United States Patent Application Publication US 2005/0153317 A1 - sequence listing, part 3

SEQ ID NO: 9204 - DNA, 600 bp, Chicken  19866894204519_2
ttaaacagcataggggatggaaggctgtgtattttatttatatacatacacacaaacacttttttttttttccttcctaaaataaaacaaatagctattawttcttgctacctcggtctttgagcttcacttactttgaacacgtcaaacctttcaccccagggactgagagcaaaactactacgggctcctgggactgagactagcctgaaaaagctaagtgtctagaaaagcccacagaatgttgaacagccagcagcactggaaggtataaatccaattcagctgaagaaaaaaagwaaaaaaaaaagggtaaacagccctagctggaatgaacccagattctacccaccagaaatgcatgagtaataccmaacaacctcaaatacatatattttttagtgagaactctcaataaacacacataaatatacagccatctcttggagagacaagtggttccatatctggagaaggcaggagagtctgtgccactgagcaggtggttcacaaagcactgaagatgcttctgtttgcatgattatggctacttcatatttctgagaggaaggacaaaaagtcttggaaacaggctcagtt

SEQ ID NO: 9205 - DNA, 600 bp, Chicken  19866894204519_3
tcctaaaataaaacaaatagctattawttcttgctacctcggtctttgagcttcacttactttgaacacgtcaaacctttcaccccagggactgagagcaaaactactacgggctcctgggactgagactagcctgaaaaagctaagtgtctagaaaagcccacagaatgttgaacagccagcagcactggaaggtataaatccaattcagctgaagaaaaaaagaaaaaaaaaaagggtaaacagccctagctggaatgaacccagattctacccaccagaaatgcatgagtaataccmaacaacctcaaatacatatattttttagtgagaactctcaataaacacacataaatatacagccatctcttggagagacaagtggttccatatctggagaaggcaggagagtctgtgccactgagcaggtggttcacaaagcactgaagatgcttctgtttgcatgattatggctacttcatatttctgagaggaaggacaaaaagtcttggaaacaggctcagttcagacacatacagctggtgtcatctgaaactgctgtgttacagggttagaaagatgagaaggctcagctggaga

SEQ ID NO: 9206 - DNA, 483 bp, Chicken  19866894204519_4
tggagagacaagtggttccatatctggagaaggcaggagagtctgtgccactgagcaggtggttcacaaagcactgaagatgcttctgtttgcatgattatggctacttcatatttctgagaggaaggacaaaaagtcttggaaacaggctcagttcagacacatacagctggtgtcatctgaaactgctgtgttacagggttagaaagatgagaaggctcagctggagaaagatcaaacaaaaccctctggagactgccaggaaacatctgcagacagcattcatccacaagaagtccrgtcagaatttgacagagaaaggaagtcccacaggagcatcccttctctgcctggggattgctcaccacctggaacgagctgcgaatcagctcctggctgaagtctaccatggaacctttcacaaaggccaggctgtccacatccacaactacacgggcaccaccttgttcaaacaccctgcag

SEQ ID NO: 9207 - DNA, 599 bp, Chicken  19866894204520_1
  misc_feature (1)..(191): n is any nucleotide
nnnnnnnnnnnnnnnnnnnnnnnnnnnnnnnnnnnnnnnnnnnnnnnnnnnnnnnnnnnnnnnnnnnnnnnnnnnnnnnnnnnnnnnnnnnnnnnnnnnnnnnnnnnnnnnnnnnnnnnnnnnnnnnnnnnnnnnnnnnnnnnnnnnnnnnnnnnnnnnnnnnnnnnnnnnnnnnnnnnnnnnnnnnnnnnatgattttcaaagagttttaaagagcaagctaaacacctaccattatcttacctacctatcacatctctgagatgtcagccctgttgaataagacatttttcaccatcrccataacagtaacccatttttcctccctttcatgtttgcctccaacacagaagcacaaacataagcagcctgttttcctacygcttttttagttgggttgcactatatgcaaagtgattcttagaaaggaatggatattcactacaaacatcagacacgacagcactatctgatatgctgctgccctcacagaacgaggaaataaagaaccaaagcatatcaatataaggcaacaaaattaatttttatttccattagtyagatctgctcatggaagggccatgcaatggcttgggttg

SEQ ID NO: 9208 - DNA, 599 bp, Chicken  19866894204520_2
  misc_feature (1)..(109): n is any nucleotide
nnnnnnnnnnnnnnnnnnnnnnnnnnnnnnnnnnnnnnnnnnnnnnnnnnnnnnnnnnnnnnnnnnnnnnnnnnnnnnnnnnnnnnnnnnnnnnnnnnnnnnnnnnnnnatgattttcaaagagttttaaagagcaagctaaacacctaccattatcttacctacctatcacatctctgagatgtcagccctgttgaataagacatttttcaccatcrccataacagtaacccatttttcctccctttcatgtttgcctccaacacagaagcacaaacataagcagcctgttttcctacygcttttttagttgggttgcactatatgcaaagtgattcttagaaaggaatggatattcactacaaacatcagacacgacagcactatctgatatgctgctgccctcacagaacgaggaaataaagaaccaaagcatatcaatataaggcaacaaaattaatttttatttccattagtyagatctgctcatggaagggccatgcaatggcttgggttggaagggacttaaagactaygtagttccagcygtgggcattttacaacagattgactcagaactgtacctctaattcacttcc

SEQ ID NO: 9209 - DNA, 600 bp, Chicken  19866894204520_3
gagatgtcagccctgttgaataagacatttttcaccatcrccataacagtaacccatttttcctccctttcatgtttgcctccaacacagaagcacaaacataagcagcctgttttcctacygcttttttagttgggttgcactatatgcaaagtgattcttagaaaggaatggatattcactacaaacatcagacacgacagcactatctgatatgctgctgccctcacagaacgaggaaataaagaaccaaagcatatcaatataaggcaacaaaattaatttttatttccattagtyagatctgctcatggaagggccatgcaatggcttgggttggaagggacttaaagactaygtagttccagcygtgggcattttacaacagattgactcagaactgtacctctaattcacttccaaaacggtttaattagacaaaattgayacaagttaattgaatcagcatttgtctaccaacgattagcatcattaccttaattttgtagctacgcaagcactgagaacattagctcttacgtggttggtattatcatgcagcaaaacccagaacagcaaaactttagcaagtatagaaca

SEQ ID NO: 9210 - DNA, 600 bp, Chicken  19866894204520_4
tttcctccctttcatgtttgcctccaacacagaagcacaaacataagcagcctgttttcctacygcttttttagttgggttgcactatatgcaaagtgattcttagaaaggaatggatattcactacaaacatcagacacgacagcactatctgatatgctgctgccctcacagaacgaggaaataaagaaccaaagcatatcaatataaggcaacaaaattaatttttatttccattagtyagatctgctcatggaagggccatgcaatggcttgggttggaagggacttaaagactaygtagttccagcygtgggcattttacaacagattgactcagaactgtacctctaattcacttccaaaacggtttaattagacaaaattgayacaagttaattgaatcagcatttgtctaccaacgattagcatcattaccttaattttgtagctacgcaagcactgagaacattagctcttacgtggttggtattatcatgcagcaaaacccagaacagcaaaactttagcaagtatagaacagaagactgcatttataaaacaaaggattacataatcaagcatgattgtttttctagca

SEQ ID NO: 9211 - DNA, 600 bp, Chicken  19866894204520_5
catgtttgcctccaacacagaagcacaaacataagcagcctgttttcctacygcttttttagttgggttgcactatatgcaaagtgattcttagaaaggaatggatattcactacaaacatcagacacgacagcactatctgatatgctgctgccctcacagaacgaggaaataaagaaccaaagcatatcaatataaggcaacaaaattaatttttatttccattagtyagatctgctcatggaagggccatgcaatggcttgggttggaagggacttaaagactaygtagttccagcygtgggcattttacaacagattgactcagaactgtacctctaattcacttccaaaacggtttaattagacaaaattgayacaagttaattgaatcagcatttgtctaccaacgattagcatcattaccttaattttgtagctacgcaagcactgagaacattagctcttacgtggttggtattatcatgcagcaaaacccagaacagcaaaactttagcaagtatagaacagaagactgcatttataaaacaaaggattacataatcaagcatgattgtttttctagcatgcaagtactat

SEQ ID NO: 9212 - DNA, 570 bp, Chicken  19866894204520_6
gcaaagtgattcttagaaaggaatggatattcactacaaacatcagacacgacagcactatctgatatgctgctgccctcacagaacgaggaaataaagaaccaaagcatatcaatataaggcaacaaaattaatttttatttccattagtyagatctgctcatggaagggccatgcaatggcttgggttggaagggacttaaagactaygtagttccagcygtgggcattttacaacagattgactcagaactgtacctctaattcacttccaaaacggtttaattagacaaaattgayacaagttaattgaatcagcatttgtctaccaacgattagcatcattaccttaattttgtagctacgcaagcactgagaacattagctcttacgtggttggtattatcatgcagcaaaacccagaacagcaaaactttagcaagtatagaacagaagactgcatttataaaacaaaggattacataatcaagcatgattgtttttctagcatgcaagtactatgtaagttacagttaggattaacaaaggatcaaagaacatcagtgccca

SEQ ID NO: 9213 - DNA, 600 bp, Chicken  19866894204521_1
tttatttcctttcttgccctttcagtcattcatgtattcaggtaaagtcagtaaagaagaactttttttcttcgtttctgctgttgtgtttggagtgtgacttttagcatcaagtgagagcggacaggtggtgttgtaatatatcttcttgcactcccaccttgtatcttggactcttatatcaaaaatattcctggtctggccaaaacgcacagtggtttaggtgcagtgttgaggaaaatgaaagtgtcatgataggtacatgacttttctattaggaaaagaattaattcaacaagrtcttctctaactatcgagaagtgtagcattcttgtactaagtagtattactaaaacaagtattgctgtaatacatggctctggagagcaatatatttyctgtcttttggctacattgtttgtactcgtaaaccgagctgcattttttgaccaaatatccattttgggccattttggtttaaaaacagcaatagagtgttcagttactgaaatatagtcacattctgtcaggatgctttctccactactcaatctaatagcacagtgtaattctttggaagattatttgtgtactcctttg

SEQ ID NO: 9214 - DNA, 600 bp, Chicken  19866894204521_2
gacttttagcatcaagtgagagcggacaggtggtgttgtaatatatcttcttgcactcccaccttgtatcttggactcttatatcaaaaatattcctggtctggccaaaacgcacagtggtttaggtgcagtgttgaggaaaatgaaagtgtcatgataggtacatgacttttctattaggaaaagaattaattcaacaagrtcttctctaactatcgagaagtgtagcattcttgtactaagtagtattactaaaacaagtattgctgtaatacatggctctggagagcaatatatttyctgtcttttggctacattgtttgtactcgtaaaccgagctgcattttttgaccaaatatccattttgggccattttggtttaaaaacagcaatagagtgttcagttactgaaatatagtcacattctgtcaggatgctttctccactactcaatctaatagcacagtgtaattctttggaagattatttgtgtactcctttgtgaagattttgaaacaaatctctatttgtttttatcaacattgtttactgtctcagtaaatctttctaatatattgtgggttcaacactaattattgc

SEQ ID NO: 9215 - DNA, 600 bp, Chicken  19866894204524_1
tgtgtgtacatatccccctgtcccaatacctcaattatttaataggattgttaccttgttcactccgtccgccatcgcttgtagtgttagctctctaggtccatccacagtctttccattatcagttggtccccagctggcactgtagatatctatgacctgaggcatatgactgatagaggaagcctcaataatgtctgtcataaatggctggtcgagcatccgaatacctgtggatttaatcacagaatcacagaatggcctgggttggaagggacctcaaggatcatgaagctccaryccccctgccgggcagggccacaaacctccccatttactagaccaggttgcccatgaccccatccaacctggcrttgaacacctccagggacggggcwtccacaacctctctgggcagcccattccagcacctcaccactctcctggtaaagaacttccccctaacatccaacctaaatcttccctctttcaacttaaaaccgttcccccttgtcctgctgttatctaccttctccaacagctctctgtcttcataaacatgaactatatgtcacctagcagaagatgaaagctcagcac

SEQ ID NO: 9216 - DNA, 600 bp, Chicken  19866894204524_2
gtgtgtacatatccccctgtcccaatacctcaattatttaataggattgttaccttgttcactccgtccgccatcgcttgtagtgttagctctctaggtccatccacagtctttccattatcagttggtccccagctggcactgtagatatctatgacctgaggcatatgactgatagaggaagcctcaataatgtctgtcataaatggctggtcgagcatccgaatacctgtggatttaatcacagaatcacagaatggcctgggttggaagggacctcaaggatcatgaagctccaryccccctgccgggcagggccacaaacctccccatttactagaccaggttgcccatgaccccatccaacctggcrttgaacacctccagggacggggcwtccacaacctctctgggcagcccattccagcacctcaccactctcctggtaaagaacttccccctaacatccaacctaaatcttccctctttcaacttaaaaccgttcccccttgtcctgctgttatctaccttctccaacagctctctgtcttcataaacatgaactatatgtcacctagcagaagatgaaagctcagcacc

SEQ ID NO: 9217 - DNA, 600 bp, Chicken  19866894204524_3
tcgcttgtagtgttagctctctaggtccatccacagtctttccattatcagttggtccccagctggcactgtagatatctatgacctgaggcatatgactgatagaggaagcctcaataatgtctgtcataaatggctggtcgagcatccgaatacctgtggatttaatcacagaatcacagaatggcctgggttggaagggacctcaaggatcatgaagctccaryccccctgccgggcagggccacaaacctccccatttactagaccaggttgcccatgaccccatccaacctggcrttgaacacctccagggacggggcwtccacaacctctctgggcagcccattccagcacctcaccactctcctggtaaagaacttccccctaacatccaacctaaatcttccctctttcaacttaaaaccgttcccccttgtcctgctgttatctaccttctccaacagctctctgtcttcataaacatgaactatatgtcacctagcagaagatgaaagctcagcacctgggtaactcccccagactcatcggcattttcagtcactcagcagttctgcatccaccatacactttgcatca

SEQ ID NO: 9218 - DNA, 600 bp, Chicken  19866894204524_4
gtccatccacagtctttccattatcagttggtccccagctggcactgtagatatctatgacctgaggcatatgactgatagaggaagcctcaataatgtctgtcataaatggctggtcgagcatccgaatacctgtggatttaatcacagaatcacagaatggcctgggttggaagggacctcaaggatcatgaagctccaryccccctgccgggcagggccacaaacctccccatttactagaccaggttgcccatgaccccatccaacctggcrttgaacacctccagggacggggcwtccacaacctctctgggcagcccattccagcacctcaccactctcctggtaaagaacttccccctaacatccaacctaaatcttccctctttcaacttaaaaccgttcccccttgtcctgctgttatctaccttctccaacagctctctgtcttcataaacatgaactatatgtcacctagcagaagatgaaagctcagcacctgggtaactcccccagactcatcggcattttcagtcactcagcagttctgcatccaccatacactttgcatcagggtatgcttacccagcaggatgc

SEQ ID NO: 9219 - DNA, 600 bp, Chicken  19866894204524_5
atgtcacctagcagaagatgaaagctcagcacctgggtaactcccccagactcatcggcattttcagtcactcagcagttctgcatccaccatacactttgcatcagggtatgcttacccagcaggatgcaagcacttaaacacccagccacagcaatgcagtgtggcccagaaagaaaataacactttgctgctttctaagtacatagattcacctgctatttgaaaacacttcaaaaacatttgtgctaagcgctctcagcattttagagtaatgaaatattaaaagtatgtagatcrtatttttaatataggaactgaattagggtttcagtgatatgatccaaggatatgtcaactttttaaaacctcagagcactggccctgagcaaggcagagtgtaggacagaagcagtgcaagcccttgcatctatcaaccccgctatgcaggacagtggtgctgacagccaacctttgggcctttggatgagaccggagcagctagggacacattccagatctcattatggccttgaattgaattttggtgtttatcccaacagcttcagaacagacatgtggcagaaatcagcaccacag

SEQ ID NO: 9220 - DNA, 600 bp, Chicken  19866894204541_1
gctaaaaggaaaaaatgtggagagcctgcatattgaacactactgtcccatatccctccactaaaaaatgtacatagtcctaggaaagtttcagaaaagaacaacaagaaacaagtttacggcatagcttcctagccactgagaatcaacacgacaggcgagatggcttttcagcccatatatgacacctgtaagaaaaggtgtcagcagttctctgtcactccaacagaacctaagacggatcaaatcagctggaaaaatcacaccagaagatttctgcataacctagcgctatgcttyagagctccctgccactggcttcttcaactctgcaagtgccaaagcaaaaatttcatgggagagaaatctccttttgggttttaaaaccaaagccatcagctcaagaaaatgatgagcccccagctggtttgtgctggaaggcaattttggagggttcattctcggtccgttcatcactttattttgatcttcctcggacaactattcctggacactactggaggcaaaacaagggctgaatagatctcgtagcagttcctaaggtggctcccttgcttttataaattgcagtttcatagc

SEQ ID NO: 9221 - DNA, 600 bp, Chicken  19866894204547_1
ttgtccttccttcacatgtcttttgtcacttaaagtggctgattgatgtcaggattgctttaggctagatatcattaaacaggtgattaaataaaaagaaaagatcaggtttggttaatcatagataaacttcctctgcctgaaaggaaacagcctagttttaccttctcttttccaaaccactcacttctgtcacttggccttgttccactctgtactttctcaaaactttctggtaacaatttctgatcatagataacatatctgttctttttcctgacagtgaatgaatttttgggrraaaaaaaaaaaaaaaaaagagagagagagagagatttggaccaccaaaagaaaccacaaagatttggaccacacagccacaggtaaggaaggcagcagaaagggggaaacaagatgatggaatataatagcctccagagagaaaccatatgcctactgatatacagcttgagtcaacaaaatgcaggggaaattttatcccctactgaatcccagtgttaaattgtcggaaaggtatagacactcagcttaatttttatctccaaataagtgaaataatgcttattttaaataatgaca

SEQ ID NO: 9222 - DNA, 600 bp, Chicken  19866894204547_2
tgtccttccttcacatgtcttttgtcacttaaagtggctgattgatgtcaggattgctttaggctagatatcattaaacaggtgattaaataaaaagaaaagatcaggtttggttaatcatagataaacttcctctgcctgaaaggaaacagcctagttttaccttctcttttccaaaccactcacttctgtcacttggccttgttccactctgtactttctcaaaactttctggtaacaatttctgatcatagataacatatctgttctttttcctgacagtgaatgaatttttgggrraaaaaaaaaaaaaaaaaagagagagagagagagatttggaccaccaaaagaaaccacaaagatttggaccacacagccacaggtaaggaaggcagcagaaagggggaaacaagatgatggaatataatagcctccagagagaaaccatatgcctactgatatacagcttgagtcaacaaaatgcaggggaaattttatcccctactgaatcccagtgttaaattgtcggaaaggtatagacactcagcttaatttttatctccaaataagtgaaataatgcttattttaaataatgacaa

SEQ ID NO: 9223 - DNA, 600 bp, Chicken  19866894204556_1
taagttgcttgggcatattctccactgaggaatttccaagtgttttctctaagaataaagaatacatacttccttacaagagctttataaatactttgccatttttttaggtgcacgtgttcacctacctccttaaattcccttggagacattatttaggaagcagcaggacaacatgcagtcacgctttcatattcctgtaagtcgaacatccatagtctgcttccagagtacttggttccaacgtggcaggcttggttcacagcccaatttgaccctggcaaaagaatttgacgtcamtgggaaagctgcctccccatagcatggttgaatggctcccccgattcaaagccagattcatatctgtgtttgattacttgcatttattttcctgacaggtagccttttgctgtaattacagtagtaaaattttctacatccttgataaccattttgaatgttctgagcacagaagtaagagcatgcacgtactgaaagagagctgtacagagccaaggagagctttaatgtcattctctctcttcagtcttcattgtgactgacatccattcagccacaaatgagaaacaacacctgtaa

SEQ ID NO: 9224 - DNA, 600 bp, Chicken  19866894204562_1
ggctaaatcagttctatagttttgagtcttagagcatgtcaattattagttttcctaagtagcaatggagttgggcagaattatactgtagctggagtgtcctgttagacacacaacatcattaggagctgtctccaagtaaagcacccatgatacagagttctagaactttcatattcaagcaagtaggaacaaaaagcatgtactcttggctgatgaatctccagtcattctttctgcctcatatccagcaagcaacatggggcaatgctgtcaaacctgatgtttcaggaacatccygctgtgttaaaaatggtttttccatttccctagtggaggttattagatcatagtaagatatgatcctttcctctctgcttacaaaagagagaaatgtgctatttgatgtttccaaattgcaggcagggtttttgcaactctagtttgaagtcaaattttggttagtatttcatattcatatatatatgttactgtataaacataccattctctatatgtaggacatacgaagtaacattattcttacaatgcctataaatgtgaagaggaataaaacttgaattctctgtgtgctttaaa

SEQ ID NO: 9225 - DNA, 600 bp, Chicken  19866894204566_1
catatatcaacaaaggcttactaaagcagcttgaagtgtgcaaggattcggtaggtcctgtgctgttaggagaattcatacttctctagcctaattcctatgtcaaaagtaggcgcagtatctgccatagcagaggatttggtctactcatgttccacgtctgtgaaaagaaaaatcatctctgttattgatctgaatgagagtttcagtcttaggacaagagaagaagctgtgccaatacctggtgtgtgaacaagcaggcacagtgctgctgctgcttgtcattgaaatttaagaggrggaaaaaaaaagcttttgtgaaacacacaaaagacattttcatttaatcagaatgatggttactgttttgtttttagatcaacacttaaagtatttactcaatattacatcaactttcataatgtttttaaactggttttatgcatggccaaatagaatgtagatatctgcaaaacaatctgccaacatggcctctgaggtgtgctttaataaaaatgtgaaaattcatttttaaaagtgtaaatgcaagctttctagtcaataagaaatttacctgaggaaaaccagtacatttgaatt

SEQ ID NO: 9226 - DNA, 600 bp, Chicken  19866894204580_1
ttcttccatttcaaagtactcattcttcagaaaagtgtttatagcaggaaaatataagtaaatccttgagggcatattgagaagagattctgtgactgtcaggtctttgtattgtcaatttcttttttgaccatcatgtaatacttagaaaacatagtgcaccacaaacacccactccactgtaacctataaaaagcaggttattccacatttttcttcaaagaaattaacttccagatgtgaggaattcttaagtacagatagcatgaaatatatacttgcaacagaagcacttaaackggtctctgaggaaaatgacagaatgttttgatagatggagaggtaaagcaaaagagcaggttgtcctgtgaatcagccaacctctgattccaaaattttcaccttgagaagaattttaatattcttcacgataataaattaaagcacattaacagctatggggaagctgggacatagttatgaatgctatcaaaaaaagttacaatgtcccttactgttgtcagattttctttccagaaacatatacttggaaaagttgtgtatgttttctgctgtcactattatttctctaaccatctc

SEQ ID NO: 9227 - DNA, 563 bp, Chicken  19866894204589_1
agctttcttcttggctccattttgatctccaacttcactgttccaagaagagttcactctaggatctgcttacaaaaggaggcactaagagcacttcatcagatccagttctgtcagaattctgacaccagcccaagcagactttgtaccctcaatcagcaccatgtgcccccacaatacccaccccatacccatccatcatatgtggtcaattccacaatatgaaaagccatgcacagatggggctgcatcagacataggctgcatattatttcagaataactgaacttctggagaacwcaaaaaataatcatttcttaggacttatttttatgacaacagggagtcacaaaggacccagagaaacatcctgtagtgcataatgtggttggatcacataggatggaaggggcagggagtgtgggtgcacatcaatcagtgctactcgattgatttgaggaccataggttcctttgccacattttacttagctcaatgaccaatctctaagcgtggtgtccaagcaatcagcaactataatttgctcctcagaaaatcatttt

SEQ ID NO: 9228 - DNA, 599 bp, Chicken  19866894204590_1
  misc_feature (1)..(186): n is any nucleotide
nnnnnnnnnnnnnnnnnnnnnnnnnnnnnnnnnnnnnnnnnnnnnnnnnnnnnnnnnnnnnnnnnnnnnnnnnnnnnnnnnnnnnnnnnnnnnnnnnnnnnnnnnnnnnnnnnnnnnnnnnnnnnnnnnnnnnnnnnnnnnnnnnnnnnnnnnnnnnnnnnnnnnnnnnnnnnnnnnnnnnnnnnntcagctgcagcttaagttagtcggggaactaagctcagaaacaggatgtaattcaaagtaagttgtacaaagatttagcagattcaaagcatttgacaaatacccaagttggtrccgaggatgagggcaggggaaatcccagagtattcagatgtatttttctgtgattgtccaaaaattcttattttcaaacaatagcagtatcatcaacatgtctacaataaatggaaaataggtcctttacagcacaccacacagagggaggcaaagctgcatttaaagatcttccctctcatttcacagaataaagtacgactttggattttagtttagctttgcaattcataatttaccagagttgtagaagggatatatttccatcaaaacttcatgtgcttcacgtagaggacctg

SEQ ID NO: 9229 - DNA, 599 bp, Chicken  19866894204597_1
  misc_feature (1)..(77): n is any nucleotide
nnnnnnnnnnnnnnnnnnnnnnnnnnnnnnnnnnnnnnnnnnnnnnnnnnnnnnnnnnnnnnnnnnnnnnnnnnnnngaatgattcctctcactgaaaaaagaagaagaaaggctttaaatttcgactctaagataagaggctctttgggaagacgtctgttacttcctgttggactgtggtgctgccgtggtttggtcctctacacctaaaggaaatgaaagtgtttaacaacaaccccacaactccagacaagtctagaataaaagacaacctccacccacaagcacttcaagtttaraaaaggtttccagctgcaatgaaaaatgtggcaactgtgmgcttaaagagtttggatgagtagaaaggaaatcagtgccaygcagtgtgaaacgccgggtagctgaggtcaggttatggctgtgtgccaaactgcactgcaataactgcactaactaargaaaataaattccccaaacaaaaatcacagcgttcaaaagaygggcatagagcacagcatggaataagaagaaagagaaatttgtttaatgggaatgttctcagttctaagaagtttggaattaaatttctctaaacttg

SEQ ID NO: 9230 - DNA, 599 bp, Chicken  19866894204597_2
  misc_feature (1)..(37): n is any nucleotide
nnnnnnnnnnnnnnnnnnnnnnnnnnnnnnnnnnnnngaatgattcctctcactgaaaaaagaagaagaaaggctttaaatttcgactctaagataagaggctctttgggaagacgtctgttacttcctgttggactgtggtgctgccgtggtttggtcctctacacctaaaggaaatgaaagtgtttaacaacaaccccacaactccagacaagtctagaataaaagacaacctccacccacaagcacttcaagtttaraaaaggtttccagctgcaatgaaaaatgtggcaactgtgmgcttaaagagtttggatgagtagaaaggaaatcagtgccaygcagtgtgaaacgccgggtagctgaggtcaggttatggctgtgtgccaaactgcactgcaataactgcactaactaargaaaataaattccccaaacaaaaatcacagcgttcaaaagaygggcatagagcacagcatggaataagaagaaagagaaatttgtttaatgggaatgttctcagttctaagaagtttggaattaaatttctctaaacttgccaaagaaatatttatctccaggatcttaattcagccatg

SEQ ID NO: 9231 - DNA, 600 bp, Chicken  19866894204597_3
gattcctctcactgaaaaaagaagaagaaaggctttaaatttcgactctaagataagaggctctttgggaagacgtctgttacttcctgttggactgtggtgctgccgtggtttggtcctctacacctaaaggaaatgaaagtgtttaacaacaaccccacaactccagacaagtctagaataaaagacaacctccacccacaagcacttcaagtttaraaaaggtttccagctgcaatgaaaaatgtggcaactgtgmgcttaaagagtttggatgagtagaaaggaaatcagtgccaygcagtgtgaaacgccgggtagctgaggtcaggttatggctgtgtgccaaactgcactgcaataactgcactaactaargaaaataaattccccaaacaaaaatcacagcgttcaaaagaygggcatagagcacagcatggaataagaagaaagagaaatttgtttaatgggaatgttctcagttctaagaagtttggaattaaatttctctaaacttgccaaagaaatatttatctccaggatcttaattcagccatgtctcagtctacgtagcgagagacaggaaagaatcaaaggaag

SEQ ID NO: 9232 - DNA, 600 bp, Chicken  19866894204597_4
gttacttcctgttggactgtggtgctgccgtggtttggtcctctacacctaaaggaaatgaaagtgtttaacaacaaccccacaactccagacaagtctagaataaaagacaacctccacccacaagcacttcaagtttaraaaaggtttccagctgcaatgaaaaatgtggcaactgtgmgcttaaagagtttggatgagtagaaaggaaatcagtgccaygcagtgtgaaacgccgggtagctgaggtcaggttatggctgtgtgccaaactgcactgcaataactgcactaactaargaaaataaattccccaaacaaaaatcacagcgttcaaaagaygggcatagagcacagcatggaataagaagaaagagaaatttgtttaatgggaatgttctcagttctaagaagtttggaattaaatttctctaaacttgccaaagaaatatttatctccaggatcttaattcagccatgtctcagtctacgtagcgagagacaggaaagaatcaaaggaagaattaattggcagtgcagcagttcccagtcttgatttggtttgtctcctttaacagcatcttgcacatacatgttcta

SEQ ID NO: 9233 - DNA, 600 bp, Chicken  19866894204597_5
ctacacctaaaggaaatgaaagtgtttaacaacaaccccacaactccagacaagtctagaataaaagacaacctccacccacaagcacttcaagtttaraaaaggtttccagctgcaatgaaaaatgtggcaactgtgmgcttaaagagtttggatgagtagaaaggaaatcagtgccaygcagtgtgaaacgccgggtagctgaggtcaggttatggctgtgtgccaaactgcactgcaataactgcactaactaargaaaataaattccccaaacaaaaatcacagcgttcaaaagaygggcatagagcacagcatggaataagaagaaagagaaatttgtttaatgggaatgttctcagttctaagaagtttggaattaaatttctctaaacttgccaaagaaatatttatctccaggatcttaattcagccatgtctcagtctacgtagcgagagacaggaaagaatcaaaggaagaattaattggcagtgcagcagttcccagtcttgatttggtttgtctcctttaacagcatcttgcacatacatgttctaatacctgacatggaaggcatctgaattttgctttcaatctcc

SEQ ID NO: 9234 - DNA, 600 bp, Chicken  19866894204598_1
actattttaaatgtgttatttgttgaaaatgagtgctgacagctaaagtagtgatgtttgcatttaggtgccctctggccacattgtaattttcttgataataatcaggaagtgtcagtatcagcattagactttcactatgcttgtgtggatttttcttgtatcttagaatatatagcttctggatgttatgggttgtaccgggcttttctgagcatggaatatgacagccgtaagagtcttatgcctgtttgacaatgcctcttgaaacaaaaggaaaatatatgcattttaataacrtggtttttgttattgttgttgtttgttttccccctgcagacagctataccaaagacttctgaaaaactggctttggatctattgtttattgatgactcacaactctcacctccctctacagggacatcctccaagtcattttggactaattttcagcatttttttcaatagttatagtcttttctgtaactttatacagaacttgagaactggcagggaccagctctggtaatccttatgtattactgaatatcaccactgaggaacattgtcatctacagtagatgagataatcctagc

SEQ ID NO: 9235 - DNA, 600 bp, Chicken  19866894204601_1
aatttctttggtgaaccgaggaagcacgtccctaaccaactgtgtgactgctcaatacaacactgcatcaattttatcatcaaattatcattgtgaaacaatgaccagcagcaattaggacagataagaattctaatccaatacctcataaaaccatcacatacctccagagccattgctcagcacgacaaatgtgcactaagatggatatgacaaatacgaacttaaaaactgaaggactcagataaaaactatgaaaaggaattgtttttattagcaatgagaggaaaacatgccccraagcaacttagaagctcttgttctcaaactcagtcctctctttcaagaaggatttagataatctgtgaatactgaagagaaagaaatcaactcatcccatctgtgctacatttataaggtagaacgagtgctaaacatatttttctccacatgggaaagcaaacaaacagaaattctacaggtagaaattcagaaatactatttcccccccccccctttttttttttacagtaatgtgctacctcagctaaaaggcagcacattgctgtaaaaaagtaaagcccacagcatcctcagagc

SEQ ID NO: 9236 - DNA, 551 bp, Chicken  19866894204604_1
ggaggagacagggctgtgcagcactcagcctcagctccatccctggaaggagtgtgccgtgtgtcctcctgtgctccctgtccccaaacaaagcaggcacggggaggcaatcaaggacaaccagcatggattgtactaacagcaaattgtgcttgaccaagcacaaagttaaggctttaagtgctttaaggcagtagtccattaaatattttgcctgttatctccctgacatccctctgttaacatctcgttaggtctttcagcagttgctaacaaccctggcgatgagcatttgggaascagtgcttgcatgttcttggcacagcactggaccccagtgctggaggtactgtgtgggccggaggcacgagcactgctcataccctgccctgcctgccctccccggggcgccagggctggtctgtattccacagcatccttaggaaagctcagagaactttacatcagagcaaggatgttctcagatgtagggtatggatttagagtggtcttgtgtgcagccaggggttggactcgatggtctttgtggt

SEQ ID NO: 9237 - DNA, 599 bp, Chicken  19866894204605_1
  misc_feature (1)..(230): n is any nucleotide
nnnnnnnnnnnnnnnnnnnnnnnnnnnnnnnnnnnnnnnnnnnnnnnnnnnnnnnnnnnnnnnnnnnnnnnnnnnnnnnnnnnnnnnnnnnnnnnnnnnnnnnnnnnnnnnnnnnnnnnnnnnnnnnnnnnnnnnnnnnnnnnnnnnnnnnnnnnnnnnnnnnnnnnnnnnnnnnnnnnnnnnnnnnnnnnnnnnnnnnnnnnnnnnnnnnnnnnnnnnnnnnnnnnnnnctttacttatattaagttaaggatacttcaacaacaccttgaaataagaagaaacaacagaatgtttttygttgatgaaggtccttgatcatttacatggagaagtgcagaatctgagttctttcaaagctcttcaaattatttccaacaaaggtttagggaaggtacatctactatgatagcatgatacttttgatcacaattmcatcttattttccactgataatagacagactggtacaagtggttgaaaaataggaatccaaggagtcggagtttttttgaggcagtyagctctttactacagtagctcttgaagagtgagactcattgaagtgttatggcatcatggttagcaaacccatggac

SEQ ID NO: 9238 - DNA, 599 bp, Chicken  19866894204605_2
  misc_feature (1)..(95): n is any nucleotide
nnnnnnnnnnnnnnnnnnnnnnnnnnnnnnnnnnnnnnnnnnnnnnnnnnnnnnnnnnnnnnnnnnnnnnnnnnnnnnnnnnnnnnnnnnnnnnnctttacttatattaagttaaggatacttcaacaacaccttgaaataagaagaaacaacagaatgtttttygttgatgaaggtccttgatcatttacatggagaagtgcagaatctgagttctttcaaagctcttcaaattatttccaacaaaggtttagggaaggtacatctactatgatagcatgatacttttgatcacaattmcatcttattttccactgataatagacagactggtacaagtggttgaaaaataggaatccaaggagtcggagtttttttgaggcagtyagctctttactacagtagctcttgaagagtgagactcattgaagtgttatggcatcatggttagcaaacccatggacwggrcctttgagaatatagtcattttacatggatcttggccaaagtgaaattgacaagatttctgttggagaagaaattaatacattagattctacaaggcagctaagcaagtagcctaggagatggaattaatg

SEQ ID NO: 9239 - DNA, 599 bp, Chicken  19866894204605_3
  misc_feature (1)..(8): n is any nucleotide
nnnnnnnnctttacttatattaagttaaggatacttcaacaacaccttgaaataagaagaaacaacagaatgtttttygttgatgaaggtccttgatcatttacatggagaagtgcagaatctgagttctttcaaagctcttcaaattatttccaacaaaggtttagggaaggtacatctactatgatagcatgatacttttgatcacaattmcatcttattttccactgataatagacagactggtacaagtggttgaaaaataggaatccaaggagtcggagtttttttgaggcagtyagctctttactacagtagctcttgaagagtgagactcattgaagtgttatggcatcatggttagcaaacccatggacwggrcctttgagaatatagtcattttacatggatcttggccaaagtgaaattgacaagatttctgttggagaagaaattaatacattagattctacaaggcagctaagcaagtagcctaggagatggaattaatgtagtgtgataaatttattagcaataagatggttggttgggaaacctcttggaatatgagaaccacagaaagactcctcaggtaagtg

SEQ ID NO: 9240 - DNA, 600 bp, Chicken  19866894204605_4
gttgatgaaggtccttgatcatttacatggagaagtgcagaatctgagttctttcaaagctcttcaaattatttccaacaaaggtttagggaaggtacatctactatgatagcatgatacttttgatcacaattmcatcttattttccactgataatagacagactggtacaagtggttgaaaaataggaatccaaggagtcggagtttttttgaggcagtyagctctttactacagtagctcttgaagagtgagactcattgaagtgttatggcatcatggttagcaaacccatggacwggrcctttgagaatatagtcattttacatggatcttggccaaagtgaaattgacaagatttctgttggagaagaaattaatacattagattctacaaggcagctaagcaagtagcctaggagatggaattaatgtagtgtgataaatttattagcaataagatggttggttgggaaacctcttggaatatgagaaccacagaaagactcctcaggtaagtggtagaataatccaatttcaaggaggaccttgccaacaagcatacaaaagttaaacacataaacaagcaacaaaatatca

SEQ ID NO: 9241 - DNA, 600 bp, Chicken  19866894204605_5
gatgaaggtccttgatcatttacatggagaagtgcagaatctgagttctttcaaagctcttcaaattatttccaacaaaggtttagggaaggtacatctactatgatagcatgatacttttgatcacaattmcatcttattttccactgataatagacagactggtacaagtggttgaaaaataggaatccaaggagtcggagtttttttgaggcagtyagctctttactacagtagctcttgaagagtgagactcattgaagtgttatggcatcatggttagcaaacccatggacwggrcctttgagaatatagtcattttacatggatcttggccaaagtgaaattgacaagatttctgttggagaagaaattaatacattagattctacaaggcagctaagcaagtagcctaggagatggaattaatgtagtgtgataaatttattagcaataagatggttggttgggaaacctcttggaatatgagaaccacagaaagactcctcaggtaagtggtagaataatccaatttcaaggaggaccttgccaacaagcatacaaaagttaaacacataaacaagcaacaaaatatcagga

SEQ ID NO: 9242 - DNA, 599 bp, Chicken  19866894204641_1
  misc_feature (1)..(246): n is any nucleotide
nnnnnnnnnnnnnnnnnnnnnnnnnnnnnnnnnnnnnnnnnnnnnnnnnnnnnnnnnnnnnnnnnnnnnnnnnnnnnnnnnnnnnnnnnnnnnnnnnnnnnnnnnnnnnnnnnnnnnnnnnnnnnnnnnnnnnnnnnnnnnnnnnnnnnnnnnnnnnnnnnnnnnnnnnnnnnnnnnnnnnnnnnnnnnnnnnnnnnnnnnnnnnnnnnnnnnnnnnnnnnnnnnnnnnnnnnnnnnnnnnnnnnncagcaggcagctggttcatgccctgatgtcaaacaggggagggagaagagccargagggagagagccatgaggatccggcccctgccagcagagcagcaacacactctgcagacacaggtggcttcagctggagcagctggggctgtcacggggctgctagccagagctagccctctgcctgccctctgccacctgcgagtggagcagagcatgaggctggcagagctgagagcgagagttttgccagccagatccaaatctgcaagtgtggaggaggaggaggcatcctctcgattgctcaacagcgagctggcagcaaggtgctttgtgaaaaagcctgtcccgaggtaag

SEQ ID NO: 9243 - DNA, 600 bp, Chicken  19866894204641_2
aggtggcttcagctggagcagctggggctgtcacggggctgctagccagagctagccctctgcctgccctctgccacctgcgagtggagcagagcatgaggctggcagagctgagagcgagagttttgccagccagatccaaatctgcaagtgtggaggaggaggaggcatcctctcgattgctcaacagcgagctggcagcaaggtgctttgtgaaaaagcctgtcccgaggtaagctttgctcaggctctgacagcgtgctgattttacagctcaggatccccactgctgccaaagtygcctgctttgccctcgaagcgcctggaatttgctccatagcactgcctacgtaccacccctgtgtgagggcaaagcaggttctcagccctgtgtccagctcttgggtttgggccagtcaggcaaagggatgacgagttcaaggggatgcggtggtgccagcagcgtggcgctcaggggaaggccgtgcagcagccagggctcccacaggtgcttctcccctggctctcacatgtcgtcagcatcgagcagaaagacgagcatcgtcccagagaagtgtaggcgggcgctcagctccgttt

SEQ ID NO: 9244 - DNA, 600 bp, Chicken  19866894204647_1
tacagagaaagtcattcagtatgagaagtttccaagctttcagtgtcagaggaaacatccaagtattgctggtgttggcaacttttgaaggtcaagtgatggtagcttgtgacagtttggggaccttttctttttttccaccgttttgaagctcgctcagctctttcagctgtgctgatggttcagctgcctctttaggcaagagcaggaaccctccagctcctcatcacctcccagggatggcaggaagagctcctggtcttcgccctgcacaaggtgagctccaggcaggcaggtgcyggtgctggcagccaagctgctgggagcggcctcaggttggatttcccagtctggaaaatctaagaaaggaaaagagttaaaagaaaaatagtgaccacgtgccaaatggcagccaggattctaggccaccagccagcagctcgagcacagcagcatctgacaggcagcaatgggttctttaggggcgagcccactgccgtgcaaagtgcagcgaggatgtccaaaagggaagagccttccaggtttccttccagctaaagcacgctcacagggcagaagggatggcccagacaacgtgac

SEQ ID NO: 9245 - DNA, 599 bp, Chicken  19866894204666_1
  misc_feature (1)..(110): n is any nucleotide
nnnnnnnnnnnnnnnnnnnnnnnnnnnnnnnnnnnnnnnnnnnnnnnnnnnnnnnnnnnnnnnnnnnnnnnnnnnnnnnnnnnnnnnnnnnnnnnnnnnnnnnnnnnnnncagaagcagaaagaaaaaaaaaatgatattctagagaaaaaagtgacaaaatttgatgggaatgaggatgaaaaaactatgctagttagccttttatgctttctgttacattacaaaatgatattttactcttctgagagtcaactgtagttcacagtttctcttctgtgttggtgacatttttctctcrtaagcactttttagaatactgacataatttttgatccttaaaataataatgctgggagagtttacagctcaactgtatctattcacatctgaccccttgtccttgcctcctagcttctgcatagttctgtgtacccatctgctgattttcacagtatctgcttctccaaaataacttcatgcattcattgtttttagtagttttatttgctgcctgtttggtacagaacatccacctccagttaaaaagcacactgccctatctccaggacactctcttgagtacctggctgtggtttt

SEQ ID NO: 9246 - DNA, 543 bp, Chicken  19866894204669_1
cactaccttctatccctatggtatcctgtactgttctgtgttattgtaattttgtgttctcataatactgagtgtgtttattttgctggaggcgatggagtactacagtgatgagcaacagagatgcatgccaatacaatgtttaaattgaagtctaggtttccattttgtttttagaattttaggactttcaagaaaacagaacatataggaattgcaggcctgcaaaatgtagtagaaatgattattatggtgatgaggagggaaaaaaaatcaaagaaaaggcagaagtaggggacscaagtgaaggagtagcatgttcctttcagttcagaggttggcaaggagctgtgcataagcagttgattcagttcctgtaaagcataccagcatggaaattagagagaaaatgcttattaagttacgcaggccatttcccagagctatcaggggagggaataaatgtcaccctcatgtcccctctggctattcttagaataaaccctgctgggagccacacccaggtactttggccagaggaag

SEQ ID NO: 9247 - DNA, 600 bp, Chicken  19866894204672_1
tgagacacctggggatgaaaatcccttctcgtctgcctacgccccatgccaagaagctttatcagatgtctatctatagctgcaggggttgtgagattaaacctagccctctgcaaaaaatcccacccacggtattttccccttggagacttgtctgtctgcaagcgtggaacaggagctgcttggagaggaaccccgcagccccaggcaccactgacactggcaccagtgccatgcacaggcatgagggagagcagtggggaccctgctgcatgccgtgcctcatctcctatgtgctgycagaggatttcctggaggagcagaaggaatcgatggggaggagatgagtaatgggagattccgcagtgaggagaaaatatccttaacatacacaggagaaaaggatggaggagagcaggagaagctttcgtcacttgggtacctccaaggcagacagtcaagctaaagagatgtcacattcactctctctttgcccttttcagtgaaaatattctggctcagttctgacgtttatctcatcagagtgcagagaataaggagcacaaccacatcaacctgtcttccatactcagaaaaagc

SEQ ID NO: 9248 - DNA, 600 bp, Chicken  19866894204675_1
tttgattaatgagaattctgactatctggtgaatgggatttccctgaacttgcgtcagctggcacaccagccgcatgctgcccaggtcctgggcacgatgctgaggcactcggatgccagcttgctgccactggtagaagacgttatccaagatgtcctgtctgcactagatcagtcttacaatgaccaggcttccaccttccttggtgttctccactccttaatggcagctctaggtatctaagtgatgtttactttgcacaattcagtgttgctgtgactaagggtccctggctttgrcattwggacttgccatgggaagtttcaagtagctgaggtactgcaacgtttacttatgggcagtaataaccagttgctttgcttataggcgataatgataaccactttgtctgcctggcctgcagagttatggggctgcagttcaaaaagggtagttttactcctcccataaatgttctgtagaagcacgtggggtgtattgctgtgtccatcagggttttaacagtcatgggaggtcccggtgatgcgacagcttctccctggttaygtacttcaatcccatgcttaaatgttatattc

SEQ ID NO: 9249 - DNA, 600 bp, Chicken  19866894204675_2
ttaatgagaattctgactatctggtgaatgggatttccctgaacttgcgtcagctggcacaccagccgcatgctgcccaggtcctgggcacgatgctgaggcactcggatgccagcttgctgccactggtagaagacgttatccaagatgtcctgtctgcactagatcagtcttacaatgaccaggcttccaccttccttggtgttctccactccttaatggcagctctaggtatctaagtgatgtttactttgcacaattcagtgttgctgtgactaagggtccctggctttgrcattwggacttgccatgggaagtttcaagtagctgaggtactgcaacgtttacttatgggcagtaataaccagttgctttgcttataggcgataatgataaccactttgtctgcctggcctgcagagttatggggctgcagttcaaaaagggtagttttactcctcccataaatgttctgtagaagcacgtggggtgtattgctgtgtccatcagggttttaacagtcatgggaggtcccggtgatgcgacagcttctccctggttaygtacttcaatcccatgcttaaatgttatattcgtctc

SEQ ID NO: 9250 - DNA, 600 bp, Chicken  19866894204675_3
gtgttgctgtgactaagggtccctggctttgrcattwggacttgccatgggaagtttcaagtagctgaggtactgcaacgtttacttatgggcagtaataaccagttgctttgcttataggcgataatgataaccactttgtctgcctggcctgcagagttatggggctgcagttcaaaaagggtagttttactcctcccataaatgttctgtagaagcacgtggggtgtattgctgtgtccatcagggttttaacagtcatgggaggtcccggtgatgcgacagcttctccctggttaygtacttcaatcccatgcttaaatgttatattcgtctcaaggaaactgtgatagcttgttgtcttgcaggaaggaattatgartgcttagtgatgtatcagttcctcttttgcagtccagtggtttgggctgtcctgcagcaaggagcaccagcagaggcaggctgccgaggggcagagcaggactttgtcccacatacagcaggagataacaagtcaagaagtggagcggttcttcctcgactacatcaagcagaagcagattgcagagggcaacttttctgactcaggtgacgaggagg

SEQ ID NO: 9251 - DNA, 600 bp, Chicken  19866894204675_4
tacttatgggcagtaataaccagttgctttgcttataggcgataatgataaccactttgtctgcctggcctgcagagttatggggctgcagttcaaaaagggtagttttactcctcccataaatgttctgtagaagcacgtggggtgtattgctgtgtccatcagggttttaacagtcatgggaggtcccggtgatgcgacagcttctccctggttaygtacttcaatcccatgcttaaatgttatattcgtctcaaggaaactgtgatagcttgttgtcttgcaggaaggaattatgartgcttagtgatgtatcagttcctcttttgcagtccagtggtttgggctgtcctgcagcaaggagcaccagcagaggcaggctgccgaggggcagagcaggactttgtcccacatacagcaggagataacaagtcaagaagtggagcggttcttcctcgactacatcaagcagaagcagattgcagagggcaacttttctgactcaggtgacgaggaggcaggtcagtactggagctgaatatcttcagcttagacaaaracagtgatttctgaggcttccttttgtcagctgaggggctc

SEQ ID NO: 9252 - DNA, 600 bp, Chicken  19866894204675_5
aaactgtgatagcttgttgtcttgcaggaaggaattatgartgcttagtgatgtatcagttcctcttttgcagtccagtggtttgggctgtcctgcagcaaggagcaccagcagaggcaggctgccgaggggcagagcaggactttgtcccacatacagcaggagataacaagtcaagaagtggagcggttcttcctcgactacatcaagcagaagcagattgcagagggcaacttttctgactcaggtgacgaggaggcaggtcagtactggagctgaatatcttcagcttagacaaaracagtgatttctgaggcttccttttgtcagctgaggggctctggatggggttgaaagactgatgtgctcatgacaatctcaggtttgctctgagctgactgtagctcatgtgaggtgctgcttggtgttcttgctttgttgggtccaggacccaaacttgcctcttttcagaatcctatttcagcttcctcaccctcctttgggaatccctataccattttctcttgtcttataatgctgctgcttctttcccacttggccttggaaggccctgcagacattcacatagggaacttcata

SEQ ID NO: 9253 - DNA, 600 bp, Chicken  19866894204677_1
gagggcatggtgggaatgggtcaacacttggactatatgatcttagtgatcttttctaaccttaatgattctatgatcactgcttcctgaactttgggttcctccaggagtctgcgaacacaagaaacccaaaggacacaggcgatgtacttgagaaagatatctggatacacacagtcaatgagggctgaagtttgctctcatgaggaaagtagtgacctccccattgtggtttcagcaccagatgaaccagttcctctttaacctgcctcttacctctggtaccacacaacccacggycagggactaccctcctcctctctgtggacrcaagtgggatacaagtagagacgattaccaaaaaaaagatttgtctcactatggaagaagtaaggatgctctggagatgaaagataaaccatacacctctgcatctaagagacttgtgcatagaagctgggaccctaagactaagaataattatattgcaggggaagagggagcctggggttatttgatacccgtgcagaaaatacacacatggctccgttcactccccacaaagtatttcacttcaggagcctccatgaagattaaagc

SEQ ID NO: 9254 - DNA, 600 bp, Chicken  19866894204677_2
gactatatgatcttagtgatcttttctaaccttaatgattctatgatcactgcttcctgaactttgggttcctccaggagtctgcgaacacaagaaacccaaaggacacaggcgatgtacttgagaaagatatctggatacacacagtcaatgagggctgaagtttgctctcatgaggaaagtagtgacctccccattgtggtttcagcaccagatgaaccagttcctctttaacctgcctcttacctctggtaccacacaacccacggycagggactaccctcctcctctctgtggacrcaagtgggatacaagtagagacgattaccaaaaaaaagatttgtctcactatggaagaagtaaggatgctctggagatgaaagataaaccatacacctctgcatctaagagacttgtgcatagaagctgggaccctaagactaagaataattatattgcaggggaagagggagcctggggttatttgatacccgtgcagaaaatacacacatggctccgttcactccccacaaagtatttcacttcaggagcctccatgaagattaaagcctgaagactctttttctaactttcctttgt

SEQ ID NO: 9255 - DNA, 600 bp, Chicken  19866894204683_1
attgcagctcctgtggctgggtggctattccttttgcattgtcagagagttcagtctaccaggtaaaattagtcgtcttttaaagactcctgcaattcccaattgctgtttatttatacagcacctgacagagtgaactatgggactactatgggactgaggcctccagacttctctttcttccttaattttccccccattttgcctgtgcagtggtggtgaatggagcttgctaactcatttgatttctgtggtttgattccttctaagtattagatggcttcctttgactggcagtgrtactactgattcccacccagcactgactaggtaggcacagctgtctttttttatgttaggattacatagtaaagaacttcattgtagatacaatgcaaaatgagatggcaaaatgaacatctgcaaatttttgtatttacttttaaaaaagactatttctgaaggcattatttcatagtttattatttttaatattgtaggggaactgttagctcacagcttgaactgatgattgagcacctggtgaaggggtgtggctggcacagggtgcacaggcacattgtttgcacctgtgatccc

SEQ ID NO: 9256 - DNA, 600 bp, Chicken  19866894204684_1
ggacagagccaggcttctcccaatggctcccagtgccaagacaagagatgacagacacaaactagaacaggaaggttccatctgaacaccaggaagcactgctgtgctgtgcagtgacagatcactggcacagctttctggaggctgtgggcctccccgatgagatctccagaagctgcctggctgtggcactgcctaccctactctgggtgtccctgctgggggagaattgggccagatggaccctgagcttcctgccaatatccgccactccatgattctccatgattctgacaatcscctcctctcyctaaagccaacactaccaacaatggctgagtgggaacagctctgattgcttttccatttgctctgtgcagccctgctcccatgcttacttcagcagcaagggctgagtagttttatttatttcatgtactttagtgcctgataaaaatacagctgtaccaatcatcgcctacagttaatgattccttttattagtttattcttaaaatcactttttttacaagacctggagcagatttttattgtgaactatctgtgaaaacatacaaacagttatcagtcataatcacc

SEQ ID NO: 9257 - DNA, 600 bp, Chicken  19866894204684_2
aggcttctcccaatggctcccagtgccaagacaagagatgacagacacaaactagaacaggaaggttccatctgaacaccaggaagcactgctgtgctgtgcagtgacagatcactggcacagctttctggaggctgtgggcctccccgatgagatctccagaagctgcctggctgtggcactgcctaccctactctgggtgtccctgctgggggagaattgggccagatggaccctgagcttcctgccaatatccgccactccatgattctccatgattctgacaatcscctcctctcyctaaagccaacactaccaacaatggctgagtgggaacagctctgattgcttttccatttgctctgtgcagccctgctcccatgcttacttcagcagcaagggctgagtagttttatttatttcatgtactttagtgcctgataaaaatacagctgtaccaatcatcgcctacagttaatgattccttttattagtttattcttaaaatcactttttttacaagacctggagcagatttttattgtgaactatctgtgaaaacatacaaacagttatcagtcataatcaccaagaaaagac

SEQ ID NO: 9258 - DNA, 600 bp, Chicken  19866894204686_1
aactgcactgcactgcactgctctggaaaaacatacttgcagccggcatcgcagcctttaagacatcatttctgaggcatgcaaaatacaacatcactttttcctttcactctaatggaatctcattgggaattatgaagggcgatttttcttttttcaggttttagcagactgcgaagaaaatggagatttttgctttcgacagagtacaatggctaatgctttactattcgtgacattaacactacgatgggacaaatctgcaaaagtcattgtcaacagagctgttaatcttaacaytttttctgctgctggcaaaggacaagatattttccatttcctgctgtggctgtgcccatgagattcggggtagcaccacagtaagcgagcaggaaggagctaaaaatggtgaaacctgtgttggcccataggctttaaggagatctaccaggagttctgactgctttgtcccaggtctgtttaagcagcccagtatgctcatggcttccgttagggttaatgggaaatgctgtgtcatgagaagtgtcaggagagttacaatggggcagaaacttgcaatcaaacacaaatttaggaaga

SEQ ID NO: 9259 - DNA, 599 bp, Chicken  19866894204690_1
  misc_feature (1)..(38): n is any nucleotide
nnnnnnnnnnnnnnnnnnnnnnnnnnnnnnnnnnnnnnatgggttttcctgctcatctcagtgtccttcccctgccactgtaggaatacaggcaaatactacttgtacgcctgctccatcaactaacctccccagtcccctaaaatcatttcttatagtcctcaggcttctgtcagcgacctcatcactgctggcctgaactatcaataagggatagtaataagaggggcatatcagactgggaagttttctagaaatatccctgacctgggccccagggacgcagcacacctccctacrggtagggtcaggctgacatactgggctctctgttcctctcagaagggagtcaccaactgaatacattttatcaggagtaagtgctggattctgcaccttagatgagacaacccaggatagtgcagccagacagaaggactagggaagtgattgttttcctgtgctctacactggaaagactgcacctcgaataccatgttcattttgtgatccctcactacaagatactgaggcagctactggagcatgtccaaagaagggcaatgaagctggtgaagggtctggaacacaagacttct

SEQ ID NO: 9260 - DNA, 600 bp, Chicken  19866894204690_2
agaagggagtcaccaactgaatacattttatcaggagtaagtgctggattctgcaccttagatgagacaacccaggatagtgcagccagacagaaggactagggaagtgattgttttcctgtgctctacactggaaagactgcacctcgaataccatgttcattttgtgatccctcactacaagatactgaggcagctactggagcatgtccaaagaagggcaatgaagctggtgaagggtctggaacacaagacttctgaggagagactgagggaactgagattgttttgtctcaggargaggttcaaggtagaccttattgctctctagaactacatgatagaggttgtggtgagatggaagttgatctcttctctcatgtaactagtgaaaggatgagaggcaatggtctcaagttatgccagagaaggttcaggttggatatttggaaaaaattattctctgaaagagtggttaagcattggaacaggctgcccaggaaagtggtggagtccttggaggtgttcaggaaatgtgtagatgcagcacttagaggcatgatttagcagacgtggtgatgatgcactgatgtttgtact

SEQ ID NO: 9261 - DNA, 600 bp, Chicken  19866894204691_1
ttctgcagtgctgcctcccctcccctccaatcccctcctggatccaaagcttcgtacgtctcaagaaggatttcaccccgactggaacacctgggcccctagtaactccgtgttaacaagatggctgccgtgccgttacctgatcactttggctgcccaagcacctccaggtcctctccgagcagcatcgtaattgccacgagcatggaaatacttgtcagcaccaatgtagtttgcctcacgcatgtcccggtatgctctccacatatcccgtgcgcctgaagagagcagacaggtgaygttcactttgatgtcccattccagcagcagccaagcaccatttcagacagaagcccatggctgctactgggccagaaagcctcatgtgtccccaaggctccccatgtgtccccagggctccatggagaaacctctcttatcaayccctactgaagtagggcaggttagcaaagcggaagaaaaggggctccttgaggagaacttcgtggagccatggaggctttgcttggctctgatgcctcaagggctggwggagttgtctcaaagcaagctggcagtgacactttagacccatagtgt

SEQ ID NO: 9262 - DNA, 600 bp, Chicken  19866894204691_2
cactttggctgcccaagcacctccaggtcctctccgagcagcatcgtaattgccacgagcatggaaatacttgtcagcaccaatgtagtttgcctcacgcatgtcccggtatgctctccacatatcccgtgcgcctgaagagagcagacaggtgaygttcactttgatgtcccattccagcagcagccaagcaccatttcagacagaagcccatggctgctactgggccagaaagcctcatgtgtccccaaggctccccatgtgtccccagggctccatggagaaacctctcttatcaayccctactgaagtagggcaggttagcaaagcggaagaaaaggggctccttgaggagaacttcgtggagccatggaggctttgcttggctctgatgcctcaagggctggwggagttgtctcaaagcaagctggcagtgacactttagacccatagtgtgcactagagaaggtaccagcttcattctgagactttagcmgtagarggtttgtgcaaccagtttgtccacaaaaagctctccatgagcacgtgcctatcctgcaatccctgtgcctggtttggccgcagggttgcccccaagct

SEQ ID NO: 9263 - DNA, 600 bp, Chicken  19866894204691_3
gtatgctctccacatatcccgtgcgcctgaagagagcagacaggtgaygttcactttgatgtcccattccagcagcagccaagcaccatttcagacagaagcccatggctgctactgggccagaaagcctcatgtgtccccaaggctccccatgtgtccccagggctccatggagaaacctctcttatcaayccctactgaagtagggcaggttagcaaagcggaagaaaaggggctccttgaggagaacttcgtggagccatggaggctttgcttggctctgatgcctcaagggctggwggagttgtctcaaagcaagctggcagtgacactttagacccatagtgtgcactagagaaggtaccagcttcattctgagactttagcmgtagarggtttgtgcaaccagtttgtccacaaaaagctctccatgagcacgtgcctatcctgcaatccctgtgcctggtttggccgcagggttgcccccaagcttgagcccaggcctgccatattctttgtgctgcgcttggcaagacccaaggaacacagaggcacttgtccaaatgggcctttcaatgggagtcaccagctgaaagggcc

SEQ ID NO: 9264 - DNA, 600 bp, Chicken  19866894204691_4
tttcagacagaagcccatggctgctactgggccagaaagcctcatgtgtccccaaggctccccatgtgtccccagggctccatggagaaacctctcttatcaayccctactgaagtagggcaggttagcaaagcggaagaaaaggggctccttgaggagaacttcgtggagccatggaggctttgcttggctctgatgcctcaagggctggwggagttgtctcaaagcaagctggcagtgacactttagacccatagtgtgcactagagaaggtaccagcttcattctgagactttagcmgtagarggtttgtgcaaccagtttgtccacaaaaagctctccatgagcacgtgcctatcctgcaatccctgtgcctggtttggccgcagggttgcccccaagcttgagcccaggcctgccatattctttgtgctgcgcttggcaagacccaaggaacacagaggcacttgtccaaatgggcctttcaatgggagtcaccagctgaaagggcctgtggaggctgatcgaggtcctctcctagcagcagagaccaacagggtccctaatgtggagccgcaggacctccttgactggaggact

SEQ ID NO: 9265 - DNA, 600 bp, Chicken  19866894204691_5
acagaagcccatggctgctactgggccagaaagcctcatgtgtccccaaggctccccatgtgtccccagggctccatggagaaacctctcttatcaayccctactgaagtagggcaggttagcaaagcggaagaaaaggggctccttgaggagaacttcgtggagccatggaggctttgcttggctctgatgcctcaagggctggwggagttgtctcaaagcaagctggcagtgacactttagacccatagtgtgcactagagaaggtaccagcttcattctgagactttagcmgtagarggtttgtgcaaccagtttgtccacaaaaagctctccatgagcacgtgcctatcctgcaatccctgtgcctggtttggccgcagggttgcccccaagcttgagcccaggcctgccatattctttgtgctgcgcttggcaagacccaaggaacacagaggcacttgtccaaatgggcctttcaatgggagtcaccagctgaaagggcctgtggaggctgatcgaggtcctctcctagcagcagagaccaacagggtccctaatgtggagccgcaggacctccttgactggaggactgcatgt

SEQ ID NO: 9266 - DNA, 599 bp, Chicken  19866894204693_1
  misc_feature (1)..(60): n is any nucleotide
nnnnnnnnnnnnnnnnnnnnnnnnnnnnnnnnnnnnnnnnnnnnnnnnnnnnnnnnnnnntgtgcgtgctgaggtcggtcgtttggaattgtaactaccacagactgaggtgaaaatacgacacagcacatacgcgcagctcgtgaggcgaggaaaacccactgaggtaacagccccgcttcgtcgggcgctaacagctgccgcagcccgccctgccaatcaagcttctcgtcaccatggcaacaccgcggtttggccctccccttcctctgggagagcggaagtagcgaagggggcggygtgcgcccgaggagaaggaggaggtatacgtcagttccgctgcgcgggggcggagcgggaggtcggaaggttccagaggggctgtggagttgtcgccgctgttcgggaagtgcagctcagcactgtgcygcaygcgacatggctgctgcgcgtgaggaggtgagcgggttgccttcgtcccccctcccctccctayccctccctcctcctactagggcctggcgggaaggacgttgcggggaattctcggccggaccattgcatgaggcctctgttggcctctgaacgcggagaagctg

SEQ ID NO: 9267 - DNA, 600 bp, Chicken  19866894204693_2
atacgcgcagctcgtgaggcgaggaaaacccactgaggtaacagccccgcttcgtcgggcgctaacagctgccgcagcccgccctgccaatcaagcttctcgtcaccatggcaacaccgcggtttggccctccccttcctctgggagagcggaagtagcgaagggggcggygtgcgcccgaggagaaggaggaggtatacgtcagttccgctgcgcgggggcggagcgggaggtcggaaggttccagaggggctgtggagttgtcgccgctgttcgggaagtgcagctcagcactgtgcygcaygcgacatggctgctgcgcgtgaggaggtgagcgggttgccttcgtcccccctcccctccctayccctccctcctcctactagggcctggcgggaaggacgttgcggggaattctcggccggaccattgcatgaggcctctgttggcctctgaacgcggagaagctgtttcggttataaaacatttacggctttccgttgtgtcctggttgatcggagcttaagcgtggaagtaggtatggtcgggaagtgaaggtgttcgtagcctcgtgcttacgagcatgctgagtgatgttga

SEQ ID NO: 9268 - DNA, 598 bp, Chicken  19866894204693_3
gcgcagctcgtgaggcgaggaaaacccactgaggtaacagccccgcttcgtcgggcgctaacagctgccgcagcccgccctgccaatcaagcttctcgtcaccatggcaacaccgcggtttggccctccccttcctctgggagagcggaagtagcgaagggggcggygtgcgcccgaggagaaggaggaggtatacgtcagttccgctgcgcgggggcggagcgggaggtcggaaggttccagaggggctgtggagttgtcgccgctgttcgggaagtgcagctcagcactgtgcygcaygcgacatggctgctgcgcgtgaggaggtgagcgggttgccttcgtcccccctcccctccctayccctccctcctcctactagggcctggcgggaaggacgttgcggggaattctcggccggaccattgcatgaggcctctgttggcctctgaacgcggagaagctgtttcggttataaaacatttacggctttccgttgtgtcctggttgatcggagcttaagcgtggaagtaggtatggtcgggaagtgaaggtgttcgtagcctcgtgcttacgagcatgctgagtgatgttgatt

SEQ ID NO: 9269 - DNA, 535 bp, Chicken  19866894204693_4
gctgccgcagcccgccctgccaatcaagcttctcgtcaccatggcaacaccgcggtttggccctccccttcctctgggagagcggaagtagcgaagggggcggygtgcgcccgaggagaaggaggaggtatacgtcagttccgctgcgcgggggcggagcgggaggtcggaaggttccagaggggctgtggagttgtcgccgctgttcgggaagtgcagctcagcactgtgcygcaygcgacatggctgctgcgcgtgaggaggtgagcgggttgccttcgtcccccctcccctccctayccctccctcctcctactagggcctggcgggaaggacgttgcggggaattctcggccggaccattgcatgaggcctctgttggcctctgaacgcggagaagctgtttcggttataaaacatttacggctttccgttgtgtcctggttgatcggagcttaagcgtggaagtaggtatggtcgggaagtgaaggtgttcgtagcctcgtgcttacgagcatgctgagtgatgttgatt

SEQ ID NO: 9270 - DNA, 599 bp, Chicken  19866894204700_1
  misc_feature (1)..(109): n is any nucleotide
nnnnnnnnnnnnnnnnnnnnnnnnnnnnnnnnnnnnnnnnnnnnnnnnnnnnnnnnnnnnnnnnnnnnnnnnnnnnnnnnnnnnnnnnnnnnnnnnnnnnnnnnnnnnnacataattaacaaacgatacctattaccctaaatgcagtgaactagtcctatttgagaagtcccatggtatctaagacaactgcatggcagatatgacataggatctcttttctgtaatggcagtgatgccaaatgatgctagatatctgtgtttatgcaatcacatcaatgccatttccacatactagtrattagtcatgtacatctcaaacatatttcttgcctttaggaattttgatttgcaagttgaatttcaccttttgagtttttataatatgtgataagtaactttatgtaaatgacttgaagaattccgtgtggttaactgtgctggcatggaaaagattttaagtccccaaaaatttgttcttgcaccagctcttacattctgaactcagtcagatccaatcagataagaaaacctactctgtaatgtgaaagttttcacatttgacttctattctgaatggaaaagaagaaatctcttac

SEQ ID NO: 9271 - DNA, 600 bp, Chicken  19866894204702_1
ggcagtagccttcttatccttaacatatttagaaatgatttatggagttctttatgacatcatttcagcagggatcaaagtgaggcttacttttctgtagttcttttgatgctctgtcttgttttttttgaagatgaggtgacactggctttcttccagtccacatgaaaccaatcgctatcacagtgaccttccaaacaacccaatgagactgaccttgcagtgatatcaaccaacttcctctgtatttgtgagtggattccaccaaggcctatggcctatctaagttcagtttgtttraatgtttcctaacctgatccttccccacagagaaggaatcttccttgctctatagtcctcacctgtctcagaggcctggaactcctgtagactactcttgtcttctaatactgaggcatatcatttctgaacttggaagaggtaattcttaaatatcagcaacccttcctggatccctctttcctgtggggctgtatcccatgaaagttgtttcaagtagaatggtcctgagaaggccaacatctgctctcctgaagcacgggagttgtgaccatgtttgttttgttccctcctctcaga

SEQ ID NO: 9272 - DNA, 600 bp, Chicken  19866894204709_1
taggattgcaacaacagagcatccagcttcattttcaaaggtgcaaaacccatcagtgtcaacaaacaaaaacaaaaaaagcagactactactgctatttaagtgccaacatatggacttcagtctctaattgcatgccctacgtcttgattaaattgctgcctggagctttgccaaaacagattatttcacttagcaaaagttatatctataccgcagttctgagctatagtgcacatcccaaggcagcctcaggtggtgcaatcttggtactatagtacacataaaccaagttcatawtacactgccatgtgctacactgaaaaacagcagagcacaacactgaaacgctgcagaacataacataacatagccttagcatatcagattccttctgaatctgttgcctgcactttgagcttgttgttcattttgtcaagatctgatkttcagaatccgatgttcaggtcagcacagaaacagctttaaaaatcaggactgttctggaactagcctgaaaccagagctcttttgaaaaattagtccttaaagtcaaaacatcagaatattccaacttcaaaatttccagagtttcttgat

SEQ ID NO: 9273 - DNA, 600 bp, Chicken  19866894204709_2
gattaaattgctgcctggagctttgccaaaacagattatttcacttagcaaaagttatatctataccgcagttctgagctatagtgcacatcccaaggcagcctcaggtggtgcaatcttggtactatagtacacataaaccaagttcatawtacactgccatgtgctacactgaaaaacagcagagcacaacactgaaacgctgcagaacataacataacatagccttagcatatcagattccttctgaatctgttgcctgcactttgagcttgttgttcattttgtcaagatctgatkttcagaatccgatgttcaggtcagcacagaaacagctttaaaaatcaggactgttctggaactagcctgaaaccagagctcttttgaaaaattagtccttaaagtcaaaacatcagaatattccaacttcaaaatttccagagtttcttgatctgaattaatatcagatatggctccttgagctccatcatcagtcacagctcttgggaatcactgggtcaccatcttctatgaataatcagactttcttttcttttctttttggtttgtttgttttcttccacgactaatctaccatct

SEQ ID NO: 9274 - DNA, 600 bp, Chicken  19866894204711_1
catcatatgacattccgttcacacagactgatcattcatattgggatgcttattcatactgggatattttcacctctctgtcatcttcctaaacaagattttcatctaggtcagattgtgatacccttactaacaggagaagtatatcaaggcccagtcccttatcaaacatgctaaaatttatgggccttttataacattcacaatttatcagtgtgtctcagctttcctgcaaggagtaaacagccactcacttcttcctaggagagagagtagtgagacacatgccaagaaacgacratctcttctagtcttgtgcacctcaggattttgttaaggaattaatcccacttcaaatcaggaaatcagcatcctttcatctgttttgcagccaaagtttatgagggagttagaaagatatttctcaacaactgtaggatttattctctcccactttgccatgctttccctcagaataaggatcatggcacaggatagatctttattcttatacaatttacatgatggactgtggtttataagtctccattttaatgtaaatgacctttcatctcatgtgataagatttatggattaaag

SEQ ID NO: 9275 - DNA, 600 bp, Chicken  19866894204713_1
accaccaactagaatgaagcattggtgggaactgcctgattggagggcatggagagtgtcaacaagaatacaggactaaatgaattccacctgatatggaaatgtttgtctctcttcatcagtgcaatttttaggagattgtttctctagagggtttaaaagttgaattaataggccttgatttctttattcatttttgtcaaaatgtggagaatttctagacaaggtaagggaaatggtagttactctgttttgtagtttatcagtgaatatagtcatataagaaaaaaaaaatccttyttcagattcagaaagcacagctaggttgccacaagctaggagctgcattaccaaccaagatattcagtctttactactgctgtgaaatacaaatggaattggagtgccatagctgaaaaatctgctctctctatttccagttcagtggatcaagtgaaagggaatttgcattttcataaccagttgcaataatggtcatgatcattatgatagcttagtgaaaaaccaaaattagcaaatcattgtgtttctttgtcagcgaggacttttctgcagactcacatctgtcaggttttgtca

SEQ ID NO: 9276 - DNA, 600 bp, Chicken  19866894204715_1
tgctgcatgcagcacagccatctgaacactattgttctgattattgacttatgattatggagttctcctgtgttattacatttttatgagcaagagcaagccaaagtgctatttatagtttcagctggctgggaggacaaccaattttgtcattactgacattacagcccttccttttgcttcgggatatcactagctatgaaaaagttgtgaagaagctttgtctgttagagaactaacttctgtttgtccaccttctcaagaaatcagaataagctgacatgagtccaatactgcttrctgtggtatactagcatactgcctgatactagatttagttttaggattctgttcttcagcacagatcaaggtctgggccctgtacaactcatgtactaccttgcttgacagcttaccatgacctagcatgacagctgtggtcataggtaatcactgccaaaagggaggatcataggagtgggtggaaaggaaatcagacattcctggcagctggcccacagctctgaagcttcctttcaccaaacatcagactgaaaacagatctccacttgctgaaaagtggaagaccatacttttcaa

SEQ ID NO: 9277 - DNA, 600 bp, Chicken  19866894204716_1
tccatgactactatgaattagagaagtactggcagagatgtacatgtaaaaggaaaacaatgattacatctcacgtaggttttaagaacctgaaaaaaaccctccaatttttgataaattctcaatgtatgcatagagctttctattaagaataaattacaaagcaaataataaaaaaaactaactctagatgaccagtgacccagacctgatcagtaaagtgggctgcaaaggagaaagaaggaaaataaagaaggaaaacaaatacccacaattcacaattgcctcaagtttctttcwrttattgtgctgtgagtgcaaagtgaccaaagtatgcaagagaacctcatggcttgggacttctgactgaaatcacttcctatttccaaacatttcaacttytacacaatctacttataatcttctgtgaggaagacagactcayaactgtgtactcaggtgagtacagtgagatgtttgcaaacagactggagaggctgacagttacagcaccgtgattttaactctgccttcaaaccattgagaaaatcatcccgacacatacactgaagatcaggtacattcaaatgtacaaataaa

SEQ ID NO: 9278 - DNA, 600 bp, Chicken  19866894204716_2
ccatgactactatgaattagagaagtactggcagagatgtacatgtaaaaggaaaacaatgattacatctcacgtaggttttaagaacctgaaaaaaaccctccaatttttgataaattctcaatgtatgcatagagctttctattaagaataaattacaaagcaaataataaaaaaaactaactctagatgaccagtgacccagacctgatcagtaaagtgggctgcaaaggagaaagaaggaaaataaagaaggaaaacaaatacccacaattcacaattgcctcaagtttctttcwrttattgtgctgtgagtgcaaagtgaccaaagtatgcaagagaacctcatggcttgggacttctgactgaaatcacttcctatttccaaacatttcaacttytacacaatctacttataatcttctgtgaggaagacagactcayaactgtgtactcaggtgagtacagtgagatgtttgcaaacagactggagaggctgacagttacagcaccgtgattttaactctgccttcaaaccattgagaaaatcatcccgacacatacactgaagatcaggtacattcaaatgtacaaataaac

SEQ ID NO: 9279 - DNA, 600 bp, Chicken  19866894204716_3
tccaatttttgataaattctcaatgtatgcatagagctttctattaagaataaattacaaagcaaataataaaaaaaactaactctagatgaccagtgacccagacctgatcagtaaagtgggctgcaaaggagaaagaaggaaaataaagaaggaaaacaaatacccacaattcacaattgcctcaagtttctttcwrttattgtgctgtgagtgcaaagtgaccaaagtatgcaagagaacctcatggcttgggacttctgactgaaatcacttcctatttccaaacatttcaacttytacacaatctacttataatcttctgtgaggaagacagactcayaactgtgtactcaggtgagtacagtgagatgtttgcaaacagactggagaggctgacagttacagcaccgtgattttaactctgccttcaaaccattgagaaaatcatcccgacacatacactgaagatcaggtacattcaaatgtacaaataaacagaaactaatgctgacaatatgcaacaacaaattagccaatcttgccaccaactcaaatctagctagccttcaaagacctgcatctgaagaaccaattttc

SEQ ID NO: 9280 - DNA, 600 bp, Chicken  19866894204716_4
ttaagaataaattacaaagcaaataataaaaaaaactaactctagatgaccagtgacccagacctgatcagtaaagtgggctgcaaaggagaaagaaggaaaataaagaaggaaaacaaatacccacaattcacaattgcctcaagtttctttcwrttattgtgctgtgagtgcaaagtgaccaaagtatgcaagagaacctcatggcttgggacttctgactgaaatcacttcctatttccaaacatttcaacttytacacaatctacttataatcttctgtgaggaagacagactcayaactgtgtactcaggtgagtacagtgagatgtttgcaaacagactggagaggctgacagttacagcaccgtgattttaactctgccttcaaaccattgagaaaatcatcccgacacatacactgaagatcaggtacattcaaatgtacaaataaacagaaactaatgctgacaatatgcaacaacaaattagccaatcttgccaccaactcaaatctagctagccttcaaagacctgcatctgaagaaccaattttcttgttgctgccttattttctgattttagctaggaatgctgttt

SEQ ID NO: 9281 - DNA, 599 bp, Chicken  19866894204720_1
  misc_feature (1)..(41): n is any nucleotide
nnnnnnnnnnnnnnnnnnnnnnnnnnnnnnnnnnnnnnnnnctgttcatgtccaacatttttctacttaagaccttgtaacacagcaaaatgaacagcaatgacagcagagcagcaaggtgccaggctacagcatttgctcaaatgcaacagccataggtacagaaataaaggaaagaagttgcttgccttcagaaggcctcagatacacagggatctccagtaagatacccttacctgcccctgctaaccgttaaatgaggtctgggaaggggtggatcctggctccagcccttccagwcactcaggcgcgtcgcaccaggtgttcaatcactggttcaagccgtgacttagcatttctgctacagacttattttgtttgtatttttcttttaagtaatgcatgagaaagtaaaaatctcattcatttacaaaacaactggaaataatgggtgtttgtggcctgctactgacgaaagctatttctaagtgtcctgctgtgacccattcccttttaatagaagaagttgcttttggatggatgcctaatgtaaacatcttcttgcactgaacaaaaaatgcgtagatagttgcttccag

SEQ ID NO: 9282 - DNA, 600 bp, Chicken  19866894204723_1
atgcaaaagaatggatcgtaactctcgtcttaacactctgtattgtaaatgcattagaaaatgcagtgaataactttgattccaaatgcttagaagtgcttgatcctctagccatatgcttctgctcccagctgctttactcctttagggagcagtctgtgtctttgctgcccctttatgcagtgttcttctgcatgccagctgtatttccagtttggttttcctttgccgtgggttttagcacacaccccatataatgctgctccatatcagtgtaaatcgcagtagaaatggctcacrtcacaaccagaccacttcaccactgtttttgcatcacctcagagtgaattaacatttggcataggaaggatagagatgtcatggctcagcttctggacatggaggtcttctgagtgcaagaacaagcacttgaggccaccaaggtagagggatagctgcatccttatgtccttcatgacaaacttccccctctctcattccccttttggggtgaacgagcatctttcaaaattacagtggagaatggttcacaaacatttgtttctgtctcttacgaagtagccactgggcaatatcacc

SEQ ID NO: 9283 - DNA, 599 bp, Chicken  19866894204725_1
  misc_feature (1)..(5): n is any nucleotide
nnnnncaggaaataccgagtattaggggggacccactgtgtgaagagaacccgtattgcgcccactgagtgaatgctggagaactgtgtgccttgttttatcactgtatggctgttccatctccccctgtctgttgatcagacgtcaatagataaaattttagataacgtttgctgcctgaattgactgaaacgttggcagaaccatggaagattgtctttctgaggagaacagggctaaatcgcattttcagtttagtgttgctttggaatacacaaaggagtcactgcgtgctgctcrtggtgtgctaagaaaacaatcatagaaacagagaaccagactccaataaaaagacatggtatctgytgatagtcaaatattagtcctatatttggtctgaccaaatataggatcttggasagaggctgttttcttcttgttgtttgtgtttgcaggagacttgtatcactgagtgccatttcagttgcttttcttacggaaaaagagaaagtgtggytmtttgagcaatctaggaaaagtgagccaccttcttaggatatgtttacccaatcttctaaaatattcacttcctctgacgt

SEQ ID NO: 9284 - DNA, 600 bp, Chicken  19866894204725_2
gagtgaatgctggagaactgtgtgccttgttttatcactgtatggctgttccatctccccctgtctgttgatcagacgtcaatagataaaattttagataacgtttgctgcctgaattgactgaaacgttggcagaaccatggaagattgtctttctgaggagaacagggctaaatcgcattttcagtttagtgttgctttggaatacacaaaggagtcactgcgtgctgctcrtggtgtgctaagaaaacaatcatagaaacagagaaccagactccaataaaaagacatggtatctgytgatagtcaaatattagtcctatatttggtctgaccaaatataggatcttggasagaggctgttttcttcttgttgtttgtgtttgcaggagacttgtatcactgagtgccatttcagttgcttttcttacggaaaaagagaaagtgtggytmtttgagcaatctaggaaaagtgagccaccttcttaggatatgtttacccaatcttctaaaatattcacttcctctgacgttcttatttgttttggcacagaagcactgagttaagctgtttcctctttcctgaactcagtgctttca

SEQ ID NO: 9285 - DNA, 600 bp, Chicken  19866894204725_3
ctccccctgtctgttgatcagacgtcaatagataaaattttagataacgtttgctgcctgaattgactgaaacgttggcagaaccatggaagattgtctttctgaggagaacagggctaaatcgcattttcagtttagtgttgctttggaatacacaaaggagtcactgcgtgctgctcrtggtgtgctaagaaaacaatcatagaaacagagaaccagactccaataaaaagacatggtatctgytgatagtcaaatattagtcctatatttggtctgaccaaatataggatcttggasagaggctgttttcttcttgttgtttgtgtttgcaggagacttgtatcactgagtgccatttcagttgcttttcttacggaaaaagagaaagtgtggytmtttgagcaatctaggaaaagtgagccaccttcttaggatatgtttacccaatcttctaaaatattcacttcctctgacgttcttatttgttttggcacagaagcactgagttaagctgtttcctctttcctgaactcagtgctttcaaaggaagctaatgttcagtcttgctaaagaatttcagataacttcatagaggga

SEQ ID NO: 9286 - DNA, 600 bp, Chicken  19866894204725_4
ctttctgaggagaacagggctaaatcgcattttcagtttagtgttgctttggaatacacaaaggagtcactgcgtgctgctcrtggtgtgctaagaaaacaatcatagaaacagagaaccagactccaataaaaagacatggtatctgytgatagtcaaatattagtcctatatttggtctgaccaaatataggatcttggasagaggctgttttcttcttgttgtttgtgtttgcaggagacttgtatcactgagtgccatttcagttgcttttcttacggaaaaagagaaagtgtggytmtttgagcaatctaggaaaagtgagccaccttcttaggatatgtttacccaatcttctaaaatattcacttcctctgacgttcttatttgttttggcacagaagcactgagttaagctgtttcctctttcctgaactcagtgctttcaaaggaagctaatgttcagtcttgctaaagaatttcagataacttcatagagggactgcagttaaaaagaacaaccctgttctgcaagaatgtcctcccagatattctggttctctcaaggaactacaaagatctcagctcagaagaactat

SEQ ID NO: 9287 - DNA, 600 bp, Chicken  19866894204725_5
ttctgaggagaacagggctaaatcgcattttcagtttagtgttgctttggaatacacaaaggagtcactgcgtgctgctcrtggtgtgctaagaaaacaatcatagaaacagagaaccagactccaataaaaagacatggtatctgytgatagtcaaatattagtcctatatttggtctgaccaaatataggatcttggasagaggctgttttcttcttgttgtttgtgtttgcaggagacttgtatcactgagtgccatttcagttgcttttcttacggaaaaagagaaagtgtggytmtttgagcaatctaggaaaagtgagccaccttcttaggatatgtttacccaatcttctaaaatattcacttcctctgacgttcttatttgttttggcacagaagcactgagttaagctgtttcctctttcctgaactcagtgctttcaaaggaagctaatgttcagtcttgctaaagaatttcagataacttcatagagggactgcagttaaaaagaacaaccctgttctgcaagaatgtcctcccagatattctggttctctcaaggaactacaaagatctcagctcagaagaactatcc

SEQ ID NO: 9288 - DNA, 600 bp, Chicken  19866894204726_1
taactgtaaaaagctggaagacgtgatgaatgaatcaaggaaaacgtgctctgaaggaaaagggatgatgctgtgctcactgctgagtgttattcattatactctataagaacgtctgcagaatatttagtgatgaacaattctcaagtccagtatatctagagagaagaatgagtttgagccttaaatatctttttgttaatttttagcacatattgctcatttttccaaacagacaatcaagcttctccagaaatgcattttcttgagaatttgaaatatgtctaagatgaatcccamttttaaaatcactatctcttcatggtaaacacaatactgaacacctgaatgatccaatgcagcctatgtacctataacattaacaatgcgctattacaaagaataaaagtcatgactcataagataattcaattgaaaatataagaagttttaagtagtgtaaaaaacatgaatttaagacttcaactgcttttttgttgttgtggttgttgttgtgtaacatttcgcatgctttttaaaaactgctggaagcttgatatagaaggaagagtggaaagaaagtataacaacattcaggtc

SEQ ID NO: 9289 - DNA, 600 bp, Chicken  19866894204727_1
ctgctttcactagaggcctggatgacagaaaaaaacacacacacccaatctgcatatgatcccaggctcggaggggcagaaagattcaaagggcaaagtgtaaataaaagcaacattctgtaatgaggaacaggatggacacatatcatcagtgtggcaaataagggcaaagctcatccttggatgaactctcaacagtatctgcaaaatatggaaggaaaacgatgctcttgtatttttttctggtgatgcttttgcagaacccacaaagccttcatgcaaactggaaaatacattttwgaaaggtgtaagcagatgagagaaataggagtttagaagacgtgtctcttgaggaaaagtggagtttctttctaacagaaattgcctgggaaagggaaacaataagggctaagaatatgcaaagtctgctccaaaggtgacggtgagatctccctctgctgccagctgggaaaggatgagcaacagatttatccccaggcagagaggcttgaccaagtattaaaatcatctcctgagaaccaagcatargcaagtcctaggcagaatagctactgaagggtttcaatcacaggttagaaa

SEQ ID NO: 9290 - DNA, 600 bp, Chicken  19866894204727_2
tgcttttgcagaacccacaaagccttcatgcaaactggaaaatacattttwgaaaggtgtaagcagatgagagaaataggagtttagaagacgtgtctcttgaggaaaagtggagtttctttctaacagaaattgcctgggaaagggaaacaataagggctaagaatatgcaaagtctgctccaaaggtgacggtgagatctccctctgctgccagctgggaaaggatgagcaacagatttatccccaggcagagaggcttgaccaagtattaaaatcatctcctgagaaccaagcatargcaagtcctaggcagaatagctactgaagggtttcaatcacaggttagaaatttctgccagggattggcaaggcaccccaaagacacaggtgaagacacaagtgacctctatgtgatttcccattccaaagctctgtgtccttgacatctcaccagaccattttatacagccttctttttcggttctgctttgcagctctttcagaggaggagttcaccgctgttctgccttgtgtcaaatgtgtggacagaagaagcaagtagcagcacggagctaccrgtctgcaattccactccgac

SEQ ID NO: 9291 - DNA, 418 bp, Chicken  19866894204727_3
ctcctgagaaccaagcatargcaagtcctaggcagaatagctactgaagggtttcaatcacaggttagaaatttctgccagggattggcaaggcaccccaaagacacaggtgaagacacaagtgacctctatgtgatttcccattccaaagctctgtgtccttgacatctcaccagaccattttatacagccttctttttcggttctgctttgcagctctttcagaggaggagttcaccgctgttctgccttgtgtcaaatgtgtggacagaagaagcaagtagcagcacggagctaccrgtctgcaattccactccgacagtccagagctgtcaaaacactccaagagagcagaaatggtttgtgtcattctccaggctgtgaaataacacctcaatttaaaagcctgccctgggat

SEQ ID NO: 9292 - DNA, 600 bp, Chicken  19866894204729_1
tgaccctctgaagcagctagaggatttgccaaagcaccatgggtctactaccttgtatgaagcactgtctggtcggaatgagaagaaatgagaaaaaggttctttaaacacttaaaaccattatgtaccaagtaatgggcatgttctctgagggatttagtcttctcagatcctcactgccctagaacttgaattctctgtccccagtatgtccttttgtaaattgctggtgtactcccccatcatcctatttcatctgtgccttcagtccttattacagtgagaaatactaggttgatkggaagcctttctttgcttctattgcttaaattcaaaattgatctcgtattttagcagtttgagaaactggatggataagtgtccttgtatacaccctacaggtgcccaaagcagcaaaaatagttgtttctcmgaatgagcagtattagctgtaattgtgtacaaagttgaccttgaggcttaggtggtagaactattagtgtgacccagtaaaaaagcacttccaaattatttaatagattatttcacttcttgttcttatgcagtaaaatgattttttttaatttaaatgaataaggc

SEQ ID NO: 9293 - DNA, 600 bp, Chicken  19866894204729_2
aatgggcatgttctctgagggatttagtcttctcagatcctcactgccctagaacttgaattctctgtccccagtatgtccttttgtaaattgctggtgtactcccccatcatcctatttcatctgtgccttcagtccttattacagtgagaaatactaggttgatkggaagcctttctttgcttctattgcttaaattcaaaattgatctcgtattttagcagtttgagaaactggatggataagtgtccttgtatacaccctacaggtgcccaaagcagcaaaaatagttgtttctcmgaatgagcagtattagctgtaattgtgtacaaagttgaccttgaggcttaggtggtagaactattagtgtgacccagtaaaaaagcacttccaaattatttaatagattatttcacttcttgttcttatgcagtaaaatgattttttttaatttaaatgaataaggctatctaatcatcttcagttttgttcttaatggttttatccccttttacagttctggggtgcttaaatgaaactgtcatttaaatgtagacgctttatttctttcttctgatccatatgagcagaggagaaatg

SEQ ID NO: 9294 - DNA, 600 bp, Chicken  19866894204731_1
acattttctagctgtccacactatgagagatggcaaagcagagcttaatcaggcatggactgaggatcctttccagctggtaccactggtgctcagcaccatttctgcaccctttgttactctttgttcagagacactgggctggaagagcagggctgcagtggcatagctgcccagggaggtggtgaggtcaccatccctggaggtgcccaggaaccacggggatgtggcagtgatggacatggtcagtgggcatggtggggtgggttgatggttgcattcggtggtcttttccaactstaatgattctgtatcttcagactgccatttggtgatagagttgcaatgctcataggcacttattgcccagtttgcagcttttkgggatttttttaatcctgctttgttttcccagtaacatacctgtattagtatctttctcttgaatttacttctctatgtgtgcattaattgctaaattactatgtgtcatatcctctcaactgctcattgatgtatttgtaactatgatattttatggcaatttaactgtggagattacaaatagaaatatcagctaaaaccagaatgattagcaaa

SEQ ID NO: 9295 - DNA, 600 bp, Chicken  19866894204731_2
cactggtgctcagcaccatttctgcaccctttgttactctttgttcagagacactgggctggaagagcagggctgcagtggcatagctgcccagggaggtggtgaggtcaccatccctggaggtgcccaggaaccacggggatgtggcagtgatggacatggtcagtgggcatggtggggtgggttgatggttgcattcggtggtcttttccaactstaatgattctgtatcttcagactgccatttggtgatagagttgcaatgctcataggcacttattgcccagtttgcagcttttkgggatttttttaatcctgctttgttttcccagtaacatacctgtattagtatctttctcttgaatttacttctctatgtgtgcattaattgctaaattactatgtgtcatatcctctcaactgctcattgatgtatttgtaactatgatattttatggcaatttaactgtggagattacaaatagaaatatcagctaaaaccagaatgattagcaaaccaagatgaatgctgtgaattaatcatcgtttcagacatcacattaaggttctaaatgttcatcttaatatggcagatacaaa

SEQ ID NO: 9296 - DNA, 600 bp, Chicken  19866894204731_3
cttaatatggcagatacaaatcgctgaggcgagaagagtccttgcaatttgaactatactaaataccagtccttaatcacaaacacacacactggaaggtttgaactaagctttcagtcacacataccttcatagaacgacctccatgttttagcagatagttgctaaagggcgacacaatggttattctgtcagtttccacactttgattttctgggtgccgtgttgaggagtgcactaaaggcacagcatgcactgcagccactccttctgttggtcagacctgaaagaataaagctygcttgtctgcaggtcttgctgggggaggacgtgctgtactttctgagtttatgcagcatttgacacaagggacaagtcctcatttatttaaagatgctaagagaacattttcttttgcaaaataatggagaaagcccttttcatcctaaaagtaacagatgtgtaccctgacaccctctaacgtgatacacaaatacattccccctttgtcataaaacagaagcaaacacacacactccccacattttaaattacacagcactggctcagctagacagaaaacgtgcatggttactgcag

SEQ ID NO: 9297 - DNA, 600 bp, Chicken  19866894204734_1
caggtcgatacgtgtttaacctgagctatgcccagcagtccttactaaaatacatttatgccctggagttggcctccattgatgagcctggcctattaaaatcagtgcaagttcatttgtaagcaaatcttgaactgataaaatggagttaaattggtaaaatcatttttaacctgaattagaacatccctgcaggctccataagtttattgagtgagaggtagaatgctttacctaattacgttacttcgtacaaacgcctttgtaaacccactctggctagtggactaaacacagtawaaaagacagtatagaaatttttaccattgaaaactctgagcagggagtgttcccacggtgcaggaatcctttgaggcagagtgctttagtagtgtaattcatggcttgtctactgggggaatgtaagaaagtttagctaccttttaaagaagattaattaaacctcattaaaactctgtatggatactaattctgagaattaaaggactaaggagagtggcaagataaacgaatgacactttaattctacttcagaggccaatgcacagcttatctaaacaggttcctgttcttagtgaa

SEQ ID NO: 9298 - DNA, 600 bp, Chicken  19866894204736_1
acagctttctggttttgctgacttctcttgtatctcaagcatcttcagtgttagaagaggtagaccacccaccagtgatggaaatttgaagctatacagaaaccatctctatagaagtgagtttgcaggctggctagtctgtttggacaggaatttttatgctgcaattagcagtgattgtcccagaaaaacattttctttattagttgaacatttttctttttaacattcttctgcctcagaatatttactgaatgttccttgtcctcaaatcctactgaagtcagaaaaatactaaamttactattaatgttaaaataaatgttaaaaatattatgtrgctatgmaaaatgactgccttatttcagctatcctcatgatattcctggcatgagatttcacatcttggaagataatgggcagacagttacaatccactgtacatggactatatcacagtatcattaatatatctgtaagcatatctattactcattagtcatcaagacacaagatctgagttgtgtattcccctcactttacttgactgtgttgacacaatcagattggtaactcaaactaattaaaacaaaaattaag

SEQ ID NO: 9299 - DNA, 600 bp, Chicken  19866894204736_2
atcttcagtgttagaagaggtagaccacccaccagtgatggaaatttgaagctatacagaaaccatctctatagaagtgagtttgcaggctggctagtctgtttggacaggaatttttatgctgcaattagcagtgattgtcccagaaaaacattttctttattagttgaacatttttctttttaacattcttctgcctcagaatatttactgaatgttccttgtcctcaaatcctactgaagtcagaaaaatactaaamttactattaatgttaaaataaatgttaaaaatattatgtrgctatgmaaaatgactgccttatttcagctatcctcatgatattcctggcatgagatttcacatcttggaagataatgggcagacagttacaatccactgtacatggactatatcacagtatcattaatatatctgtaagcatatctattactcattagtcatcaagacacaagatctgagttgtgtattcccctcactttacttgactgtgttgacacaatcagattggtaactcaaactaattaaaacaaaaattaagaatcagagaatgcattctagcattacgaataaayaaaagt

SEQ ID NO: 9300 - DNA, 600 bp, Chicken  19866894204736_3
gtgttagaagaggtagaccacccaccagtgatggaaatttgaagctatacagaaaccatctctatagaagtgagtttgcaggctggctagtctgtttggacaggaatttttatgctgcaattagcagtgattgtcccagaaaaacattttctttattagttgaacatttttctttttaacattcttctgcctcagaatatttactgaatgttccttgtcctcaaatcctactgaagtcagaaaaatactaaamttactattaatgttaaaataaatgttaaaaatattatgtrgctatgmaaaatgactgccttatttcagctatcctcatgatattcctggcatgagatttcacatcttggaagataatgggcagacagttacaatccactgtacatggactatatcacagtatcattaatatatctgtaagcatatctattactcattagtcatcaagacacaagatctgagttgtgtattcccctcactttacttgactgtgttgacacaatcagattggtaactcaaactaattaaaacaaaaattaagaatcagagaatgcattctagcattacgaataaayaaaagtaatgtag

SEQ ID NO: 9301 - DNA, 600 bp, Chicken  19866894204736_4
tatgtrgctatgmaaaatgactgccttatttcagctatcctcatgatattcctggcatgagatttcacatcttggaagataatgggcagacagttacaatccactgtacatggactatatcacagtatcattaatatatctgtaagcatatctattactcattagtcatcaagacacaagatctgagttgtgtattcccctcactttacttgactgtgttgacacaatcagattggtaactcaaactaattaaaacaaaaattaagaatcagagaatgcattctagcattacgaataaayaaaagtaatgtagaagcaatgactgaaagtggcttatttaaaaataagcattatatgagactacaaaatcaactcaattataaaatcaacctaattaatatcacagagcactacagctaaagcattagataatttgcctggttaatcagtgtttcagttctcctcatttcatttaatacattttacagatggcaagagtggctttatttcaggtttctgggcatttttgaagggctagtattgttacacatgcactctaatgagtacaacatagagaaacttaataggaaaggagactgg

SEQ ID NO: 9302 - DNA, 600 bp, Chicken  19866894204740_1
tcacaatcacaatcactttttggcaatatctacctttgtgaacaactcttttcaaggatgaagtacaggaagactaaaatttctatagaaatctgatgaacaccttgagagctcactgagaattgcagctacttccatcgaaccagactgctgcattagtttcacaaaagcaagatgaggtcacatatcccactcactttatgtttttgttgctctctttttgttgttgttgttgttgttgttgttttaataaatagatatagaagcaacaaaactttttgcaatatgcattaactatawaacattttatatgtagcccaggacaattcctctttgctcagtgcggcctaggaaagccaaagggttcaagatatgtattgtagaagccgggtcaaggttactttactgctctgcaaggggagagcagatcatctccacgtcacatctctgtgtgcaaagctggtgcaaccagcagcaccaagactgcattttgcacagtatcaaggggggatgttcaaaagcagtgcaatgtcagacaggacttccaatgatagcctcaaagctgttggttgcagtgggaagtgcctccagccttggagt

SEQ ID NO: 9303 - DNA, 600 bp, Chicken  19866894204744_1
agtaaaaacttcggtccaggcttactcagctaaacctcagtgaattaaagagaattcttccttaagcagagaacagttgagcaactggatttgaaaaaattctaagtattggatggaaggattaaagcaaactcccaaaaagctttctgaattgaagaacaaggaaaaagctttaatgaaataaagaggcagagaaaacatcagaataaatcagctttgtattcatatgccatgagaagccttatatggatctggtatttcttgcccacccactttctggtcacatacataagcttcagktttttttcagtcctccctcaaggggaaaggaatatttccacaagaaaacaaaatttagttacacaatccaactctgtattcacctcaagggttattgttttgttttgtttttgcttcctttgtgaatgaggctaaactgccctctggaacatgtaataaaatctttttcttggctgcagggagttgctgactttaagaaaatcccacataatgaaattgaaacacacgagaagagacattcaggcctatatgtgcaattcatttctcttcagtcctcgtaagaaagggaaaaatgtaagt

SEQ ID NO: 9304 - DNA, 587 bp, Chicken  19866894204746_1
acctatttaaacatcactaaaggagtagtggctagcctaaacctcactgattgttggatatgtacagccttactaagagatgtagcaatgaaactccctcagtatgagattccctctaccaattggacactatggggcggagcaggaggtagacgtgtgtgtaaattaaattccaacaataggaaaaaggacctaacttcagtatacaactatagacaggatatatagtatatatagtatttatatagtatatatagtatttttatagtaggatataaagtaatacccttcctaagaacyggaagggacgttttgtaggaggatactcagtgcgccatatttctttcttcaatggaacagctccccctccagggataccaagaacctctgggaaaagggtgaagtggggaaataacccccttatagacagaccctctgggttccatagttttattagatttattcctactctaggagtaagtgaattagaaaaggcaattatcaatatatcagctatcgagaactcaactatggatgctattcttgaattgcagacggaagtatcctctcttagtcaagtaatattg

SEQ ID NO: 9305 - DNA, 599 bp, Chicken  19866894204749_1
  misc_feature (1)..(109): n is any nucleotide
nnnnnnnnnnnnnnnnnnnnnnnnnnnnnnnnnnnnnnnnnnnnnnnnnnnnnnnnnnnnnnnnnnnnnnnnnnnnnnnnnnnnnnnnnnnnnnnnnnnnnnnnnnnnntaggcataactgcaaagcaggtgaccgtttgtcataaagattattactaggtggttaagtacttgaaaggctaccacttgatgcaagaccttccctataaaagcttggctataggtcagtaatttgccaatattcctgggtcaggagaaagcagcttaagattagaaataataatagagcctattaaagcygatggtagaatgccggaagcattctggaggtgttaaaaatttttatkatttaaaataataataataaaaaaaaggcaacacaacacctgtcaggtctaggaggaaaagttgttgcaaatgaagatttgaagagaaacaaaggacttcattaatacaattaatacaaaaggaaagattagcttgaggacaaaaaaataaaaataaaaataaaaaaataggagaggagtcggggagtataaagcyggtagaagaactgtaataatgtcataaagagaaattgaaacaaaatgatgttaaaa

SEQ ID NO: 9306 - DNA, 599 bp, Chicken  19866894204749_2
  misc_feature (1)..(62): n is any nucleotide
nnnnnnnnnnnnnnnnnnnnnnnnnnnnnnnnnnnnnnnnnnnnnnnnnnnnnnnnnnnnnntaggcataactgcaaagcaggtgaccgtttgtcataaagattattactaggtggttaagtacttgaaaggctaccacttgatgcaagaccttccctataaaagcttggctataggtcagtaatttgccaatattcctgggtcaggagaaagcagcttaagattagaaataataatagagcctattaaagcygatggtagaatgccggaagcattctggaggtgttaaaaatttttatkatttaaaataataataataaaaaaaaggcaacacaacacctgtcaggtctaggaggaaaagttgttgcaaatgaagatttgaagagaaacaaaggacttcattaatacaattaatacaaaaggaaagattagcttgaggacaaaaaaataaaaataaaaataaaaaaataggagaggagtcggggagtataaagcyggtagaagaactgtaataatgtcataaagagaaattgaaacaaaatgatgttaaaactattcaaaccaataaggycagtaaggatattccccaaaagttaaga

SEQ ID NO: 9307 - DNA, 600 bp, Chicken  19866894204749_3
cctgggtcaggagaaagcagcttaagattagaaataataatagagcctattaaagcygatggtagaatgccggaagcattctggaggtgttaaaaatttttatkatttaaaataataataataaaaaaaaggcaacacaacacctgtcaggtctaggaggaaaagttgttgcaaatgaagatttgaagagaaacaaaggacttcattaatacaattaatacaaaaggaaagattagcttgaggacaaaaaaataaaaataaaaataaaaaaataggagaggagtcggggagtataaagcyggtagaagaactgtaataatgtcataaagagaaattgaaacaaaatgatgttaaaactattcaaaccaataaggycagtaaggatattccccaaaagttaagatgaaggttttagtggatgcggcagtaagacataattttcacttttgatcatgaatgtggttctggcaagggaagcgataagcagagaacatgaaggggtcgtgcagggagcttgcagcsacaatctcgggctgaattcttcagtcctttggaaatttcactgcttttgtgagaaaacagcaattgtaatttctttct

SEQ ID NO: 9308 - DNA, 600 bp, Chicken  19866894204749_4
gcattctggaggtgttaaaaatttttatkatttaaaataataataataaaaaaaaggcaacacaacacctgtcaggtctaggaggaaaagttgttgcaaatgaagatttgaagagaaacaaaggacttcattaatacaattaatacaaaaggaaagattagcttgaggacaaaaaaataaaaataaaaataaaaaaataggagaggagtcggggagtataaagcyggtagaagaactgtaataatgtcataaagagaaattgaaacaaaatgatgttaaaactattcaaaccaataaggycagtaaggatattccccaaaagttaagatgaaggttttagtggatgcggcagtaagacataattttcacttttgatcatgaatgtggttctggcaagggaagcgataagcagagaacatgaaggggtcgtgcagggagcttgcagcsacaatctcgggctgaattcttcagtcctttggaaatttcactgcttttgtgagaaaacagcaattgtaatttctttcttttttttttttttttctggggcttcgaatgtagtccaagagcttaataaaacaacgtgaaggaaaactcatttgc

SEQ ID NO: 9309 - DNA, 457 bp, Chicken  19866894204749_5
aaaggaaagattagcttgaggacaaaaaaataaaaataaaaataaaaaaataggagaggagtcggggagtataaagcyggtagaagaactgtaataatgtcataaagagaaattgaaacaaaatgatgttaaaactattcaaaccaataaggycagtaaggatattccccaaaagttaagatgaaggttttagtggatgcggcagtaagacataattttcacttttgatcatgaatgtggttctggcaagggaagcgataagcagagaacatgaaggggtcgtgcagggagcttgcagcsacaatctcgggctgaattcttcagtcctttggaaatttcactgcttttgtgagaaaacagcaattgtaatttctttcttttttttttttttttctggggcttcgaatgtagtccaagagcttaataaaacaacgtgaaggaaaactcatttgcttga

SEQ ID NO: 9310 - DNA, 600 bp, Chicken  19866894204750_1
aacataacaatttcatctacacaaatataactgtagtagtacatacttctatagacacagcttaacctcacatgaatggcctcagtacagatatcctgcctatccagacccctctgcagggcctttctaccctcaggcaaagcaacacttcctcccagcttggtgtcatctgcaaacttaccgtgtgcactcaatccccctgtccagatcatcaataaagatattaaacagggccagccctagtaccgctgcctggagaacaccactcctgaccactccattcactaccattctctggaygtggccatgagagccgactccttcacgggagattcacagtcgtaagtgttgaatcacagaatggtttgggttggaagggaccttaaagcccacttagttccaatccccttccatgggcatggacacctctaaccagacctggtgcccaaagcctcatccagccctgcagggatggggcatccacagcttctctcgcagcccgtggcagtgcctcaccactctttaatttattcctatttctcagtaggcatgaaacattaataagcaatcacaactaatgtataaaaacagagagaatct

SEQ ID NO: 9311 - DNA, 600 bp, Chicken  19866894204757_1
caggaaggaaatgttgccttattaccagtgggggccttagcccagagtttcgttttctttacattgtattgtgatctgtgttgaaatctagcttgggatatattgtgcagtacagtgtaaggtgctgagtaaacaaatagagaaaattcattctgaaagacgacgactttttaaaatctaagtctgaagtttagctaataaataatattttccagggcaacagggcacctgtcagtcactgtaagccatttcagaccttcagttgctgctcccagagcaaagtatgccaacggcaattaytggtttaaaactaaccttaaatacctatgtttgaaaatgtttgccaatatattttgcttttattggatattatttagatccaatatattgatcaaagattcaggagttttgtaaaggctcttgaaggagcttatttaaacactttggttcgaagatgtcaattccaaatggtgtggcagtttctgtgtaaagaaatgccaaatgaaatactgcgtgtttgaaagtgtgagtcaaatcccaagtgacctttagctcacataataaggttgctttccaagtgtctctgcttaagagaactca

SEQ ID NO: 9312 - DNA, 600 bp, Chicken  19866894204760_1
ttgtagcaagacatagaattctgcatttcaaattaaattgttgttcagtcagaagaatcttgagatagagaaggagcctttgaaaactgttcctctatgttttgcccattttgatcacgtcacccattttacccaacttgaagtaagtagtctctgtcttttgctgttgtaaaaagtggtccttaggtaaaaacttacttacctctattcagaatgcaagctgtcagttttcttttcgaggttgtttggagaccttgggattgccaaatggtcagaattgctggcttagaaacacagtcyttcaagcatttcatcactatcacctgtctatttcgaaatttcttagctgctrcttaggaacttttagaagtagctgaatattaagctttggacacaataaatccttttgaaaatccagtccgaactgtgggaactgaggttcggaaattctgtccttgtgtatgttcaaatgagtaccccaaattaacagctactttcatcttgttcatgtcaaggcaaaactcccactcacawargttggtccaggatcagacccatatgcatcactccctgctgtaaacagaaagtaagatratatcg

SEQ ID NO: 9313 - DNA, 600 bp, Chicken  19866894204760_2
aagaatcttgagatagagaaggagcctttgaaaactgttcctctatgttttgcccattttgatcacgtcacccattttacccaacttgaagtaagtagtctctgtcttttgctgttgtaaaaagtggtccttaggtaaaaacttacttacctctattcagaatgcaagctgtcagttttcttttcgaggttgtttggagaccttgggattgccaaatggtcagaattgctggcttagaaacacagtcyttcaagcatttcatcactatcacctgtctatttcgaaatttcttagctgctrcttaggaacttttagaagtagctgaatattaagctttggacacaataaatccttttgaaaatccagtccgaactgtgggaactgaggttcggaaattctgtccttgtgtatgttcaaatgagtaccccaaattaacagctactttcatcttgttcatgtcaaggcaaaactcccactcacawargttggtccaggatcagacccatatgcatcactccctgctgtaaacagaaagtaagatratatcgagcctgataactgtcaaacaacaaacacttacaaaagtacaaatatcatatc

SEQ ID NO: 9314 - DNA, 600 bp, Chicken  19866894204760_3
ttcgaggttgtttggagaccttgggattgccaaatggtcagaattgctggcttagaaacacagtcyttcaagcatttcatcactatcacctgtctatttcgaaatttcttagctgctrcttaggaacttttagaagtagctgaatattaagctttggacacaataaatccttttgaaaatccagtccgaactgtgggaactgaggttcggaaattctgtccttgtgtatgttcaaatgagtaccccaaattaacagctactttcatcttgttcatgtcaaggcaaaactcccactcacawargttggtccaggatcagacccatatgcatcactccctgctgtaaacagaaagtaagatratatcgagcctgataactgtcaaacaacaaacacttacaaaagtacaaatatcatatcccttccttcatttctataataaggaaaatgtctattggaattgcagcacttcagaatctgcatgaacactgagcttacgtatcaaatgagttttatgcagtagtctgaagaatagtcacctcttggagagctcatatatttttccttcctgatctccagtctaaagtagtactaactttatt

SEQ ID NO: 9315 - DNA, 600 bp, Chicken  19866894204760_4
cgaggttgtttggagaccttgggattgccaaatggtcagaattgctggcttagaaacacagtcyttcaagcatttcatcactatcacctgtctatttcgaaatttcttagctgctrcttaggaacttttagaagtagctgaatattaagctttggacacaataaatccttttgaaaatccagtccgaactgtgggaactgaggttcggaaattctgtccttgtgtatgttcaaatgagtaccccaaattaacagctactttcatcttgttcatgtcaaggcaaaactcccactcacawargttggtccaggatcagacccatatgcatcactccctgctgtaaacagaaagtaagatratatcgagcctgataactgtcaaacaacaaacacttacaaaagtacaaatatcatatcccttccttcatttctataataaggaaaatgtctattggaattgcagcacttcagaatctgcatgaacactgagcttacgtatcaaatgagttttatgcagtagtctgaagaatagtcacctcttggagagctcatatatttttccttcctgatctccagtctaaagtagtactaactttattgg

SEQ ID NO: 9316 - DNA, 600 bp, Chicken  19866894204760_5
cagtcyttcaagcatttcatcactatcacctgtctatttcgaaatttcttagctgctrcttaggaacttttagaagtagctgaatattaagctttggacacaataaatccttttgaaaatccagtccgaactgtgggaactgaggttcggaaattctgtccttgtgtatgttcaaatgagtaccccaaattaacagctactttcatcttgttcatgtcaaggcaaaactcccactcacawargttggtccaggatcagacccatatgcatcactccctgctgtaaacagaaagtaagatratatcgagcctgataactgtcaaacaacaaacacttacaaaagtacaaatatcatatcccttccttcatttctataataaggaaaatgtctattggaattgcagcacttcagaatctgcatgaacactgagcttacgtatcaaatgagttttatgcagtagtctgaagaatagtcacctcttggagagctcatatatttttccttcctgatctccagtctaaagtagtactaactttattggtatggttcttgtttaatatttttttctttttctgggtagcagttggacttgacagata

SEQ ID NO: 9317 - DNA, 600 bp, Chicken  19866894204763_1
ataattataactcaccaagaaatcagttaaacatataagaagaaataattggttatttttattgttttgaaatgggacacatctatatactttaaagttaaagctttcagaaaaaaaagaaaaaacagacaacaaaaaagctgctttctgaagatttccctggcttttgccacccactctgcagttctttcagcagtcatattctggatttggagagactctcagcagcagcagcagcaaacaagaaaatctgcttctcttggatatggactcctcaaagagtacatagaaaagataaaraaagtacagggagtgatctgtcacccccattttcccacagtaaaacccagcaatgtagttttggtttctttgttctggcaccagtgttcaaaaccatcagccagacattctactaacttcaatgaggcttcgtcacaagtgccagcactgacagagggtaaaccgcaggcaaaaagctctagcacctctgcttaagaggtaattctttgcaaactgaaaccattcaatctttatcattgtttctgaatgcactgggaaatactgttgcataaaacaagataaataaaaacagtgtgcgga

SEQ ID NO: 9318 - DNA, 600 bp, Chicken  19866894204766_1
aataagcaaaatggacatctgagcctgtacttcttaaaagctgggaacagctacctcctgctacttctgtgatacagcccttaagtgctgctctcactactcagaaagagaaccaggaaaacaggaaatgtaataattcaggataaatgaagccagttgcacttaaaataaaaattaagaagtaggtgaagaatcgtgggcagaggagagaaaggggctgtaggcttactgaagcagataaattgaccctctcagctggaatcctgtttcacttgtcttcgaaagatgacacgcagctcyctgtccttcactggctgctttaatctaaggaaagatctgtcgtcccgtcccaccttaccgcatcactgccatctcctcagtaggataaacgctctactttcagaagagactkttggacagaaagcaagtgaagtgtgccagcaactacagaacctctttagcacctcatcgtgtggaaacttctgggaaactagcttagaggctgcagttgaagcagtcagtaggtcaggccagcttttcctatggagcattaataaaatacagttataatatacttataataaaatgggattgaaagaa

SEQ ID NO: 9319 - DNA, 561 bp, Chicken  19866894204766_2
ccaggaaaacaggaaatgtaataattcaggataaatgaagccagttgcacttaaaataaaaattaagaagtaggtgaagaatcgtgggcagaggagagaaaggggctgtaggcttactgaagcagataaattgaccctctcagctggaatcctgtttcacttgtcttcgaaagatgacacgcagctcyctgtccttcactggctgctttaatctaaggaaagatctgtcgtcccgtcccaccttaccgcatcactgccatctcctcagtaggataaacgctctactttcagaagagactkttggacagaaagcaagtgaagtgtgccagcaactacagaacctctttagcacctcatcgtgtggaaacttctgggaaactagcttagaggctgcagttgaagcagtcagtaggtcaggccagcttttcctatggagcattaataaaatacagttataatatacttataataaaatgggattgaaagaagggactgaattcttttcttatgtaacaaaaagtatattgaaaatgaaatacagggagggttttcagttcttcg

SEQ ID NO: 9320 - DNA, 599 bp, Chicken  19866894204768_1
  misc_feature (1)..(14): n is any nucleotide
nnnnnnnnnnnnnnaattatttggaaaaagaagcaggaatcattttttccctgctagccttctcaactgttcttttcccttttgttgaaagcaaggtgattccaataacataaaagcaactatactactactaaaaaaaaaaaaaagacatcactaactgttctttgcttacatttttcctacttttaggcttattcatttaatacaaagagggaaaaaactacaaaggcgctatccaagaaaaaaagcaataaagcaatgttggtgtttttttctgagatttcagtctagatgctgcartagacattcaacaccatttccagctttgagtaagttcactcctcrtttacagaaagcccagcaaattgttccttgataattttaattattggcactctggtcatggatttctaaactgaaccaataatgaggtacacaaagcaagcaaggtacacagaaacaaagatcaaagcaatttcagcaaaatgtacgcctcgctaatacatggggattgtagagttcggtttgactgccacgtattagcaagygtatcagcaacttttaggagctsaattgattattaacatgactttttaacc

SEQ ID NO: 9321 - DNA, 600 bp, Chicken  19866894204768_2
tttccctgctagccttctcaactgttcttttcccttttgttgaaagcaaggtgattccaataacataaaagcaactatactactactaaaaaaaaaaaaaagacatcactaactgttctttgcttacatttttcctacttttaggcttattcatttaatacaaagagggaaaaaactacaaaggcgctatccaagaaaaaaagcaataaagcaatgttggtgtttttttctgagatttcagtctagatgctgcartagacattcaacaccatttccagctttgagtaagttcactcctcrtttacagaaagcccagcaaattgttccttgataattttaattattggcactctggtcatggatttctaaactgaaccaataatgaggtacacaaagcaagcaaggtacacagaaacaaagatcaaagcaatttcagcaaaatgtacgcctcgctaatacatggggattgtagagttcggtttgactgccacgtattagcaagygtatcagcaacttttaggagctsaattgattattaacatgactttttaaccacaagcgagaaagtaaagccacactacagcagaaattttctatgag

SEQ ID NO: 9322 - DNA, 600 bp, Chicken  19866894204768_3
caataaagcaatgttggtgtttttttctgagatttcagtctagatgctgcartagacattcaacaccatttccagctttgagtaagttcactcctcrtttacagaaagcccagcaaattgttccttgataattttaattattggcactctggtcatggatttctaaactgaaccaataatgaggtacacaaagcaagcaaggtacacagaaacaaagatcaaagcaatttcagcaaaatgtacgcctcgctaatacatggggattgtagagttcggtttgactgccacgtattagcaagygtatcagcaacttttaggagctsaattgattattaacatgactttttaaccacaagcgagaaagtaaagccacactacagcagaaattttctatgagtttgacagcggtgattttgagaaatagcttttcgagttcatagcaaagggatttttttttcatgagcagaaaatagttttattcccttatgtcaaataacatttatgtttgaattaatgtaygtgtaacgtgtaccataccacaagatggaaggcatgaagcaaaacatgaccttacagacatggctttatcatcacacagaa

SEQ ID NO: 9323 - DNA, 600 bp, Chicken  19866894204768_4
tttctgagatttcagtctagatgctgcartagacattcaacaccatttccagctttgagtaagttcactcctcrtttacagaaagcccagcaaattgttccttgataattttaattattggcactctggtcatggatttctaaactgaaccaataatgaggtacacaaagcaagcaaggtacacagaaacaaagatcaaagcaatttcagcaaaatgtacgcctcgctaatacatggggattgtagagttcggtttgactgccacgtattagcaagygtatcagcaacttttaggagctsaattgattattaacatgactttttaaccacaagcgagaaagtaaagccacactacagcagaaattttctatgagtttgacagcggtgattttgagaaatagcttttcgagttcatagcaaagggatttttttttcatgagcagaaaatagttttattcccttatgtcaaataacatttatgtttgaattaatgtaygtgtaacgtgtaccataccacaagatggaaggcatgaagcaaaacatgaccttacagacatggctttatcatcacacagaaccgctttataaataatgccgaag

SEQ ID NO: 9324 - DNA, 600 bp, Chicken  19866894204768_5
caaagcaatttcagcaaaatgtacgcctcgctaatacatggggattgtagagttcggtttgactgccacgtattagcaagygtatcagcaacttttaggagctsaattgattattaacatgactttttaaccacaagcgagaaagtaaagccacactacagcagaaattttctatgagtttgacagcggtgattttgagaaatagcttttcgagttcatagcaaagggatttttttttcatgagcagaaaatagttttattcccttatgtcaaataacatttatgtttgaattaatgtaygtgtaacgtgtaccataccacaagatggaaggcatgaagcaaaacatgaccttacagacatggctttatcatcacacagaaccgctttataaataatgccgaagcaaacagtgtataaataacatttctcatattgactgttaaatacactgacagaaccaagcagcagcaaaacgccgcttatcgtaaaaatatccctgcttttattttaaatatataaacaaaattgctatttttgcaaccgtcaaagaattcaggcagctgacttctgatttcatctataaggagcacaaatccata

SEQ ID NO: 9325 - DNA, 600 bp, Chicken  19866894204769_1
ggtatttctagcaaccagaatgtctaccttttctctacagcaatcgatcaagtctgtatttgagactacaaatttttctaagcggaaacaaagcagatagcatcctttagcaggcacaagtccaacaaatgtcaatttctgaacaacattactttgtgtctctatttaacattaaagctgatggctttttgacaggtttatagctgacaacttccatagccagtcatgcagtacaattatgtttgagctaatttgatgaatcaacttgatgttctatagtcccagttggcttcaatagcrtatgtgctcaattttctgctggaggtcagaaataagctttgaaatttggctaatcccatcacatccgcagaacatgtctggtggaataatctttggacatgaagtcttgaataatgccagaaataggaaggaaaacttagtaatttcattagacccatcaatcatgaatcgtgtacgcacagcaatcagggtctcatgtccagcaatttacttgtaagctttaaatgcttaagtggttagggtaggaggagaaacattcctcaagcctggcctttgttctagaggaaaatgggtctcatt

SEQ ID NO: 9326 - DNA, 600 bp, Chicken  19866894204775_1
ccctcctttcctatacatttcaataaccaagttattttctgaatggtttctatgttgctccttcaaccagtgactgtgccacaatggcaaatcaagtaatggaattaaatgcaattaaaatgcacgtttaccttgagtacctttgtagtaggtaaatactcacctgaataggcctgccatgttgccagaatgttattctttggtgagaattcaagacaaactaccttcggaagatcaaaggaacgcagtaatcctgcactggtgacgttaacaatatttactctggaagcaaaagacggygtttcaatgaaacaygcttagaagagataattgccaaggtaacttttcatgtatttggttctgttccagatgtgcccaatggtacaaaamtaaagacctcttttctcctcctgcttttactaaatttttgaaggaatgtattttaaaaccagacccccaagcataacagaaactggcaatgtgaaagcactggttgaagcgtatcctgtacttcaatctgtaacgttttgactcttgagtcagaggcaaggtatgctccatccatggagattccatccatgcttccacagaagaggccaa

SEQ ID NO: 9327 - DNA, 600 bp, Chicken  19866894204775_2
catttcaataaccaagttattttctgaatggtttctatgttgctccttcaaccagtgactgtgccacaatggcaaatcaagtaatggaattaaatgcaattaaaatgcacgtttaccttgagtacctttgtagtaggtaaatactcacctgaataggcctgccatgttgccagaatgttattctttggtgagaattcaagacaaactaccttcggaagatcaaaggaacgcagtaatcctgcactggtgacgttaacaatatttactctggaagcaaaagacggygtttcaatgaaacaygcttagaagagataattgccaaggtaacttttcatgtatttggttctgttccagatgtgcccaatggtacaaaamtaaagacctcttttctcctcctgcttttactaaatttttgaaggaatgtattttaaaaccagacccccaagcataacagaaactggcaatgtgaaagcactggttgaagcgtatcctgtacttcaatctgtaacgttttgactcttgagtcagaggcaaggtatgctccatccatggagattccatccatgcttccacagaagaggccaaagatctaactgaata

SEQ ID NO: 9328 - DNA, 600 bp, Chicken  19866894204775_3
atcaagtaatggaattaaatgcaattaaaatgcacgtttaccttgagtacctttgtagtaggtaaatactcacctgaataggcctgccatgttgccagaatgttattctttggtgagaattcaagacaaactaccttcggaagatcaaaggaacgcagtaatcctgcactggtgacgttaacaatatttactctggaagcaaaagacggygtttcaatgaaacaygcttagaagagataattgccaaggtaacttttcatgtatttggttctgttccagatgtgcccaatggtacaaaamtaaagacctcttttctcctcctgcttttactaaatttttgaaggaatgtattttaaaaccagacccccaagcataacagaaactggcaatgtgaaagcactggttgaagcgtatcctgtacttcaatctgtaacgttttgactcttgagtcagaggcaaggtatgctccatccatggagattccatccatgcttccacagaagaggccaaagatctaactgaatagaaacgtgcaggatgaacgtccatgaacttcattaacagttcaggtgtgatagarcagattttcaaattactttg

SEQ ID NO: 9329 - DNA, 405 bp, Chicken  19866894204775_4
tgtgcccaatggtacaaaamtaaagacctcttttctcctcctgcttttactaaatttttgaaggaatgtattttaaaaccagacccccaagcataacagaaactggcaatgtgaaagcactggttgaagcgtatcctgtacttcaatctgtaacgttttgactcttgagtcagaggcaaggtatgctccatccatggagattccatccatgcttccacagaagaggccaaagatctaactgaatagaaacgtgcaggatgaacgtccatgaacttcattaacagttcaggtgtgatagarcagattttcaaattactttgtaacactttgacaaacatttcacctccacaactaaaaacagcccagcactcgctgactctcagaacatgccatcaggaggaaaaa

SEQ ID NO: 9330 - DNA, 600 bp, Chicken  19866894204784_1
ttctctaaatgttcaggtgacaaaatgatgactagggaaaagtgggccaactactgagcaaggcaggggatatagggaacaggacaggcaaaaggctgagatactgattattttctttgcctcagtctttaccagaaagactgtattcagtaatctcaggacccaaaaatcaagggacaaaggcaggaagacaggaagatgtgcctttagtggaaaaggaacaggttaaggaatactgaacacacagaagtccattggccctggtggggtgctgatgatttttgagggagctgacagatktgattgcaaggccactctataattgcttagttgtagcaattggtagaagtgcctgaagactggaggaaartaaactagttgttactcctgccttgatggagggtaagaagraagactcaggaaactgcaacctgattagccttgcctcgtttgctgggaaggcaatggaatagctaatcctgaaaaccacctcaaagctcatgaagagcaagaagatcatcaggtataatcagcatggattcaccaagaggaaatcatgcttgaacaatctgatcaacttctatgatgtagtaactatcc

SEQ ID NO: 9331 - DNA, 600 bp, Chicken  19866894204784_2
tatagggaacaggacaggcaaaaggctgagatactgattattttctttgcctcagtctttaccagaaagactgtattcagtaatctcaggacccaaaaatcaagggacaaaggcaggaagacaggaagatgtgcctttagtggaaaaggaacaggttaaggaatactgaacacacagaagtccattggccctggtggggtgctgatgatttttgagggagctgacagatktgattgcaaggccactctataattgcttagttgtagcaattggtagaagtgcctgaagactggaggaaartaaactagttgttactcctgccttgatggagggtaagaagraagactcaggaaactgcaacctgattagccttgcctcgtttgctgggaaggcaatggaatagctaatcctgaaaaccacctcaaagctcatgaagagcaagaagatcatcaggtataatcagcatggattcaccaagaggaaatcatgcttgaacaatctgatcaacttctatgatgtagtaactatcctggcagataaggggagaacagtggatattgtctgcctgaatttcattgaggcattggactctgtctccca

SEQ ID NO: 9332 - DNA, 600 bp, Chicken  19866894204784_3
tttctttgcctcagtctttaccagaaagactgtattcagtaatctcaggacccaaaaatcaagggacaaaggcaggaagacaggaagatgtgcctttagtggaaaaggaacaggttaaggaatactgaacacacagaagtccattggccctggtggggtgctgatgatttttgagggagctgacagatktgattgcaaggccactctataattgcttagttgtagcaattggtagaagtgcctgaagactggaggaaartaaactagttgttactcctgccttgatggagggtaagaagraagactcaggaaactgcaacctgattagccttgcctcgtttgctgggaaggcaatggaatagctaatcctgaaaaccacctcaaagctcatgaagagcaagaagatcatcaggtataatcagcatggattcaccaagaggaaatcatgcttgaacaatctgatcaacttctatgatgtagtaactatcctggcagataaggggagaacagtggatattgtctgcctgaatttcattgaggcattggactctgtctcccataagatcttcagggataaactgttgayatatgagctgaatg

SEQ ID NO: 9333 - DNA, 600 bp, Chicken  19866894204784_4
ggagggtaagaagraagactcaggaaactgcaacctgattagccttgcctcgtttgctgggaaggcaatggaatagctaatcctgaaaaccacctcaaagctcatgaagagcaagaagatcatcaggtataatcagcatggattcaccaagaggaaatcatgcttgaacaatctgatcaacttctatgatgtagtaactatcctggcagataaggggagaacagtggatattgtctgcctgaatttcattgaggcattggactctgtctcccataagatcttcagggataaactgttgayatatgagctgaatgagcagatagtgagatggattgaaaactggctgaatggccaagcctaaaggtgcaaattctagttagaggccagtagctagcgaagtaccctaagagccagtactgggcccagtcttgttcaatattttcattaacatcataagtgatggagcagcatgtgtaccacagcaagtctgctgatgacacaaagttggaagaaacctcagtcattctttaggggaagtgtgtgtgtgtgtgtgtgtgtgtgtgtgcatgtgtgtatttttgatttgttttttattttagg

SEQ ID NO: 9334 - DNA, 512 bp, Chicken  19866894204784_5
tgtattgagaacttgaaggaacattgttttattcatacctgtacattcaaaatgcaaaggatgtaacctgatctagtaacagggttagtcacagtgccatgaattataaagccaacatgtgagtttctttggaggtggtggaaactgagtctcttgaatttgatgaactgatatagaaatacagtagtctggactattttataacagcctgtaattcattttgccaaattaattaagattgagataaatttataccttatttttcaaacaagaagcaactgagtactctgtattttctcrtaggctgcctctgaatgtgattcagcctgtgcagatggcctgcacagggatgacacatcagttaagtctcaattagctcctcaatgcagagtttaaatgggattatgtgatacataaaaccttgctgccactgtctgaaaagagatgatttacagcctctaatattaaaggctaacatctaatgatccccaatttaagtattttatcatctt

SEQ ID NO: 9335 - DNA, 600 bp, Chicken  19866894204787_1
tgaacacacaatacctgtaactaccccttcacaggctcattctatcttggcatatgtactgcacagattgggaaggagggctcacttctaatctagtctaatacatcttttgtagtaatgaaagaatattaataaaaaggctttggtctattgtatcttctaggaaaagtattaaaaattgagatacttaatttatcatggcatttgtgcatagttgaagagtagtgtattctgttaaacagatttctttcggaatgcccttgctccctaactgtaattgatctttcctgagtaaattgsaaagataatatttttttcctttattaacatttttttttctttaagtatttttttttcttaaagagtaagagagagatctgttaggttgggctaacaccaagtactacagtcatcttgaaatctctcagagagacaaatgaatcagtactgaaaaaggaaaaaaaaatctaaaaagattagaataaggtgaaagaaaaaagctgtccatattgtgccaaagagttctaacaaaaacaaaagaaacggcacaaaaacagttccatgtatttagagtccacaaatatcttctaccatcatata

SEQ ID NO: 9336 - DNA, 600 bp, Chicken  19866894204794_1
tccttaggatgcactcttgtaagagatgctttctgaaatacagttaatctgtattctaacactttaaaactgataatgacagctgctaaaaacatcatgtagttcagtatcaaccagaatagggctctccttgtaaagaataaagctttgctgtaattctgatcagtgctttcttctctgatgttactgctgctagcaaaatttcattaattgttccccaatagacactctagcagacaagggcaacaatatatgaaatatgaaatttactttagtcattagaaatatcattgtacaaaragtatttctcatctgaaaagaaaataatcaaagaaataatattttagaaggatctttctgcttacacagaacttcattgattttttttttacttcatttaatcaataagaaaatacagattattggaattcattacagtccatgattgtctagcctgtcttscaacaaaataaagagttaagaatcccttgaattaattcctgcttgatctcaactatatctcctaacaatatggtatagatttataaatattcccttgagatggcatatccagtaactaaatgcttactataggcaatt

SEQ ID NO: 9337 - DNA, 600 bp, Chicken  19866894204794_2
tcagtgctttcttctctgatgttactgctgctagcaaaatttcattaattgttccccaatagacactctagcagacaagggcaacaatatatgaaatatgaaatttactttagtcattagaaatatcattgtacaaaragtatttctcatctgaaaagaaaataatcaaagaaataatattttagaaggatctttctgcttacacagaacttcattgattttttttttacttcatttaatcaataagaaaatacagattattggaattcattacagtccatgattgtctagcctgtcttscaacaaaataaagagttaagaatcccttgaattaattcctgcttgatctcaactatatctcctaacaatatggtatagatttataaatattcccttgagatggcatatccagtaactaaatgcttactataggcaattatgttccttcgttgctagtactctgttaatagatttatattccctggaaattgcatattgattaagttagggtcaccccccataaacttgtcttttataagacaaattgttcgggctatatatttcagggaaagctcggtttttcatatctttatcattctc

SEQ ID NO: 9338 - DNA, 600 bp, Chicken  19866894204794_3
actataggcaattatgttccttcgttgctagtactctgttaatagatttatattccctggaaattgcatattgattaagttagggtcaccccccataaacttgtcttttataagacaaattgttcgggctatatatttcagggaaagctcggtttttcatatctttatcattctcaaggctcttctctcaaccctgtccagtttctcagcattctttctgaactgcagatactgaaccctgtctttcagcagcaatcattctactctcaaatatggaatatactcatttaacacctcccragtgtgtgtcttcctctatatytgaaagttttttgcctcaagttgaaggaagttggctcttccagtccgctgacaaaaaatcataagatatgtgtagaaaagggcctatttctttaggagacataacaatgcagatcttgctacgtgccttctagaactgtaaaccatctgtgttgtgttgttttttttgtttgtttgtttgtttttctttttgaatacggtaacaatgttgcctttcttcttttrtggaaattttgcaatgctccagatcttttgaaagctgataacaatgttcagtag

SEQ ID NO: 9339 - DNA, 600 bp, Chicken  19866894204794_4
cgttgctagtactctgttaatagatttatattccctggaaattgcatattgattaagttagggtcaccccccataaacttgtcttttataagacaaattgttcgggctatatatttcagggaaagctcggtttttcatatctttatcattctcaaggctcttctctcaaccctgtccagtttctcagcattctttctgaactgcagatactgaaccctgtctttcagcagcaatcattctactctcaaatatggaatatactcatttaacacctcccragtgtgtgtcttcctctatatytgaaagttttttgcctcaagttgaaggaagttggctcttccagtccgctgacaaaaaatcataagatatgtgtagaaaagggcctatttctttaggagacataacaatgcagatcttgctacgtgccttctagaactgtaaaccatctgtgttgtgttgttttttttgtttgtttgtttgtttttctttttgaatacggtaacaatgttgcctttcttcttttrtggaaattttgcaatgctccagatcttttgaaagctgataacaatgttcagtagagctgctttatgtgggtataaa

SEQ ID NO: 9340 - DNA, 600 bp, Chicken  19866894204794_5
ttctctcaaccctgtccagtttctcagcattctttctgaactgcagatactgaaccctgtctttcagcagcaatcattctactctcaaatatggaatatactcatttaacacctcccragtgtgtgtcttcctctatatytgaaagttttttgcctcaagttgaaggaagttggctcttccagtccgctgacaaaaaatcataagatatgtgtagaaaagggcctatttctttaggagacataacaatgcagatcttgctacgtgccttctagaactgtaaaccatctgtgttgtgttgytttttttgtttgtttgtttgtttttctttttgaatacggtaacaatgttgcctttcttcttttrtggaaattttgcaatgctccagatcttttgaaagctgataacaatgttcagtagagctgctttatgtgggtataaaatgtctagtagttgtatcttatgtttattttatttctcccatcaatctaaaaagcagaagttattggtaagtagcattcaggtttggaaaatgcacttaaaattacatcagctcacttctaaaagrctaaagctatattcagcagctgggtggattaata

SEQ ID NO: 9341 - DNA, 600 bp, Chicken  19866894204794_6
cagcagcaatcattctactctcaaatatggaatatactcatttaacacctcccragtgtgtgtcttcctctatatytgaaagttttttgcctcaagttgaaggaagttggctcttccagtccgctgacaaaaaatcataagatatgtgtagaaaagggcctatttctttaggagacataacaatgcagatcttgctacgtgccttctagaactgtaaaccatctgtgttgtgttgttttttttgtttgtttgtttgtttttctttttgaatacggtaacaatgttgcctttcttcttttrtggaaattttgcaatgctccagatcttttgaaagctgataacaatgttcagtagagctgctttatgtgggtataaaatgtctagtagttgtatcttatgtttattttatttctcccatcaatctaaaaagcagaagttattggtaagtagcattcaggtttggaaaatgcacttaaaattacatcagctcacttctaaaagrctaaagctatattcagcagctgggtggattaatacagatcatttaaacaggtgaaactgatattagctctcagtccacagagataaagggcctagagt

SEQ ID NO: 9342 - DNA, 600 bp, Chicken  19866894204794_7
cttctagaactgtaaaccatctgtgttgtgttgttttttttgtttgtttgtttgtttttctttttgaatacggtaacaatgttgcctttcttcttttrtggaaattttgcaatgctccagatcttttgaaagctgataacaatgttcagtagagctgctttatgtgggtataaaatgtctagtagttgtatcttatgtttattttatttctcccatcaatctaaaaagcagaagttattggtaagtagcattcaggtttggaaaatgcacttaaaattacatcagctcacttctaaaagrctaaagctatattcagcagctgggtggattaatacagatcatttaaacaggtgaaactgatattagctctcagtccacagagataaagggcctagagtgtagakgacggtttaaactaaaacaaggtccttctttgaagtcttctgattttttcttttccaccaagctgctaagaaatggtacaagtattgagtagatgtgagtttacagcctttttaaatgtacatcttaaatttttctagtagcaatgaattctcatcatttaaagcatcagttaaataaggcagttatttgtggtac

SEQ ID NO: 9343 - DNA, 600 bp, Chicken  19866894204794_8
ttttgcaatgctccagatcttttgaaagctgataacaatgttcagtagagctgctttatgtgggtataaaatgtctagtagttgtatcttatgtttattttatttctcccatcaatctaaaaagcagaagttattggtaagtagcattcaggtttggaaaatgcacttaaaattacatcagctcacttctaaaagrctaaagctatattcagcagctgggtggattaatacagatcatttaaacaggtgaaactgatattagctctcagtccacagagataaagggcctagagtgtagakgacggtttaaactaaaacaaggtccttctttgaagtcttctgattttttcttttccaccaagctgctaagaaatggtacaagtattgagtagatgtgagtttacagcctttttaaatgtacatcttaaatttttctagtagcaatgaattctcatcatttaaagcatcagttaaataaggcagttatttgtggtactaagaggattaaattcctatcttttccatgtcagtcattttaaaaccctttttattatcaagatggcttacttcctcacacacatttaatttcaaacatcttaa

SEQ ID NO: 9344 - DNA, 600 bp, Chicken  19866894204803_1
catcattagggcaaggttcaggcaggatgttaagtaattcagctcagaggcagagctgacaacagctgtgggttcctatatggtatatgtctcagtgctttgggccagcaccactcagcagaaaggacctggagtttcgggccagtctcatgacatgtgctttgtattgttcctgagaactaggttctatttactttcattcttctgctccttaaacccataagcaacagatgcacaagaggacaggctcaaactctcaagcaaagagtaggtattttctgctttggcatggtgaagacrtatagcaaagtmattgcccaacttagaatggcttgtagctgtagtttctagaaattactacttgctagaagtgacataaattgcaacataagcaatatatatgtaaggttggaggggcattaagtcctayagagcccagtcctacttgcaccacacatttagtggcgtccatcagtgttgtccatgagtgctgtttcacatagaaagttgattctcttcacacagggctgcagaggcagaacaaacagatatttggactcttgtttccttttcagtgaccttttcaacagtcgccaccac

SEQ ID NO: 9345 - DNA, 600 bp, Chicken  19866894204803_2
aaggttcaggcaggatgttaagtaattcagctcagaggcagagctgacaacagctgtgggttcctatatggtatatgtctcagtgctttgggccagcaccactcagcagaaaggacctggagtttcgggccagtctcatgacatgtgctttgtattgttcctgagaactaggttctatttactttcattcttctgctccttaaacccataagcaacagatgcacaagaggacaggctcaaactctcaagcaaagagtaggtattttctgctttggcatggtgaagacrtatagcaaagtmattgcccaacttagaatggcttgtagctgtagtttctagaaattactacttgctagaagtgacataaattgcaacataagcaatatatatgtaaggttggaggggcattaagtcctayagagcccagtcctacttgcaccacacatttagtggcgtccatcagtgttgtccatgagtgctgtttcacatagaaagttgattctcttcacacagggctgcagaggcagaacaaacagatatttggactcttgtttccttttcagtgaccttttcaacagtcgccaccactaccctgctaaa

SEQ ID NO: 9346 - DNA, 582 bp, Chicken  19866894204803_3
ggagtttcgggccagtctcatgacatgtgctttgtattgttcctgagaactaggttctatttactttcattcttctgctccttaaacccataagcaacagatgcacaagaggacaggctcaaactctcaagcaaagagtaggtattttctgctttggcatggtgaagacrtatagcaaagtmattgcccaacttagaatggcttgtagctgtagtttctagaaattactacttgctagaagtgacataaattgcaacataagcaatatatatgtaaggttggaggggcattaagtcctayagagcccagtcctacttgcaccacacatttagtggcgtccatcagtgttgtccatgagtgctgtttcacatagaaagttgattctcttcacacagggctgcagaggcagaacaaacagatatttggactcttgtttccttttcagtgaccttttcaacagtcgccaccactaccctgctaaataatgtgatctttagaaagggtacattaaaagtaataaatctgaacaagccatggcctcaaaaatacaagtagaaagctgagaatagtactgggctttca

SEQ ID NO: 9347 - DNA, 600 bp, Chicken  19866894204806_1
gttactgaaacattttctgttgttgttacttcagagccaaggcttttttacaggccaaaatgctaagttagtagaaaaagtcttacaaatatacgtgaaaaactacaaaatgtaggcagagatgcttaattcctcacagaatgtatatatcttccaatagtggcaaatcctcaggctcaaataagacgaagcatctattttaaggcatacctcaagcttaaaacgtcagtgataaacttcttgttttgtgaaacttaactttcttaacacaaacttctttgatattttctaagtgtgtaygtgttcttggacaaataacattcttttatgggtaccctttatacacatagataatagagagagaaggaagcagcagaaacccttaagtttgaaaggtggtttccattcctcattgaagaaactgcaataaaaatatgagatttatgattcaatttgctcctccattaagcagaagacattgcaagtgtcagccagtgtctgtaaggatttcagtactggttctgcctagtggctcattaaaacctgataaaaaaccagcactctggcttaaagctaaacctgctgctgttraaaatgaag

SEQ ID NO: 9348 - DNA, 600 bp, Chicken  19866894204806_2
ttactgaaacattttctgttgttgttacttcagagccaaggcttttttacaggccaaaatgctaagttagtagaaaaagtcttacaaatatacgtgaaaaactacaaaatgtaggcagagatgcttaattcctcacagaatgtatatatcttccaatagtggcaaatcctcaggctcaaataagacgaagcatctattttaaggcatacctcaagcttaaaacgtcagtgataaacttcttgttttgtgaaacttaactttcttaacacaaacttctttgatattttctaagtgtgtatytgttcttggacaaataacattcttttatgggtaccctttatacacatagataatagagagagaaggaagcagcagaaacccttaagtttgaaaggtggtttccattcctcattgaagaaactgcaataaaaatatgagatttatgattcaatttgctcctccattaagcagaagacattgcaagtgtcagccagtgtctgtaaggatttcagtactggttctgcctagtggctcattaaaacctgataaaaaaccagcactctggcttaaagctaaacctgctgctgttraaaatgaagt

SEQ ID NO: 9349 - DNA, 575 bp, Chicken  19866894204806_3
agtgtgtatgtgttcttggacaaataacattcttttatgggtaccctttatacacatagataatagagagagaaggaagcagcagaaacccttaagtttgaaaggtggtttccattcctcattgaagaaactgcaataaaaatatgagatttatgattcaatttgctcctccattaagcagaagacattgcaagtgtcagccagtgtctgtaaggatttcagtactggttctgcctagtggctcattaaaacctgataaaaaaccagcactctggcttaaagctaaacctgctgctgttraaaatgaagtgtgctgcyatatttttataaattagaatatgtatttgggtgtgtgcgcaatactgaaaatgttagaaacaccacagtggaaaatctgttagggcagttgtgcakaatacacagtgaagtacaatgctcagtattttgcttcacctagtgaacctgtctagggaaaggtgtgatatttgacacatctctgggggcagattcaatgaagaatgcattgtcctctgccatagcctcacacctcacttccacagcctatattctatctg

SEQ ID NO: 9350 - DNA, 557 bp, Chicken  19866894204806_4
gacaaataacattcttttatgggtaccctttatacacatagataatagagagagaaggaagcagcagaaacccttaagtttgaaaggtggtttccattcctcattgaagaaactgcaataaaaatatgagatttatgattcaatttgctcctccattaagcagaagacattgcaagtgtcagccagtgtctgtaaggatttcagtactggttctgcctagtggctcattaaaacctgataaaaaaccagcactctggcttaaagctaaacctgctgctgttraaaatgaagtgtgctgcyatatttttataaattagaatatgtatttgggtgtgtgcgcaatactgaaaatgttagaaacaccacagtggaaaatctgttagggcagttgtgcakaatacacagtgaagtacaatgctcagtattttgcttcacctagtgaacctgtctagggaaaggtgtgatatttgacacatctctgggggcagattcaatgaagaatgcattgtcctctgccatagcctcacacctcacttccacagcctatattctatctg

SEQ ID NO: 9351 - DNA, 461 bp, Chicken  19866894204806_5
ttcctcattgaagaaactgcaataaaaatatgagatttatgattcaatttgctcctccattaagcagaagacattgcaagtgtcagccagtgtctgtaaggatttcagtactggttctgcctagtggctcattaaaacctgataaaaaaccagcactctggcttaaagctaaacctgctgctgttraaaatgaagtgtgctgcyatatttttataaattagaatatgtatttgggtgtgtgcgcaatactgaaaatgttagaaacaccacagtggaaaatctgttagggcagttgtgcakaatacacagtgaagtacaatgctcagtattttgcttcacctagtgaacctgtctagggaaaggtgtgatatttgacacatctctgggggcagattcaatgaagaatgcattgtcctctgccatagcctcacacctcacttccacagcctatattctatctg

SEQ ID NO: 9352 - DNA, 600 bp, Chicken  19866894204809_1
gtaatttttttagtgttcatggggaatatacctatcattcagcagcattttaaaatacaatttaaggtgccgctttgatcagaagctttccaacgctgtaatttgtctagcaaactgaagcttgtattgcagtaggtgatgagcatcagtgatgcgttttatttctgtgcaggttgttcagcaggttggtgcagggcgcctggctgcattctgctcctagcacccgtttctagcagtctccacagcccctacctcacaaatgccttgtgcatatgcagaagttaccttaatactaagcaytcatttactatgggaaagctctaagtgcatcttgagggatctgaactcgattgaaaggatgaagacattcagcatctatttgtgcactttgcctgcagactgtggagcgagccaygttgggctgagtccactgctcactttgtgacttctttaattctgtttttggatctgttccctttgcactccatcacccccacaagaaaacataccagatagcgaacttggcttttgtgtgtgtttgcactcagctatgctgagtctttcttcctgcggctacttcactgggagatgctaaatatt

SEQ ID NO: 9353 - DNA, 600 bp, Chicken  19866894204809_2
tgaagcttgtattgcagtaggtgatgagcatcagtgatgcgttttatttctgtgcaggttgttcagcaggttggtgcagggcgcctggctgcattctgctcctagcacccgtttctagcagtctccacagcccctacctcacaaatgccttgtgcatatgcagaagttaccttaatactaagcaytcatttactatgggaaagctctaagtgcatcttgagggatctgaactcgattgaaaggatgaagacattcagcatctatttgtgcactttgcctgcagactgtggagcgagccaygttgggctgagtccactgctcactttgtgacttctttaattctgtttttggatctgttccctttgcactccatcacccccacaagaaaacataccagatagcgaacttggcttttgtgtgtgtttgcactcagctatgctgagtctttcttcctgcggctacttcactgggagatgctaaatattgctgtccttttgctttggttcccagtgccaggcgagctgcagcgcagcaagaactccttatttggctcagatgatgcatttcaagtcaccttgcttttcagtttgtgcactttct

SEQ ID NO: 9354 - DNA, 544 bp, Chicken  19866894204809_3
tggatctgttccctttgcactccatcacccccacaagaaaacataccagatagcgaacttggcttttgtgtgtgtttgcactcagctatgctgagtctttcttcctgcggctacttcactgggagatgctaaatattgctgtccttttgctttggttcccagtgccaggcgagctgcagcgcagcaagaactccttatttggctcagatgatgcatttcaagtcaccttgcttttcagtttgtgcactttctccttgtcattagcagtctgcactgcgccaaccttcggagctgtcaccrttgagactgggcacagtggtgatggcaaatctgggcagtggcagcactcaagggtatcccccatagcagctgactgcagggtgagaaaggtgtgcacagccacagcagcacaactcaacttaargaaggcatattccagttttgaaaggctattttaataattgatgcagttggttttaattaatcatctaaaccaataattaaaaatctatatgattaaatacttggcagcttggtggtgggg

SEQ ID NO: 9355 - DNA, 420 bp, Chicken  19866894204809_4
gatgctaaatattgctgtccttttgctttggttcccagtgccaggcgagctgcagcgcagcaagaactccttatttggctcagatgatgcatttcaagtcaccttgcttttcagtttgtgcactttctccttgtcattagcagtctgcactgcgccaaccttcggagctgtcaccrttgagactgggcacagtggtgatggcaaatctgggcagtggcagcactcaagggtatcccccatagcagctgactgcagggtgagaaaggtgtgcacagccacagcagcacaactcaacttaargaaggcatattccagttttgaaaggctattttaataattgatgcagttggttttaattaatcatctaaaccaataattaaaaatctatatgattaaatacttggcagcttggtggtgggg

SEQ ID NO: 9356 - DNA, 600 bp, Chicken  19866894204810_1
cagtccctcaaacagcagtgttctgaagttgccatgccagcacacaaaataatcatgagttaaaatacttctgtttctctaaggaaatgtttaaatccttccatatttccacaggcactacagattaggatatacatatatatgtatatatatatatatgtgtgtgtgtgtgtgtgtgtgccactgaaaagcaaagctaagagtcttcagaaagctcccagcagcctcaacttgcaaggaagagcaatgttcaggtcaaacaattatcagcagaaataacaaccttctctctcatacaaytcgagaagtaaaatgaaagagaggttaagtggttactgatagctttgttttcaattacagcatgtaattaatataaccatccaacaaagcttctgtgaagaggcacagcctgccttcatgctccatgcctggcacacacagtttctacttgctggttctcattctagtgggcagagctgccctgcttgtatggcaatgttatcaggaaatatggccactaayagcaccacttccgtgccttcttatagaaaggcagcacaaaagatgggtaggaaatattcttaggggcacaactgtact

SEQ ID NO: 9357 - DNA, 600 bp, Chicken  19866894204810_2
agcctcaacttgcaaggaagagcaatgttcaggtcaaacaattatcagcagaaataacaaccttctctctcatacaaytcgagaagtaaaatgaaagagaggttaagtggttactgatagctttgttttcaattacagcatgtaattaatataaccatccaacaaagcttctgtgaagaggcacagcctgccttcatgctccatgcctggcacacacagtttctacttgctggttctcattctagtgggcagagctgccctgcttgtatggcaatgttatcaggaaatatggccactaayagcaccacttccgtgccttcttatagaaaggcagcacaaaagatgggtaggaaatattcttaggggcacaactgtactgagacaagactcactgaccagaggatcccagttacaaagctcacagtttgggtctggacttgatgcaaacccaaatgtcagtaagactaggcactgctcatggcatctgcaggatttctagggatacatgacttgaaactcaacaaaacaattaaatgatttatgtagcaacagttttaccagccttgcacccaccctccttttgaacttatctcagagacc

SEQ ID NO: 9358 - DNA, 600 bp, Chicken  19866894204818_1
ctcttagcttgataggccaccataaaattttaaacgtagggtatgaatgaagttacttgcactggtttcattgtatgcttgcggtagtagaaagcacggatgtgccaaggattgtcagaggaaaagacaaaaaaaaatggtataagatgtcactaacgtttttgcaaacatattttggaggaaagtttgcataatgatccttctgcatgagtgctatgaaatatttctcatcttggtggggcagtgggaggagtctgcagttaatgtgagttgctgtaacctacttgtagctgatgggaktagggcagcatagctcctttcagagtgtgtgcctttaaactttcttttctctctgtaagctgttactacattgttctgtttgaattaataacaagaccccattaattttaattagctctgctaacgagttacttccaaagtgctacaaaatgatctgtaattcagcatctgatttatctcctaccttgggtatttcatcttttccgaaaattcttctgctgcagatcggtgaagacatttgatctgtctygatttgagcttgtttacgtctacgtttgttagagtagctcatcagctgct

SEQ ID NO: 9359 - DNA, 600 bp, Chicken  19866894204818_2
gagtctgcagttaatgtgagttgctgtaacctacttgtagctgatgggaktagggcagcatagctcctttcagagtgtgtgcctttaaactttcttttctctctgtaagctgttactacattgttctgtttgaattaataacaagaccccattaattttaattagctctgctaacgagttacttccaaagtgctacaaaatgatctgtaattcagcatctgatttatctcctaccttgggtatttcatcttttccgaaaattcttctgctgcagatcggtgaagacatttgatctgtctygatttgagcttgtttacgtctacgtttgttagagtagctcatcagctgctattcctttagcaaataactcctgtgatgttaattgtgttttatggatttgggtcacatcttagcgtttgtgtttaggctgaagaagcaggtagaggctgaagtctgctgaatgctgagtgttctcaataagtgggacagcagagcacttagttgtaatgttcgtgttgtaggacctgaatggtttctgtggctttgtaacctgtgggttgggttgggtctgccagccccagaagcctttgcatgctggag

SEQ ID NO: 9360 - DNA, 600 bp, Chicken  19866894204819_1
gttacattaaaacttctgccagaatgtgttggtgtattttgatgtagaagacaaatgcagtctaaagcttacgtcttacagttaaatacatatatgatggacttgtgatctatgttgttttagctgcaggtaacaatttacctgcttcatcttattcttaatgagtaaggctattactgataaaatgttctcttaacagaaaacatgctaagtattctcttagattgttttcccttgtgctcttcagtataaattgcaataccagaagctgctgtagtatgatccacacccaaaggtggycaaatgccagagcagttatttggcccatctaattccatacattgattcctgtggttctgtaattttatatatatatattaaaaaaaatacaaaatacaaaataaaaaattaacactccctgcctatcactgacttgaaaggataatgcccagcaagttttatttgaccttagttttgatttccgcatctttattctcccatcctttctttgtcctgctccttagcagtaaaggtcatctgcaacaatttgttctagaggccaggaacaaatgaattttgtaaagcattgtcagcacctgt

SEQ ID NO: 9361 - DNA, 599 bp, Chicken  19866894204830_1
  misc_feature (1)..(166): n is any nucleotide
nnnnnnnnnnnnnnnnnnnnnnnnnnnnnnnnnnnnnnnnnnnnnnnnnnnnnnnnnnnnnnnnnnnnnnnnnnnnnnnnnnnnnnnnnnnnnnnnnnnnnnnnnnnnnnnnnnnnnnnnnnnnnnnnnnnnnnnnnnnnnnnnnnnnnnnnnnnnnnnnnnnnnngacctgctatcactacagcctgcaggcacttgctggagtaagaaaggaaggaggaggaaggagctgggaaagcaacagctccagcctccacctgtcctgctaccttatcctcttccaagtggctgctggtatcrtggtaacacggtgcacagcagcragaggatgggcaccrctgccccacataaggcttcagttgttggtgattatgaacagacatcgtgtgctagcttaaatagaagatactaccttcacaagatgcatcttgagratttggtgttagtaattcaaaattcaggggccaaatttaatgcaaatttcatctttctttaaatttggcaaacaccacacatattgccaagaatgagacmagcaactcatctatgcatgactgcaattggaggttaagctgggaggagagtcaagggagcacgga

SEQ ID NO: 9362 - DNA, 599 bp, Chicken  19866894204830_2
  misc_feature (1)..(143): n is any nucleotide
nnnnnnnnnnnnnnnnnnnnnnnnnnnnnnnnnnnnnnnnnnnnnnnnnnnnnnnnnnnnnnnnnnnnnnnnnnnnnnnnnnnnnnnnnnnnnnnnnnnnnnnnnnnnnnnnnnnnnnnnnnnnnnnnnnnnnnnnnnnnnnngacctgctatcactacagcctgcaggcacttgctggagtaagaaaggaaggaggaggaaggagctgggaaagcaacagctccagcctccacctgtcctgctaccttatcctcttccaagtggctgctggtatcrtggtaacacggtgcacagcagcragaggatgggcaccrctgccccacataaggcttcagttgttggtgattatgaacagacatcgtgtgctagcttaaatagaagatactaccttcacaagatgcatcttgagratttggtgttagtaattcaaaattcaggggccaaatttaatgcaaatttcatctttctttaaatttggcaaacaccacacatattgccaagaatgagacmagcaactcatctatgcatgactgcaattggaggttaagctgggaggagagtcaagggagcacggaggtctcaacagctgatgcagccc

SEQ ID NO: 9363 - DNA, 599 bp, Chicken  19866894204830_3
  misc_feature (1)..(128): n is any nucleotide
nnnnnnnnnnnnnnnnnnnnnnnnnnnnnnnnnnnnnnnnnnnnnnnnnnnnnnnnnnnnnnnnnnnnnnnnnnnnnnnnnnnnnnnnnnnnnnnnnnnnnnnnnnnnnnnnnnnnnnnnnnnnnnnngacctgctatcactacagcctgcaggcacttgctggagtaagaaaggaaggaggaggaaggagctgggaaagcaacagctccagcctccacctgtcctgctaccttatcctcttccaagtggctgctggtatcrtggtaacacggtgcacagcagcragaggatgggcaccrctgccccacataaggcttcagttgttggtgattatgaacagacatcgtgtgctagcttaaatagaagatactaccttcacaagatgcatcttgagratttggtgttagtaattcaaaattcaggggccaaatttaatgcaaatttcatctttctttaaatttggcaaacaccacacatattgccaagaatgagacmagcaactcatctatgcatgactgcaattggaggttaagctgggaggagagtcaagggagcacggaggtctcaacagctgatgcagcccttccaaatcaatgtg

SEQ ID NO: 9364 - DNA, 599 bp, Chicken  19866894204830_4
  misc_feature (1)..(32): n is any nucleotide
nnnnnnnnnnnnnnnnnnnnnnnnnnnnnnnngacctgctatcactacagcctgcaggcacttgctggagtaagaaaggaaggaggaggaaggagctgggaaagcaacagctccagcctccacctgtcctgctaccttatcctcttccaagtggctgctggtatcrtggtaacacggtgcacagcagcragaggatgggcaccrctgccccacataaggcttcagttgttggtgattatgaacagacatcgtgtgctagcttaaatagaagatactaccttcacaagatgcatcttgagratttggtgttagtaattcaaaattcaggggccaaatttaatgcaaatttcatctttctttaaatttggcaaacaccacacatattgccaagaatgagacmagcaactcatctatgcatgactgcaattggaggttaagctgggaggagagtcaagggagcacggaggtctcaacagctgatgcagcccttccaaatcaatgtgctctgactgcagcttgcccttacttcttactgatttcacctcctcccctacattaatacaccaactgaggacaygggctgtgctcctgctcaccca

SEQ ID NO: 9365 - DNA, 600 bp, Chicken  19866894204830_5
aaagcaacagctccagcctccacctgtcctgctaccttatcctcttccaagtggctgctggtatcrtggtaacacggtgcacagcagcragaggatgggcaccrctgccccacataaggcttcagttgttggtgattatgaacagacatcgtgtgctagcttaaatagaagatactaccttcacaagatgcatcttgagratttggtgttagtaattcaaaattcaggggccaaatttaatgcaaatttcatctttctttaaatttggcaaacaccacacatattgccaagaatgagacmagcaactcatctatgcatgactgcaattggaggttaagctgggaggagagtcaagggagcacggaggtctcaacagctgatgcagcccttccaaatcaatgtgctctgactgcagcttgcccttacttcttactgatttcacctcctcccctacattaatacaccaactgaggacaygggctgtgctcctgctcacccagcatgtgggattagcagcagctggaagccagagtcctacattgtttcatcactcacgcatttggatgggatccagatgcagcctcatccagagcctgacct

SEQ ID NO: 9366 - DNA, 600 bp, Chicken  19866894204830_6
ccttcacaagatgcatcttgagratttggtgttagtaattcaaaattcaggggccaaatttaatgcaaatttcatctttctttaaatttggcaaacaccacacatattgccaagaatgagacmagcaactcatctatgcatgactgcaattggaggttaagctgggaggagagtcaagggagcacggaggtctcaacagctgatgcagcccttccaaatcaatgtgctctgactgcagcttgcccttacttcttactgatttcacctcctcccctacattaatacaccaactgaggacaygggctgtgctcctgctcacccagcatgtgggattagcagcagctggaagccagagtcctacattgtttcatcactcacgcatttggatgggatccagatgcagcctcatccagagcctgacctctccctcccctcttggtgctacagaatgtgcagatttgcagctaacctacatggactggacccagctgcagaaagaaaactccaaaaactgtggaggacccacactccttgcacccacacagatgaagaagtgctctgagatcagaaagcctcataatagtgaggctacaactacat

SEQ ID NO: 9367 - DNA, 600 bp, Chicken  19866894204838_1
tctgaactttaaaaatatatttttaaagataaatttgtttttatatacgtaaagtactgaaatacacacaaaaataacacaagagtatgcaatgaaaacaactttgcagaacagaaatcatgcatgtcgcagatcatattagtgctaaggctttaatttctttcttcattacctaataagaaaagaacagaaaaaaaaaacctattagtaaagcagaaataaaactgatgaacactttctacttttccacaaaatgagtaaagaattcgtaatgacatccaactgttagtcacagttagyaaacagtgtgctgcctctctcacaatgccttgttatcccctttagcttcagatgcatcatcacgcatccaaactgcagagtagcacatagactcttacggatctatacagtagaatcatagaatggcttgggttggaagggacctcaaggatcatgaagttccaaccacaggcagggctgccaacctccacatttaataccagaccaggctgcccagggcctcatccaacctggccttgaacactgtcagggatggggcatccacaacctctctgtgcagcctgttccagcacctcacca

SEQ ID NO: 9368 - DNA, 599 bp, Chicken  19866894204841_1
  misc_feature (1)..(209): n is any nucleotide
nnnnnnnnnnnnnnnnnnnnnnnnnnnnnnnnnnnnnnnnnnnnnnnnnnnnnnnnnnnnnnnnnnnnnnnnnnnnnnnnnnnnnnnnnnnnnnnnnnnnnnnnnnnnnnnnnnnnnnnnnnnnnnnnnnnnnnnnnnnnnnnnnnnnnnnnnnnnnnnnnnnnnnnnnnnnnnnnnnnnnnnnnnnnnnnnnnnnnnnnnnnnnnnnnatacttggcagaaatctacgctgcctttttgctatgaaggagaacatccatactggccaacttgtgcacacgagcagctttgtgggtattwaatttctcatgtttctattacaagccgagctttttccttgtacttcatgggacagacttattttgcagaagactcttcctgaagacttattttcttacccttaagaacattatcttaaacataayaccagaattaaggctcaagtgcttgtcaaggatgggcataaagccttgcaattccttcctgaagccttttcaagtaagtgtttttgtctgcataagtaggcagtataatcattaacagcataatggcatgctaagggagctgatatgctataaagaagaacaaaaaagaaaccc

SEQ ID NO: 9369 - DNA, 599 bp, Chicken  19866894204841_2
  misc_feature (1)..(84): n is any nucleotide
nnnnnnnnnnnnnnnnnnnnnnnnnnnnnnnnnnnnnnnnnnnnnnnnnnnnnnnnnnnnnnnnnnnnnnnnnnnnnnnnnnnnatacttggcagaaatctacgctgcctttttgctatgaaggagaacatccatactggccaacttgtgcacacgagcagctttgtgggtattwaatttctcatgtttctattacaagccgagctttttccttgtacttcatgggacagacttattttgcagaagactcttcctgaagacttattttcttacccttaagaacattatcttaaacataayaccagaattaaggctcaagtgcttgtcaaggatgggcataaagccttgcaattccttcctgaagccttttcaagtaagtgtttttgtctgcataagtaggcagtataatcattaacagcataatggcatgctaagggagctgatatgctataaagaagaacaaaaaagaaaccctcatgattacaagggtatctttttcatcaagctgcttttacaggagatgagtggttgagttcaagcactttccttatattgttataaagcagtctgctcaactggttggctctgctaaaatcata

SEQ ID NO: 9370 - DNA, 600 bp, Chicken  19866894204841_3
attccttcctgaagccttttcaagtaagtgtttttgtctgcataagtaggcagtataatcattaacagcataatggcatgctaagggagctgatatgctataaagaagaacaaaaaagaaaccctcatgattacaagggtatctttttcatcaagctgcttttacaggagatgagtggttgagttcaagcactttccttatattgttataaagcagtctgctcaactggttggctctgctaaaatcatagctgcaatacagatgaattatttacttattactatgctgtctgctgtaaaygttcagttgcttactcattattctttttttccatctcattatttccaaacaaagaagacaagtttcattttgccttcacttcagccatcagaaaaaaagcacagagcatctcttggagaacacacacatctgcttagggaagtattactgagattattaaagcaatgaggcaatagattttttgtttcgtaatattacaagcatactgctgcagagagtgcttgaagcagtgaccagtatagagctccaagtcttccatgaggtgtgctattgaatgcttagacagagcagaaagatgta

SEQ ID NO: 9371 - DNA, 599 bp, Chicken  19866894204842_1
  misc_feature (1)..(77): n is any nucleotide
nnnnnnnnnnnnnnnnnnnnnnnnnnnnnnnnnnnnnnnnnnnnnnnnnnnnnnnnnnnnnnnnnnnnnnnnnnnnncctgcagtgaccaccaaaggtcagctcacactcctgtaaatgaaacttcgtgagtgtggtaagaggacgcttggtttcagctgggttcctcacttgcccacagcctttcagtttattatttttttaatatacaaactattggctttataggtgaacagctgcacctgggataacttacattctcgtcttcgatggttcaccaagcacgttctaggtggtaaaytgtgatgtcaggagagaggcaggatgagaagagagtgaaataggcaattattttcacttccttttctcttatgcctgtgaggctccagattccagattagcaatctctctgtagatgggtttggagtctccttaactagtattcagggccagatctgcagaatttgctgatttctctgtaattgacttgcaaggtgatctagcactgacaatttaacacaggtctgctcggccccagagctctcatttggtcacgagcccctgaagttcatcgccaccagcactgcccttcctctgcct

SEQ ID NO: 9372 - DNA, 600 bp, Chicken  19866894204851_1
cacttctcagaagccgataccattttcccgaacagacaattcatttctttcccccccactgaacactctaaatctgggcagcaaaggaagcgctggtacaatttctaacagcacggacactacagaaaaacacttagctcagcaatgctacagtacgttctcataaggtgtataattcattcttttaatctccattcttgtattatctgtgccatatttgtcagatggagtctaagctgcaaatgcggacctcaaatacattaaaatgcagatgatgttcatattcaagacatcaggagkatcaaatcgcagataatccatttcagttttcaatctgcgagctgcacttttttttttcttttcatttttatgctcatcaggctcagctggggaaaaacatatgtatgatgttccatttccaccatgcaccgtatactgtgtaatcagttatgggaagaattgtggaaggctgggggagggcggtggagaggaaaagatttatgctttaatgagtaactcttagcaagaaagagatgcttactttgcaagtctgcttctctgcagggaatatctaacagttctgagaatgagctcttgagt

SEQ ID NO: 9373 - DNA, 600 bp, Chicken  19866894204853_1
gaagtaaaataaatatttttatatggaaaataccgtttgacagcatgctaacaatcaacctgaacaaccttctgttttcaatctgagaacgtaagtactcccttggggaaaacggaagaaacttaaaaggtgagaggaaacaaaatccagaaaaggaggatggaaaagtcaatacacgagctgccaaagtggcactggaaatttatagcaagcgtgcttttgtttgggaaccgctccgggaagcacggaaggtggaagcagctggtccaggtttacacaggcactcagaggttcaaaccyaggaacactcagagcgtttccagctctctggcagcagccaccagacggagaggcctyggagcagcagagctccggaggcagcagtggtttctcttgccctgtgcaggagtttcacatcataactcatagcaggttctgttgtggtaagggtatcacacacactccgcacgcagcgcaatgtgtctccataggctgcctgtcttcatcacctcccatgggctccacatcacactggttatgacaacaagagagcattacagacaacagcctttctccttcagctctgatatctctgtggca

SEQ ID NO: 9374 - DNA, 600 bp, Chicken  19866894204853_2
acctgaacaaccttctgttttcaatctgagaacgtaagtactcccttggggaaaacggaagaaacttaaaaggtgagaggaaacaaaatccagaaaaggaggatggaaaagtcaatacacgagctgccaaagtggcactggaaatttatagcaagcgtgcttttgtttgggaaccgctccgggaagcacggaaggtggaagcagctggtccaggtttacacaggcactcagaggttcaaaccyaggaacactcagagcgtttccagctctctggcagcagccaccagacggagaggcctyggagcagcagagctccggaggcagcagtggtttctcttgccctgtgcaggagtttcacatcataactcatagcaggttctgttgtggtaagggtatcacacacactccgcacgcagcgcaatgtgtctccataggctgcctgtcttcatcacctcccatgggctccacatcacactggttatgacaacaagagagcattacagacaacagcctttctccttcagctctgatatctctgtggcagttcaacctcaagctgagtcctcccttgctcgagtaagacctcacaaaggacaagac

SEQ ID NO: 9375 - DNA, 600 bp, Chicken  19866894204856_1
gcgggctgacctgggcaccccacgtgcacgaagcaatagagaaccttcagctgcagtgcaaggtcagaaccagaacaggcaaaacacaatcaacttgctacttacagatttaaatggagcagagggggacacctcaggccaccttcctacaagaccttgcagggcaatttaaaaaagcaaaccccaaacaacaagcagtacgttcttctgcttttgggcaattccaaaacgtgaaagagatacacaacgcagtacaatccggcgtaagtagaagacagaaaaaacaaaaggtaaaaggasgtttctactagaacagatacttcttgtttgcactcagctgagcttggcaagggatggatttttgcctctgttagcttcagagaaatccttaccgttcgttgtgttccctttctggagaagcagggaagcagcacatgcccagcagccagcatgaggagctcagggaggcaacaaacacactgctgttgcagacagggggaaggctcagccaccagggtcagcccagggcagctcctcaggtgctggctgttgtcagcaaatcacccacgtcactatttctcatgccctgctcacatctcc

SEQ ID NO: 9376 - DNA, 600 bp, Chicken  19866894204856_2
caatgccaggtcactggaagagagcatgcagagcctgtgcattcacttaatttgattaggaaatggagagttgcttaattgaggacactctaattagagcagcaaaggttagagtgcacgtccaggccagagggagaccagggtaagggggggcagaagtggcctcccgtaatacagagaacagagcagtggcagagatggaatcagcaccaaaagctgaccaagaccaccccgtgtccaccgatgctgcactcccatgccagtgaagcagctccctcagacagatgtagaagtcccttygaaagcaggagggagcaccttaagggctgcagcccacacgctgaaagctacgtggtcagacccagcacagcctctaagaggtctacaccaattttgctttctgcaaaggtctctaaagcagcgttattttccttggaacaacacctaatacaacaggcctgggcagggacgtggcttttgcttctccctgcacggctgtgtgcggtgtcccatgccaaggatgtggggattcccaaggagctgcccttaccattcccatcgggatcagccttgactgcagtgtacatctctcggatattt

SEQ ID NO: 9377 - DNA, 600 bp, Chicken  19866894204858_1
ttcttggctgcaagcacacactgctggctcatgtccagctcttcttccacaggacccccaagtccttctctgcagggctgctctcagtgagttcttctcccagcctgtactcatatctgggattgtctcgaaccaagctaaacaacttgcacttggccttgttaaacctctttagattctcatatgcccacttttcaagcatatccaagtccctctggatggtgtcccttcctctgttgtgtcaactgcatcactcagcttggagtcatcctcaaactttctgaaggtatactcaatccyactgtctatgtcactgataaagatattgaagagcactggtctcaagacagatccccaggggataccacttgtgaccagcctccacctggacatagagccattgataacaacttcccagctatcactagtcaaccaattctttgtctgccagatagtccagtcttccactttcagtccttccattaaaggattcttatcctttaattctttgtgatgtaaatcctacatgaatatttcattaatatcccctggattaataccaggatttatgacccctagttacacaggtcatctacttgc

SEQ ID NO: 9378 - DNA, 599 bp, Chicken  19866894204863_1
  misc_feature (1)..(119): n is any nucleotide
nnnnnnnnnnnnnnnnnnnnnnnnnnnnnnnnnnnnnnnnnnnnnnnnnnnnnnnnnnnnnnnnnnnnnnnnnnnnnnnnnnnnnnnnnnnnnnnnnnnnnnnnnnnnnnnnnnnnnnnctactctgagcttctaaaatatgtctacattaatttctgtttgcatagaagagtgcttgagaacaaaggcagagagagcttcattaactggaagctaatattttgaccacttgagaatatacagtttaatatttggcatttactgtatttaaattgtgcggtgtccccctgtcccacagcrtcccccagcacaagcagttggacagggatggcactggttgtggtggggccctatcggtgcccaccagygctgcaggatgtccccaagcatcctgggaattccttgcttgtagactctgaatttgctctcacagggaactactttgtgctcgggcagataaggtgatgaatagtactttggagtcctgcatcctgaatattaattcagtattgggcctggcacaacattctgcaggatggtaatacagtgtaagaaggtggtgtccagctgtgtgctgaaggcaataaggacattaaaaa

SEQ ID NO: 9379 - DNA, 599 bp, Chicken  19866894204863_2
  misc_feature (1)..(51): n is any nucleotide
nnnnnnnnnnnnnnnnnnnnnnnnnnnnnnnnnnnnnnnnnnnnnnnnnnnctactctgagcttctaaaatatgtctacattaatttctgtttgcatagaagagtgcttgagaacaaaggcagagagagcttcattaactggaagctaatattttgaccacttgagaatatacagtttaatatttggcatttactgtatttaaattgtgcggtgtccccctgtcccacagcrtcccccagcacaagcagttggacagggatggcactggttgtggtggggccctatcggtgcccaccagygctgcaggatgtccccaagcatcctgggaattccttgcttgtagactctgaatttgctctcacagggaactactttgtgctcgggcagataaggtgatgaatagtactttggagtcctgcatcctgaatattaattcagtattgggcctggcacaacattctgcaggatggtaatacagtgtaagaaggtggtgtccagctgtgtgctgaaggcaataaggacattaaaaagaaaggagactgaagcctttgacrcaacctgatgcagaagactagagaccctgcctggtacctcaaat

SEQ ID NO: 9380 - DNA, 577 bp, Chicken  19866894204863_3
agggatggcactggttgtggtggggccctatcggtgcccaccagygctgcaggatgtccccaagcatcctgggaattccttgcttgtagactctgaatttgctctcacagggaactactttgtgctcgggcagataaggtgatgaatagtactttggagtcctgcatcctgaatattaattcagtattgggcctggcacaacattctgcaggatggtaatacagtgtaagaaggtggtgtccagctgtgtgctgaaggcaataaggacattaaaaagaaaggagactgaagcctttgacrcaacctgatgcagaagactagagaccctgcctggtacctcaaattcaaacccttgtaatcattagcattaatgaaagtagctctttgatattcatttttctttcctttttagtatatctttctggatctagaaagcttcaaaactgctcaagttctcaggccaactctcttatttctgcttttctctcctggaaatgctttcatctttgatgtttctgaaagatatgttgtaactgccaatctgttactaaacagatagtcggggtaaagtcagaga

SEQ ID NO: 9381 - DNA, 600 bp, Chicken  19866894204865_1
atattttttagtctacaacaggtggagttacacacttagtcacggtattaggagtagcagtggcagtagacaaccattagtgtgcagtcttagtgtttggaagcaccagagtaattagctattttgatccttgtttggttgcaattataaacaaatataaacataatttagtgatctttgtgaaaagtaagggctttactactgtcatgtaggacagttcatctttacatggtaatattcctcccgctctagcataaataagtttaaagtaacattgactagagaaagagtttgttttawtgcacctctctcaaatgaatgtgtgtcagggaatgtaagtgagtggaaaaagtctgtctggcaagaggcagcgtgctgtggtgtattgcgtttcgctgacatgggaggaatgtggcagtgaggtctacggttgctggctgtaggcgctcgcactccggctgaaaagcagattgggatgtgctttttgcttcattaagcaaaaggctttttgcctgtggcatgaaatgctataaagcacagtggaagtattatagtacttgctgttaggcagggctgtcaatctcaaacatccagaagtca

SEQ ID NO: 9382 - DNA, 600 bp, Chicken  19866894204869_1
ttaatgttttcagtacttgggaacataaagagaggaaagatttagattataattcatacagttttaacagtatttaaagtacagaattaaagtagatactagaattcactgcaaattcaagattaaaaaaaatcataattgaatatttatattacccaataattacattgaaaacttcacctctgattaactaaaaactttctgtgataactgtcactgtatttcatataatcaacaagagaacgctacatgtactacagtcagttacaatatgcagcctaacttagtagatgaaaatarcttaaaagtaatatccatcagaacttgtgcatctgtgtacaagttgttgcctcttgtgtagtggctgcagtagaagcacagagaaaaagaatcaaaaacaaccactctttgtactgtactacaaaatttttttgcatggtccaattgtattgcctctaggcttcttttcatctgttttaaggtaaaacaagatcccaagaacttggccaactgatgtctgaagaggacttaaatgccaggtatgaaccaaaacttttatactaaaaatactgacaatttcctaaactttataatacatgc

SEQ ID NO: 9383 - DNA, 599 bp, Chicken  19866894204876_1
  misc_feature (1)..(140): n is any nucleotide
nnnnnnnnnnnnnnnnnnnnnnnnnnnnnnnnnnnnnnnnnnnnnnnnnnnnnnnnnnnnnnnnnnnnnnnnnnnnnnnnnnnnnnnnnnnnnnnnnnnnnnnnnnnnnnnnnnnnnnnnnnnnnnnnnnnnnnnnnnnntgtgggcgggggggggggaggcatctcgggtgttccccctggctgtgcagtgcccgtgaccttggcctttgcttagaggtgatgggtggagcttccttcagctgcttgaggagcagcgtggggcttaatcagctcttaatagctcttacggacagtgaayagtgaatccacgctccgtggctcagcaggcaaatcttcagctgtagagcgttaacacggtgctaataataatatgggtctgctgaatggagaagctgtttggatgtgctcccttaacaagtcacgtggtatggttccttagctgtgtttttcactgtgtgtgtagaatgagtaagactctacaggtgtagtgtagtagcgtgatgtggtcgtggttattggtcttaaatagaactggaagtaaagcatggagtctgctctgacctgaaaggcagatgtttgttttgcacctcctgcact

SEQ ID NO: 9384 - DNA, 599 bp, Chicken  19866894204877_1
  misc_feature (1)..(164): n is any nucleotide
nnnnnnnnnnnnnnnnnnnnnnnnnnnnnnnnnnnnnnnnnnnnnnnnnnnnnnnnnnnnnnnnnnnnnnnnnnnnnnnnnnnnnnnnnnnnnnnnnnnnnnnnnnnnnnnnnnnnnnnnnnnnnnnnnnnnnnnnnnnnnnnnnnnnnnnnnnnnnnnnnnnncaaaccccaaatgtttacatgtatgaaaaactttgtatacagaagatttatctggtcctgctgtcatccttttgctgtctgttcagcttggctacaccagcctaacatcatttgctgttgcttctttgtcttcccrtggcacgcttgtctttgcaatgttgctaacacttccctgcacattcatgttgtgttgcttgtgtcagacaggtgcagattgcatctgtcgttggttgtgtttgctgcacccatgtttaaagctaaacatagctgttcccccggctgtttgctgactgcgtgcatgctgctggagataggtattgtgtccttgtttgaatgtttgactctctagggtttaccctgcattgacttaaaaatgcatttgtgcatgtgcttgtttcactaagttgcattctctttgtatgtttcccttctgta

SEQ ID NO: 9385 - DNA, 600 bp, Chicken  19866894204877_2
tttgtgcatgtgcttgtttcactaagttgcattctctttgtatgtttcccttctgtaactacacttgtaacttgagttagcttaggtagtaagtgcagcactttatatttgttcccaatggaaatgcaaactattctggtgttactgttttcatttgtgatactgattttgttctcggtccatacttaaaaaagattaaataaagcttttttgtgtgtgtgtttctatctgtaggtttgtagcaacaaacttgcgatgaaggatcaccctctgagtgggagccaggtcaaagtggaacarttgtttgaggactctgggaacagaaggagtagtacccttcagtctacaggaattacttgttcagaaagatctcttccttccctgacgaaagataaaagcatagagagcttaagcacttgtaaaggtggcagcagttcctcaaaagcacacaaagccatttcccaggctccagaacaagctgtcaaacagtacaagcatcagttatctgcgtatgagcagcaagagatatttaacttctctgagatttactttgtgggtccagctgcaaagaagaggcaaggagtgattggtggtcccaac

SEQ ID NO: 9386 - DNA, 599 bp, Chicken  19866894204881_1
  misc_feature (1)..(83): n is any nucleotide
nnnnnnnnnnnnnnnnnnnnnnnnnnnnnnnnnnnnnnnnnnnnnnnnnnnnnnnnnnnnnnnnnnnnnnnnnnnnnnnnnnnacggagagcgatacctggggtggtcaatctattattcaagtcagcactaatgtcacagctggtgaagaaagcaattaggcttcaaacactcaagagtggagagtgagatcttaccaacaaaactgggaacagacagagatgtcttgcatggccacagtgacttcatctttcttcccagctgtgcagcaaaacgaaactcagcccaagttagtgcaarctcccttgtgtgakagggatttggaaacttctgtggatgtagaaatttccaattatgcacaagamcaggtctagaaggacttttattccatgcacaatccctctgcttcccaatgcttcgtaaggaagctattgctgccatcacagtcccrtgcagctgaaggtctctgaacacacatagctccactgaggttcttcycygctggagaggagtggatcagggctggatactgtgcaggagtgcagagatcaaacctcagagaacagcactgggatgcagacgttgcaggcagtggtcct

SEQ ID NO: 9387 - DNA, 599 bp, Chicken  19866894204881_2
  misc_feature (1)..(69): n is any nucleotide
nnnnnnnnnnnnnnnnnnnnnnnnnnnnnnnnnnnnnnnnnnnnnnnnnnnnnnnnnnnnnnnnnnnnnacggagagcgatacctggggtggtcaatctattattcaagtcagcactaatgtcacagctggtgaagaaagcaattaggcttcaaacactcaagagtggagagtgagatcttaccaacaaaactgggaacagacagagatgtcttgcatggccacagtgacttcatctttcttcccagctgtgcagcaaaacgaaactcagcccaagttagtgcaarctcccttgtgtgakagggatttggaaacttctgtggatgtagaaatttccaattatgcacaagamcaggtctagaaggacttttattccatgcacaatccctctgcttcccaatgcttcgtaaggaagctattgctgccatcacagtcccrtgcagctgaaggtctctgaacacacatagctccactgaggttcttcycygctggagaggagtggatcagggctggatactgtgcaggagtgcagagatcaaacctcagagaacagcactgggatgcagacgttgcaggcagtggtccttcacaaaagcccca

SEQ ID NO: 9388 - DNA, 599 bp, Chicken  19866894204881_3
  misc_feature (1)..(18): n is any nucleotide
nnnnnnnnnnnnnnnnnnacggagagcgatacctggggtggtcaatctattattcaagtcagcactaatgtcacagctggtgaagaaagcaattaggcttcaaacactcaagagtggagagtgagatcttaccaacaaaactgggaacagacagagatgtcttgcatggccacagtgacttcatctttcttcccagctgtgcagcaaaacgaaactcagcccaagttagtgcaarctcccttgtgtgakagggatttggaaacttctgtggatgtagaaatttccaattatgcacaagamcaggtctagaaggacttttattccatgcacaatccctctgcttcccaatgcttcgtaaggaagctattgctgccatcacagtcccrtgcagctgaaggtctctgaacacacatagctccactgaggttcttcycygctggagaggagtggatcagggctggatactgtgcaggagtgcagagatcaaacctcagagaacagcactgggatgcagacgttgcaggcagtggtccttcacaaaagccccatgtgattcttgccttctattgtaagcatatgcagaccagctcagtgccaca

SEQ ID NO: 9389 - DNA, 600 bp, Chicken  19866894204881_4
aagcaattaggcttcaaacactcaagagtggagagtgagatcttaccaacaaaactgggaacagacagagatgtcttgcatggccacagtgacttcatctttcttcccagctgtgcagcaaaacgaaactcagcccaagttagtgcaarctcccttgtgtgakagggatttggaaacttctgtggatgtagaaatttccaattatgcacaagamcaggtctagaaggacttttattccatgcacaatccctctgcttcccaatgcttcgtaaggaagctattgctgccatcacagtcccrtgcagctgaaggtctctgaacacacatagctccactgaggttcttcycygctggagaggagtggatcagggctggatactgtgcaggagtgcagagatcaaacctcagagaacagcactgggatgcagacgttgcaggcagtggtccttcacaaaagccccatgtgattcttgccttctattgtaagcatatgcagaccagctcagtgccacatacctgagcacatccttgggatagatgcaggggatgctgcagtgggttgcatctctattcccagacatcagccctgtagggactagc

SEQ ID NO: 9390 - DNA, 600 bp, Chicken  19866894204881_5
aacaaaactgggaacagacagagatgtcttgcatggccacagtgacttcatctttcttcccagctgtgcagcaaaacgaaactcagcccaagttagtgcaarctcccttgtgtgakagggatttggaaacttctgtggatgtagaaatttccaattatgcacaagamcaggtctagaaggacttttattccatgcacaatccctctgcttcccaatgcttcgtaaggaagctattgctgccatcacagtcccrtgcagctgaaggtctctgaacacacatagctccactgaggttcttcycygctggagaggagtggatcagggctggatactgtgcaggagtgcagagatcaaacctcagagaacagcactgggatgcagacgttgcaggcagtggtccttcacaaaagccccatgtgattcttgccttctattgtaagcatatgcagaccagctcagtgccacatacctgagcacatccttgggatagatgcaggggatgctgcagtgggttgcatctctattcccagacatcagccctgtagggactagcttgatgcctaacagaggagagactttccttcctgatggtggaaagag

SEQ ID NO: 9391 - DNA, 600 bp, Chicken  19866894204881_6
caaaactgggaacagacagagatgtcttgcatggccacagtgacttcatctttcttcccagctgtgcagcaaaacgaaactcagcccaagttagtgcaarctcccttgtgtgakagggatttggaaacttctgtggatgtagaaatttccaattatgcacaagamcaggtctagaaggacttttattccatgcacaatccctctgcttcccaatgcttcgtaaggaagctattgctgccatcacagtcccrtgcagctgaaggtctctgaacacacatagctccactgaggttcttcycygctggagaggagtggatcagggctggatactgtgcaggagtgcagagatcaaacctcagagaacagcactgggatgcagacgttgcaggcagtggtccttcacaaaagccccatgtgattcttgccttctattgtaagcatatgcagaccagctcagtgccacatacctgagcacatccttgggatagatgcaggggatgctgcagtgggttgcatctctattcccagacatcagccctgtagggactagcttgatgcctaacagaggagagactttccttcctgatggtggaaagagct

SEQ ID NO: 9392 - DNA, 600 bp, Chicken  19866894204893_1
tgaatagcgtgagtagtgtcatagagcaaacaccaaatgaacaacagcaccatcattcttagcattgtcctttaaaatccacccatgccttggccatgtagatgttaaaaaagaatttattttcagggaaggcagctccactaatctaactcaccattttcccccaaaggctggctgtggcgcgtgtgcccaaccaaggctgagaccagttttttggggaagtagacactggccttcccgtctggtgctgtaagagatctgcaaggattaaggggtgatctcagaatgcatgcagttacygcaaccccaagaagcatggaatttgattcaacaagtcagtacgtaaaattttccagcccaacagaagtttgtgaagtgacactgtcttagggtgctgagaggttactgtagtaggcggttgttgcagaaaggcaacaggttaccttgatgctcatcctgaaggagatgcagggctggtttgtgctagcaaataaccccaaaccacttgactttatattccgtagtatttgtattgaatttagacttctagtctgcctgcaaagtttcagatgcagttatcttcttcttgtggcagccctt

SEQ ID NO: 9393 - DNA, 600 bp, Chicken  19866894204899_1
agaagcttttaaacttagaaaaccacattttatgtgaatagaagcaagaagcctccattttcaaagggaaaaaactcaaagcaagcagggaacagaaaagaaataaaaagttctccccctacccgctgtacccatgaggacacagtcctgcttcacacttggattcaattagctcggggacttgaagagctgtgccaaactctgccaaagcccctccagctgctgggatgtcccctctggtctatgctggctgtgctgcagtgagtgcactctgctcctgggcagctcatggcatccccmcaagaattagaagaaataaaagcattcagtagctcatcctattggtgtgtttggagcagggacagcaatcgcagggctttgccaagaggatggtggcaaaactggagcaggattggcctcacctgcacagattgggcttgggagcacttcatctccaacaccctgagcccctcacatcagtaatgctgggtcgtgtatttgagatctattaaactgcaagggaatgtttaattatctgtttaatgatgcttaaagcacgtcagaaatattgttctgcagaggagaaaagtgcacagcctc

SEQ ID NO: 9394 - DNA, 600 bp, Chicken  19866894204900_1
caggaaaggctcccttatgtcctaagaaggtaataacttcatatcaccactatcttgtctctgcagtcatactgctaattgacctttggtatctgtgacaccagaaaccatgcttaaaaagccatctgtgcttaccttgaagagcctacctattcagcagacccagtcactggctaatgagtcctcaaatctgacatgtactgtccaacagattaggctgtagattatgagaacaaagacaatcatccacagtttacatttgattgtaatagttgactgtttttttgttgttgttgtttktttttttttaattttctttttcaaacttctgtgcagtatttctctaaaaaacagctagaaaaaatatcagtaatttacatcattcacaaatgtgaaactcacaggaagttgttgatggataaaatttacaatctractctaaagaatgatgtgtaattcaagcctgaaatacttcagaatctgagttcgagattctgttttttcaatgggacttctcaccctgaggcacaccttgactgacctaaaacataaaatatattaaatacctaggcagctagctgcctgtattggaactgaatg

SEQ ID NO: 9395 - DNA, 600 bp, Chicken  19866894204900_2
cttgaagagcctacctattcagcagacccagtcactggctaatgagtcctcaaatctgacatgtactgtccaacagattaggctgtagattatgagaacaaagacaatcatccacagtttacatttgattgtaatagttgactgtttttttgttgttgttgtttktttttttttaattttctttttcaaacttctgtgcagtatttctctaaaaaacagctagaaaaaatatcagtaatttacatcattcacaaatgtgaaactcacaggaagttgttgatggataaaatttacaatctractctaaagaatgatgtgtaattcaagcctgaaatacttcagaatctgagttcgagattctgttttttcaatgggacttctcaccctgaggcacaccttgactgacctaaaacataaaatatattaaatacctaggcagctagctgcctgtattggaactgaatgtaatggtagttaggatagatttatagataagactttcagaaagccagggagggaaggaagacaagtcactcatgggatgtccaagcaacatgtgtgtctcagattgcatgtcagggagaaacaagatatacaagg

SEQ ID NO: 9396 - DNA, 600 bp, Chicken  19866894204904_1
gctttgaattctatatattctgctctcagcaacagcggagattaattaatcttgctagattcttccattttggcaaacttctttcggaggaaaaaatattagctttagatatttttaattacaagtttaagaaacgatcaaagacaaagggcatttctcagatctttcagtcttcttaaaaataaccaagtctttgattaatacacatttaaggaaaattattaattatatcatcaagacacagacaatcacaggctaattcccatttctactgacaattatatgtgacaaaacttgctktaacaaaaaagccaagaccggccagcctagcaattaattagctacaccaactttgctaagattgcttatgcacttagcttccmagttccttaagaaaactgtcttatcaggcttgcaaagaagaagcatctagtaaaaatgtaaatcagtattcaaagtagctctacaataacacaccagacatgatttgttcaggaaaatataaaagaatatatagaatgcataccagcaagagccaacaggatggttcaacaaaccggtccttctctttctgtgcattcatttaattcacaagtttaa

SEQ ID NO: 9397 - DNA, 600 bp, Chicken  19866894204904_2
tcggaggaaaaaatattagctttagatatttttaattacaagtttaagaaacgatcaaagacaaagggcatttctcagatctttcagtcttcttaaaaataaccaagtctttgattaatacacatttaaggaaaattattaattatatcatcaagacacagacaatcacaggctaattcccatttctactgacaattatatgtgacaaaacttgctktaacaaaaaagccaagaccggccagcctagcaattaattagctacaccaactttgctaagattgcttatgcacttagcttccmagttccttaagaaaactgtcttatcaggcttgcaaagaagaagcatctagtaaaaatgtaaatcagtattcaaagtagctctacaataacacaccagacatgatttgttcaggaaaatataaaagaatatatagaatgcataccagcaagagccaacaggatggttcaacaaaccggtccttctctttctgtgcattcatttaattcacaagtttaaaagagttatgtttaagataaatctagaaaaaaacacttgcttatttcctcatgctttctaaagtaatacatgtttgtgtaaca

SEQ ID NO: 9398 - DNA, 599 bp, Chicken  19866894204905_1
  misc_feature (1)..(57): n is any nucleotide
nnnnnnnnnnnnnnnnnnnnnnnnnnnnnnnnnnnnnnnnnnnnnnnnnnnnnnnnncagtaaaaaaattatatttgattttataaatcttaagcagttctgcaaaagaaacgtaaatgtctttcaagaattacaccagaaaaaaaagatattttacctaagagaatgaaaccttatgccaaaatgtgatcggtgtgttttcgtgatatctttctcaacaagtgcctttaaatgagcttctgaacagaaactcatgtttggttactccgtctttctactcttatttaaccctaaagccaygatctaacttgtgttcaggttaatagaagtccttcactgattcaagtcccaggtaatggaaaactgtatttctacatacaacttggactgctcagaaaacgyagtggcgctcgactgaacagagaacaaaacagaagaaatccctttgtcctttaaaacggatggagtaattactaacatgccctcaaaaatcatttctttgaaatcacacacacacaaaaatgcttaaaaatacataaccggagcaaagcacctttttctgtagcctaaactctagcaaaaaaacaatattgttatta

SEQ ID NO: 9399 - DNA, 600 bp, Chicken  19866894204905_2
caaaagaaacgtaaatgtctttcaagaattacaccagaaaaaaaagatattttacctaagagaatgaaaccttatgccaaaatgtgatcggtgtgttttcgtgatatctttctcaacaagtgcctttaaatgagcttctgaacagaaactcatgtttggttactccgtctttctactcttatttaaccctaaagccaygatctaacttgtgttcaggttaatagaagtccttcactgattcaagtcccaggtaatggaaaactgtatttctacatacaacttggactgctcagaaaacgyagtggcgctcgactgaacagagaacaaaacagaagaaatccctttgtcctttaaaacggatggagtaattactaacatgccctcaaaaatcatttctttgaaatcacacacacacaaaaatgcttaaaaatacataaccggagcaaagcacctttttctgtagcctaaactctagcaaaaaaacaatattgttattaaataaaatgttttaagagttacactgctatttttattttctagtatcaactggtagtgaatgtgcaagcattttttcacgttattttcatcaacttaaaggac

SEQ ID NO: 9400 - DNA, 600 bp, Chicken  19866894204909_1
gcacctgtaggtcgcttacttctgagggatgtgattcaaattaagtgttggctgagctcagcagtgaggtgttgacgtgccgagctcatggggaaaagcacagttacatttggcagaggttaacccccgtctgggtaaatgtttactttgctgagtgcttcagcacttgttctgagtgtctttgcaagatggatgttgtgggcttctggggaggaaggtgagcacgaggggctgagtgctgcctcacagcctcagtgcttacagagctgtcagcagcccactgctgggagctgctgcccrggggagtgcactgcagctgcaggaggtccccaaagcacggggctcccctgccttcctcctcttcttcctcctccttactgccttcaagaggagcagggacaaaacccaccctgagcagctgaagttattgcttttccttcgcattattttctttaagctgattttcctacgttttcagatacttttgttgccttctccggtaattgtaacagtgttcaatgtcaacttttgcttattctgagtaatgggaagcacttacaaacctgtggtgtggtctggctgtctcttggtgtgtgttgt

SEQ ID NO: 9401 - DNA, 587 bp, Chicken  19866894204910_1
agcatcggtaaaatctgagcccaggttctgctatctccttcattaaatgcatggcggtgtggcaagctgcagttcttcataaactgagtccctttccaattgtttttaatgagttgtattataagaacattatttgtgtgtatagatatgagacttctcacaaatcagaaatgtctcataatgctgataaaatggggacttagaatgaagaatttcttcacctaccacaataacaaacgtgttggatgtcttaacctatgctacactgcagtatatattgatgactgtgtatcatacttytaaacgtaatgaagacaagctaacaaatcctgtgcctctggaaaagccatcctttgcaaatccagtctatacataatcttaaacagcattcatcctgatagcaaatactaaatgtattttgtaatgtagagagagagaatggctgctggttggatgacattagcaaataggccatccctaatctgctcttcagcgcatgacctacatcttgttgctatcattcctcttttctttgagtgaataactctcatttcatgaagattttctgagcagaacccatccttcag

SEQ ID NO: 9402 - DNA, 599 bp, Chicken  19866894204913_1
  misc_feature (1)..(219): n is any nucleotide
nnnnnnnnnnnnnnnnnnnnnnnnnnnnnnnnnnnnnnnnnnnnnnnnnnnnnnnnnnnnnnnnnnnnnnnnnnnnnnnnnnnnnnnnnnnnnnnnnnnnnnnnnnnnnnnnnnnnnnnnnnnnnnnnnnnnnnnnnnnnnnnnnnnnnnnnnnnnnnnnnnnnnnnnnnnnnnnnnnnnnnnnnnnnnnnnnnnnnnnnnnnnnnnnnnnnnnnnnnntaattggcttagttttactgaagaagtaaaaactgactcaatagaagtgtcattctgctctgcagtaaaagaactcttaamtcaaaccttactgttgaggtcactatccagaattcatcaagtcaaacaatctattctccacaagtcttaaataccattcattcaaagcttgtccaagactagttattctaacaagcatctcctaccaaagtaggagacaatcaccatcaatagtgtgcttatacyaacaacaaagcagcctcacaacaaaatgccaaaggaacgtaagatgtaacgactattattaaaggcagttgccaacaactgattccctcaaactgattattttctcacatttctcaataaaattgaatgctaaa

SEQ ID NO: 9403 - DNA, 599 bp, Chicken  19866894204913_2
  misc_feature (1)..(54): n is any nucleotide
nnnnnnnnnnnnnnnnnnnnnnnnnnnnnnnnnnnnnnnnnnnnnnnnnnnnnntaattggcttagttttactgaagaagtaaaaactgactcaatagaagtgtcattctgctctgcagtaaaagaactcttaamtcaaaccttactgttgaggtcactatccagaattcatcaagtcaaacaatctattctccacaagtcttaaataccattcattcaaagcttgtccaagactagttattctaacaagcatctcctaccaaagtaggagacaatcaccatcaatagtgtgcttatacyaacaacaaagcagcctcacaacaaaatgccaaaggaacgtaagatgtaacgactattattaaaggcagttgccaacaactgattccctcaaactgattattttctcacatttctcaataaaattgaatgctaaagattctaaatcagaacatctttactaactaatcaagcccggtgagataagagaaacgagtcatatctcagaaccccggagctgtcagctatgaagctagtcttcaatgactgattctcagactgaattgaatgaaactcctgtctgggcagtctacgtttctgta

SEQ ID NO: 9404 - DNA, 599 bp, Chicken  19866894204922_1
  misc_feature (1)..(37): n is any nucleotide
nnnnnnnnnnnnnnnnnnnnnnnnnnnnnnnnnnnnncattgagcagaaggtgtcatatgtgttgaatgcattcagcacttcagagaatcctgcacatttgatctgattgttctattaaattatttgagtttgtacagagcagtgtatctacttctctctcccttacgttggccattaaatatagagcctcggtatagcagagttttggaaatgaatgagttttcacccactccttagttctttcatgggttggttatttattgtttggattaatgttatgaaaggtctaaagtaacttyttgtaagaagaggtgtctgaaaagctattgtgtagctgagcatccctcttagcttagatgagttaggtttagattagatactaggaagaagtttttcacacagagggtggtgacgcactggaasagrttgcccaaggaggytgtggatrccccatccctggaggcattcaaggccaggctggatgtggctctgggcagcctgctctggtggttggcgaccctgcacatagtaggggggttgaaactcgatgatcattgtggtccctttcaacccagrccattctatgattctatgagtt

SEQ ID NO: 9405 - DNA, 600 bp, Chicken  19866894204922_2
ttgagtttgtacagagcagtgtatctacttctctctcccttacgttggccattaaatatagagcctcggtatagcagagttttggaaatgaatgagttttcacccactccttagttctttcatgggttggttatttattgtttggattaatgttatgaaaggtctaaagtaacttyttgtaagaagaggtgtctgaaaagctattgtgtagctgagcatccctcttagcttagatgagttaggtttagattagatactaggaagaagtttttcacacagagggtggtgacgcactggaasagrttgcccaaggaggytgtggatrccccatccctggaggcattcaaggccaggctggatgtggctctgggcagcctgctctggtggttggcgaccctgcacatagtaggggggttgaaactcgatgatcattgtggtccctttcaacccagrccattctatgattctatgagttttacatgtttggcaaataaaatttgttgcaacaagtattgcaaaggcagtagttggtggctcttgctgttgctgtgtaaagcaaatatgaaatacaggcttatgacccagcacaactgttgcaga

SEQ ID NO: 9406 - DNA, 600 bp, Chicken  19866894204922_3
agtttgtacagagcagtgtatctacttctctctcccttacgttggccattaaatatagagcctcggtatagcagagttttggaaatgaatgagttttcacccactccttagttctttcatgggttggttatttattgtttggattaatgttatgaaaggtctaaagtaacttyttgtaagaagaggtgtctgaaaagctattgtgtagctgagcatccctcttagcttagatgagttaggtttagattagatactaggaagaagtttttcacacagagggtggtgacgcactggaasagrttgcccaaggaggytgtggatrccccatccctggaggcattcaaggccaggctggatgtggctctgggcagcctgctctggtggttggcgaccctgcacatagtaggggggttgaaactcgatgatcattgtggtccctttcaacccagrccattctatgattctatgagttttacatgtttggcaaataaaatttgttgcaacaagtattgcaaaggcagtagttggtggctcttgctgttgctgtgtaaagcaaatatgaaatacaggcttatgacccagcacaactgttgcagagac

SEQ ID NO: 9407 - DNA, 600 bp, Chicken  19866894204922_4
agtgtatctacttctctctcccttacgttggccattaaatatagagcctcggtatagcagagttttggaaatgaatgagttttcacccactccttagttctttcatgggttggttatttattgtttggattaatgttatgaaaggtctaaagtaacttyttgtaagaagaggtgtctgaaaagctattgtgtagctgagcatccctcttagcttagatgagttaggtttagattagatactaggaagaagtttttcacacagagggtggtgacgcactggaasagrttgcccaaggaggytgtggatrccccatccctggaggcattcaaggccaggctggatgtggctctgggcagcctgctctggtggttggcgaccctgcacatagtaggggggttgaaactcgatgatcattgtggtccctttcaacccagrccattctatgattctatgagttttacatgtttggcaaataaaatttgttgcaacaagtattgcaaaggcagtagttggtggctcttgctgttgctgtgtaaagcaaatatgaaatacaggcttatgacccagcacaactgttgcagagactttctgaaggtgag

SEQ ID NO: 9408 - DNA, 600 bp, Chicken  19866894204922_5
tacttctctctcccttacgttggccattaaatatagagcctcggtatagcagagttttggaaatgaatgagttttcacccactccttagttctttcatgggttggttatttattgtttggattaatgttatgaaaggtctaaagtaacttyttgtaagaagaggtgtctgaaaagctattgtgtagctgagcatccctcttagcttagatgagttaggtttagattagatactaggaagaagtttttcacacagagggtggtgacgcactggaasagrttgcccaaggaggytgtggatrccccatccctggaggcattcaaggccaggctggatgtggctctgggcagcctgctctggtggttggcgaccctgcacatagtaggggggttgaaactcgatgatcattgtggtccctttcaacccagrccattctatgattctatgagttttacatgtttggcaaataaaatttgttgcaacaagtattgcaaaggcagtagttggtggctcttgctgttgctgtgtaaagcaaatatgaaatacaggcttatgacccagcacaactgttgcagagactttctgaaggtgagcagaaagt

SEQ ID NO: 9409 - DNA, 600 bp, Chicken  19866894204922_6
tatgaaaggtctaaagtaacttyttgtaagaagaggtgtctgaaaagctattgtgtagctgagcatccctcttagcttagatgagttaggtttagattagatactaggaagaagtttttcacacagagggtggtgacgcactggaasagrttgcccaaggaggytgtggatrccccatccctggaggcattcaaggccaggctggatgtggctctgggcagcctgctctggtggttggcgaccctgcacatagtaggggggttgaaactcgatgatcattgtggtccctttcaacccagrccattctatgattctatgagttttacatgtttggcaaataaaatttgttgcaacaagtattgcaaaggcagtagttggtggctcttgctgttgctgtgtaaagcaaatatgaaatacaggcttatgacccagcacaactgttgcagagactttctgaaggtgagcagaaagtctttattgcagacttaatgtgatcttaaattactgtactatgcgtaggaattattctgctggtgtccagtatgtacacgtgaatgaaaggaatgagatctgcagtcagtccttctgaaacttcctgca

SEQ ID NO: 9410 - DNA, 600 bp, Chicken  19866894204924_1
tttctatgcaagcctaaaaacacagagctgacctgatgacactgaatgcagacgctactgttctggttgaacaatttctaatttaatatctgagcgacaactccatcactgaataagaatcatcacacatggaaaactgttttacaggcaactattttatatggaagctgactggaaagacagttaagataacgttgtagctacaccataccttcagtgcatgtaattcacagttcagttgtgaattctgaatggttctggtaagccaccggctgctgacacaccaaaaggccactgtgycaactccctcctccaacaaaacaggtcttttctacctaataatttkggcaatttgtattgctttggtattgcaagatcactggacctaatgctgagaagcagtaattctttatcaccaggcaaggccactttgatgctggtcaatgtttacactgagttaagtgcaatttgtttaatttcctggacttacaggctcattcaatccagaggagcaaacgcttggagaggaagagagaacttcagtgctcctttcctcttcataggctgtggtgaaagtcctggacactgcagaggaaacct

SEQ ID NO: 9411 - DNA, 600 bp, Chicken  19866894204924_2
tgcagacgctactgttctggttgaacaatttctaatttaatatctgagcgacaactccatcactgaataagaatcatcacacatggaaaactgttttacaggcaactattttatatggaagctgactggaaagacagttaagataacgttgtagctacaccataccttcagtgcatgtaattcacagttcagttgtgaattctgaatggttctggtaagccaccggctgctgacacaccaaaaggccactgtgycaactccctcctccaacaaaacaggtcttttctacctaataatttkggcaatttgtattgctttggtattgcaagatcactggacctaatgctgagaagcagtaattctttatcaccaggcaaggccactttgatgctggtcaatgtttacactgagttaagtgcaatttgtttaatttcctggacttacaggctcattcaatccagaggagcaaacgcttggagaggaagagagaacttcagtgctcctttcctcttcataggctgtggtgaaagtcctggacactgcagaggaaacctcctgacaaatgcatgaggaagaatccaaaactacttcatggcaaca

SEQ ID NO: 9412 - DNA, 599 bp, Chicken  19866894204932_1
  misc_feature (1)..(72): n is any nucleotide
nnnnnnnnnnnnnnnnnnnnnnnnnnnnnnnnnnnnnnnnnnnnnnnnnnnnnnnnnnnnnnnnnnnnnnnnatgtgctcttgtagcttggaaagcaaatggtatcctgggctccatcagaagaggggtggccagcagggacagggaggtgattgtgtctctctactctgccctcctgaggccccatctggagcactgtgtctgggtctggagcccccaatagacgaaagacaaggaactgttggagagggtccagaggagggccacaaagatgatcagaggactggagcacctcccctrcaaagacaggctgaggggtctgggcttgttcagyctggagagagggcggctgcggggcaacctaattgcagcctttcagtacctaaagggagcctataaacaggaggggaatcaactctttgtaaggatagataacagcaggacaaggggaaatggttttaagttgaaggagggaaggtttaggttggatgtcaggggggaagttcttcactatgagagtggtgagatgctggaacaggctgcccagagaggctgtggatgccctgtccttggaggtgttcaaggccaggttggatagg

SEQ ID NO: 9413 - DNA, 599 bp, Chicken  19866894204932_2
  misc_feature (1)..(38): n is any nucleotide
nnnnnnnnnnnnnnnnnnnnnnnnnnnnnnnnnnnnnnatgtgctcttgtagcttggaaagcaaatggtatcctgggctccatcagaagaggggtggccagcagggacagggaggtgattgtgtctctctactctgccctcctgaggccccatctggagcactgtgtctgggtctggagcccccaatagacgaaagacaaggaactgttggagagggtccagaggagggccacaaagatgatcagaggactggagcacctcccctrcaaagacaggctgaggggtctgggcttgttcagyctggagagagggcggctgcggggcaacctaattgcagcctttcagtacctaaagggagcctataaacaggaggggaatcaactctttgtaaggatagataacagcaggacaaggggaaatggttttaagttgaaggagggaaggtttaggttggatgtcaggggggaagttcttcactatgagagtggtgagatgctggaacaggctgcccagagaggctgtggatgccctgtccttggaggtgttcaaggccaggttggatagggccctggacagcctggtctagtattaaatgtgga

SEQ ID NO: 9414 - DNA, 599 bp, Chicken  19866894204938_1
  misc_feature (1)..(122): n is any nucleotide
nnnnnnnnnnnnnnnnnnnnnnnnnnnnnnnnnnnnnnnnnnnnnnnnnnnnnnnnnnnnnnnnnnnnnnnnnnnnnnnnnnnnnnnnnnnnnnnnnnnnnnnnnnnnnnnnnnnnnnnnnntggttgcacctgagctgaggaggaaaatgtgctatcatttaaggaacttctaaaatgttttttaatttctatctctgctagactgaattgaatataatggcaaataatctctaggctgtatttcattatttgtgacctagcaaactaaaatatattgctttttatgctgctgctcttstgaagggattctggctgtgcacacagcaatctyagatctttgttatttaaaataccttctttggtgtgatgtgttggatcctagggaaattctgcccgtactctgatttcagagggagactacatggttctgaaaaacatgttactttaaagcttacaaaatcatagtgctctcgctggatcacacagagagtrtgggctgagtgttcaagggatttggtggggatggcacagctgaacaaggaaagctgcagtcatggccctgcaagcccagyactgttagagacaaaattccaaggg

SEQ ID NO: 9415 - DNA, 599 bp, Chicken  19866894204938_2
  misc_feature (1)..(89): n is any nucleotide
nnnnnnnnnnnnnnnnnnnnnnnnnnnnnnnnnnnnnnnnnnnnnnnnnnnnnnnnnnnnnnnnnnnnnnnnnnnnnnnnnnnnnnnnntggttgcacctgagctgaggaggaaaatgtgctatcatttaaggaacttctaaaatgttttttaatttctatctctgctagactgaattgaatataatggcaaataatctctaggctgtatttcattatttgtgacctagcaaactaaaatatattgctttttatgctgctgctcttstgaagggattctggctgtgcacacagcaatctyagatctttgttatttaaaataccttctttggtgtgatgtgttggatcctagggaaattctgcccgtactctgatttcagagggagactacatggttctgaaaaacatgttactttaaagcttacaaaatcatagtgctctcgctggatcacacagagagtrtgggctgagtgttcaagggatttggtggggatggcacagctgaacaaggaaagctgcagtcatggccctgcaagcccagyactgttagagacaaaattccaaggggccaagaaatcatttcttatatagtgatagttg

SEQ ID NO: 9416 - DNA, 600 bp, Chicken  19866894204938_3
ctctgctagactgaattgaatataatggcaaataatctctaggctgtatttcattatttgtgacctagcaaactaaaatatattgctttttatgctgctgctcttstgaagggattctggctgtgcacacagcaatctyagatctttgttatttaaaataccttctttggtgtgatgtgttggatcctagggaaattctgcccgtactctgatttcagagggagactacatggttctgaaaaacatgttactttaaagcttacaaaatcatagtgctctcgctggatcacacagagagtrtgggctgagtgttcaagggatttggtggggatggcacagctgaacaaggaaagctgcagtcatggccctgcaagcccagyactgttagagacaaaattccaaggggccaagaaatcatttcttatatagtgatagttgggaatggtgtccattacacaatggacagctttyctgttgtttcaaaactgtaaatcagtttctagttttgctgtagactaatactgtcctatctgctttttctgttctcagctgagagagctgaagtatctccctatttaaattaggctgtaggcattagac

SEQ ID NO: 9417 - DNA, 600 bp, Chicken  19866894204938_4
tattgctttttatgctgctgctcttstgaagggattctggctgtgcacacagcaatctyagatctttgttatttaaaataccttctttggtgtgatgtgttggatcctagggaaattctgcccgtactctgatttcagagggagactacatggttctgaaaaacatgttactttaaagcttacaaaatcatagtgctctcgctggatcacacagagagtrtgggctgagtgttcaagggatttggtggggatggcacagctgaacaaggaaagctgcagtcatggccctgcaagcccagyactgttagagacaaaattccaaggggccaagaaatcatttcttatatagtgatagttgggaatggtgtccattacacaatggacagctttyctgttgtttcaaaactgtaaatcagtttctagttttgctgtagactaatactgtcctatctgctttttctgttctcagctgagagagctgaagtatctccctatttaaattaggctgtaggcattagacaaaaaagaagtaatttttttttcagtgaattctaaaactaggacaacagtccctttggaaaatgctgtctttaccaaaat

SEQ ID NO: 9418 - DNA, 600 bp, Chicken  19866894204938_5
gtgatgtgttggatcctagggaaattctgcccgtactctgatttcagagggagactacatggttctgaaaaacatgttactttaaagcttacaaaatcatagtgctctcgctggatcacacagagagtrtgggctgagtgttcaagggatttggtggggatggcacagctgaacaaggaaagctgcagtcatggccctgcaagcccagyactgttagagacaaaattccaaggggccaagaaatcatttcttatatagtgatagttgggaatggtgtccattacacaatggacagctttyctgttgtttcaaaactgtaaatcagtttctagttttgctgtagactaatactgtcctatctgctttttctgttctcagctgagagagctgaagtatctccctatttaaattaggctgtaggcattagacaaaaaagaagtaatttttttttcagtgaattctaaaactaggacaacagtccctttggaaaatgctgtctttaccaaaatattactcaaatgagcctgacaaagcacaaaatgattatgtgtgatctccagattattttagcagcttactttgcagaactaaaagttctta

SEQ ID NO: 9419 - DNA, 600 bp, Chicken  19866894204939_1
tgtgatatggaacacaatgatgggtacatctatattaagtatcccatgggggataaaacaggtaaaaatatggcaaatatatgctcatgaaaatgtttttggaaacatggcttgctcttcttttttctgtagtgttattgatacatatagtgtgtttttttttcccctctaaacaggcaggatttacttctggagtcattctcatcgtactgatgggcattttgacactttattgctgttacagagttgtgaaatcacggaaaatgatacgtaagcttcataatgcaaatatttccacawaagtgtgaaatacagatttctaatagtttgttgtatgcctgtactactggaatgtttgtatataaaaaataaattgtttccgattagaaaggaatgaggttcttattatcatttagccatctgagagctgcagttctgctgtctctgaaatatgcacaactgaaggcatttatgtactctgcagtctgtgttggatgcaatttatgtatgattgcatcactgactagtatacctactttgagtgtacttttattgttcaaaactcgtatatcttgttcttttacacataaactaccacct

SEQ ID NO: 9420 - DNA, 600 bp, Chicken  19866894204943_1
cttctattaataacttcatagatgcagcaactaagcaatgtgctttgaaagaaaaacctatttccgcatcttgtggtatataaagcaagcaaacaaagccccaaatgggggagaatacacacgagggagaactcctaaagaaaaaaaactggtagtgtacacaaaccgtctgcaggaaaagtagagctatttacacagaaggttttgatagaaaagcaggtcagcaccatgaacctttccatattcttggcaacttataatgcttttcttgaaggagggcaatttgaaaaatgacaactygctcttccaggtgaaggtaatgttcctcactgcacaagtgattgtacagctcacagcaggaaataagctgcacctccagctttggaaatccatttaaggctctgcctctgagggcagaataacctcatgagcccttggtttttgcaacagaaacaacagaagtaaaaagcttcgsagtggataacgasagctacctttgaggagccagaagaagcaggatgcttaattaaatctgggaaaacaagagcagagactggaaagaagagggcaaaagctgctttttcaaaaccccttttttgt

SEQ ID NO: 9421 - DNA, 574 bp, Chicken  19866894204943_2
gaaaagtagagctatttacacagaaggttttgatagaaaagcaggtcagcaccatgaacctttccatattcttggcaacttataatgcttttcttgaaggagggcaatttgaaaaatgacaactygctcttccaggtgaaggtaatgttcctcactgcacaagtgattgtacagctcacagcaggaaataagctgcacctccagctttggaaatccatttaaggctctgcctctgagggcagaataacctcatgagcccttggtttttgcaacagaaacaacagaagtaaaaagcttcgsagtggataacgasagctacctttgaggagccagaagaagcaggatgcttaattaaatctgggaaaacaagagcagagactggaaagaagagggcaaaagctgctttttcaaaaccccttttttgttaccagacatcggagtgtgttgtgaagactccatccttcagtgattccggggacatccagcggacgggcagcaaacctttccctcctttccggtaataatctgtctcgtagatatctcttgtcatgccaaaatctagaagacacaagtt

SEQ ID NO: 9422 - DNA, 561 bp, Chicken  19866894204943_3
atttacacagaaggttttgatagaaaagcaggtcagcaccatgaacctttccatattcttggcaacttataatgcttttcttgaaggagggcaatttgaaaaatgacaactygctcttccaggtgaaggtaatgttcctcactgcacaagtgattgtacagctcacagcaggaaataagctgcacctccagctttggaaatccatttaaggctctgcctctgagggcagaataacctcatgagcccttggtttttgcaacagaaacaacagaagtaaaaagcttcgsagtggataacgasagctacctttgaggagccagaagaagcaggatgcttaattaaatctgggaaaacaagagcagagactggaaagaagagggcaaaagctgctttttcaaaaccccttttttgttaccagacatcggagtgtgttgtgaagactccatccttcagtgattccggggacatccagcggacgggcagcaaacctttccctcctttccggtaataatctgtctcgtagatatctcttgtcatgccaaaatctagaagacacaagtt

SEQ ID NO: 9423 - DNA, 600 bp, Chicken  19866894204944_1
acaatgacagctttgaaacaataaatttgatcagtacaatagaggctgtatggtaaaaatgttgctgtgtcccataagtgaggacatcagaaaactgaaggatattagggaattcctaatgtgcaatttacaggtataattaagtaattatcggaataataaaaaacaaattggcagctgtacagatctgttcaaaactcttcctctaaactaccctccacaaaaaccaagaaaataaaccatttaaatactcccaaaccaaaagcagctggaaagcagataacattctcctctgctaayaggcaaagaattaagagcatgacacatttacagctttcctagtctgatgctttatcgtatctttgattttaagaggtctagcagggctttggatgggaaagataagggctcagggacagtggctattatatatgtctggaacaaaggcagagccgcagagcaagaggaaacacctttctctcctctcactgcctaaaatacaatagaaggctgctcttaagctttgcagcatcccagcatttgcacaggtagtccttgacagctgccatataaaattaagttttaaaattatacagctta

SEQ ID NO: 9424 - DNA, 600 bp, Chicken  19866894204952_1
aaacaacagcatagattacaggagaaagttgctaaaactaaaagcaaataaaggttatgtcttattagcagccattggtgtgagaaggaatttccatcttttaccaatcttttgaaagacttcctgaggctcaacataaatacttattgaagtatcaaagacttacttccccccaaaatgaataaattgactaatatcttcatataggcaaaatttagaattttgcaagaagattcactcgcagatactattgtacttttctggaatgcttgagcaaaaccatgctggaggaactaggaktgaaaactattcacctggaaagcgacttaccacagacagaaacaccacagtgaattcttccttgtaactcagaattaggccatggtgctcctaaggcattttgtttttcctgctgtctttttaacattctgtttctgaagatttatactgaggaaagggaaagtgcactgggaacactatggagcctgtatttcatcagccatttttagctcagctaggccttttttctgattagctatttcacattccattaatctctacccaaattatcttccagactggtcacttttggagtagtct

SEQ ID NO: 9425 - DNA, 599 bp, Chicken  19866894204955_1
  misc_feature (1)..(90): n is any nucleotide
nnnnnnnnnnnnnnnnnnnnnnnnnnnnnnnnnnnnnnnnnnnnnnnnnnnnnnnnnnnnnnnnnnnnnnnnnnnnnnnnnnnnnnnnnncggggctggagggctgctttatgtattattcatcccccacttgtgtgcatgtgtctgctccccccaggtctggggacagcgtgtaaatagatttatgagtcgaaaggcagcacattaaacagtttaagtgtcttggagtccatcctgaagtgtattattgctccagtgttttatcacgctgcggaggaccggcctccataaattagagcyggcactgtaaatcgcayggaacggggttttgttggagaacttgggtaaacaggttgtgacaccagctcccacggggctgacagctgccagggacccatggagagagcacatcccagcaccgacggggctgggagaagggacgatgtctaggggtgggtaggcggatggatggatgggtatggtgatggaacagtgcaggcgggtggctggatggatacatagagtgatagaagaatatatacggttgaatgggtatggagatgaaaaaatagacacccgtggctgggtttgagggctga

SEQ ID NO: 9426 - DNA, 600 bp, Chicken  19866894204955_10
attattggccattatcaccccaaagctctgggtgtgccaggttccctccaatccctgctgctcctgaggcaaaatgcttgtgcttacatggcccagagggcaaaacggctttgagtcattcatcatttccattacgttaatatttgatcgagttgtttgtctaaaaggtgattgtaatcactttaaattcatctcccgtctctaacctttcaaggctgatttgagtcggcagcagaggcagagggggggctggggaaggaaaggggagatggagccctctatgcctgcagtgcatggctyctgggtggcacagggctgttcctgcagtgagcagggtagcttgtggccatggggatataccagtgtcagccacaggccctgatgtctctctgctaaagccgcatttggcatcttccagcacagcttgagagcatcagtttgttctaacccagctcctggaggcatttccctccctgctcccaaagacaccaggtgatggagatgtcaccacctgggaacaatccagcatgtcacagtccttcctgattctccttggccaactcaagcctttcatcacccaagactggatcatgaggagtg

SEQ ID NO: 9427 - DNA, 600 bp, Chicken  19866894204955_11
ccacaggccctgatgtctctctgctaaagccgcatttggcatcttccagcacagcttgagagcatcagtttgttctaacccagctcctggaggcatttccctccctgctcccaaagacaccaggtgatggagatgtcaccacctgggaacaatccagcatgtcacagtccttcctgattctccttggccaactcaagcctttcatcacccaagactggatcatgaggagtgggcatcatccttgcgcccagcagggcagaacagctctgtccagctcacatggtgtctaggtttgtgctycccatccaatactcatccatgaccttgggggccagagagaccttatctggggagtgctccccttccttcccaaagggtttcttcattcaggacaaccaatacagagctgctaccatccacagtattgcaacttttacaaaaattaaaatacttccccctcaaactggaggatccttcatgccttcacagtaccaccccaaagcctccatatgyacctaccagcatctgaaacaattggataaatgccagctgagaaatggggatgcagcagcaaaatgttgccgtgacccaggagcacat

SEQ ID NO: 9428 - DNA, 600 bp, Chicken  19866894204955_12
actggatcatgaggagtgggcatcatccttgcgcccagcagggcagaacagctctgtccagctcacatggtgtctaggtttgtgctycccatccaatactcatccatgaccttgggggccagagagaccttatctggggagtgctccccttccttcccaaagggtttcttcattcaggacaaccaatacagagctgctaccatccacagtattgcaacttttacaaaaattaaaatacttccccctcaaactggaggatccttcatgccttcacagtaccaccccaaagcctccatatgyacctaccagcatctgaaacaattggataaatgccagctgagaaatggggatgcagcagcaaaatgttgccgtgacccaggagcacattgcttgagcatcagcttggtgttggccatggagtagatcacacccaaccacaccaccctgcatcccacaccaggcgttcaagacccgtggagatatggaagtgacagacatgatttagtgggtatggtggggatgggttgatggttacctgggcccagcgccctccaccctggccacatcgacagtggccgtggagtgtttgccacctgtcag

SEQ ID NO: 9429 - DNA, 599 bp, Chicken  19866894204955_2
  misc_feature (1)..(73): n is any nucleotide
nnnnnnnnnnnnnnnnnnnnnnnnnnnnnnnnnnnnnnnnnnnnnnnnnnnnnnnnnnnnnnnnnnnnnnnnncggggctggagggctgctttatgtattattcatcccccacttgtgtgcatgtgtctgctccccccaggtctggggacagcgtgtaaatagatttatgagtcgaaaggcagcacattaaacagtttaagtgtcttggagtccatcctgaagtgtattattgctccagtgttttatcacgctgcggaggaccggcctccataaattagagcyggcactgtaaatcgcayggaacggggttttgttggagaacttgggtaaacaggttgtgacaccagctcccacggggctgacagctgccagggacccatggagagagcacatcccagcaccgacggggctgggagaagggacgatgtctaggggtgggtaggcggatggatggatgggtatggtgatggaacagtgcaggcgggtggctggatggatacatagagtgatagaagaatatatacggttgaatgggtatggagatgaaaaaatagacacccgtggctgggtttgagggctgatactgccgagtcagctg

SEQ ID NO: 9430 - DNA, 600 bp, Chicken  19866894204955_3
gtctaggggtgggtaggcggatggatggatgggtatggtgatggaacagtgcaggcgggtggctggatggatacatagagtgatagaagaatatatacggttgaatgggtatggagatgaaaaaatagacacccgtggctgggtttgagggctgatactgccgagtcagctgagggatgcgtgggccatcatcaccatgggagtctgcacatgttttgtgctcagtggagcagccccagtcccacgcagccccagtctcctgtgtcccattgtccccagtgctttgcttgaccctcccaywcagcccagcattaaatcccacacaggagataaatgtcacccagaggcgcaggtgaagccamtgatgaaaacgtgtggttcacatttcaaggcgacggtattttaccttatcagtgctaagtactgcgataacccatagttattgctgctgcctggtgccagcgtgcacagcaccacagcatctaatggccttcagtggggasagtgacaaaatgcattgtccttctctccacagacaagcacagagggattgaaaccaccagagaggctcagcagggatgcgctcctggggcaggagat

SEQ ID NO: 9431 - DNA, 600 bp, Chicken  19866894204955_4
tctaggggtgggtaggcggatggatggatgggtatggtgatggaacagtgcaggcgggtggctggatggatacatagagtgatagaagaatatatacggttgaatgggtatggagatgaaaaaatagacacccgtggctgggtttgagggctgatactgccgagtcagctgagggatgcgtgggccatcatcaccatgggagtctgcacatgttttgtgctcagtggagcagccccagtcccacgcagccccagtctcctgtgtcccattgtccccagtgctttgcttgaccctcccagwcagcccagcattaaatcccacacaggagataaatgtcacccagaggcgcaggtgaagccamtgatgaaaacgtgtggttcacatttcaaggcgacggtattttaccttatcagtgctaagtactgcgataacccatagttattgctgctgcctggtgccagcgtgcacagcaccacagcatctaatggccttcagtggggasagtgacaaaatgcattgtccttctctccacagacaagcacagagggattgaaaccaccagagaggctcagcagggatgcgctcctggggcaggagatg

SEQ ID NO: 9432 - DNA, 600 bp, Chicken  19866894204955_5
ctggatggatacatagagtgatagaagaatatatacggttgaatgggtatggagatgaaaaaatagacacccgtggctgggtttgagggctgatactgccgagtcagctgagggatgcgtgggccatcatcaccatgggagtctgcacatgttttgtgctcagtggagcagccccagtcccacgcagccccagtctcctgtgtcccattgtccccagtgctttgcttgaccctcccagwcagcccagcattaaatcccacacaggagataaatgtcacccagaggcgcaggtgaagccamtgatgaaaacgtgtggttcacatttcaaggcgacggtattttaccttatcagtgctaagtactgcgataacccatagttattgctgctgcctggtgccagcgtgcacagcaccacagcatctaatggccttcagtggggasagtgacaaaatgcattgtccttctctccacagacaagcacagagggattgaaaccaccagagaggctcagcagggatgcgctcctggggcaggagatggaagttatccctcccgtacccaccttgatgatgtcctcattgttggatttgcactccacca

SEQ ID NO: 9433 - DNA, 600 bp, Chicken  19866894204955_6
tctgcacatgttttgtgctcagtggagcagccccagtcccacgcagccccagtctcctgtgtcccattgtccccagtgctttgcttgaccctcccagwcagcccagcattaaatcccacacaggagataaatgtcacccagaggcgcaggtgaagccamtgatgaaaacgtgtggttcacatttcaaggcgacggtattttaccttatcagtgctaagtactgcgataacccatagttattgctgctgcctggtgccagcgtgcacagcaccacagcatctaatggccttcagtggggasagtgacaaaatgcattgtccttctctccacagacaagcacagagggattgaaaccaccagagaggctcagcagggatgcgctcctggggcaggagatggaagttatccctcccgtacccaccttgatgatgtcctcattgttggatttgcactccaccatggctgagacgtccacgatgacaccgctcaactcgattgcaatgaccttcacaggaatggccactgtccggcctgtcagaatggctgtgttgatgatttctgtgtcctggggagaaaaggtgcaaaggagacagtcattgg

SEQ ID NO: 9434 - DNA, 600 bp, Chicken  19866894204955_7
ccaccttctccagatcaggcggggggttacggcccctgtagtcaatgtgccacatgatgcggcgtgtcaccgactggctggtgaagttctccatctcaaaatccagctgcatgatctcagaggaggactctccatccctggcaagggaccagaggaggatgcagtgagctaggtgctctggatggtccctgatgcagagcatctccagtgggtccctcctcaggggtgaccctgcatgatgaggggaccagagtggtcaccaccatgatgctcagcccaaacacagctgctcctatgaamgcccacacaaarggaaggcattttccctgtagatcctgcaaaagcctccttggagcagaatggagcagggtgagtagagctgaaatagtcctgctctcatcttggcatgcagcagccgtcgagaaggtcccattaatctggkgatgctggatgcaggcagtttctcacttataaatatataatgagtgaaagggattccttgtagcagcacaacaaagaccaatgtcttctgcatccccccgagcatccctggcagagcaaagctgcctggatttggggaatgactcaagatgctgatgc

SEQ ID NO: 9435 - DNA, 600 bp, Chicken  19866894204955_8
gatcaggcggggggttacggcccctgtagtcaatgtgccacatgatgcggcgtgtcaccgactggctggtgaagttctccatctcaaaatccagctgcatgatctcagaggaggactctccatccctggcaagggaccagaggaggatgcagtgagctaggtgctctggatggtccctgatgcagagcatctccagtgggtccctcctcaggggtgaccctgcatgatgaggggaccagagtggtcaccaccatgatgctcagcccaaacacagctgctcctatgaamgcccacacaaarggaaggcattttccctgtagatcctgcaaaagcctccttggagcagaatggagcagggtgagtagagctgaaatagtcctgctctcatcttggcatgcagcagccgtcgagaaggtcccattaatctggkgatgctggatgcaggcagtttctcacttataaatatataatgagtgaaagggattccttgtagcagcacaacaaagaccaatgtcttctgcatccccccgagcatccctggcagagcaaagctgcctggatttggggaatgactcaagatgctgatgctggagtgcaaaa

SEQ ID NO: 9436 - DNA, 600 bp, Chicken  19866894204955_9
aagggaccagaggaggatgcagtgagctaggtgctctggatggtccctgatgcagagcatctccagtgggtccctcctcaggggtgaccctgcatgatgaggggaccagagtggtcaccaccatgatgctcagcccaaacacagctgctcctatgaamgcccacacaaarggaaggcattttccctgtagatcctgcaaaagcctccttggagcagaatggagcagggtgagtagagctgaaatagtcctgctctcatcttggcatgcagcagccgtcgagaaggtcccattaatctggkgatgctggatgcaggcagtttctcacttataaatatataatgagtgaaagggattccttgtagcagcacaacaaagaccaatgtcttctgcatccccccgagcatccctggcagagcaaagctgcctggatttggggaatgactcaagatgctgatgctggagtgcaaaattgccattattggccattatcaccccaaagctctgggtgtgccaggttccctccaatccctgctgctcctgaggcaaaatgcttgtgcttacatggcccagagggcaaaacggctttgagtcattcatca

SEQ ID NO: 9437 - DNA, 600 bp, Chicken  19866894204959_1
ctcagcccaaagctcatgggttcattcaattttaagaacagaaagtccagaccaatttaacacttggagatggctctgctcagcaccagcagactattcaccaagcattaattcagcagctatttgaacggctgggaagatgttcccagtgcttcctcctcaatggtgttcatactgacacccatggtcagaaattcatgttctcctcattagacttggaatattctccagcaaacgatttgacttcaaggaaacaggaaaatttatttccatggccaaatcttttctattcaacatgcktaatgctgtctgcagaagtgagctattagcacgtggtgctctccagcaacagcagatacgtatgtagacaacaggaagacagatatgatagctgcctgctgtcatgcaagatagaatacaaactaaacacaagagaatcacagcagcttgcagacaagggctgaactctgagctctctgctggcagttgtttaataaacataacatcccaccttaccaaaaatttgggttttgtgtcacacaagaaatgatttatgcatgcacttgggtaacaagtggcctatatatgtcagcagtgagt

SEQ ID NO: 9438 - DNA, 599 bp, Chicken  19866894204963_1
  misc_feature (1)..(253): n is any nucleotide
nnnnnnnnnnnnnnnnnnnnnnnnnnnnnnnnnnnnnnnnnnnnnnnnnnnnnnnnnnnnnnnnnnnnnnnnnnnnnnnnnnnnnnnnnnnnnnnnnnnnnnnnnnnnnnnnnnnnnnnnnnnnnnnnnnnnnnnnnnnnnnnnnnnnnnnnnnnnnnnnnnnnnnnnnnnnnnnnnnnnnnnnnnnnnnnnnnnnnnnnnnnnnnnnnnnnnnnnnnnnnnnnnnnnnnnnnnnnnnnnnnnnnnnnnnnnnttgcctggattcagtctttgcttgtgactcatcctctggcagctccwgctgcttgtgaatatctttagttttgtgtattccggatgatattccaactgctgatattggaaaatgtgtgtctcaagagccttgcatcttttccactgttacaaacccaaggtgcatggtgataatggctaatgccagagatacttgctgaaagtgcctcttatgtgtgtctcacagcacagttctgggacaaaaagtaacagtttgcttctgacccagaactgctgaagtttctcaggggaacagttttggaaaatgcattctggccagtctgtgtgcaatggttttataagatgga

SEQ ID NO: 9439 - DNA, 600 bp, Chicken  19866894204963_2
atattccaactgctgatattggaaaatgtgtgtctcaagagccttgcatcttttccactgttacaaacccaaggtgcatggtgataatggctaatgccagagatacttgctgaaagtgcctcttatgtgtgtctcacagcacagttctgggacaaaaagtaacagtttgcttctgacccagaactgctgaagtttctcaggggaacagttttggaaaatgcattctggccagtctgtgtgcaatggttttataagatggataaatgagcactattcagccatctgaaatgtcacaggctyctctttttgggtctgacaccagatccacaaggatgaaaagtagtgctctaactcagtgttccagctaacactggcgacatggggctttttatgatgcctgtgatttatttggaagcatcaacctttttctttgaggtctgttttgtaggtagctgtgcatgcagttggcttagtgttctagtgcataagcaagctgatctgtcacattccttccaaacacattccaggcttctgtctttattgcactattaatgaccaagaaatttaattgagaagaacacaaatcccaacacttgagtg

SEQ ID NO: 9440 - DNA, 600 bp, Chicken  19866894204967_1
ttctaatgactaaaacactgatgtttcccccccacgaatgcaatcaaacactacaaacaagattcttccaattttactacaacggaaaatactcaagagtcctaggaaagcttccagaaagccttcttaaatgaagtccaataaacaaagcaagaataagacagaaaaggggataaaaaataggtatgtaaaatatagacaaaaagtttagaagggtgcagaaaatgtcaaaggattatggtgccaaagcaagataaacacagaaataaaaatcagttcacacagttgctcactcactcytctcccagtgagatggaggaaagaataggaaaggtaaaagtgagaaaacacagaaattgagataaagactgtttaataggtgaagcaaaaggtacatatgtaaagagattgagataaggaattcattcactgcttcccattgacaggtagattttagccatttccaagaaagcagtgctccatcatgcattatggttacttgggaagacataccagattgcagaatatcytcccttcctccttttttccccagctttagatactgagcatggtgccatatggtattggacatccctttgg

SEQ ID NO: 9441 - DNA, 600 bp, Chicken  19866894204967_2
aaggattatggtgccaaagcaagataaacacagaaataaaaatcagttcacacagttgctcactcactcytctcccagtgagatggaggaaagaataggaaaggtaaaagtgagaaaacacagaaattgagataaagactgtttaataggtgaagcaaaaggtacatatgtaaagagattgagataaggaattcattcactgcttcccattgacaggtagattttagccatttccaagaaagcagtgctccatcatgcattatggttacttgggaagacataccagattgcagaatatcytcccttcctccttttttccccagctttagatactgagcatggtgccatatggtattggacatccctttggtcagctggggccagctgtcctgaytgtgtccccttccggctccttgtgccccgccagcccctcactggcaggactgtatgagaagcagagaagtccctgactcagtgcaagcaccactttgcaacaactaaaacataagcgtgttttcagcgctattttcatcacaaatccaaaatacagcaccatatgaacaactatgaaaaaaattaaatatatcccaatcccaaatc

SEQ ID NO: 9442 - DNA, 600 bp, Chicken  19866894204967_3
ataggaaaggtaaaagtgagaaaacacagaaattgagataaagactgtttaataggtgaagcaaaaggtacatatgtaaagagattgagataaggaattcattcactgcttcccattgacaggtagattttagccatttccaagaaagcagtgctccatcatgcattatggttacttgggaagacataccagattgcagaatatcytcccttcctccttttttccccagctttagatactgagcatggtgccatatggtattggacatccctttggtcagctggggccagctgtcctgaytgtgtccccttccggctccttgtgccccgccagcccctcactggcaggactgtatgagaagcagagaagtccctgactcagtgcaagcaccactttgcaacaactaaaacataagcgtgttttcagcgctattttcatcacaaatccaaaatacagcaccatatgaacaactatgaaaaaaattaaatatatcccaatcccaaatcagcacaataataaacaaacgccatcagttcttcacttcctccaagtgggtgctttctatctacaatgcctgctgccaattggcctttttgcctt

SEQ ID NO: 9443 - DNA, 600 bp, Chicken  19866894204972_1
ttttgaaccagacctcctcctacattttcagagcccggaaggcatgttctgtttaatcagagagtgcttatacagttcttcgaacatcagaagtgttgtcagagcttttgcaatgctatatctgagtcctgggcacttgctgccccaatccctgtgtgtgccaagggcctgtccccaaaaacctgcagtgctgggggctgaagaggctgggtggctgagggcagtccgtgctcacctgtcagagcagcccgatgtcacaggttgtgagcacatcggggcttttacttggcttcttggtcygaagcacttatggtgctcctgggatgaagggcagcagtttgagcactcacgtatctctcagcatcacatggaggctgcatcgcttggcagtgctgtagacgtgtgcaagtagaaacattgataccctggaggttagttgctgctgttgctgagcaggttatgtggtaggaacaggtttccaggaaaggagtgactaccactctttaaaggtcttatgcaagtgtgagctcattggggtgaagcattgaggcaacctcctcctgtcattgtccagtgagactgcattcacatgtgcagctc

SEQ ID NO: 9444 - DNA, 600 bp, Chicken  19866894204974_1
ggcactagctggctttctgaccattacctttccagtgctctaggaactgtgttatgaatatagtgggagaggtcaaaaagggtgggaccaaactactgttaaggactatgtgcacagttactcttatatttgttttgaatatagaatgcatccacatcacacattttattcagcctggctagaaatgctaagctcagtttcctaacgcataaataactgtccttggtgacatagactcctttgggttctagtgtcctacccagaaactgtcttcaaaatattgcagttactagtgaggartaactgtgccattttggtgtcctttagagcacgcagtacaaacattatggtatgaaaagcacttggttctttccacaggttagtgatgtcgggaacgtgggggattgtaaatccagtccattacaatgagagtcatactcacaatcatgaagattatgccaactataagaaaaattagagcctgtaattggaaaataaaattgtattaatgaagaaagtgactgagcagactttctatattggcaaggtcctgaatttgggccattctctgtgactgaatctaagtaaaaccatacaggg

SEQ ID NO: 9445 - DNA, 600 bp, Chicken  19866894204974_2
tttccatctactttatttttaatttttttttataaatctgtacttacgtatgtctgtttacattatgtgcctgaatatatatttcatcaatatattttgattaattgttcaaaggacatatcctcagtggtacgtgttaaatttcaggtgactattaatgtgagcattaatacatggatacaagacactgctgcagcagtccagcatgatgtataaacacatgctgcatataaatgatagaccttcacgtgtatcttctgtcagtgtacaaatctatcccagcggagaactctcatcttygtatcacttcattatctctgcagtacaacctccttcttaacctagaccttacatcttcctattaacccatagatagccttctagtatsgaccaacagtttcttatgcacaatttaggtatcatttatataggtgaagatgttaactacggcttagatccaattaaataaattcmtttttctagtgttagaagagacactttaacctagacacttactgttgttaatttagcagtagcagtagagctttaaacaatttcactcgcacagcctggctctccatgctatggcgaatcacactg

SEQ ID NO: 9446 - DNA, 600 bp, Chicken  19866894204974_3
aatatattttgattaattgttcaaaggacatatcctcagtggtacgtgttaaatttcaggtgactattaatgtgagcattaatacatggatacaagacactgctgcagcagtccagcatgatgtataaacacatgctgcatataaatgatagaccttcacgtgtatcttctgtcagtgtacaaatctatcccagcggagaactctcatcttygtatcacttcattatctctgcagtacaacctccttcttaacctagaccttacatcttcctattaacccatagatagccttctagtatsgaccaacagtttcttatgcacaatttaggtatcatttatataggtgaagatgttaactacggcttagatccaattaaataaattcmtttttctagtgttagaagagacactttaacctagacacttactgttgttaatttagcagtagcagtagagctttaaacaatttcactcgcacagcctggctctccatgctatggcgaatcacactgtccaatctgtgttttggtgagcacctaccatttatgatcagatttcagacattgcaagtaaaagcccttgtatttgtggccaatggaa

SEQ ID NO: 9447 - DNA, 600 bp, Chicken  19866894204974_4
tggatacaagacactgctgcagcagtccagcatgatgtataaacacatgctgcatataaatgatagaccttcacgtgtatcttctgtcagtgtacaaatctatcccagcggagaactctcatcttygtatcacttcattatctctgcagtacaacctccttcttaacctagaccttacatcttcctattaacccatagatagccttctagtatsgaccaacagtttcttatgcacaatttaggtatcatttatataggtgaagatgttaactacggcttagatccaattaaataaattcmtttttctagtgttagaagagacactttaacctagacacttactgttgttaatttagcagtagcagtagagctttaaacaatttcactcgcacagcctggctctccatgctatggcgaatcacactgtccaatctgtgttttggtgagcacctaccatttatgatcagatttcagacattgcaagtaaaagcccttgtatttgtggccaatggaatgcacacaccctccagtcatccytcctcaaaaattgctgctagtatccttaccccgatcttctggggagacctcatgggctccttc

SEQ ID NO: 9448 - DNA, 600 bp, Chicken  19866894204974_5
tttaggtatcatttatataggtgaagatgttaactacggcttagatccaattaaataaattcmtttttctagtgttagaagagacactttaacctagacacttactgttgttaatttagcagtagcagtagagctttaaacaatttcactcgcacagcctggctctccatgctatggcgaatcacactgtccaatctgtgttttggtgagcacctaccatttatgatcagatttcagacattgcaagtaaaagcccttgtatttgtggccaatggaatgcacacaccctccagtcatccytcctcaaaaattgctgctagtatccttaccccgatcttctggggagacctcatgggctccttcttaacaagccgcaggtagaatgcagagggaaggatgaagatgagcatggtggcagaagaggcacctggaggagagaccaaagttgagtaccatgttgtgtgacacactkccagcatggtgcacccatagtgcaaagagatggggaatatttatgcagaactcttttgtggtcatgcatgaccttcaacttgcatggcttcaacttcagggggcctgaaacgccccctacagaagagt

SEQ ID NO: 9449 - DNA, 600 bp, Chicken  19866894204974_6
tatggcgaatcacactgtccaatctgtgttttggtgagcacctaccatttatgatcagatttcagacattgcaagtaaaagcccttgtatttgtggccaatggaatgcacacaccctccagtcatccytcctcaaaaattgctgctagtatccttaccccgatcttctggggagacctcatgggctccttcttaacaagccgcaggtagaatgcagagggaaggatgaagatgagcatggtggcagaagaggcacctggaggagagaccaaagttgagtaccatgttgtgtgacacactkccagcatggtgcacccatagtgcaaagagatggggaatatttatgcagaactcttttgtggtcatgcatgaccttcaacttgcatggcttcaacttcagggggcctgaaacgccccctacagaagagttgggtttctgtttaaggaataatttctgtgggttttatggggactgatttgggtgacttcctttggagtacagttattcctgtctgctgagacccatcctcaagtgtggcacagagatatccaagtacttcagtgctcagggctgaagagacgttagttgtccatctgcaag

SEQ ID NO: 9450 - DNA, 600 bp, Chicken  19866894204975_1
aaagaggtgaagcattcgcagaaatgagtttctgacactttaaatgttgtttaagatagagactgtgataattgcagtattttcttatctggaaaaaacacaccttactgttacttgttaagcacctgacatttaaaatgcaaaatggctaaatgtgttgaaatataaatgcttgcctatttaagtttcataaggaaataagtgctttttggtacgttgggttatccatttgtagtgggattctgttcacatgagagacagagtactgaagaaaaggagacctgcccatctgtgttcatyggcaagggcaatgacctgcctcaaacactgcctcagaaggattaagtggaatttaaaaccaagcttttataatgtcttgctgtgagaaagcgttgatggtgatagtgtatggttctttccatttccagtggatatccatttgcctttgtactaggagaatgaatatataggagcagtggatctagtcccttatattgttcagtgtattatttttctttctttcctcagccctttccaccttaatttctgtggggttttttggttgtttgttgttgaaagaaactgtctaatataggcaga

SEQ ID NO: 9451 - DNA, 600 bp, Chicken  19866894204975_2
cgttgatggtgatagtgtatggttctttccatttccagtggatatccatttgcctttgtactaggagaatgaatatataggagcagtggatctagtcccttatattgttcagtgtattatttttctttctttcctcagccctttccaccttaatttctgtggggttttttggttgtttgttgttgaaagaaactgtctaatataggcagaattggatttatgttgcttctggtcagtctggggtgtgcgtctgtcattagatagccaggatgatttttttgtactgatacaggtattcarctgctgacagcccctgcagtctttctgttaagcttacattcttataacaggctatgtgcttgctgtatttaattttccacaaataaacatttttttttctgttaatgactataattatctgtagcaaaaacacatgctgaaagaaagaaaggaaactgaattaacaaaagctccagattctactacttgcagagaatttaggtcatgctttcctgaaatttgaatagaaaggacagactggctcagagcccgtgtaaattgttactcttttgtctctgtgatattttgggtagcagtgtc

SEQ ID NO: 9452 - DNA, 600 bp, Chicken  19866894204975_3
taacaggctatgtgcttgctgtatttaattttccacaaataaacatttttttttctgttaatgactataattatctgtagcaaaaacacatgctgaaagaaagaaaggaaactgaattaacaaaagctccagattctactacttgcagagaatttaggtcatgctttcctgaaatttgaatagaaaggacagactggctcagagcccgtgtaaattgttactcttttgtctctgtgatattttgggtagcagtgtcatcaacatggtgacgattaatttgctaagtcaagtttttatacmgaccagattcttcagttcattagtcactccagtgtctggcagatagaaggatctgtatgaaaacaaattgctggtgattcagagaggattcagagacagaagtggtgcttttaatggaaacagacaaagactattttttaaaagtgcagcagacttaaaggtgttagcaggtttgtagttcaactttgataacgttcatggatattcagaaagcagtgatggcagcagggactctgacatgtggggcagctacatcagtctgctttactgagaaccggggggaatgttatgcacagaagt

SEQ ID NO: 9453 - DNA, 600 bp, Chicken  19866894204975_4
ttgtgaagcacgttattgatgatcattatgcttaaactggatttgtcctataacctgaaaacccatttctaaccacagtgccttgttctgatggttctgatcaaattgaaagttcttgattttttaaatgaagttcagaaattgtctatgacaagggatctttctgatttcagtctgcctccagtggttttcctgagcagatgactattagtagcatagagcaagctgaaattacttgcttatcttaacattcagtccacaatttagtttaatctatcaaaagaatagaaaaatatatamaacaatttatgtagatttgtactggaacctacaatgcaaacaataacagtatgtagaattattaggtaaattcatttgacacagctttattttttactgcaatcatgtccaagaagacatatkcyccagtatttctaaygaggtacaagaatacatacttattttatgaggtagcatagcttttttcatttgttgtgagaaagtagtgtttaaattaagacttctagaaaacttgcaagctggaacgctgtgatctttcttacaattctcttctcagtttttgtttcgcttcttccatca

SEQ ID NO: 9454 - DNA, 600 bp, Chicken  19866894204975_5
ttaaatgaagttcagaaattgtctatgacaagggatctttctgatttcagtctgcctccagtggttttcctgagcagatgactattagtagcatagagcaagctgaaattacttgcttatcttaacattcagtccacaatttagtttaatctatcaaaagaatagaaaaatatatamaacaatttatgtagatttgtactggaacctacaatgcaaacaataacagtatgtagaattattaggtaaattcatttgacacagctttattttttactgcaatcatgtccaagaagacatatkcyccagtatttctaaygaggtacaagaatacatacttattttatgaggtagcatagcttttttcatttgttgtgagaaagtagtgtttaaattaagacttctagaaaacttgcaagctggaacgctgtgatctttcttacaattctcttctcagtttttgtttcgcttcttccatcaccatgcaatatgacaggaaggcagagatattgagtgagaattactagctttttgatcttttctcacctccttgccatgcttttcctcattattcttgctgcctagtgaaagcaagaaattcag

SEQ ID NO: 9455 - DNA, 600 bp, Chicken  19866894204975_6
aaatgaagttcagaaattgtctatgacaagggatctttctgatttcagtctgcctccagtggttttcctgagcagatgactattagtagcatagagcaagctgaaattacttgcttatcttaacattcagtccacaatttagtttaatctatcaaaagaatagaaaaatatatamaacaatttatgtagatttgtactggaacctacaatgcaaacaataacagtatgtagaattattaggtaaattcatttgacacagctttattttttactgcaatcatgtccaagaagacatatkcyccagtatttctaaygaggtacaagaatacatacttattttatgaggtagcatagcttttttcatttgttgtgagaaagtagtgtttaaattaagacttctagaaaacttgcaagctggaacgctgtgatctttcttacaattctcttctcagtttttgtttcgcttcttccatcaccatgcaatatgacaggaaggcagagatattgagtgagaattactagctttttgatcttttctcacctccttgccatgcttttcctcattattcttgctgcctagtgaaagcaagaaattcaggc

SEQ ID NO: 9456 - DNA, 600 bp, Chicken  19866894204975_7
aattgtctatgacaagggatctttctgatttcagtctgcctccagtggttttcctgagcagatgactattagtagcatagagcaagctgaaattacttgcttatcttaacattcagtccacaatttagtttaatctatcaaaagaatagaaaaatatatamaacaatttatgtagatttgtactggaacctacaatgcaaacaataacagtatgtagaattattaggtaaattcatttgacacagctttattttttactgcaatcatgtccaagaagacatatkcyccagtatttctaaygaggtacaagaatacatacttattttatgaggtagcatagcttttttcatttgttgtgagaaagtagtgtttaaattaagacttctagaaaacttgcaagctggaacgctgtgatctttcttacaattctcttctcagtttttgtttcgcttcttccatcaccatgcaatatgacaggaaggcagagatattgagtgagaattactagctttttgatcttttctcacctccttgccatgcttttcctcattattcttgctgcctagtgaaagcaagaaattcaggcttagtttggcctat

SEQ ID NO: 9457 - DNA, 600 bp, Chicken  19866894204977_1
cttggtgatctccagaggtcccttccaatccctacaattctgtgattcctgcagatggtagctgtgaactcttcaagtccaacaccagcatcggccgggatgtgggaggcccaggcaatgggagatggtggagccatcggtgattccagtgcagaaagcctctatgttcaaggtaaacaaacacaggagttaacatcaccctgtgggggttgtttatcgtgggaagagcaaaaatagggtgtgaagtggcatagaacatcagcagctctatgtctatgcagtgtaggttcacctttgtastctaatagcaagctttctgctatctttgagttggtcacctgttggttacaagatctcagagctttctttggttgtgctgccaggcatggagctgtttgaggaggccctgcagaagtgggaacaggcgctgaccatcaggcagcgggacagtgctagttccagcactcctgtgccctgggacagcaagaaacaccaagagaacttgtctgagcatgcagaggtaggtccgcacttttctcttgcatttgacagctgggaaacatggcaaaaggccaggcagaatgctagtagtagtagcta

SEQ ID NO: 9458 - DNA, 600 bp, Chicken  19866894204978_1
gaggtaatgttattgtgtcggtgggagatacgctgtttgtcttcttagttatgcaggctgtaatcacaacaactgattttttttccctaggatctgtagataaatggatttctttcctcaatcagttgactctcaacaacatacgcagctattttacaaacttcttcattttagtcacacagcagcagctcattgagcataatatgcaagaagcaagccttaccataagaaacctgtttaacagaactaaaacttggtatatttggcacttcaatttcctaccgtaaccatctctgataytgtgatactgttagataagaggtcttgggasatacttgtattttgggggccactctttctcttgtacatagcgttacaatagccacactggctgcttaagctggtataattagtaattaatgaatcaaagaaaaggatcttgtgttgcagtaaaaattgcatcccagtagtttgagctgctcttaatctagacagctctgttgctctcaaacttcaaatgaccaggtagcacaaatgtgttccatacttgctgtttcattagctctttctgtttttcctgtcccagcccgcatttggaat

SEQ ID NO: 9459 - DNA, 600 bp, Chicken  19866894204978_2
gctgtttgtcttcttagttatgcaggctgtaatcacaacaactgattttttttccctaggatctgtagataaatggatttctttcctcaatcagttgactctcaacaacatacgcagctattttacaaacttcttcattttagtcacacagcagcagctcattgagcataatatgcaagaagcaagccttaccataagaaacctgtttaacagaactaaaacttggtatatttggcacttcaatttcctaccgtaaccatctctgataytgtgatactgttagataagaggtcttgggasatacttgtattttgggggccactctttctcttgtacatagcgttacaatagccacactggctgcttaagctggtataattagtaattaatgaatcaaagaaaaggatcttgtgttgcagtaaaaattgcatcccagtagtttgagctgctcttaatctagacagctctgttgctctcaaacttcaaatgaccaggtagcacaaatgtgttccatacttgctgtttcattagctctttctgtttttcctgtcccagcccgcatttggaattaattccatcagagaatggagctaaaaatca

SEQ ID NO: 9460 - DNA, 600 bp, Chicken  19866894204986_1
atcctattaataattccacattttactcctccttgttgattccaaatgatttgcgatggatttaaatcacagtggtataaagtgtcacctgctgatatcaacatttatctctgaagtatcctaagcatttcagtttatcctctgtcttgagctcaagtcctgtcaaatatcatgagccaagttcagtcaatattggagagacttcaaaccaatacctgagtaatgcagaggagtatcagtcatcaagcaagcgatacttttttctgccatttccaagtacagtctccatggttattatgkgttagtttggtgtggtttttattttctggggagtgggaaagacttgtttgtttgttttttaaaaagcaacataagagatttcaacccttgtctgacaaaaatttctccagttcttttccctaaaagagcattattgacctamgcacatcagccaagtgtcagtactcataattacattctcagctccctacattctgaatgcagctttgattggatacagcaatcagagagcacaccactaaacatctaccattctctgttccaaaggtgatcaactgaacagtgccacgtgaagcagcc

SEQ ID NO: 9461 - DNA, 600 bp, Chicken  19866894204986_2
tgtcttgagctcaagtcctgtcaaatatcatgagccaagttcagtcaatattggagagacttcaaaccaatacctgagtaatgcagaggagtatcagtcatcaagcaagcgatacttttttctgccatttccaagtacagtctccatggttattatgkgttagtttggtgtggtttttattttctggggagtgggaaagacttgtttgtttgttttttaaaaagcaacataagagatttcaacccttgtctgacaaaaatttctccagttcttttccctaaaagagcattattgacctamgcacatcagccaagtgtcagtactcataattacattctcagctccctacattctgaatgcagctttgattggatacagcaatcagagagcacaccactaaacatctaccattctctgttccaaaggtgatcaactgaacagtgccacgtgaagcagcccctatgtgtttcttacatatcttacagaattgtcatgctttgtgacttagtcaattcattgtttgtaatagtcggctgcaggatgaacaatggtgtaggagtacaaacaagattaatgcatttatacacttactggaattag

SEQ ID NO: 9462 - DNA, 599 bp, Chicken  19866894204988_1
  misc_feature (1)..(106): n is any nucleotide
nnnnnnnnnnnnnnnnnnnnnnnnnnnnnnnnnnnnnnnnnnnnnnnnnnnnnnnnnnnnnnnnnnnnnnnnnnnnnnnnnnnnnnnnnnnnnnnnnnnnnnnnnntaatccagtttcccaggtgagatattaacacactcttcagcagcaaagttccaggaactgttcgcctgagcaattccctccctgacagagctgctatatctaacttagtacttcagctagaaactagacgactccataaggtttaagaaaatcccaagtaaataattggtttcagcagacattacagttgaagragttaagccacttgagaataagctgccttcgtaacaatactaagagaataacactagtttcaaggacgtgggagattatgacacgatcaaaatatgattaaatacctcaaatgtctttatgacacacaaacaccattccaagcttgagtctacaggtattttcttctccacctcctgacaatgaagcacagcgtctcttaatttattatttgaacggtagagagcaaccagtctgatgttaaggtagagatcgtctggtctcgcacagagttctgttcgaatcatatccaagagctgat

SEQ ID NO: 9463 - DNA, 600 bp, Chicken  19866894204989_1
atgtgtgcagtgctgcatgctaactgtcacccttcatgcatgcacaaccacacccgtgtggcctcagataaagatgcaaaacctttctgctcttaaatgtgcagaccatgctggcacatctttctaggcacaggtgtagcttcatttccaaagagtcctccataacctctcactgcctgccagccaattgctttgggaaggaatcagaccaacacagaccttgccaagaagggagaaaagctgacccaggacccgtccttgtctcgccctgcagtgagtgtgggagggcagcagcagccrccacaggagccctatggggctgtgttgcactgtttgctttctacagtgcatggtttgtttgccctgctggctgcctgtgggatatgtatgaagaagcatttttcatgctcagtgggttaatcattagccatagacaagtggacaccgagcaattaaaagtcccaatacaaggaagaaagcataacagagcgcctttcatcttcacacggaagcaaaggcatttttcttctaccgggaattacccctaataaaacaaaccctatcacctgatgcccagaaatcaaattcctgtggctgttt

SEQ ID NO: 9464 - DNA, 600 bp, Chicken  19866894204989_2
tagcaggtgacttgaccattcatcatttttgcaagtgctattattcaccaatttccgtgccttttccagggaatgcaagaagaatgactttactggcattcatcctcctgctctccttcctcccagctgaatctgcaaaaagtagatatcctcccaaaacaagtaagtgcaacctgcctggggcacagaggtttgcaggcagcattaaaccagatgacgcactcctaagggagagaggagggtttggggtccccattcacgctcaccactatgggatctttcagagcacaccaggacacraagccctttgcacagctcgtggttgcatggcatgcacacccaatgggttttcttcttgcaggcttaaacccagtgtttggaccgcagcaggtgtacggcctgatcgatggctccgttagcatcaagtgcttctaccctcccaccacagtgaacagacacgataggaagtactggtgcagggaatcctccaggagttgcttgactgtagtatccaccagcgggtacagagcacggggctaccagggcagagtcaccatcgtcgacttcccagagcagggcatcatgctggtcaacatctca

SEQ ID NO: 9465 - DNA, 600 bp, Chicken  19866894204992_1
gttgtctatagaggacttgatattctgcactagttcactaaaaatggttttgaactaattgtgcagggccttaatttacctctaaagtgctaaaagaagggctctctatgtagcataaaaaaatgtcacagaaaacacaagaataactttaaattatcctgttacttaagtgttcctgttagagttcctccagcattggagtatgttcctcttcctatggagcagaaaggagaagagaggcagtgctcctccacacaggcaactggagggaagaaactggagggaaggcaggaacagatwttccagttttaaaatgacagaatgtcagcagtaaatcacattcctctttcctaacaggaaaagtaataataataataataataaatagaagaaacaaaaaggattttacagtgcagtctgggtattgtatcatactttcttgaaagcttttgaaaatgttttatcgcatcagtgttagcagccaaggttttttacatgagaatataacactggctgctctgggttagaggaagggtttatctaactcaagtatcttgtctttaacagtggccaatagcagatgcttagggaagaatataa

SEQ ID NO: 9466 - DNA, 600 bp, Chicken  19866894204994_1
gagctgttctgcacatcctgtgctgtggaactgcccttctgtccccttgtctcagaggccttactgctggcagcctgggacacagctctccacccatccgacccacacacggttggacagctgaagaactagcgaaactgctcctgctgaaattcgctttcagttcattatctatctagtgtcactataaaggtctgagctaatcttagctgcataatgggctggtagaaagtattccatttgttatacaaataaatatttgcttcaaatgtggtttcccaaagtagggtcaccttgcaygcatctgcttccaaaaatgcatctgctttgcaacaaggtagtaattatcctttcctcaagggggttcagtttgaacctactatgtgtactagactgctggcgaagtttttaattttggtttatggtgtttgtagtttttggaggcacaggatcaaacgtttgaaatgcagtgttcatcagatactatgcaccaaccccaaatacaggtagggtttacttggtgggctttttttcttcttcaagagcagtccctttctctcatgctattttttttttgtgtgtgtgtgtgtgttcttctga

SEQ ID NO: 9467 - DNA, 600 bp, Chicken  19866894204998_1
gcaagggtttcctctcccatagtgtgtttcagcgtctgtcacggcctcgatgggaattcctttgggaaggtcagatctgggatgtgctgtgcgcagccaccttgcttcttgcccccgggaatatggtatggcaagatgcatgggctgggagcaatgggctagcaaggagccaaggtgaggagtccttctagcctaggacagacttaccagtaatgctttgtagctggagagccaagtggtgtcacccgaagacagccatcctgctcacacacaggcactgcacaacgctccttctccaayagggcttcaggctccttgggtggcaatgcagccctttggttcatgcagggtggctgcaaagtgacagtggaggacaaagtgctggtagctcagggcacgtggcattggcctcgggaagggggaggcactgagagctgctgaagaacagcagcctttgggaccactggcacagatgcaatttcagctggccaggagcaagtctgttgattgtccccatgaccaggcgttcaaggtgctgaattccctttggtagcaaagagcagagcagcactctctgccaagatgagagattttcagagc

SEQ ID NO: 9468 - DNA, 599 bp, Chicken  19866894205000_1
  misc_feature (1)..(127): n is any nucleotide
nnnnnnnnnnnnnnnnnnnnnnnnnnnnnnnnnnnnnnnnnnnnnnnnnnnnnnnnnnnnnnnnnnnnnnnnnnnnnnnnnnnnnnnnnnnnnnnnnnnnnnnnnnnnnnnnnnnnnnnnnnnnnnnatcagatcccctgagtcatcttttctcaaggccaaacagactcaggttgcttctgagtttctttcctttcctcataagagaggtgctccaggccctttgtcatctttgtggccctccactgaattctttccaggagatccctgcctttttttttgtaccggggagcccagaaytggacacagtgctccaggcaaggcctcaccagggcagagtagagggggaggatcaccttcccttgacctgctggccacactctttttaatgcgccccaggccaccattggtcctcttggccacaaaggcacgctgctgactcctggccaacctttgtgcaccaggatacccagaccactctctgcagagctcatctccagcaggtcatccctccaacctgtactggtgcatgcagttattcctcacrtggtgcaagattctatgcttgcttttgttaaaccttgtctggttcttctctg

SEQ ID NO: 9469 - DNA, 600 bp, Chicken  19866894205000_2
gaattctttccaggagatccctgcctttttttttgtaccggggagcccagaaytggacacagtgctccaggcaaggcctcaccagggcagagtagagggggaggatcaccttcccttgacctgctggccacactctttttaatgcgccccaggccaccattggtcctcttggccacaaaggcacgctgctgactcctggccaacctttgtgcaccaggatacccagaccactctctgcagagctcatctccagcaggtcatccctccaacctgtactggtgcatgcagttattcctcacrtggtgcaagattctatgcttgcttttgttaaaccttgtctggttcttctctgctcaactctccaacctgtccaggtcctgctgaatggtagcaccgccttcaggtgcagcagccactcctccyggctttgtggtgtcagcgtacttgctgagggtggacactatcgcctcatcaaggtcactcataaagatattgaacaaggccgtacccagcactgacccctggggaccaccactagtcacagatctccaaccagactctgcattgctgatcacccccctctgagcttggctagtcagg

SEQ ID NO: 9470 - DNA, 600 bp, Chicken  19866894205000_3
ctggccacactctttttaatgcgccccaggccaccattggtcctcttggccacaaaggcacgctgctgactcctggccaacctttgtgcaccaggatacccagaccactctctgcagagctcatctccagcaggtcatccctccaacctgtactggtgcatgcagttattcctcacrtggtgcaagattctatgcttgcttttgttaaaccttgtctggttcttctctgctcaactctccaacctgtccaggtcctgctgaatggtagcaccgccttcaggtgcagcagccactcctccyggctttgtggtgtcagcgtacttgctgagggtggacactatcgcctcatcaaggtcactcataaagatattgaacaaggccgtacccagcactgacccctggggaccaccactagtcacagatctccaaccagactctgcattgctgatcacccccctctgagcttggctagtcaggcagtacctgacccacctcactgtccactcatccattccacactttctcagctttgttatcaggatgtcatgggagacagtatcagaagccttgctgaagtctaggtagatgacatccactgct

SEQ ID NO: 9471 - DNA, 600 bp, Chicken  19866894205001_1
aaagatatagacttgtttatgtggggagagaatcttgtaactcagaaagaactttcgttagcacaaggggtccaggatgtgttttgagctgctttgggtctcatgctgatttcccaaatgtacctgagctgtagttttgtggtttatcttgctcatctgcaagctgccatcataaatttgttgcatagtttagctgaccaaacagacttgtagatagaggcttgggttgctgtagttaaataagtgaaggatgaacaaaggttggaaaatcctaaatgagttcatcaaaatatctgacayctgcttaggagaagataaattctgtttaaaacaactgttgagattctttatttgtgtgtgtgcttctgtaccacagtggttgtctttgaaggtcaccgttacattgtttgttcctcctcccagtctgaaaatgtatttcacaatctctaagactaccaggtatttttcttctgtcttcagtaatgttttgtcttttgctttcagtgaattagagagttaaagtgaacaaaattatgcttctagcgtggccgttctcttttcacactgaaatgtgtttttcagtgtttcaactttcatact

SEQ ID NO: 9472 - DNA, 600 bp, Chicken  19866894205010_1
ctgcaaactttcattcccgtcataaatgacacgctataattatatttttacaaggttccctatatatgttgatttattttctttaatttctctttcattaatagactttttcttccctaggaagatgaggtgatctgaaaaatgcccactggctttttcagtgacccttttttcctttggtgctacaataccaataataaaaattaatttcctcctctgatttcctcatctgcacaaagcaaagattccttccacctgcatttgcagtctactgggaatacaaaggccaccaaatagtckgtctaaaacatacacrcattttttcatcttctttttaagtgctcactttttaattcattgacaatcacaaatagcaaaccaagtcatgcgtgggttaggtctcccccactgcytcttgtcactattttaattgattgccaattagcttgtgttagccagccagttcaggaagccacgaacattcatctcctggaatgaatgtttgcagactgtctatactagcatttacaaatgcgttatcttactggagttaattccagccatcctttaactcaaattaaatctagtctagagaagaac

SEQ ID NO: 9473 - DNA, 600 bp, Chicken  19866894205010_2
ccgtcataaatgacacgctataattatatttttacaaggttccctatatatgttgatttattttctttaatttctctttcattaatagactttttcttccctaggaagatgaggtgatctgaaaaatgcccactggctttttcagtgacccttttttcctttggtgctacaataccaataataaaaattaatttcctcctctgatttcctcatctgcacaaagcaaagattccttccacctgcatttgcagtctactgggaatacaaaggccaccaaatagtckgtctaaaacatacacrcattttttcatcttctttttaagtgctcactttttaattcattgacaatcacaaatagcaaaccaagtcatgcgtgggttaggtctcccccactgcytcttgtcactattttaattgattgccaattagcttgtgttagccagccagttcaggaagccacgaacattcatctcctggaatgaatgtttgcagactgtctatactagcatttacaaatgcgttatcttactggagttaattccagccatcctttaactcaaattaaatctagtctagagaagaactctgttattactgtgc

SEQ ID NO: 9474 - DNA, 600 bp, Chicken  19866894205010_3
tccctaggaagatgaggtgatctgaaaaatgcccactggctttttcagtgacccttttttcctttggtgctacaataccaataataaaaattaatttcctcctctgatttcctcatctgcacaaagcaaagattccttccacctgcatttgcagtctactgggaatacaaaggccaccaaatagtckgtctaaaacatacacrcattttttcatcttctttttaagtgctcactttttaattcattgacaatcacaaatagcaaaccaagtcatgcgtgggttaggtctcccccactgcytcttgtcactattttaattgattgccaattagcttgtgttagccagccagttcaggaagccacgaacattcatctcctggaatgaatgtttgcagactgtctatactagcatttacaaatgcgttatcttactggagttaattccagccatcctttaactcaaattaaatctagtctagagaagaactctgttattactgtgcttgtacatctgcttctcggattgtttggatgggatatttgttactgacagtrytgcattactaactctygctttagggcttccctggagctggcctt

SEQ ID NO: 9475 - DNA, 600 bp, Chicken  19866894205010_4
aaatagcaaaccaagtcatgcgtgggttaggtctcccccactgcytcttgtcactattttaattgattgccaattagcttgtgttagccagccagttcaggaagccacgaacattcatctcctggaatgaatgtttgcagactgtctatactagcatttacaaatgcgttatcttactggagttaattccagccatcctttaactcaaattaaatctagtctagagaagaactctgttattactgtgcttgtacatctgcttctcggattgtttggatgggatatttgttactgacagtrytgcattactaactctygctttagggcttccctggagctggccttgtctgtctttcctccttttttctggttgccattactgctcttttttcagcaacaactcttgagacctcttactaaaccagtgtgtgcaccatctatccagcacaagtttctgttctgcaaatacaatgttggccaaagtagtgtttacaccatgatgcacacctaggagatgattggaagtatgtgatgtggtgtcctatctttatactcctaaatgtacttcttcaaagcactgattaaagaaatgtcacatcg

SEQ ID NO: 9476 - DNA, 600 bp, Chicken  19866894205010_5
aatagcaaaccaagtcatgcgtgggttaggtctcccccactgcytcttgtcactattttaattgattgccaattagcttgtgttagccagccagttcaggaagccacgaacattcatctcctggaatgaatgtttgcagactgtctatactagcatttacaaatgcgttatcttactggagttaattccagccatcctttaactcaaattaaatctagtctagagaagaactctgttattactgtgcttgtacatctgcttctcggattgtttggatgggatatttgttactgacagtrytgcattactaactctygctttagggcttccctggagctggccttgtctgtctttcctccttttttctggttgccattactgctcttttttcagcaacaactcttgagacctcttactaaaccagtgtgtgcaccatctatccagcacaagtttctgttctgcaaatacaatgttggccaaagtagtgtttacaccatgatgcacacctaggagatgattggaagtatgtgatgtggtgtcctatctttatactcctaaatgtacttcttcaaagcactgattaaagaaatgtcacatcga

SEQ ID NO: 9477 - DNA, 600 bp, Chicken  19866894205010_6
atgcgtgggttaggtctcccccactgcytcttgtcactattttaattgattgccaattagcttgtgttagccagccagttcaggaagccacgaacattcatctcctggaatgaatgtttgcagactgtctatactagcatttacaaatgcgttatcttactggagttaattccagccatcctttaactcaaattaaatctagtctagagaagaactctgttattactgtgcttgtacatctgcttctcggattgtttggatgggatatttgttactgacagtrytgcattactaactctygctttagggcttccctggagctggccttgtctgtctttcctccttttttctggttgccattactgctcttttttcagcaacaactcttgagacctcttactaaaccagtgtgtgcaccatctatccagcacaagtttctgttctgcaaatacaatgttggccaaagtagtgtttacaccatgatgcacacctaggagatgattggaagtatgtgatgtggtgtcctatctttatactcctaaatgtacttcttcaaagcactgattaaagaaatgtcacatcgatgcaagtaatagttct

SEQ ID NO: 9478 - DNA, 600 bp, Chicken  19866894205012_1
gatggttgcctgaaaatccacagaaaaaaaataagccctaaatcaagaggtatcaaaacataacttttcagctgtgaataataggaagtcgtgcttaccttaaaattgtgtgctttttcatagttgaaatggttgtcgttttgagttaaggctgctcttcggaccaaggaggtgatctgcgaataggcaaagagtttcagaggttgccacaggagtgcccccttcactcccaccttcacccccagggccacggccaggagctcttggcgcttccttccccgcttcgacttgtggacgacrgcacagcttttctcattctccagccacagatcctccgagaacatcgcgctcgggtcccagatcttttccctgtcttccccggcacccggcaggctcgccgccgtcagcgcggcacagttcgtccaactgcttctgatgttagacagcagatttgaagcagctgcagcccattctgctgagacctctggcatgtgactcgaatgggccggcttgtgggacggaagaagcttctgcatctgaataagtaacggcctgtgccgtgctatttctgaaggcagatgtgcgcctggaacaatagcc

SEQ ID NO: 9479 - DNA, 597 bp, Chicken  19866894205013_1
ttctgttctgggaaggatgcaagataatatacttttactacataaagaaaattaatagtttgaagtcagataataagcaagcaaaaatattaaatgctatttctgtctcaacaatctgtgcagctgctatttcacactctgtccatttctgaagcccaaaattaagtgatgcagataaatcaaggaaggtgctgaaaagagaaatgacatggctatagtgtttcctcttcatgagagagacttctctttattccaagtagttatgtcatccaggaggcaaaatcataagaagaatcatcrgttggaaactgaaacataataaattcaaatgagaaatcaaacaacagctgaacagtgctgctgattaaccttgaacaaacccaagggaggtaccaagggtttcctgctcttgatagactgaggtcaggagttggtgtctttttggaaggtcatacaagattttaagcccagtagtggagcagctaaggaaaagtaatgatttgtggtctcacaactgcctctaccttaaaaacatttgaatttattaatcttggagtgctgatgaaagttgaaactctgtattgggtccatatacaa

SEQ ID NO: 9480 - DNA, 600 bp, Chicken  19866894205021_1
tgagaagtgagggtgtcattagcatgttgctttaattgcgtttcagatattgcattaaaccatttttgtacatttgctaagaagagcccccttccgggaggtgccccgcgtctcacgtcagctcgctgcggctcccatgtggacgtgaaatccaattaacgcattccaaacttcgtttccactgaaacacaatcaattgtaacttctttctgagccctgctgctctctctaattgttagctccagcctctgctgaataggtggttaagcaaattagtccttctcacatatgaaaattgcrctattgatgctggcagatttcatggttactgatgaggtttctcgagttaatgaaataatgaaaatgcaaaacagatttaccttttcttaataaggaaaaagataatgaactaaaattaaaattgaaactctcgctctatgcagagttactgtaatattatttcggcttcaaattaatgctggtgcttttttattttattttttacatgccagccacaaagctggttaagaatccacttcaactggggcgttctaaggacactttcactttgttgcatttgtataactgaattatgacgcg

SEQ ID NO: 9481 - DNA, 600 bp, Chicken  19866894205027_1
gtttccctgtggaggcatggagactctgcttgcggaatttctgtgaataggttctggttattctaagaggaaaggacgtgttctttgacaagtgtgcaaaggggaggaaaatataaaactgcctgtgagtgggagtccggttttgtaccctgtatctcactgaaagactgtaagaaagaattcttacattacatcaaccacaaatgacatgagaatattctttaagtttcttctgaagctggcacccaggagactcttgttcatgcagaagatatttttaaattttaaaagaaaagtcasagtgtaacttctgtttcgctctgactgttcctttttaatgtgtcccctttctgttggattcagtgttcttataggtgagccatttgtcttttttctttttctttcccttctgaacgtggtcctaattcacttgtaatcaaatgaaatatttctttgatgctaaggcctatatagggcagctgttccctcacccctgtgcctggtagtgtcagttctggagaggctctccagtgcacagcaaaatatctgaatctccacgttgttgtgaggagaaatgtctggtttcctttagatgctgtt

SEQ ID NO: 9482 - DNA, 600 bp, Chicken  19866894205028_1
tagtgggcatggtcatgatgggttgatggttgaactagatgaccttagttgtcttttccaacctttaagattctatggtttccatatttcactgtttccaactgttgatttagattgctcctctttttttcctatatcagtcatggaatctttgcttagcattcagatgtgggatgtgagcagagcatacagaagcctgtgggacagtgagggctctgtgacgctgccttccaggctggtgcctgtgcagcactccccagctctgccagcacagagacaggagggcttttggtacaggasagggatgtgtgctgatrgggtgcatggagggsctgtcagggagagctttgctccctgaagaatttccatccacatttggraggtgtgggtgcatctccagctgcaccaaagccttcagctttctgcagtcacaaactcactttgacagcctctaagccacccagatcacccaatgaatcagcactcgcttcctcttgaattttcctgatgaaacacattttccttagcragtcagcaagcagtgcaggttatgatggatggaggcataaatgaaacagcccatgtacgctgacayttagc

SEQ ID NO: 9483 - DNA, 600 bp, Chicken  19866894205028_2
atgggttgatggttgaactagatgaccttagttgtcttttccaacctttaagattctatggtttccatatttcactgtttccaactgttgatttagattgctcctctttttttcctatatcagtcatggaatctttgcttagcattcagatgtgggatgtgagcagagcatacagaagcctgtgggacagtgagggctctgtgacgctgccttccaggctggtgcctgtgcagcactccccagctctgccagcacagagacaggagggcttttggtacaggasagggatgtgtgctgatrgggtgcatggagggsctgtcagggagagctttgctccctgaagaatttccatccacatttggraggtgtgggtgcatctccagctgcaccaaagccttcagctttctgcagtcacaaactcactttgacagcctctaagccacccagatcacccaatgaatcagcactcgcttcctcttgaattttcctgatgaaacacattttccttagcragtcagcaagcagtgcaggttatgatggatggaggcataaatgaaacagcccatgtacgctgacayttagctcaatgacagaccagtc

SEQ ID NO: 9484 - DNA, 600 bp, Chicken  19866894205028_3
aactagatgaccttagttgtcttttccaacctttaagattctatggtttccatatttcactgtttccaactgttgatttagattgctcctctttttttcctatatcagtcatggaatctttgcttagcattcagatgtgggatgtgagcagagcatacagaagcctgtgggacagtgagggctctgtgacgctgccttccaggctggtgcctgtgcagcactccccagctctgccagcacagagacaggagggcttttggtacaggasagggatgtgtgctgatrgggtgcatggagggsctgtcagggagagctttgctccctgaagaatttccatccacatttggraggtgtgggtgcatctccagctgcaccaaagccttcagctttctgcagtcacaaactcactttgacagcctctaagccacccagatcacccaatgaatcagcactcgcttcctcttgaattttcctgatgaaacacattttccttagcragtcagcaagcagtgcaggttatgatggatggaggcataaatgaaacagcccatgtacgctgacayttagctcaatgacagaccagtcgagcacagccaccaa

SEQ ID NO: 9485 - DNA, 600 bp, Chicken  19866894205028_4
tccatatttcactgtttccaactgttgatttagattgctcctctttttttcctatatcagtcatggaatctttgcttagcattcagatgtgggatgtgagcagagcatacagaagcctgtgggacagtgagggctctgtgacgctgccttccaggctggtgcctgtgcagcactccccagctctgccagcacagagacaggagggcttttggtacaggasagggatgtgtgctgatrgggtgcatggagggsctgtcagggagagctttgctccctgaagaatttccatccacatttggraggtgtgggtgcatctccagctgcaccaaagccttcagctttctgcagtcacaaactcactttgacagcctctaagccacccagatcacccaatgaatcagcactcgcttcctcttgaattttcctgatgaaacacattttccttagcragtcagcaagcagtgcaggttatgatggatggaggcataaatgaaacagcccatgtacgctgacayttagctcaatgacagaccagtcgagcacagccaccaaatgggcacaacctgatcgtgctgtcagatggtctgtcctcaagatcac

SEQ ID NO: 9486 - DNA, 600 bp, Chicken  19866894205028_5
tccaggctggtgcctgtgcagcactccccagctctgccagcacagagacaggagggcttttggtacaggasagggatgtgtgctgatrgggtgcatggagggsctgtcagggagagctttgctccctgaagaatttccatccacatttggraggtgtgggtgcatctccagctgcaccaaagccttcagctttctgcagtcacaaactcactttgacagcctctaagccacccagatcacccaatgaatcagcactcgcttcctcttgaattttcctgatgaaacacattttccttagcragtcagcaagcagtgcaggttatgatggatggaggcataaatgaaacagcccatgtacgctgacayttagctcaatgacagaccagtcgagcacagccaccaaatgggcacaacctgatcgtgctgtcagatggtctgtcctcaagatcacctagatagctgctgcctttgaaagaaagctcatgggagatcaaatccctcaccttcactctttcagaagttagcttgatgcgttcttatcacattacctgtgagtgaggatctcagtaaatttgctaccatcacctgcttaccatcact

SEQ ID NO: 9487 - DNA, 600 bp, Chicken  19866894205028_6
aggasagggatgtgtgctgatrgggtgcatggagggsctgtcagggagagctttgctccctgaagaatttccatccacatttggraggtgtgggtgcatctccagctgcaccaaagccttcagctttctgcagtcacaaactcactttgacagcctctaagccacccagatcacccaatgaatcagcactcgcttcctcttgaattttcctgatgaaacacattttccttagcragtcagcaagcagtgcaggttatgatggatggaggcataaatgaaacagcccatgtacgctgacayttagctcaatgacagaccagtcgagcacagccaccaaatgggcacaacctgatcgtgctgtcagatggtctgtcctcaagatcacctagatagctgctgcctttgaaagaaagctcatgggagatcaaatccctcaccttcactctttcagaagttagcttgatgcgttcttatcacattacctgtgagtgaggatctcagtaaatttgctaccatcacctgcttaccatcactgagataatctcagtgtatacaatccatgtttcatgaagtgaacacacattgactaggactagactg

SEQ ID NO: 9488 - DNA, 600 bp, Chicken  19866894205029_1
tattactgggacatcacttcggggctcggaggcattactgggatttcaaggtggctgttggtgctgtgtgtccttcggcagctccgaatgacttgaactattctgtccatgcatggtttgtgcaaacagagtatgagtaccagactaacacagctctctgagaacagtactatttcagcaatattcatcaccagctcatcctttggagttccaatgctcttctgtaatttcagtgttgtcctgacgagaatcataatgttataaaatagacggcatataaatgttgttatgcttataacraacacagcaaggtaagtacgaatgtgctgttgtaaggctggagcttcagcaggggcttctttagcaaggagggtgataaaagagagtatctgaagaaaggatgggattccaaatccaaaggtgaacttaacgatctcatattcaggccatgcaaataatggatctagttggcagtatgttttcaagtggtagttatctgtgccaaccagcactgcttccatcactgacaaacagaaggcatacagcagtacacatccgatgcacagcatgggacgttgggttactttgctcagagcagtc

SEQ ID NO: 9489 - DNA, 572 bp, Chicken  19866894205029_2
ctgttgtaaggctggagcttcagcaggggcttctttagcaaggagggtgataaaagagagtatctgaagaaaggatgggattccaaatccaaaggtgaacttaacgatctcatattcaggccatgcaaataatggatctagttggcagtatgttttcaagtggtagttatctgtgccaaccagcactgcttccatcactgacaaacagaaggcatacagcagtacacatccgatgcacagcatgggacgttgggttactttgctcagagcagtcgttggtggaaatctcttcagtaacarcatgagaagcatcaacaccaaagagtgctgagagctgaaataactgaagttgaacagaaatgacagaacggtgcaggcgagttgggtcactgtgatgtagtcaggtctgttgatgactgtaaatgacaacagaatctttgtagtattgctgatggtgaagtgtaggagaagcgaatctaagtgttccatggctttgttctgcatgtaattctttatgaaaatggccaaaatgcacacagcagctatcagtcctgctggcacaaagaaggcga

SEQ ID NO: 9490 - DNA, 600 bp, Chicken  19866894205033_1
gaatctacaagaactaattatttcacacaacacctaacacacagcaaaggaccagctaagagaacctctcctgctgtgtgcttctgagccagcacggtcagacacaggtagtggtgtctgtaggacagaaaaacacctgtgcaggagggaggatttctatggacaagctgcattttaatgacaggcaggactggcacccaaacaaacagccaaggcctttttctcaacgtgtgatctcatcataatcctcaatttctcttctagatcaacaggttcctctttatttgtcattgtcagccyccagcacaargagccttttgtctacagctctgacccaaacacaagattttttgtccattctcggccgtatgctttctgatggactaacaggtttccaagctatagagtagaaccttgaccccagaatgggacatggttctgtgacaacatttctgtgttctgacatcgtaacttatcccatgcakctccactgacgscaacacactccaagtaaggacaacccaaaccagccaaatacacagcaccagcacgcctgtgacaaaggcagcacacattgcattaggaactgtgcaagccaca

SEQ ID NO: 9491 - DNA, 600 bp, Chicken  19866894205033_2
gaactaattatttcacacaacacctaacacacagcaaaggaccagctaagagaacctctcctgctgtgtgcttctgagccagcacggtcagacacaggtagtggtgtctgtaggacagaaaaacacctgtgcaggagggaggatttctatggacaagctgcattttaatgacaggcaggactggcacccaaacaaacagccaaggcctttttctcaacgtgtgatctcatcataatcctcaatttctcttctagatcaacaggttcctctttatttgtcattgtcagccyccagcacaargagccttttgtctacagctctgacccaaacacaagattttttgtccattctcggccgtatgctttctgatggactaacaggtttccaagctatagagtagaaccttgaccccagaatgggacatggttctgtgacaacatttctgtgttctgacatcgtaacttatcccatgcakctccactgacgscaacacactccaagtaaggacaacccaaaccagccaaatacacagcaccagcacgcctgtgacaaaggcagcacacattgcattaggaactgtgcaagccacaaagctcagag

SEQ ID NO: 9492 - DNA, 600 bp, Chicken  19866894205033_3
caggactggcacccaaacaaacagccaaggcctttttctcaacgtgtgatctcatcataatcctcaatttctcttctagatcaacaggttcctctttatttgtcattgtcagccyccagcacaargagccttttgtctacagctctgacccaaacacaagattttttgtccattctcggccgtatgctttctgatggactaacaggtttccaagctatagagtagaaccttgaccccagaatgggacatggttctgtgacaacatttctgtgttctgacatcgtaacttatcccatgcakctccactgacgscaacacactccaagtaaggacaacccaaaccagccaaatacacagcaccagcacgcctgtgacaaaggcagcacacattgcattaggaactgtgcaagccacaaagctcagagtcccaccacagcttcctcatgccctgctccctctgccatggtacagacagactgcaatagaacgccatgtcgtggccatgcatgaaaggcattgctgagaaacaagcagcgctaaggcaaaagttagttttctcaatttgctacagcacatccccatgttgcaatcagcccacct

SEQ ID NO: 9493 - DNA, 600 bp, Chicken  19866894205033_4
ccaaacaaacagccaaggcctttttctcaacgtgtgatctcatcataatcctcaatttctcttctagatcaacaggttcctctttatttgtcattgtcagccyccagcacaargagccttttgtctacagctctgacccaaacacaagattttttgtccattctcggccgtatgctttctgatggactaacaggtttccaagctatagagtagaaccttgaccccagaatgggacatggttctgtgacaacatttctgtgttctgacatcgtaacttatcccatgcakctccactgacgscaacacactccaagtaaggacaacccaaaccagccaaatacacagcaccagcacgcctgtgacaaaggcagcacacattgcattaggaactgtgcaagccacaaagctcagagtcccaccacagcttcctcatgccctgctccctctgccatggtacagacagactgcaatagaacgccatgtcgtggccatgcatgaaaggcattgctgagaaacaagcagcgctaaggcaaaagttagttttctcaatttgctacagcacatccccatgttgcaatcagcccacctgatgaagcacag

SEQ ID NO: 9494 - DNA, 600 bp, Chicken  19866894205037_1
cttccacagtagcatgtggcagcgcggtggagtctggaaggaaatgtgcagatctcgacaattcagtttcctggaggcaaagcctctgaaagtaccacccctgttaaaagccagcgcaggctttggttcttgttggagctgcctcaccccagagtgctccacactgcttccttgagtcgtactgtcattaaggagttccaattctccttcaccatgagatgagatagtgactggagaggttctgattaagaactgaagagattacccagtctcttctttggtcttctgccttcatttccygaatccaatatcacagagatgctaaagatgcttcagcaagttccctgcacatgatgcacctctctccttgctcattgtgttgctcattgtgtatatttctctcttgtctcttgatttctctggaattgtatttggtgttgaagcaatctctaattatctgtacgttcacattgctgcatttgtggctttggatcccaaagggatgcagacgttgcttgttatttaccagtagcaagctagaaataactcatctgtctgtgcaagtgtaggaaaatagatgagttgaagaatggcattgaa

SEQ ID NO: 9495 - DNA, 590 bp, Chicken  19866894205037_2
aaagaggagaaatggagatgataacttcaaggtagaagacatcagtgcctaaggcatcactttgaacactccttgagaaggatcatatgtgatgccccagtcatctagggccagattgccaacccagcagccatctctcacagataaactggattcttaacagatggctgagacaaagccaggccaagtgctgggccaatgcacagtggctgtggcactgctgttgtccctggtgcagtattagctattgctctgagaagctgccttagctgatggcagatgctgaccagatccaatccragccaagacaggagaaaattaaccaaggaaggtgaagagctgtagagttcatgcagagggctgactgctgttcaggaggggccctcagcctgtgctgcatgtgtgagagccatgtccttacagaggagcagggaattccttgctctgtccaccagacttattccaaggggtcccttctgcattggtaactcttcagatgccatctgtcctagctcccatagtggaatcatagaagagatgaggaatgtcattctaatttggctgtgttggggaattatttggaaacattt

SEQ ID NO: 9496 - DNA, 600 bp, Chicken  19866894205042_1
tggacatcttgtgtcaccatttcccctcacagtgcctcagttccccttttacaaaacagacgtaatatttccatgatttaatggaccccaagaggattcattaaatggcttcttctttgaaatgctcaagattttaagtactctaaatgaatcagccttatttatagctgtaccataaagcagcactatatatcactatatcagaggaaggcagagttcagccaagtcagatgaggatgggatttttgtgtggaaagaaagttaggctgtggtggccacaaaggtagttagtaagaaagygagggaagagaggaatttggacttctacttttcttgtgttttactttttgtgcrttgaaaagctccccaaacttctatataggcgctttttactcttgaatcagtatatcactgacaactgtagcagatcttgactcatggctacaagaacctaccacagaaagactggttatgttaagggaaatttgtagctaatgcccatgaagaaccttattaaggtcaagaaacaaaacacctaaaccgagctgctgacatcagttgaatttgtgcagcatcagcatgcagagataaaaagtgaaa

SEQ ID NO: 9497 - DNA, 600 bp, Chicken  19866894205042_2
aacagacgtaatatttccatgatttaatggaccccaagaggattcattaaatggcttcttctttgaaatgctcaagattttaagtactctaaatgaatcagccttatttatagctgtaccataaagcagcactatatatcactatatcagaggaaggcagagttcagccaagtcagatgaggatgggatttttgtgtggaaagaaagttaggctgtggtggccacaaaggtagttagtaagaaagygagggaagagaggaatttggacttctacttttcttgtgttttactttttgtgcrttgaaaagctccccaaacttctatataggcgctttttactcttgaatcagtatatcactgacaactgtagcagatcttgactcatggctacaagaacctaccacagaaagactggttatgttaagggaaatttgtagctaatgcccatgaagaaccttattaaggtcaagaaacaaaacacctaaaccgagctgctgacatcagttgaatttgtgcagcatcagcatgcagagataaaaagtgaaaacacatagcccagtagtgaatatgacttcattatggacacgctgtattctccaa

SEQ ID NO: 9498 - DNA, 599 bp, Chicken  19866894205049_1
  misc_feature (1)..(93): n is any nucleotide
nnnnnnnnnnnnnnnnnnnnnnnnnnnnnnnnnnnnnnnnnnnnnnnnnnnnnnnnnnnnnnnnnnnnnnnnnnnnnnnnnnnnnnnnnnnnnataattcttttagaggggggcttcctacagttggaaggactctcgttttctgccacaaggagagtagcagcaatcatgtgagtcacagagagacagaggatgatgtatggaattggcaatttctgtgaaaggatctgcgtttccaaccatacaagttttttattacagattagaaaggaattccaggaagatcttgttaattaccawtcagaagaccttgtacattaattggttgctgtttattaattgatgcattaattggtgcaggtgttcacacagaagtgaacttcactgaagaatttgcctaagtgctaagaatttagtatgggaagaggttgcacattgttaaacaatccacagatgttgctcaaagagctgttctgaaaaaaggctcagattcctaaaggctttccaaatacaaaggcctcctaaatctagatgtcttctaagtttttattctataaaattctcttgagcggacacacatatctttttttatctgaaat

SEQ ID NO: 9499 - DNA, 600 bp, Chicken  19866894205054_1
tactccatgcttattcaaaccggagatttccttctaataaaatcatttaacccactgattttttgagtaactaagtcaaaactctttgcagaaccttttaatttgtggtattgagtttgctacgcagcaaacaagaatagccaaaaacgtcttacaagaaattttacccatggatcggccgaaatggaagatgttcaacagaggatccaagactaacagacagagatcccttgtgctaacagctatagcagggggaaacaaagagtcctgatgatgaagtgtgaatgggcaagtcctcaygcatccagaccaagtgccccacgtttggtccccagcactctccttcttcgccttaggtacctccaagtacaaccaacacccgttccctgttaaggtgcaaacacggctccccgagacatttgtgaagggccctaaggagccctctgtgaaatctgtgcttgtctccactattactactttacactagaaactacaaattacttcatttttcccgatctccatacaaatataaaagatgaagctatctgaaaaccatatcatctaattatgctacattacagtgctggagatcattgctaa

SEQ ID NO: 9500 - DNA, 600 bp, Chicken  19866894205056_1
atacaaggcatctctattggcctctgcggcgcagcaaattatgaggcagtaatacttggatgctctgacctggatttcatacataatccatcagggcaatcccaccagatcgggtctccggaggcacaaacaatgcaacagtgataattaaacaaaagcgagatggacagaacgggtggcacagtaatcactgccagtactgtggggaaggaacgggacactgagcctgtctgcatatccctgcactttgggtatgccaacgttaccagttcttggaaggcgaaggcgtgttcagagggrgtgctttggtgggaggtgtgggaggtgcagggctggctgctggcaaactggggtttcacatccctttagtgggaccgcatctggcagtgcaaagggaaaggtttgcagaaaacagacagaaatgaagaaggaaatcttctggtcaaaccaaaagcacagagcgatgcgtctgcttggttcagatgtcacagcaaaggagatccgcagcgtggtcggcagtgtgtcatccccagggctgcacctgggctcccagggctcctgtcagagcttcaccttcccaattagtttaatcaggtctgt

SEQ ID NO: 9501 - DNA, 600 bp, Chicken  19866894205056_2
atgcagagacacagctcggggtcaattcgacggcgggtttttcagtacacacagctttgagtcacgcagaggaacgaacgccttccactgcaggcgcagttcacatttcccagccaatgggaagttctgctcaggattcctttcctggaggagggcctcggctcccctcgaggcccacgcaggcagggggggcaccgagcaaatccttcccgatgccaaacggtccaacgcggctcagagcaaaatggtcagcagcaaaatgggtccgtggaaacctgcaggcactgctgggacacggcygttgcagcacagtccctccctcatccatcccagcggcgtgcacagggatgagctgcaccccgtgcccacacgctcccgctgcctgcactccatgcagcacagcccgcagcrgggggaccttgctaaaagctcgtttttaatgaagcatttgggtttatccaaaatgttacycacctgtcagggggaagggatcccgatgggtgcgttcctccagctgagctgctccggctctgcccagtgcatggtgacatggggacacagggatgcccatggggcacagggccccgcaacctgcccggc

SEQ ID NO: 9502 - DNA, 600 bp, Chicken  19866894205056_3
agccaatgggaagttctgctcaggattcctttcctggaggagggcctcggctcccctcgaggcccacgcaggcagggggggcaccgagcaaatccttcccgatgccaaacggtccaacgcggctcagagcaaaatggtcagcagcaaaatgggtccgtggaaacctgcaggcactgctgggacacggcygttgcagcacagtccctccctcatccatcccagcggcgtgcacagggatgagctgcaccccgtgcccacacgctcccgctgcctgcactccatgcagcacagcccgcagcrgggggaccttgctaaaagctcgtttttaatgaagcatttgggtttatccaaaatgttacycacctgtcagggggaagggatcccgatgggtgcgttcctccagctgagctgctccggctctgcccagtgcatggtgacatggggacacagggatgcccatggggcacagggccccgcaacctgcccggccccgcatcccgggaccctgcacacagccatgcacacatcctaaacgagagccaccgcctccaccttcatccccagcaaatttctgactctgttggtccaaagggcgaccgc

SEQ ID NO: 9503 - DNA, 600 bp, Chicken  19866894205056_4
ggcccacgcaggcagggggggcaccgagcaaatccttcccgatgccaaacggtccaacgcggctcagagcaaaatggtcagcagcaaaatgggtccgtggaaacctgcaggcactgctgggacacggcygttgcagcacagtccctccctcatccatcccagcggcgtgcacagggatgagctgcaccccgtgcccacacgctcccgctgcctgcactccatgcagcacagcccgcagcrgggggaccttgctaaaagctcgtttttaatgaagcatttgggtttatccaaaatgttacycacctgtcagggggaagggatcccgatgggtgcgttcctccagctgagctgctccggctctgcccagtgcatggtgacatggggacacagggatgcccatggggcacagggccccgcaacctgcccggccccgcatcccgggaccctgcacacagccatgcacacatcctaaacgagagccaccgcctccaccttcatccccagcaaatttctgactctgttggtccaaagggcgaccgctctgggtttgggtttggcatcgactgagagaagtcctcggtgcgttctgtgctaaataac

SEQ ID NO: 9504 - DNA, 599 bp, Chicken  19866894205071_1
  misc_feature (1)..(167): n is any nucleotide
nnnnnnnnnnnnnnnnnnnnnnnnnnnnnnnnnnnnnnnnnnnnnnnnnnnnnnnnnnnnnnnnnnnnnnnnnnnnnnnnnnnnnnnnnnnnnnnnnnnnnnnnnnnnnnnnnnnnnnnnnnnnnnnnnnnnnnnnnnnnnnnnnnnnnnnnnnnnnnnnnnnnnnntgctttgtgttgttcagtctttgaaaggcatagtaaacaatttctttaataaaatatcgcagaattttgacaagatctttagaattactgatatagcattaacagggtattttgatttgcatttcaccacacrtaaaagagcagcaaagactgaggaagaaattattcgtaaaaagaccaaatgcaaagtgaacaaaacttaataagttggtgtagccatcagggtgtaagtgatcagttatgagtcaactggtgaggaagcagaaaatttcatccaggatttgcacttggcttttatttttggtagcctgtgaggccatgtttggtgagagtgctctttcttccaaaataagatcattcttgctagtgctgtgttctaacattgcatgaaggctgtttgacgagggagcagtttcctgagagatgcaaatc

SEQ ID NO: 9505 - DNA, 600 bp, Chicken  19866894205073_1
acaaaatactgagttatgttgtacccccaactgtgagacttgtgcacatatttgttagaaagattgcgagtgttttagtaagccactctggacccaaagagaaggcctttgagagtaccaggaaaggtacccaaagagaacctttgggttctctataattttcatcctgaagctgttttcatatcactgttgactggtattattattttaaagcaactaaatgacttaagaatcttaaatcatgttaaaagcgcctttggatagtgttccccataatgtttgtgaaacccctcttactckgagtgcgctcacatactcacttgttgacactgcctagggagagygatgagtgaagatgcagaactggattaaagtaatccattgattctatgatcctataataaaacaggaggcataacttttggagcagcattcgtggcagttcatacttatstagaagctaggaaagggctgacatttccttagtcctactttaagatgttgtacctggaggtacacatgccrtgttagcagcagagccaagcctcccaacagcaggcattgggtcaagctggctacagcaagaaaacagaaaacagg

SEQ ID NO: 9506 - DNA, 600 bp, Chicken  19866894205073_2
cacatatttgttagaaagattgcgagtgttttagtaagccactctggacccaaagagaaggcctttgagagtaccaggaaaggtacccaaagagaacctttgggttctctataattttcatcctgaagctgttttcatatcactgttgactggtattattattttaaagcaactaaatgacttaagaatcttaaatcatgttaaaagcgcctttggatagtgttccccataatgtttgtgaaacccctcttactckgagtgcgctcacatactcacttgttgacactgcctagggagagygatgagtgaagatgcagaactggattaaagtaatccattgattctatgatcctataataaaacaggaggcataacttttggagcagcattcgtggcagttcatacttatstagaagctaggaaagggctgacatttccttagtcctactttaagatgttgtacctggaggtacacatgccrtgttagcagcagagccaagcctcccaacagcaggcattgggtcaagctggctacagcaagaaaacagaaaacaggatcacggtgtcctatcttgcagtcatagagcagagactgagtat

SEQ ID NO: 9507 - DNA, 600 bp, Chicken  19866894205073_3
ataattttcatcctgaagctgttttcatatcactgttgactggtattattattttaaagcaactaaatgacttaagaatcttaaatcatgttaaaagcgcctttggatagtgttccccataatgtttgtgaaacccctcttactckgagtgcgctcacatactcacttgttgacactgcctagggagagygatgagtgaagatgcagaactggattaaagtaatccattgattctatgatcctataataaaacaggaggcataacttttggagcagcattcgtggcagttcatacttatstagaagctaggaaagggctgacatttccttagtcctactttaagatgttgtacctggaggtacacatgccrtgttagcagcagagccaagcctcccaacagcaggcattgggtcaagctggctacagcaagaaaacagaaaacaggatcacggtgtcctatcttgcagtcatagagcagagactgagtatcatacaggctaacaacttgtttgcgcactgtttatagaaaagggtaataaaatgcagtgatgcccagcaaggtgcttttcaatgaaggatttattatatatcagggagag

SEQ ID NO: 9508 - DNA, 600 bp, Chicken  19866894205073_4
ttaagaatcttaaatcatgttaaaagcgcctttggatagtgttccccataatgtttgtgaaacccctcttactckgagtgcgctcacatactcacttgttgacactgcctagggagagygatgagtgaagatgcagaactggattaaagtaatccattgattctatgatcctataataaaacaggaggcataacttttggagcagcattcgtggcagttcatacttatstagaagctaggaaagggctgacatttccttagtcctactttaagatgttgtacctggaggtacacatgccrtgttagcagcagagccaagcctcccaacagcaggcattgggtcaagctggctacagcaagaaaacagaaaacaggatcacggtgtcctatcttgcagtcatagagcagagactgagtatcatacaggctaacaacttgtttgcgcactgtttatagaaaagggtaataaaatgcagtgatgcccagcaaggtgcttttcaatgaaggatttattatatatcagggagagaggggaagaggagaaaggaagaaagaaagagaaagaaaagattccttgcattccagaaacgtagccagagg

SEQ ID NO: 9509 - DNA, 600 bp, Chicken  19866894205075_1
tatagggccgttatgggatcccatacctgagcaccatgaggctctgcaccatctccttgcccagatagaggtccatgctgtccctgttatctatagggccgttatagggccgttatagggccccatacctgagcaccatgaggctctgcaccatctccttgcccagatagaggtccatgctgtcccgtgttatctataggaccgctataggatcccatacctgagcaccatgaggctctgcaccatctccttgcccaggtagtggtccatgctgtccctgttatctatagggccgttatrggatcccatacctgagcaccatgaggctctgcaccatctccttgcccaggtagtggtccatgcggtagatctgctcctcgcagaacagagcgctcagctgctccgtcagctcctccgacgtggccaaatcccggccgaacggcttctccacgatcagccggttccagctgcgcacacagatggggtctgagccgtggggagccatggggacacatacagacccatacagacccatagggagccatagggagccatggggagccatggggagccatggggagccatagggatcagccggtt

SEQ ID NO: 9510 - DNA, 600 bp, Chicken  19866894205075_2
gctgctccgtcagctcctccgacgtggccaaatcccggccgaacggcttctccacgatcagccggttccagctgcgcacacagatggggtctgagccgtggggagccatggggacacatacagacccatacagacccatagggagccatagggagccatggggagccatggggagccatggggagccatagggatcagccggttccagctgcgcacacagatggggtctgagccgtggggagccatggggacacatacagacccatagagacccacagagatccatagggagccatgggragccatagggacccatagggatcagccggttccagctgcgcacatggacggggtctgagccgtggggagccatggggacacatacagacccatagagacccatagggagccatagggagccatggggagccatgggaagccatagggacccatagggatcagccggttccagctgcgcacatggacggggtctgagccgtggggagccatggggacacatacagacccatagagacccatagggagccatagggagccatggggagccatggggatcagctggttccagctgcgcacacg

SEQ ID NO: 9511 - DNA, 600 bp, Chicken  19866894205083_1
tgacagggttttgttttctctgcatctgatgtgtacccaaacccctggcatttaattcataagtgaagctctatagcctctgcttacaagcacagtgaggactgggacatctcccaaaggatctgacataacagggtccatagatagctatggcctctcatgattgcttatacaaattaaaacaaatagtgaggtagcgggtgtgggtggaaggaacagaagtagcagacccatagcaagtacacataagcaccctgaggtgaacacagaggaatgtaatggagcagagaggagctggarttccatctgcctgcatctacccaggtgctggggagcttctcagctcacaggtgaaatttctgtgctaagcgggtgctgggacctgggtgaggaggactgtgaggaagggcatgacaggtaacatagggatgtaccgctgtaagaagcagagaagtgagccccgaatagctgtgcactgaggttgcacaggatcagaagtaagyttttagctcgaatcttccaaaagctgggcctcaagtgctggcattcactagcagctttaaggcaaggcttatttttctcttggtatttgtgttgtta

SEQ ID NO: 9512 - DNA, 600 bp, Chicken  19866894205083_2
tgggtggaaggaacagaagtagcagacccatagcaagtacacataagcaccctgaggtgaacacagaggaatgtaatggagcagagaggagctggarttccatctgcctgcatctacccaggtgctggggagcttctcagctcacaggtgaaatttctgtgctaagcgggtgctgggacctgggtgaggaggactgtgaggaagggcatgacaggtaacatagggatgtaccgctgtaagaagcagagaagtgagccccgaatagctgtgcactgaggttgcacaggatcagaagtaagyttttagctcgaatcttccaaaagctgggcctcaagtgctggcattcactagcagctttaaggcaaggcttatttttctcttggtatttgtgttgttaacaactttggcagggtcttggcctcatcttaatgtagagagtaggagcaaaatccctgaaaactcagacaccgcttttcagggcaggaaactcatttggttaatgctaaaaggattttctgatacaacacgtctctacagcagggacacttaattcctctcagatctggccttaaatttgtgcttacgctgaaaatgtattaa

SEQ ID NO: 9513 - DNA, 600 bp, Chicken  19866894205088_1
gagcatattctcacttgctgcagcttaggatcttgttactctgctcacattgctgcactttccatcatgttacaatatcttaactgtataaatgtagaacttgaactctgaaagtccgcatttgaggaataaaggaatgacgctttctaacaccacattggagttggagagtttttcttcccacatgtcagatgacactattaccatctgaccatgtaaaaagtcagcctccctcctgtttagaagatcccttgaagtagtggaaggccatgatgccttctccaggcttaacaggctcayatccctcaacctttcttcacaggagaggttctccagccctctgatcatctttgtggccctcctctggacttcctccaacacctccatatccttcttgccctgggaccccatggagagcttgggggctttttggagaagattcggaatttctgagttaacttctgattagttcagtcttactgtgtgtctctattttttgctttcttagtcatgttttgacacacatttctattttggctttcatataaataagaagctataaatcagaagctataaatcacagctgatcctctcctaaga

SEQ ID NO: 9514 - DNA, 599 bp, Chicken  19866894205095_1
  misc_feature (1)..(30): n is any nucleotide
nnnnnnnnnnnnnnnnnnnnnnnnnnnnnntgaatattgctgggatggaagtagaggttgagccttcccaatagtattctgtacatttcgttgctgtgcaacacatgacagcagaggggcagtctgactaagctgaaaaacagtgtttggtatctgataatttgctctatcaattattattattgtgctctttgtttctgttgtagttttcatggaaataaatagaaggcattacttttggagtgaccaacatacattggtctgctgcaggattgacagtgggtttagtgggcatcaagygggcagtgctgtgccagagcttggagtacctctgggttttgagctgtcttgcctttctacaagcagctcctcgggagagtggaaaccagtgagaagctgcctggcacagcctaacatcgtcatggctgatggcatcagttataagctaggtacctaggtgcaaccaagggaggctgagctgtgtcacgtctctcagatttatttatcagttacctttggacttctacctctttccatcaattttatatggcactgaagtgactagctttaactgcatgccttgatattacacaaaatga

SEQ ID NO: 9515 - DNA, 599 bp, Chicken  19866894205098_1
  misc_feature (1)..(177): n is any nucleotide
nnnnnnnnnnnnnnnnnnnnnnnnnnnnnnnnnnnnnnnnnnnnnnnnnnnnnnnnnnnnnnnnnnnnnnnnnnnnnnnnnnnnnnnnnnnnnnnnnnnnnnnnnnnnnnnnnnnnnnnnnnnnnnnnnnnnnnnnnnnnnnnnnnnnnnnnnnnnnnnnnnnnnnnnnnnnnnnnncctgtttatttgaaatgtaaatcaagtgcttcggagtgttcaccatccctaatgttaattgggcatcttgctttaatcattcttaggggaagaataatacagctctggagaataagctataaraaatgcggtttaaaattagagattaggtttcgaggattacttctgatagtaactgagggacrcagctttggcatttgcagtattcctgaagcagtgagaaagcatattgcatgcagtgtgtaaatgcgtgcattccatgttcawgcagtgggaaaaacgcggtacctggattacaaaacagcatcagagttgcttttgtgacatttggatgaggcacacccgggaacgcactgctgggcatcactggaagggatcgtgtgaagcattgcagccttggtgtgaagcagtccaagctgtag

SEQ ID NO: 9516 - DNA, 599 bp, Chicken  19866894205098_2
  misc_feature (1)..(115): n is any nucleotide
nnnnnnnnnnnnnnnnnnnnnnnnnnnnnnnnnnnnnnnnnnnnnnnnnnnnnnnnnnnnnnnnnnnnnnnnnnnnnnnnnnnnnnnnnnnnnnnnnnnnnnnnnnnnnnnnnnncctgtttatttgaaatgtaaatcaagtgcttcggagtgttcaccatccctaatgttaattgggcatcttgctttaatcattcttaggggaagaataatacagctctggagaataagctataaraaatgcggtttaaaattagagattaggtttcgaggattacttctgatagtaactgagggacrcagctttggcatttgcagtattcctgaagcagtgagaaagcatattgcatgcagtgtgtaaatgcgtgcattccatgttcawgcagtgggaaaaacgcggtacctggattacaaaacagcatcagagttgcttttgtgacatttggatgaggcacacccgggaacgcactgctgggcatcactggaagggatcgtgtgaagcattgcagccttggtgtgaagcagtccaagctgtaggcagatgaacgcggctcccactgcgtgttctcagcgtaacagatgtgctttatcagctttgg

SEQ ID NO: 9517 - DNA, 599 bp, Chicken  19866894205098_3
  misc_feature (1)..(33): n is any nucleotide
nnnnnnnnnnnnnnnnnnnnnnnnnnnnnnnnncctgtttatttgaaatgtaaatcaagtgcttcggagtgttcaccatccctaatgttaattgggcatcttgctttaatcattcttaggggaagaataatacagctctggagaataagctataaraaatgcggtttaaaattagagattaggtttcgaggattacttctgatagtaactgagggacrcagctttggcatttgcagtattcctgaagcagtgagaaagcatattgcatgcagtgtgtaaatgcgtgcattccatgttcawgcagtgggaaaaacgcggtacctggattacaaaacagcatcagagttgcttttgtgacatttggatgaggcacacccgggaacgcactgctgggcatcactggaagggatcgtgtgaagcattgcagccttggtgtgaagcagtccaagctgtaggcagatgaacgcggctcccactgcgtgttctcagcgtaacagatgtgctttatcagctttggttcagtcacattcccgtgtgtgcgtttagaagacagaagaggaaaagtttctgtgcccatctaatccatcctctgctctcct

SEQ ID NO: 9518 - DNA, 531 bp, Chicken  19866894205106_1
caaactaaggtatgcgaacccaattaaatcagaattcaccaccaatttctaacagcctctctcctcagggaagcatttgttttatttgctcggttgtacggaaatgtcagttggttgcctaaacttttgaaggattgcctacaggtttttgccattaaaaacatacccttaagatggggcacccattttttcatttcttgataaaagacatcttttatcataccaacaagagtagtagagatagaaaggccaatcaatggcagcaaatggtttaagatagctcttgatgaattcatgaaraggattatatgacrtacttggtggtggtcagaagacactagaccagataaggcagcaagtcccttcaagtctaattttaataagaggtcttccgtattaaaaaaaaagagagagaaaagggaaaaaagcttggatggctctctgctgtggtgtaggcttgtcagtttagttcattttagagttgagcacatcaagaaagagacagtggaaaaaaccctcgaggtgccagga

SEQ ID NO: 9519 - DNA, 517 bp, Chicken  19866894205106_2
cgaacccaattaaatcagaattcaccaccaatttctaacagcctctctcctcagggaagcatttgttttatttgctcggttgtacggaaatgtcagttggttgcctaaacttttgaaggattgcctacaggtttttgccattaaaaacatacccttaagatggggcacccattttttcatttcttgataaaagacatcttttatcataccaacaagagtagtagagatagaaaggccaatcaatggcagcaaatggtttaagatagctcttgatgaattcatgaaraggattatatgacrtacttggtggtggtcagaagacactagaccagataaggcagcaagtcccttcaagtctaattttaataagaggtcttccgtattaaaaaaaaagagagagaaaagggaaaaaagcttggatggctctctgctgtggtgtaggcttgtcagtttagttcattttagagttgagcacatcaagaaagagacagtggaaaaaaccctcgaggtgccagga

SEQ ID NO: 9520 - DNA, 600 bp, Chicken  19866894205110_1
gaatgaagaatgagtgtagcctgctagttaacaagatagggcactgaaaacaataccgtttaatgtgataaaaatatgaacattacaaaaaacattcaggtgacttaaataacagaaaattataatatttatttactgctgagctttttcaccaaaccagtgaacttactgaagtcattgctgcaatacgaggaacgaagattttgtggactgttaagtcagcttttaaaagcagtgaatgcagaaacagtattttcttcagatcagtttgttcgggtagttttgtttttattttaggargaaaaaacacattcagaatctgctgactccagttttgcattataagataagaagaaaactgagtggattgcttctagcttattttagtactttatcaagtaccacaggttgctcagaaagtaaggtctcctgctacaacagctacaaagggcataatagtgctatttgatagagcaaattctcagctacagaatactgtttttcagcgtagtcactaccattagctgtgcatttttgccagtgatgagcctgcatgctgtgcttgtaaaaatctgcactagcggaagtgacccgctgttt

SEQ ID NO: 9521 - DNA, 600 bp, Chicken  19866894205110_2
ctcttctcttgcagtttttctttctgtggctccttagtttctttgaggggaagttaatttgaagtgaatgcagtagctgtggtattcagaaacagcacagcacttacttagagttttgttatgagagagagaaatagaggatagaaaagatgatattcttggtgtctacgggcttttaggatttaagtgaagagatcaggcttgccaatatttgcctttttttgaaaatactttccagggattattacattcattttaacccattttcctgacacaaaggcactctaatcaaatacctcyagctttcatttargaactttgggaagtggtgattttgttttcaatatgccttttttgctcttcagttgtatagtgtagtagtgttataaagtgcagttggatggcagctagcatgcggataggagcataaagttcatgggaccttgttgtagtcaatatacatttatagatttctttttttttgtccttcatctctactttttatatcacctttccaaaactttccttttttttttttttttaatcttttgtgtatatatcaagtgcagtggttctggacttcacttcgatgcagcattg

SEQ ID NO: 9522 - DNA, 600 bp, Chicken  19866894205110_3
gtttttctttctgtggctccttagtttctttgaggggaagttaatttgaagtgaatgcagtagctgtggtattcagaaacagcacagcacttacttagagttttgttatgagagagagaaatagaggatagaaaagatgatattcttggtgtctacgggcttttaggatttaagtgaagagatcaggcttgccaatatttgcctttttttgaaaatactttccagggattattacattcattttaacccattttcctgacacaaaggcactctaatcaaatacctcyagctttcatttargaactttgggaagtggtgattttgttttcaatatgccttttttgctcttcagttgtatagtgtagtagtgttataaagtgcagttggatggcagctagcatgcggataggagcataaagttcatgggaccttgttgtagtcaatatacatttatagatttctttttttttgtccttcatctctactttttatatcacctttccaaaactttccttttttttttttttttaatcttttgtgtatatatcaagtgcagtggttctggacttcacttcgatgcagcattgataacaaaattga

SEQ ID NO: 9523 - DNA, 600 bp, Chicken  19866894205123_1
taactcctgtgtttttcctacgtgcgtattccatcatgaaaagatgataagcaaagaatcactaagcaagctctgcagaggctttttatactttattctctctaacacagaggtaagacatgccccaattcttttccttttctttcctcactgttagctctaataagctcatactgttcactaaaacttgacagaatggactgaaaatcatacagccttttccccagcaagtaaagtgttcatcacagcaagtcagttttgagaaggaggggtcttctctacaaatcatattctttccgyatcaagcacaaaacacgcarcagctctggctcacagcaactcccagggacacaaatggaagctctgcacaagcaaggaacgcacaagcatgggctgcatcacctctgcagaaagtacacatttaaacaaacctcaaaactgaaaaaattgagaaaaaaactgaaatagggcatgaagctgcacacattgaattaggaggtcagatcaacatatttatcttacctgtaagtatttatttagctcaagtgcattctttcaaacaagatgcctataagcagccttttgatggctgctcataat

SEQ ID NO: 9524 - DNA, 600 bp, Chicken  19866894205123_2
cgtgcgtattccatcatgaaaagatgataagcaaagaatcactaagcaagctctgcagaggctttttatactttattctctctaacacagaggtaagacatgccccaattcttttccttttctttcctcactgttagctctaataagctcatactgttcactaaaacttgacagaatggactgaaaatcatacagccttttccccagcaagtaaagtgttcatcacagcaagtcagttttgagaaggaggggtcttctctacaaatcatattctttccgyatcaagcacaaaacacgcarcagctctggctcacagcaactcccagggacacaaatggaagctctgcacaagcaaggaacgcacaagcatgggctgcatcacctctgcagaaagtacacatttaaacaaacctcaaaactgaaaaaattgagaaaaaaactgaaatagggcatgaagctgcacacattgaattaggaggtcagatcaacatatttatcttacctgtaagtatttatttagctcaagtgcattctttcaaacaagatgcctataagcagccttttgatggctgctcataatcaaatgtgtcactcgtgaaa

SEQ ID NO: 9525 - DNA, 600 bp, Chicken  19866894205129_1
cagtaggcagagcactgaatgcatggcatctgtggtgtctgcattcccatcgtgcaggtgcctagctagtgtgtgtttctgcctgatggtgctgaagatgtcctcttccttctctgcatacttctttatagatctgactactttatatgggctgggatactttttcactcatcagtttccttctctttatcctggcaagacatgcatataacagaataggactctcattctaattatcttgtatggcataaaaacagcagaactggattactgtatccagagcagagtgagaagggaagygtgttcacagatgagattttgaaagaaaactwytggagtatttggatgggtgggggaaaccacaggagtaacaacgctccaactgctgtataaatgcaaaatagtaaacagggcttatgatcggaaaatgtggagtgtggctttcagactaatgtgggctgtaactcctgtcagctgaggtgtcccttcagtttcatttgcaattgtgttttgcagaagaaaatgctcctccaaagaccgaaatgccaaggaaatggagccaggagaaagtagccactgcttcaggtaattgaaatcttt

SEQ ID NO: 9526 - DNA, 600 bp, Chicken  19866894205129_2
tggtgtctgcattcccatcgtgcaggtgcctagctagtgtgtgtttctgcctgatggtgctgaagatgtcctcttccttctctgcatacttctttatagatctgactactttatatgggctgggatactttttcactcatcagtttccttctctttatcctggcaagacatgcatataacagaataggactctcattctaattatcttgtatggcataaaaacagcagaactggattactgtatccagagcagagtgagaagggaagygtgttcacagatgagattttgaaagaaaactwytggagtatttggatgggtgggggaaaccacaggagtaacaacgctccaactgctgtataaatgcaaaatagtaaacagggcttatgatcggaaaatgtggagtgtggctttcagactaatgtgggctgtaactcctgtcagctgaggtgtcccttcagtttcatttgcaattgtgttttgcagaagaaaatgctcctccaaagaccgaaatgccaaggaaatggagccaggagaaagtagccactgcttcaggtaattgaaatctttcttctttattttgtgygtgtactttcttttta

SEQ ID NO: 9527 - DNA, 600 bp, Chicken  19866894205129_3
ggtgtctgcattcccatcgtgcaggtgcctagctagtgtgtgtttctgcctgatggtgctgaagatgtcctcttccttctctgcatacttctttatagatctgactactttatatgggctgggatactttttcactcatcagtttccttctctttatcctggcaagacatgcatataacagaataggactctcattctaattatcttgtatggcataaaaacagcagaactggattactgtatccagagcagagtgagaagggaagygtgttcacagatgagattttgaaagaaaactwytggagtatttggatgggtgggggaaaccacaggagtaacaacgctccaactgctgtataaatgcaaaatagtaaacagggcttatgatcggaaaatgtggagtgtggctttcagactaatgtgggctgtaactcctgtcagctgaggtgtcccttcagtttcatttgcaattgtgttttgcagaagaaaatgctcctccaaagaccgaaatgccaaggaaatggagccaggagaaagtagccactgcttcaggtaattgaaatctttcttctttattttgtgygtgtactttctttttat

SEQ ID NO: 9528 - DNA, 445 bp, Chicken  19866894205129_4
ttttgaaagaaaactwytggagtatttggatgggtgggggaaaccacaggagtaacaacgctccaactgctgtataaatgcaaaatagtaaacagggcttatgatcggaaaatgtggagtgtggctttcagactaatgtgggctgtaactcctgtcagctgaggtgtcccttcagtttcatttgcaattgtgttttgcagaagaaaatgctcctccaaagaccgaaatgccaaggaaatggagccaggagaaagtagccactgcttcaggtaattgaaatctttcttctttattttgtgygtgtactttctttttatctttattttcttttctcctcctctgctgtgttaaaataatgtttttatagctctcctaagctgtctttttcacctgggtgtttgatggcagcaaaactgcttagcaccacttaggatgcataaaacca

SEQ ID NO: 9529 - DNA, 600 bp, Chicken  19866894205131_1
aaccattactcgcttccatgtctctctctcacctcaacacaatgcaagctggcagaagataccaaagcattagtcagcagaagaaacatgctactgttcctcttgcaatttcacattaaaactaaaccaaaaatacactattttaacttgttctatttttaatctcaaggggctccaacatttcatggtagaagaacagcgcacttctagctgatcagaacagaaaattatcatgaataattgacttcattatcattgtccgtttacttgtcttgttatgttggacattaaggactccaygctgaattctgtgcaagtgcatatctctttttatgyctgtgmattttctgcatggcaggtttaatacatcagctgagctccccttagtaaactaaaccagatagtacaagatcacatacygagatccaagcatggtatggctggcagcatgcacaacgtgatttcaaaatgctaacaatgaaataacatttagaatgcactaaagaattgtgcagtgctgctgtgggtaggatatctatatttactatycaacagtaggccagcaggaatagtttggtcctgatgagggtttttatctat

SEQ ID NO: 9530 - DNA, 600 bp, Chicken  19866894205131_2
acacaatgcaagctggcagaagataccaaagcattagtcagcagaagaaacatgctactgttcctcttgcaatttcacattaaaactaaaccaaaaatacactattttaacttgttctatttttaatctcaaggggctccaacatttcatggtagaagaacagcgcacttctagctgatcagaacagaaaattatcatgaataattgacttcattatcattgtccgtttacttgtcttgttatgttggacattaaggactccaygctgaattctgtgcaagtgcatatctctttttatgyctgtgmattttctgcatggcaggtttaatacatcagctgagctccccttagtaaactaaaccagatagtacaagatcacatacygagatccaagcatggtatggctggcagcatgcacaacgtgatttcaaaatgctaacaatgaaataacatttagaatgcactaaagaattgtgcagtgctgctgtgggtaggatatctatatttactatycaacagtaggccagcaggaatagtttggtcctgatgagggtttttatctatatattcaaaaaaataagttaaagaaaggaagtaaga

SEQ ID NO: 9531 - DNA, 600 bp, Chicken  19866894205131_3
tgcaagctggcagaagataccaaagcattagtcagcagaagaaacatgctactgttcctcttgcaatttcacattaaaactaaaccaaaaatacactattttaacttgttctatttttaatctcaaggggctccaacatttcatggtagaagaacagcgcacttctagctgatcagaacagaaaattatcatgaataattgacttcattatcattgtccgtttacttgtcttgttatgttggacattaaggactccaygctgaattctgtgcaagtgcatatctctttttatgyctgtgmattttctgcatggcaggtttaatacatcagctgagctccccttagtaaactaaaccagatagtacaagatcacatacygagatccaagcatggtatggctggcagcatgcacaacgtgatttcaaaatgctaacaatgaaataacatttagaatgcactaaagaattgtgcagtgctgctgtgggtaggatatctatatttactatycaacagtaggccagcaggaatagtttggtcctgatgagggtttttatctatatattcaaaaaaataagttaaagaaaggaagtaagaatgrtg

SEQ ID NO: 9532 - DNA, 600 bp, Chicken  19866894205131_4
actaaaccaaaaatacactattttaacttgttctatttttaatctcaaggggctccaacatttcatggtagaagaacagcgcacttctagctgatcagaacagaaaattatcatgaataattgacttcattatcattgtccgtttacttgtcttgttatgttggacattaaggactccaygctgaattctgtgcaagtgcatatctctttttatgyctgtgmattttctgcatggcaggtttaatacatcagctgagctccccttagtaaactaaaccagatagtacaagatcacatacygagatccaagcatggtatggctggcagcatgcacaacgtgatttcaaaatgctaacaatgaaataacatttagaatgcactaaagaattgtgcagtgctgctgtgggtaggatatctatatttactatycaacagtaggccagcaggaatagtttggtcctgatgagggtttttatctatatattcaaaaaaataagttaaagaaaggaagtaagaatgrtgatactggatatattcagtagcctgagaaaaatagaatcatataagattggtctggaggggacttcatgggatcatttg

SEQ ID NO: 9533 - DNA, 600 bp, Chicken  19866894205131_5
ttatcattgtccgtttacttgtcttgttatgttggacattaaggactccaygctgaattctgtgcaagtgcatatctctttttatgyctgtgmattttctgcatggcaggtttaatacatcagctgagctccccttagtaaactaaaccagatagtacaagatcacatacygagatccaagcatggtatggctggcagcatgcacaacgtgatttcaaaatgctaacaatgaaataacatttagaatgcactaaagaattgtgcagtgctgctgtgggtaggatatctatatttactatycaacagtaggccagcaggaatagtttggtcctgatgagggtttttatctatatattcaaaaaaataagttaaagaaaggaagtaagaatgrtgatactggatatattcagtagcctgagaaaaatagaatcatataagattggtctggaggggacttcatgggatcatttggtccctccttctaccctagagcgagattagcaatacctaaattattcctgacagacattttctaacccattcttcaagatgtccagtgaagtgaattctcttggcaatccactccagctcttaactatc

SEQ ID NO: 9534 - DNA, 600 bp, Chicken  19866894205131_6
gmattttctgcatggcaggtttaatacatcagctgagctccccttagtaaactaaaccagatagtacaagatcacatacygagatccaagcatggtatggctggcagcatgcacaacgtgatttcaaaatgctaacaatgaaataacatttagaatgcactaaagaattgtgcagtgctgctgtgggtaggatatctatatttactatycaacagtaggccagcaggaatagtttggtcctgatgagggtttttatctatatattcaaaaaaataagttaaagaaaggaagtaagaatgrtgatactggatatattcagtagcctgagaaaaatagaatcatataagattggtctggaggggacttcatgggatcatttggtccctccttctaccctagagcgagattagcaatacctaaattattcctgacagacattttctaacccattcttcaagatgtccagtgaagtgaattctcttggcaatccactccagctcttaactatcattaccattacaaaaatttttctaacatctagcttgcttatgtctttgcagtctgaggcagcattccttctcctgtccccactggatatga

SEQ ID NO: 9535 - DNA, 600 bp, Chicken  19866894205140_1
ggaaccacgccaatggaaacagcccagtcaagtccattaggaagatttagtaagtataaggaagggctgactgacagagaggtcaggagactttagtcttcatgatacagagaggccaagtctgcacccacatataattctttgtaagaaaaatacattctcagactatttaggtcattgtgcttaaagctgaagtgccgaagtcttcagtgatctggtagtggaacaatgcacagaagcatactgcgtagagccatgctttgctccctcctgctggaaatagcttttatttattaaaastgaaacttccttrtgaacacacacagacaaaccaagctgatgccagttaagtcatttaggctcaacttttttcaaagacaggccaccagaaccattcagtgcatggagctgagttacactgcgttttaaggcttggccatctaacctactgcattttgtgtgatttttttacaaaacagatatcaggcaacaggaaaagaaaatgtattgtattggaaatatctcaccacttagagttggaaagaaaaaagctaactaaatggcaatgctggagcactgttttcataagatttgacacat

SEQ ID NO: 9536 - DNA, 600 bp, Chicken  19866894205140_2
tggaaacagcccagtcaagtccattaggaagatttagtaagtataaggaagggctgactgacagagaggtcaggagactttagtcttcatgatacagagaggccaagtctgcacccacatataattctttgtaagaaaaatacattctcagactatttaggtcattgtgcttaaagctgaagtgccgaagtcttcagtgatctggtagtggaacaatgcacagaagcatactgcgtagagccatgctttgctccctcctgctggaaatagcttttatttattaaaastgaaacttccttrtgaacacacacagacaaaccaagctgatgccagttaagtcatttaggctcaacttttttcaaagacaggccaccagaaccattcagtgcatggagctgagttacactgcgttttaaggcttggccatctaacctactgcattttgtgtgatttttttacaaaacagatatcaggcaacaggaaaagaaaatgtattgtattggaaatatctcaccacttagagttggaaagaaaaaagctaactaaatggcaatgctggagcactgttttcataagatttgacacatgcagctgggacat

SEQ ID NO: 9537 - DNA, 600 bp, Chicken  19866894205140_3
ttctctaacttgcttcagttacaccagtggcttatacagtagtaattacagatttacggaccattgcttctccccatatgaagctaaaaaaataaacatgatcacagaaccaaagatcttcttccacatggttctcgtttggtctttgaaacatagatacctgcctagcagggattttatataagtttcaggtgttgagggaatttgtttaataggaagtgtgaaagtcagtgctttcagctttttctatttccatgatgttaatctgggccaaagctgagagttcagaagttccttccrttgcagaagccattccttccctgtggcccttggtcacaacgatgcgagctccctctcgcagttttccagctgcccaaaggacgctttgattctagcagcaactaaagctcagcgaacttcatytgagagctatgtgtcatcattaagaattaagactgttttgtatcagcattcctgcccaatttactcagactttmggaggctgactgtactgatgttgtggaaaacgccacgtatcacagtacagaatctgagtcattacaaaagctgttatattgttgttttaagagatctatttgt

SEQ ID NO: 9538 - DNA, 600 bp, Chicken  19866894205140_4
ccacatggttctcgtttggtctttgaaacatagatacctgcctagcagggattttatataagtttcaggtgttgagggaatttgtttaataggaagtgtgaaagtcagtgctttcagctttttctatttccatgatgttaatctgggccaaagctgagagttcagaagttccttccrttgcagaagccattccttccctgtggcccttggtcacaacgatgcgagctccctctcgcagttttccagctgcccaaaggacgctttgattctagcagcaactaaagctcagcgaacttcatytgagagctatgtgtcatcattaagaattaagactgttttgtatcagcattcctgcccaatttactcagactttmggaggctgactgtactgatgttgtggaaaacgccacgtatcacagtacagaatctgagtcattacaaaagctgttatattgttgttttaagagatctatttgtccttccagttattattcctcatgtgttgtgctatcacgctaccaaaggcgatgtcccagtatcttatctctgctgcttcctttatgatgactctacagagaaggtagagatcactctactgac

SEQ ID NO: 9539 - DNA, 600 bp, Chicken  19866894205140_5
agggaatttgtttaataggaagtgtgaaagtcagtgctttcagctttttctatttccatgatgttaatctgggccaaagctgagagttcagaagttccttccrttgcagaagccattccttccctgtggcccttggtcacaacgatgcgagctccctctcgcagttttccagctgcccaaaggacgctttgattctagcagcaactaaagctcagcgaacttcatytgagagctatgtgtcatcattaagaattaagactgttttgtatcagcattcctgcccaatttactcagactttmggaggctgactgtactgatgttgtggaaaacgccacgtatcacagtacagaatctgagtcattacaaaagctgttatattgttgttttaagagatctatttgtccttccagttattattcctcatgtgttgtgctatcacgctaccaaaggcgatgtcccagtatcttatctctgctgcttcctttatgatgactctacagagaaggtagagatcactctactgaccctagaagtcagtgaagctgatggtatcttgtaggccactgtattagcctggactagatatttttttaatgtta

SEQ ID NO: 9540 - DNA, 600 bp, Chicken  19866894205142_1
agcagagatgggcaatgcagccctttgcaagtgtttcttggtgctgccggtgtaaggatccttccttgctgtgcatctgctaacatggaaaagggagaagcacttgtcctgctgaactctcctcttgtggcagtattaaggcttgattcatatgggtgtgaaaggaagtaagatctgttcagttctctttattgcctccctgcatatcctttgaaagcctgagaataggtggagcagggaattctgtttaccactgtggtaaccagtgttcaaaagcagggaagttgttctgccttggcycttgcttactgcactgcccaagttacaaggaacagtctgcccctrtgtaaactgaactcaattgcagtgctttcattttccttcckttgctcttttgwcttgcatagtaatagcacctctcgttattgtaccatactgggcagtcctttgggacacttggcaagggttcaactggagccttttgtggtagtgagccttcaaagttttgctttttgctatgggtgttcttatttcaggtggcakctgctgttcctattgagaactgtcagtgttctgatgctctgacaagagaactttatg

SEQ ID NO: 9541 - DNA, 600 bp, Chicken  19866894205142_2
gccggtgtaaggatccttccttgctgtgcatctgctaacatggaaaagggagaagcacttgtcctgctgaactctcctcttgtggcagtattaaggcttgattcatatgggtgtgaaaggaagtaagatctgttcagttctctttattgcctccctgcatatcctttgaaagcctgagaataggtggagcagggaattctgtttaccactgtggtaaccagtgttcaaaagcagggaagttgttctgccttggcycttgcttactgcactgcccaagttacaaggaacagtctgcccctrtgtaaactgaactcaattgcagtgctttcattttccttcckttgctcttttgwcttgcatagtaatagcacctctcgttattgtaccatactgggcagtcctttgggacacttggcaagggttcaactggagccttttgtggtagtgagccttcaaagttttgctttttgctatgggtgttcttatttcaggtggcakctgctgttcctattgagaactgtcagtgttctgatgctctgacaagagaactttatgttgcttacaaagtatagaaaaacaagaaaacttatttcaactcct

SEQ ID NO: 9542 - DNA, 600 bp, Chicken  19866894205142_3
ggaaaagggagaagcacttgtcctgctgaactctcctcttgtggcagtattaaggcttgattcatatgggtgtgaaaggaagtaagatctgttcagttctctttattgcctccctgcatatcctttgaaagcctgagaataggtggagcagggaattctgtttaccactgtggtaaccagtgttcaaaagcagggaagttgttctgccttggcycttgcttactgcactgcccaagttacaaggaacagtctgcccctrtgtaaactgaactcaattgcagtgctttcattttccttcckttgctcttttgwcttgcatagtaatagcacctctcgttattgtaccatactgggcagtcctttgggacacttggcaagggttcaactggagccttttgtggtagtgagccttcaaagttttgctttttgctatgggtgttcttatttcaggtggcakctgctgttcctattgagaactgtcagtgttctgatgctctgacaagagaactttatgttgcttacaaagtatagaaaaacaagaaaacttatttcaactcctgccggtctgataagtctcacatcaagatcttttcaggagaa

SEQ ID NO: 9543 - DNA, 600 bp, Chicken  19866894205142_4
agcacttgtcctgctgaactctcctcttgtggcagtattaaggcttgattcatatgggtgtgaaaggaagtaagatctgttcagttctctttattgcctccctgcatatcctttgaaagcctgagaataggtggagcagggaattctgtttaccactgtggtaaccagtgttcaaaagcagggaagttgttctgccttggcycttgcttactgcactgcccaagttacaaggaacagtctgcccctrtgtaaactgaactcaattgcagtgctttcattttccttcckttgctcttttgwcttgcatagtaatagcacctctcgttattgtaccatactgggcagtcctttgggacacttggcaagggttcaactggagccttttgtggtagtgagccttcaaagttttgctttttgctatgggtgttcttatttcaggtggcakctgctgttcctattgagaactgtcagtgttctgatgctctgacaagagaactttatgttgcttacaaagtatagaaaaacaagaaaacttatttcaactcctgccggtctgataagtctcacatcaagatcttttcaggagaagagagtcctagc

SEQ ID NO: 9544 - DNA, 600 bp, Chicken  19866894205142_5
ctgtttaccactgtggtaaccagtgttcaaaagcagggaagttgttctgccttggcycttgcttactgcactgcccaagttacaaggaacagtctgcccctrtgtaaactgaactcaattgcagtgctttcattttccttcckttgctcttttgwcttgcatagtaatagcacctctcgttattgtaccatactgggcagtcctttgggacacttggcaagggttcaactggagccttttgtggtagtgagccttcaaagttttgctttttgctatgggtgttcttatttcaggtggcakctgctgttcctattgagaactgtcagtgttctgatgctctgacaagagaactttatgttgcttacaaagtatagaaaaacaagaaaacttatttcaactcctgccggtctgataagtctcacatcaagatcttttcaggagaagagagtcctagcctctcattttcttcataggtttttattgtagctttaacttagctttaaataaagattgttgtaaaacttgtcatgtagcatttcttgcttcactggataactgattaatttcttagcctgaaagaggagatgtcttgatgtgctc

SEQ ID NO: 9545 - DNA, 600 bp, Chicken  19866894205148_1
cgctgaggtctgtgagggtgggagcagctcctggctgaatgtgctccgatcagcggtctcgtgctggtgtgacatgaggatttgccctgctgctgctgagagccggtgctcgtggctacgatgctgagctgtgtaatccctaagctgtggctctgacagccctaggaggtgtaatcattctaattccactttcagggcttttggtgtcaccagggcagggacaaagggggcaatgccaagtgtgtgcgctcggtctcaaatccctgcacatggatcttggggaaaatgtgattaataagygctggggatgarcatgggtgtgtgtgatgggggtattaaccaccccaaagttgttttgtttggaggaaaaaagtgtgtatatatatgtctgtccttggatccattttgttccctttgaaagatactgtgtgggtaatggggaggagatgaggggctgcaggactgtgattcccttttggaagcactgagtgctccttgggaaggaggaagagcttcccttgaggcgttagctttgttccaacccttcctcctgctctaactttcagtcagtgtcaaagggagggaagcctacaattagga

SEQ ID NO: 9546 - DNA, 600 bp, Chicken  19866894205148_2
tgagggtgggagcagctcctggctgaatgtgctccgatcagcggtctcgtgctggtgtgacatgaggatttgccctgctgctgctgagagccggtgctcgtggctacgatgctgagctgtgtaatccctaagctgtggctctgacagccctaggaggtgtaatcattctaattccactttcagggcttttggtgtcaccagggcagggacaaagggggcaatgccaagtgtgtgcgctcggtctcaaatccctgcacatggatcttggggaaaatgtgattaataagygctggggatgarcatgggtgtgtgtgatgggggtattaaccaccccaaagttgttttgtttggaggaaaaaagtgtgtatatatatgtctgtccttggatccattttgttccctttgaaagatactgtgtgggtaatggggaggagatgaggggctgcaggactgtgattcccttttggaagcactgagtgctccttgggaaggaggaagagcttcccttgaggcgttagctttgttccaacccttcctcctgctctaactttcagtcagtgtcaaagggagggaagcctacaattaggactggtgggttct

SEQ ID NO: 9547 - DNA, 600 bp, Chicken  19866894205150_1
aggcaaatatgcttatttcagctgatttgttcatctgacaactggaaatgccaatttaggttcattgcaataatgcaataattgtgcatgcaataactgtggtgaattgagttaaatccagctggcgactggtcataagtgttgttccccagcggttggtattggagcctatcctgttcaatcttcagtgattgcctagacaagggaattgagcatgccctcagtaagttcccagatgacatcaagctgggaggaagtgttgatatgcctggggtaggatggcccttcagagaaatctgracaggctggatcgctgggctgaggccagtgggatgaagttcaacatgaccaagtgccaggtcctgyacttttgccacaacaaccctaggcagtgctacaggcttggggcagaatggctggaagactgtgtggaagagattcagggggagattcaggttggatgttaggaaaaatttctcctctggaagggcaaacatgctagaatgagctgcccagggagktggttgagtcactgcctctggacgtattcaagaaacttttagttgtacagagggacatggtttagtgggaaaatggtgg

SEQ ID NO: 9548 - DNA, 600 bp, Chicken  19866894205150_2
gcaataatgcaataattgtgcatgcaataactgtggtgaattgagttaaatccagctggcgactggtcataagtgttgttccccagcggttggtattggagcctatcctgttcaatcttcagtgattgcctagacaagggaattgagcatgccctcagtaagttcccagatgacatcaagctgggaggaagtgttgatatgcctggggtaggatggcccttcagagaaatctgracaggctggatcgctgggctgaggccagtgggatgaagttcaacatgaccaagtgccaggtcctgyacttttgccacaacaaccctaggcagtgctacaggcttggggcagaatggctggaagactgtgtggaagagattcagggggagattcaggttggatgttaggaaaaatttctcctctggaagggcaaacatgctagaatgagctgcccagggagktggttgagtcactgcctctggacgtattcaagaaacttttagttgtacagagggacatggtttagtgggaaaatggtggtatgtgaacggttggactagatggtcttggaggtcttttccaaccatggtgattctgtgattctgt

SEQ ID NO: 9549 - DNA, 600 bp, Chicken  19866894205150_3
cagtaagttcccagatgacatcaagctgggaggaagtgttgatatgcctggggtaggatggcccttcagagaaatctgracaggctggatcgctgggctgaggccagtgggatgaagttcaacatgaccaagtgccaggtcctgyacttttgccacaacaaccctaggcagtgctacaggcttggggcagaatggctggaagactgtgtggaagagattcagggggagattcaggttggatgttaggaaaaatttctcctctggaagggcaaacatgctagaatgagctgcccagggagktggttgagtcactgcctctggacgtattcaagaaacttttagttgtacagagggacatggtttagtgggaaaatggtggtatgtgaacggttggactagatggtcttggaggtcttttccaaccatggtgattctgtgattctgtgactagctgtgattgcactgttgcattcttctgcacctgggttatttccgtctctatgagatgacttttggttggaaaacgtgcagctgtgttgctgtatttctcttagtaatctctgtcactcccttaatttttacactgacctttagtagaag

SEQ ID NO: 9550 - DNA, 600 bp, Chicken  19866894205153_1
caaaatatttaaatacctgattagcaagtgcccgtaaaacctggagtttattgtgcttgatttctttaatcatgccaaactttaaataagagataaggaagaaagtattctgcttgctcgtgccctttcaatgaatggatttattttttcctaatttttatttcaaaatcttgtttttttttttttttcagttgcttttagtaaccatgtagttgtttccttttaaagaatataaaggtcagattcattaatagtattataaacctttgctaacagaaatgatagagagtctgtgcacaygtggctgagtgaagcttttgtacatctgcccataaaatcatctgcgcatcattattaattacatctatgcccagactgtaggtttttttttgtaaagctataccttacctctgattgaaatttggagtttttagtcttattttcaagtaaaacaatattatgtgttagagagagagtctgacttatgtttatacaaatatgagctctctgataagatactaacaattatttgacagttccttattatagaggatatttagggaaaactgtcactgcaaatgtagtatcagcagtgcaaga

SEQ ID NO: 9551 - DNA, 470 bp, Chicken  19866894205153_2
gtatcagcagtgcaagagaagtatatttgtggaagagtgatggtggtcacaaagagtgatggtggattcagtgatagcagatgcacatttggagtgtagaattataataactctgataagaaggttttaaggcttacatctttttatagcatcacacatatgactaagcagtaaaaagcatgttgtgcgcgttcttctttctaaaagaggttgtgtcacaacacttgatttatggcatgaaacaatgtaggattgtaatacggttgaagagcgttcatgtggcgcgttctgttcccttgrtgagcattcctcatggaacaaaatgcacacagtctgaataaatgatagaggaaaagaaagtaggtaatgttttgcttgtagctagatgcttctactacaaaataatagaacagtgttttggcatcaacaaactctgaagtatgataaagctgagacaatgtgacaccagt

SEQ ID NO: 9552 - DNA, 600 bp, Chicken  19866894205167_1
taagctaacagtagttttcttcttctacgaattaacatcaagtatctacttttctatcttacgctttcagcaggtgcaatataagagaaggcactatttgtgcaatccaatactgtcaggctgtattttgagaagcatttgcctacaggaaatatgagatgcaggcgcacccagctggtctgtgggctggcagtcccttcctgcaggggtacagcagctctactgcaggtctgtccccatgtccctttacagggctcctagaggccctgtgagccctggtttgagcagtggaagaggacrgtgggagtatcagtgctagtgtggcagggtgcaaggcgatgcttactggaaaaaccatgggctctatgtggctgtaaggtttctgagcctgagtggttgctgatgtggggcttcctttctgcattcagtagaaaattcttttcaggatcaagtctctaactgtcacccacaacaaatccagctcacagatggcatccttgagcttacttatttttatgggatttgcttttcctacgtattctgaattgcatggtatcacatgaaaattccattttgagtatctcttaataatacaacata

SEQ ID NO: 9553 - DNA, 600 bp, Chicken  19866894205173_1
tggcctagctgtcacttgtatttatagctcttccatcaccccactgtttatttgttgttttattatttgttttttcttacctaggataacagcaaagtctatacaactcatgtttcatacttagaaatctacaatgaatgtggttatgatctgttggacccaagacatgaagcttccagattagaagatttgccgtaagtaacaaaaatactagaatagacacaaaaaacagaaatcactatcagataccatatatatgtaatgctagcatttattaatacttggacaaggatagtttaraaaaaaaaaagtatgtgggtcacaaccatgcaagtccagcaaggttaaagaccttgcacttaacaggaaattcaaaacctaatctctaagtttctactgaaagaagagtttatggcctgtgttgctcttaaaataacaaatgataaatagttataagtgagtctggaaaccataagttttctcactcagtatgacagcagaaacgtgtaaatggcaatttcatcactgctgataaagtgtaccaagaactgccaatggaccaatatcagaatataactgaattttctgtcaaaatgctaa

SEQ ID NO: 9554 - DNA, 600 bp, Chicken  19866894205173_2
ttttttaatgcaacattgataaacccccttttttttttttatcatgaaggtatgagctgttctgaaaatgatgcctcctattttattatgttggccaatattccattttgttgtcatgtgacagataaacatcagaaagctagtctgaaaaatgacatggacatgtgtatgaaacagatgtgtcactgaattcctcagtgcaggaaaattgaccccctttggcatccatcaatgctgaatgtttatggatgttaagcacagtgaggttgcaggtggtgagtgtcagcagcagtgacagtratatgaaagacaagccacatttcagatggccatgcacagttgtcacatcacaaaatgaagagtgtctcaattagctcatcctcacaaatcagcagattatgaccaggaagccgcatgaggaactgaacattagcttcaacacattggaaattatattggcaatgttgacagattgcaaagtctgtgtcaggtgggtgccaagaacacacacgggaacagaaagaacactacacaagtgtgtcagggcttattggacaaatatgaggctgaaagtgacagtttcctggatcataccatcat

SEQ ID NO: 9555 - DNA, 600 bp, Chicken  19866894205173_3
ggggttaaacttttagaaataagttgtaatggtctgaaataaaatgggagtagaaattgcgtcaagtgtaattacacgatcagttatattttagttgctcagacacattcttgcaaatggcaaagtaaatagtagttacacagactttaatatatttttaagtggttactacctgagatgtatttcattttttaaatgagaattttatgtatttaaatccttttagggttttactgctagtaagcaaagtacagaagaatataatttatccaggtttgtttgaaagcacatttttcatargcatatatattctaaaactctattgcttattttactttaaaagagtgatattaaacaattccctgttaaatttcactgtgtatcattaggatttaagaactataaaaagccaaatgttgttttttctgcggcttcatattagcagcctgtgctgatattctcccaactgtgtaaggaaaacaagaaaaatactgaagaaatatattattttagaggaggaaacaaaagattagttagttcagtacgcatgcagactgttttggagtgctcttgttatctacattcttgcaaagacaggat

SEQ ID NO: 9556 - DNA, 600 bp, Chicken  19866894205174_1
aattggaataaaaatgatttgaagacttcaacttcaatgagaacaacctcaagagcctaaaattaactgtgtagttactgacaacagatgtgttttacaattgctttgaaagtatttgatatgctcattttagtgcagaaaagtcttggagcttctggctagagaagtggatgctctgctgtctcttacctcatgagagttgttgagggtcaagttctccagtcaggttactgtcttaagacaaacaggtttagtaagctcaaaagctggaagtggttctcctttacctcctcttccccycctgcaagatctctgaccatcaactgaagaactgtgttccttttctgtccatgatatgagctgtgactgcttgagggggtcaggtggaaacatcagattctcttggtgcctctgaagtcagactggagtggattgggtaggaccatgcagttttgggatatctgtttgaaagctaatgcttattttctctctttaagacagttcagtttagaatgagatttttttttattagaagaaatgagtgatcaggatgtactattctcatcaagctgttgctataagctactggtctgtcttcag

SEQ ID NO: 9557 - DNA, 599 bp, Chicken  19866894205177_1
  misc_feature (1)..(132): n is any nucleotide
nnnnnnnnnnnnnnnnnnnnnnnnnnnnnnnnnnnnnnnnnnnnnnnnnnnnnnnnnnnnnnnnnnnnnnnnnnnnnnnnnnnnnnnnnnnnnnnnnnnnnnnnnnnnnnnnnnnnnnnnnnnnnnnnnnnntttaatttcatttttgttttgcctaaggaccctgtgtggacagtaatgaccgcacgtttccgattgcctgctggcagaacctacaatgtacgagcatctgagctggcacgagacaggcagcatacggaggtggtctgcaacattcttctcctggataacactgtacargctttcagagttaatgtaagtaatctgacggtarcaatgtcactgagcttgctttcctctgyttcatttgtataggtagagtttgacttccaaaatagtattaagtatggaatagaagggaaagttttgttcagacagacatgcttgtacttgtacataccgaatcgctgtagacttagtcattctggcatcctttatagtactaacatcttaatttcaaaattgaatatacaatgtatagtttatttctggtagttttctttatrgactgaatgttgtataatgaaaacgaagttagc

SEQ ID NO: 9558 - DNA, 599 bp, Chicken  19866894205177_2
  misc_feature (1)..(98): n is any nucleotide
nnnnnnnnnnnnnnnnnnnnnnnnnnnnnnnnnnnnnnnnnnnnnnnnnnnnnnnnnnnnnnnnnnnnnnnnnnnnnnnnnnnnnnnnnnnnnnnnnntttaatttcatttttgttttgcctaaggaccctgtgtggacagtaatgaccgcacgtttccgattgcctgctggcagaacctacaatgtacgagcatctgagctggcacgagacaggcagcatacggaggtggtctgcaacattcttctcctggataacactgtacargctttcagagttaatgtaagtaatctgacggtarcaatgtcactgagcttgctttcctctgyttcatttgtataggtagagtttgacttccaaaatagtattaagtatggaatagaagggaaagttttgttcagacagacatgcttgtacttgtacataccgaatcgctgtagacttagtcattctggcatcctttatagtactaacatcttaatttcaaaattgaatatacaatgtatagtttatttctggtagttttctttatrgactgaatgttgtataatgaaaacgaagttagctttaccactcagttgaacaagaaggaagcttttg

SEQ ID NO: 9559 - DNA, 599 bp, Chicken  19866894205177_3
  misc_feature (1)..(70): n is any nucleotide
nnnnnnnnnnnnnnnnnnnnnnnnnnnnnnnnnnnnnnnnnnnnnnnnnnnnnnnnnnnnnnnnnnnnnntttaatttcatttttgttttgcctaaggaccctgtgtggacagtaatgaccgcacgtttccgattgcctgctggcagaacctacaatgtacgagcatctgagctggcacgagacaggcagcatacggaggtggtctgcaacattcttctcctggataacactgtacargctttcagagttaatgtaagtaatctgacggtarcaatgtcactgagcttgctttcctctgyttcatttgtataggtagagtttgacttccaaaatagtattaagtatggaatagaagggaaagttttgttcagacagacatgcttgtacttgtacataccgaatcgctgtagacttagtcattctggcatcctttatagtactaacatcttaatttcaaaattgaatatacaatgtatagtttatttctggtagttttctttatrgactgaatgttgtataatgaaaacgaagttagctttaccactcagttgaacaagaaggaagcttttgttcmgttccgtttgcctttttgcatttt

SEQ ID NO: 9560 - DNA, 600 bp, Chicken  19866894205177_4
ctgcaacattcttctcctggataacactgtacargctttcagagttaatgtaagtaatctgacggtarcaatgtcactgagcttgctttcctctgyttcatttgtataggtagagtttgacttccaaaatagtattaagtatggaatagaagggaaagttttgttcagacagacatgcttgtacttgtacataccgaatcgctgtagacttagtcattctggcatcctttatagtactaacatcttaatttcaaaattgaatatacaatgtatagtttatttctggtagttttctttatrgactgaatgttgtataatgaaaacgaagttagctttaccactcagttgaacaagaaggaagcttttgttcmgttccgtttgcctttttgcattttgagaaccagtaacatgtaatggcaaatcttattttcactgtgttgctaagctaaatatgttcaatcatgtggatggttatatttagttactgttgccatcttatagtacctctttgcttttgcttttctcagatggtgttcttgttctgtacctcctaatgcactgaggatggcaggaaggagaacaggaaacttgttgaattct

SEQ ID NO: 9561 - DNA, 600 bp, Chicken  19866894205177_5
tgtcactgagcttgctttcctctgyttcatttgtataggtagagtttgacttccaaaatagtattaagtatggaatagaagggaaagttttgttcagacagacatgcttgtacttgtacataccgaatcgctgtagacttagtcattctggcatcctttatagtactaacatcttaatttcaaaattgaatatacaatgtatagtttatttctggtagttttctttatrgactgaatgttgtataatgaaaacgaagttagctttaccactcagttgaacaagaaggaagcttttgttcmgttccgtttgcctttttgcattttgagaaccagtaacatgtaatggcaaatcttattttcactgtgttgctaagctaaatatgttcaatcatgtggatggttatatttagttactgttgccatcttatagtacctctttgcttttgcttttctcagatggtgttcttgttctgtacctcctaatgcactgaggatggcaggaaggagaacaggaaacttgttgaattctgagggctgttactgtgaaaagtgaatacttttccaaatgagccttgaatacattattagattttttgattg

SEQ ID NO: 9562 - DNA, 600 bp, Chicken  19866894205183_1
ttgctttttatttactgttcattatcttagagaaaggttaagagctttcagctaattaaagcttgagatgtctggggccatattcactaaagctatatgcacttaataccctctcaatatagggtgtttctctactgcagtcttatactccagtcaccttctgtctcagaacatcaattgctgtatcttgagaacagaggaaaagctttacttcattatcttccacctttaccatagaggaaatgaagtataatgcttttatgcagatttaatatttccctcccctataaccctcatctyaaactgaagcaagatctgggaagtcagcatcattacataggaagagaccaagtgggagactgcatcctgattgaaggagagacacgagttcacacctgtgtggagaaaacccatctcgtttatgtttctgcttctactgagagaagaaaaagccatgagagggcagcagcgcacaaggctgctcagcctgcgactttggtacctgaaacctatctaatgccaaagggttggatcctacgttcaggtaggttgtcattttgtgagttttcccagtctgtaaaaagtaaacacacgtgctgt

SEQ ID NO: 9563 - DNA, 599 bp, Chicken  19866894205187_1
  misc_feature (1)..(202): n is any nucleotide
nnnnnnnnnnnnnnnnnnnnnnnnnnnnnnnnnnnnnnnnnnnnnnnnnnnnnnnnnnnnnnnnnnnnnnnnnnnnnnnnnnnnnnnnnnnnnnnnnnnnnnnnnnnnnnnnnnnnnnnnnnnnnnnnnnnnnnnnnnnnnnnnnnnnnnnnnnnnnnnnnnnnnnnnnnnnnnnnnnnnnnnnnnnnnnnnnnnnnnnnnnttgccttctacgcctcgtccttgtagctgacaccagcagcggtgctgcagcacactttgacagtggaagaacaaccaccatcaaatcagaacacgaastatgtgacgcagttaaggtgccctggaaaagcttgaatattcaagcctgagttgctagtagactgctttaatgactrcttggttcctcctctctgaagaactacgyacaacaatgccataacgaagaaacgctatgtaagacactaatgataaagctgtggcctcacagtatttagaattagagcaggttgttctcttttcaactccaggatgagagcctgtcccaccatctcctgcccagtgaggttctgaatggcccctccctggaggcaytcaaggccaggctggatggggctgtg

SEQ ID NO: 9564 - DNA, 600 bp, Chicken  19866894205187_10
cagcggacagcagactgctgaatggtcccaccaaactgcctatcttaccaccatttctgaaccgctcctgcagcattaaatagcacggaatgaggtggaaatcatctgtgcagcaacacaccacagccttttctatttacaggcactgcagcagttaaggctttactgcaggcgcagtgtgttttaaggagcagcaatggtaactgatgaagtatttcaaaggatgggctcactccttgagaaaatttgctttctaggaagcaggcagtggcatagggactggctctgagcagaaccccygctgttgctaagagcagaacagtctctgccagcctgagcagcccacctccagacagggactggctctgggatgctctccagccacacagcaccatggcaccgactcagctgggcagtgaccagcacgctcaggatgcaggaggaagcaaaggcaagtctttcagaagaaactcagaagagttaacacagatgcagtcattaaaagggacttaaccattgctgaggccttataatacagagctttgtttggtctataccaaacagccagcgacagtccctgcatcccaatgcttctgtttt

SEQ ID NO: 9565 - DNA, 599 bp, Chicken  19866894205187_2
  misc_feature (1)..(125): n is any nucleotide
nnnnnnnnnnnnnnnnnnnnnnnnnnnnnnnnnnnnnnnnnnnnnnnnnnnnnnnnnnnnnnnnnnnnnnnnnnnnnnnnnnnnnnnnnnnnnnnnnnnnnnnnnnnnnnnnnnnnnnnnnnnnnttgccttctacgcctcgtccttgtagctgacaccagcagcggtgctgcagcacactttgacagtggaagaacaaccaccatcaaatcagaacacgaastatgtgacgcagttaaggtgccctggaaaagcttgaatattcaagcctgagttgctagtagactgctttaatgactrcttggttcctcctctctgaagaactacgyacaacaatgccataacgaagaaacgctatgtaagacactaatgataaagctgtggcctcacagtatttagaattagagcaggttgttctcttttcaactccaggatgagagcctgtcccaccatctcctgcccagtgaggttctgaatggcccctccctggaggcaytcaaggccaggctggatggggctgtgagcaacctgctctagatggaggtatccctgcctatagcagcgggttggagctagatggtcttaaaggtcccttccaa

SEQ ID NO: 9566 - DNA, 599 bp, Chicken  19866894205187_3
  misc_feature (1)..(96): n is any nucleotide
nnnnnnnnnnnnnnnnnnnnnnnnnnnnnnnnnnnnnnnnnnnnnnnnnnnnnnnnnnnnnnnnnnnnnnnnnnnnnnnnnnnnnnnnnnnnnnnnttgccttctacgcctcgtccttgtagctgacaccagcagcggtgctgcagcacactttgacagtggaagaacaaccaccatcaaatcagaacacgaastatgtgacgcagttaaggtgccctggaaaagcttgaatattcaagcctgagttgctagtagactgctttaatgactrcttggttcctcctctctgaagaactacgyacaacaatgccataacgaagaaacgctatgtaagacactaatgataaagctgtggcctcacagtatttagaattagagcaggttgttctcttttcaactccaggatgagagcctgtcccaccatctcctgcccagtgaggttctgaatggcccctccctggaggcaytcaaggccaggctggatggggctgtgagcaacctgctctagatggaggtatccctgcctatagcagcgggttggagctagatggtcttaaaggtcccttccaacccaaaccattctacgattctatgatgat

SEQ ID NO: 9567 - DNA, 600 bp, Chicken  19866894205187_4
caaccaccatcaaatcagaacacgaastatgtgacgcagttaaggtgccctggaaaagcttgaatattcaagcctgagttgctagtagactgctttaatgactrcttggttcctcctctctgaagaactacgyacaacaatgccataacgaagaaacgctatgtaagacactaatgataaagctgtggcctcacagtatttagaattagagcaggttgttctcttttcaactccaggatgagagcctgtcccaccatctcctgcccagtgaggttctgaatggcccctccctggaggcaytcaaggccaggctggatggggctgtgagcaacctgctctagatggaggtatccctgcctatagcagcgggttggagctagatggtcttaaaggtcccttccaacccaaaccattctacgattctatgatgattctgcaacacctggggacttcagaactgcacccacctttacacagctcacttaattggcacccaaccaatgtggtttacaacccaatgctgccactgaacactcctggcctgggaagcgctctccaactctgcagtcacactcagagaaagtggttaaggatgacttt

SEQ ID NO: 9568 - DNA, 600 bp, Chicken  19866894205187_5
agatggtcttaaaggtcccttccaacccaaaccattctacgattctatgatgattctgcaacacctggggacttcagaactgcacccacctttacacagctcacttaattggcacccaaccaatgtggtttacaacccaatgctgccactgaacactcctggcctgggaagcgctctccaactctgcagtcacactcagagaaagtggttaaggatgactttctcagcagagagagaagttggtttgcatccagctggacttaagcgttaaaggaatttcacaattcctccagtgatggrgaatgagaggttaatcattcgcccatgtttgagtaagcaggagcctgaaataatacataaaatattatgaaaacacattccagtccttcccgaagaagtctctcctgagctctacacaatgcaaagaaacacactgaacggagaagactgaggcattgcacgggcagagctggagggtgagagtgtgccctctgctccacgagatcagaaagaccagcagttagaagacatggttaacagctgcacaaatcacagctctggacttaaatgccatcctcacgaaactacccagagcccata

SEQ ID NO: 9569 - DNA, 600 bp, Chicken  19866894205187_6
agcaccaaagaagtcgggcatttgggatttttttagaaaatatatttctaaacatatgcccactgctttatggaaatcagtagttaaacaaaatcactcctttcccaggaaccaccactaagaggcattgaaattctgacttctatccaagcttttgtctggcttcgccttctggctttactgacaccagcatttcagactcagcaggaactgtatcacagaaacattattatatccacacccaaataaatgcaaacatacagttttaagaatgccagtcactttttcactagcttaaaytctcaasatgtactcctggttgagcacaccgcatgttttgtcccagtcctactgctttgtaaatcaaaatgaaaaaaagagaaactgagaagtgataaaaaagatagctatatacacaaggaaaaaataatctcattcacagcagagcctgaaaagcaaaaacatcatgcaaattcactctggctggggtaggcacaaccccagtccaagcacaggtatcgtatcgtgggatgccatgcatttaaaagaagccataccaccttctacaggaagccaaaagctgacaaaatccatacagac

SEQ ID NO: 9570 - DNA, 600 bp, Chicken  19866894205187_7
aagaagtcgggcatttgggatttttttagaaaatatatttctaaacatatgcccactgctttatggaaatcagtagttaaacaaaatcactcctttcccaggaaccaccactaagaggcattgaaattctgacttctatccaagcttttgtctggcttcgccttctggctttactgacaccagcatttcagactcagcaggaactgtatcacagaaacattattatatccacacccaaataaatgcaaacatacagttttaagaatgccagtcactttttcactagcttaaaytctcaasatgtactcctggttgagcacaccgcatgttttgtcccagtcctactgctttgtaaatcaaaatgaaaaaaagagaaactgagaagtgataaaaaagatagctatatacacaaggaaaaaataatctcattcacagcagagcctgaaaagcaaaaacatcatgcaaattcactctggctggggtaggcacaaccccagtccaagcacaggtatcgtatcgtgggatgccatgcatttaaaagaagccataccaccttctacaggaagccaaaagctgacaaaatccatacagacragttca

SEQ ID NO: 9571 - DNA, 600 bp, Chicken  19866894205187_8
ctcaasatgtactcctggttgagcacaccgcatgttttgtcccagtcctactgctttgtaaatcaaaatgaaaaaaagagaaactgagaagtgataaaaaagatagctatatacacaaggaaaaaataatctcattcacagcagagcctgaaaagcaaaaacatcatgcaaattcactctggctggggtaggcacaaccccagtccaagcacaggtatcgtatcgtgggatgccatgcatttaaaagaagccataccaccttctacaggaagccaaaagctgacaaaatccatacagacragttcactggggcacagtgcagcacagatgaaaacacagctccatacaaagcatgctttttccccttctttagccgctggtctatagaaaagagctgaaatagactattaacggcagcaatctactgacaaattcctactgtgtaagtactaaaaagctgtgcttgtgaattaaaaaagggaaaaataatcagcatccaagccagaacagagatacttactgcctcctagctaccacagcatttcttaaccgaggctgatccttatcaggaggtgcttcccttctttgcttagttttgca

SEQ ID NO: 9572 - DNA, 600 bp, Chicken  19866894205187_9
gtactaaaaagctgtgcttgtgaattaaaaaagggaaaaataatcagcatccaagccagaacagagatacttactgcctcctagctaccacagcatttcttaaccgaggctgatccttatcaggaggtgcttcccttctttgcttagttttgcagagttgagtacggtctgaaaaccgaaatacagatgcacagagaaacagaacagaaagaggaaaataagaaactaatcttgttgctctcctttcctgaaaccgcccccaaacatatgcctgtgtgcatcagatgtgggaaggactcrgatcttggcagcaggaagcatcacactctcggcagcggacagcagactgctgaatggtcccaccaaactgcctatcttaccaccatttctgaaccgctcctgcagcattaaatagcacggaatgaggtggaaatcatctgtgcagcaacacaccacagccttttctatttacaggcactgcagcagttaaggctttactgcaggcgcagtgtgttttaaggagcagcaatggtaactgatgaagtatttcaaaggatgggctcactccttgagaaaatttgctttctaggaagcaggcag

SEQ ID NO: 9573 - DNA, 600 bp, Chicken  19866894205189_1
ggacctggcttcatactgcagaagaaaggaagacaaaaaaagtaaaggaagggtacaacctgtgcaaacaggactagatgaagccagagctgtaccaacttaagcactgcacagtgtgtgtacctcagcatccgcttcccgcccaaagaacatatctgaagagatggctttagcccctgcaaacttctgccgagcttcattagattccacaactgatgtcctgttctccatatcccgcctactggtaggcctgaggaaacaacaggagatagcttaagctcaccaacacagtaagggaaracttctccctcagatcctatctgatcaaagaaaagcaagaaagccccaggcagtagctactatcagggatctcctctcccctcttccgggcagttaaatttaatgactataaagaatgggatacaacaggcatagaaatgaatgagtctttcagtgaaggctcattttctcagggttatttatgcatgttatcttctgcagtacaaagctcagactctgtcaaaatacagtagcatctctcctacagctcttagacctataccttagtcctatacaaggaaagtacagaagcagtagtgg

SEQ ID NO: 9574 - DNA, 599 bp, Chicken  19866894205197_1
  misc_feature (1)..(168): n is any nucleotide
nnnnnnnnnnnnnnnnnnnnnnnnnnnnnnnnnnnnnnnnnnnnnnnnnnnnnnnnnnnnnnnnnnnnnnnnnnnnnnnnnnnnnnnnnnnnnnnnnnnnnnnnnnnnnnnnnnnnnnnnnnnnnnnnnnnnnnnnnnnnnnnnnnnnnnnnnnnnnnnnnnnnnnnnactgaaaatagcagctgtgtgccaaagggaacctgcaaggtagcttaaaggtagcaagtgcacaacgttcccaaggtgggataagagaaaggtgctgttgaggtctcggcctgacctgagcaggttgtcctyggttcccttccacttggtgccttcagcccaaagctgcagacactgtgcagcactcctaaccccagggccatgtgatgaaagctagaaatagcagcaattaacaaccctcatttgcccagtgggactgtaaatggagcagttgcaygcccagggcacggctgggagctgaggagatcctgctaaaaatattgctgtgaatttttaaaaagaagagaaggagggaagaagtcacaactatttagcakcttcatgcacttggtgcaccctctgcaacccttgcacaagtgtcccagttccac

SEQ ID NO: 9575 - DNA, 599 bp, Chicken  19866894205197_2
  misc_feature (1)..(23): n is any nucleotide
nnnnnnnnnnnnnnnnnnnnnnnactgaaaatagcagctgtgtgccaaagggaacctgcaaggtagcttaaaggtagcaagtgcacaacgttcccaaggtgggataagagaaaggtgctgttgaggtctcggcctgacctgagcaggttgtcctyggttcccttccacttggtgccttcagcccaaagctgcagacactgtgcagcactcctaaccccagggccatgtgatgaaagctagaaatagcagcaattaacaaccctcatttgcccagtgggactgtaaatggagcagttgcaygcccagggcacggctgggagctgaggagatcctgctaaaaatattgctgtgaatttttaaaaagaagagaaggagggaagaagtcacaactatttagcakcttcatgcacttggtgcaccctctgcaacccttgcacaagtgtcccagttccactggtctatgggatcatgyggggccaccaaagttccccagccccacgtggacatcacctacacccagcatggttgccccaaggggkataatgcatacatttcttctaatgcaaatrgtacacacccacctttgtaatatttttcat

SEQ ID NO: 9576 - DNA, 600 bp, Chicken  19866894205197_3
gggataagagaaaggtgctgttgaggtctcggcctgacctgagcaggttgtcctyggttcccttccacttggtgccttcagcccaaagctgcagacactgtgcagcactcctaaccccagggccatgtgatgaaagctagaaatagcagcaattaacaaccctcatttgcccagtgggactgtaaatggagcagttgcaygcccagggcacggctgggagctgaggagatcctgctaaaaatattgctgtgaatttttaaaaagaagagaaggagggaagaagtcacaactatttagcakcttcatgcacttggtgcaccctctgcaacccttgcacaagtgtcccagttccactggtctatgggatcatgyggggccaccaaagttccccagccccacgtggacatcacctacacccagcatggttgccccaaggggkataatgcatacatttcttctaatgcaaatrgtacacacccacctttgtaatatttttcatgttttgccaggccttrtcctctgagatgcagagcactgccttgcacagaggactcacagagatgtggtgttggacctctaaaacaaaaaagtgaggagcag

SEQ ID NO: 9577 - DNA, 600 bp, Chicken  19866894205197_4
tgccttcagcccaaagctgcagacactgtgcagcactcctaaccccagggccatgtgatgaaagctagaaatagcagcaattaacaaccctcatttgcccagtgggactgtaaatggagcagttgcaygcccagggcacggctgggagctgaggagatcctgctaaaaatattgctgtgaatttttaaaaagaagagaaggagggaagaagtcacaactatttagcakcttcatgcacttggtgcaccctctgcaacccttgcacaagtgtcccagttccactggtctatgggatcatgyggggccaccaaagttccccagccccacgtggacatcacctacacccagcatggttgccccaaggggkataatgcatacatttcttctaatgcaaatrgtacacacccacctttgtaatatttttcatgttttgccaggccttrtcctctgagatgcagagcactgccttgcacagaggactcacagagatgtggtgttggacctctaaaacaaaaaagtgaggagcagaaggggctgtcttccagctctgggcttatatgtgctacccacacatttcaacataacactggtacttgggga

SEQ ID NO: 9578 - DNA, 600 bp, Chicken  19866894205197_5
gaaatagcagcaattaacaaccctcatttgcccagtgggactgtaaatggagcagttgcaygcccagggcacggctgggagctgaggagatcctgctaaaaatattgctgtgaatttttaaaaagaagagaaggagggaagaagtcacaactatttagcakcttcatgcacttggtgcaccctctgcaacccttgcacaagtgtcccagttccactggtctatgggatcatgyggggccaccaaagttccccagccccacgtggacatcacctacacccagcatggttgccccaaggggkataatgcatacatttcttctaatgcaaatrgtacacacccacctttgtaatatttttcatgttttgccaggccttrtcctctgagatgcagagcactgccttgcacagaggactcacagagatgtggtgttggacctctaaaacaaaaaagtgaggagcagaaggggctgtcttccagctctgggcttatatgtgctacccacacatttcaacataacactggtacttggggagcagttggacaatctgaatttcaggccatgggagggaggggggtgaggctgcaggctgccctggtct

SEQ ID NO: 9579 - DNA, 571 bp, Chicken  19866894205197_6
cccagtgggactgtaaatggagcagttgcaygcccagggcacggctgggagctgaggagatcctgctaaaaatattgctgtgaatttttaaaaagaagagaaggagggaagaagtcacaactatttagcakcttcatgcacttggtgcaccctctgcaacccttgcacaagtgtcccagttccactggtctatgggatcatgyggggccaccaaagttccccagccccacgtggacatcacctacacccagcatggttgccccaaggggkataatgcatacatttcttctaatgcaaatrgtacacacccacctttgtaatatttttcatgttttgccaggccttrtcctctgagatgcagagcactgccttgcacagaggactcacagagatgtggtgttggacctctaaaacaaaaaagtgaggagcagaaggggctgtcttccagctctgggcttatatgtgctacccacacatttcaacataacactggtacttggggagcagttggacaatctgaatttcaggccatgggagggaggggggtgaggctgcaggctgccctggtctg

SEQ ID NO: 9580 - DNA, 525 bp, Chicken  19866894205197_7
gggagctgaggagatcctgctaaaaatattgctgtgaatttttaaaaagaagagaaggagggaagaagtcacaactatttagcakcttcatgcacttggtgcaccctctgcaacccttgcacaagtgtcccagttccactggtctatgggatcatgyggggccaccaaagttccccagccccacgtggacatcacctacacccagcatggttgccccaaggggkataatgcatacatttcttctaatgcaaatrgtacacacccacctttgtaatatttttcatgttttgccaggccttrtcctctgagatgcagagcactgccttgcacagaggactcacagagatgtggtgttggacctctaaaacaaaaaagtgaggagcagaaggggctgtcttccagctctgggcttatatgtgctacccacacatttcaacataacactggtacttggggagcagttggacaatctgaatttcaggccatgggagggaggggggtgaggctgcaggctgccctggtctg

SEQ ID NO: 9581 - DNA, 599 bp, Chicken  19866894205203_1
  misc_feature (1)..(43): n is any nucleotide
nnnnnnnnnnnnnnnnnnnnnnnnnnnnnnnnnnnnnnnnnnnggggtggagtacccttgatatcttgtcctggccaaatgcaatggcagcagaggaggagcaagctgcttggtagggagagctctgcagctttaatccaaacgatattctaaaatatgatgataataaagtagatcacaatggtgaaagttattaatatgtcttcgaaaagcacagcagtttgagagaaaaccttttttttcataaggtagtactgtttgtcagactaagtgatatttttatcaacaccctatccactsaactaaggctttctgagaccatctgggttgtcaccagaaattcttcagaagacagctgcctttcagcagcattttgtctcctycaaatgaaactcatttttaaaactgatttcccttaacacgtgtagcactgggtaactaatagcagcaggacccagcagtgaagctgagtattgttgcagtcagtgaatgtgcttctgctttgttgttttatctctgtttgcttctaacgtgctctaaatttagtgtgcagagatcagttgaagagtgtggcagacacttcatgcctggctgttagc

SEQ ID NO: 9582 - DNA, 600 bp, Chicken  19866894205203_2
atggcagcagaggaggagcaagctgcttggtagggagagctctgcagctttaatccaaacgatattctaaaatatgatgataataaagtagatcacaatggtgaaagttattaatatgtcttcgaaaagcacagcagtttgagagaaaaccttttttttcataaggtagtactgtttgtcagactaagtgatatttttatcaacaccctatccactsaactaaggctttctgagaccatctgggttgtcaccagaaattcttcagaagacagctgcctttcagcagcattttgtctcctycaaatgaaactcatttttaaaactgatttcccttaacacgtgtagcactgggtaactaatagcagcaggacccagcagtgaagctgagtattgttgcagtcagtgaatgtgcttctgctttgttgttttatctctgtttgcttctaacgtgctctaaatttagtgtgcagagatcagttgaagagtgtggcagacacttcatgcctggctgttagctggccaatggtttaaggggtagctaatacactaaagataagggcaagatgtcagcctatcaacaacaaagatgactaacatatt

SEQ ID NO: 9583 - DNA, 546 bp, Chicken  19866894205203_3
agatgggctttaaaaaagatgctgctgtgggctggtgagaaaacaaaaagcaggagaagggaattttagtgagaaatcttgatttcagggcaacattcataaataggggaaagcaagtcctttcctctgctacccagaagggaggcagggccgcccctcctgcaggcatcttctctgtgcagaggggatgcagcaatcagctggctggtcgggctcaccccctgtgggagaagaaggccccatccaacctggccttgaatgcctctggggatggggcacccacagcttctctgggcagcygtgccagcgctttgctgctctctgaataaagcattttctcccarcatctaacctaaatctccccttttagtttaaagccactgagtgttcatacttaagggaagggcccgttctatcggcctgctggttgaggccccatgtgtaggccccacagtgggctcaggaccccggctctgggtacaggcctcctgcaggaggtgctgggtggtaaatcctgctcttggctcacatcctcataagatgaca

SEQ ID NO: 9584 - DNA, 502 bp, Chicken  19866894205203_4
aaaaagcaggagaagggaattttagtgagaaatcttgatttcagggcaacattcataaataggggaaagcaagtcctttcctctgctacccagaagggaggcagggccgcccctcctgcaggcatcttctctgtgcagaggggatgcagcaatcagctggctggtcgggctcaccccctgtgggagaagaaggccccatccaacctggccttgaatgcctctggggatggggcacccacagcttctctgggcagcygtgccagcgctttgctgctctctgaataaagcattttctcccarcatctaacctaaatctccccttttagtttaaagccactgagtgttcatacttaagggaagggcccgttctatcggcctgctggttgaggccccatgtgtaggccccacagtgggctcaggaccccggctctgggtacaggcctcctgcaggaggtgctgggtggtaaatcctgctcttggctcacatcctcataagatgaca

SEQ ID NO: 9585 - DNA, 600 bp, Chicken  19866894205207_1
tactgctcctccctgtctcaatctcagtaaaatacaaaacactcatacaaaccctattgcaagtgcatggctggtgtttctttatgtcgcgatttgttggacttatttgtgcttcagacaaagctttattactctacacagaaaaggaagataagattcacacacccatttcaatgctgtaggaaagcacatgtgtaagaataaacaaaataataaatctgtgccagagctgtagctctgcttcccctgatgttctaccactgacaggcctgtgagcagtcccttcgtgaccttccccasgtgtcaccacctcccttctgggcactgcctgatggggaagtgccaccatgccgaccctgaccaccagtgagaggtctataaatggggcctcaataggcccgaacaacttcttggtgctaaagagaagcatttcctggctctcattctgctcttccctacaccagtgtaaatcatgtgcctatctgttgaaggcagtaagttttacttcagtgtaaatgcaaccgtaatatggaagcagcatcagccatcctgctcaggaatggtatacttggaccctaatgctatggctttctaagagag

SEQ ID NO: 9586 - DNA, 599 bp, Chicken  19866894205212_1
  misc_feature (1)..(138): n is any nucleotide
nnnnnnnnnnnnnnnnnnnnnnnnnnnnnnnnnnnnnnnnnnnnnnnnnnnnnnnnnnnnnnnnnnnnnnnnnnnnnnnnnnnnnnnnnnnnnnnnnnnnnnnnnnnnnnnnnnnnnnnnnnnnnnnnnnnnnnnnnntagaaaaggggcccaggaaaaaaaaaaaagtacatctatttcatgcacatttgtgcttataattattgttatatagaccaaaggccttgaaccaaaactagtggtggtttgttgatgtagctgtagagcagtatgtggaagggctttgggacacaaactatwctgttgttaggcgtgttttttgaaagcacaattatatgtaaggaaaatatggatgctgtaaaacctactcttgttagtctgtgaacttaaaccagaagacaaatggcactcaaacctaccatttgcatgctgtcgtatttcattcaggcattcagyggtagmattgcagtgggaaggaagaggtgtgaggcagacttcagcctgtgggagctaagccatggctggcctctcgctttggctgctctgccatccttcacaactgtgcrcactgttgctcgtgctgagcttgcgtagctcag

SEQ ID NO: 9587 - DNA, 600 bp, Chicken  19866894205212_2
aaaaaaaaaaagtacatctatttcatgcacatttgtgcttataattattgttatatagaccaaaggccttgaaccaaaactagtggtggtttgttgatgtagctgtagagcagtatgtggaagggctttgggacacaaactatwctgttgttaggcgtgttttttgaaagcacaattatatgtaaggaaaatatggatgctgtaaaacctactcttgttagtctgtgaacttaaaccagaagacaaatggcactcaaacctaccatttgcatgctgtcgtatttcattcaggcattcagyggtagmattgcagtgggaaggaagaggtgtgaggcagacttcagcctgtgggagctaagccatggctggcctctcgctttggctgctctgccatccttcacaactgtgcrcactgttgctcgtgctgagcttgcgtagctcagatatccctgtgtgccccatgagtaacatttatgccttttggtgccagaagaaaaactcattagaactgtatggaagagcatcctatgaaagacataaaagctgaaagaataaaaatcctgatttgctgtttttagaaggctaatcaatctttactcc

SEQ ID NO: 9588 - DNA, 600 bp, Chicken  19866894205212_3
aaaaagtacatctatttcatgcacatttgtgcttataattattgttatatagaccaaaggccttgaaccaaaactagtggtggtttgttgatgtagctgtagagcagtatgtggaagggctttgggacacaaactatwctgttgttaggcgtgttttttgaaagcacaattatatgtaaggaaaatatggatgctgtaaaacctactcttgttagtctgtgaacttaaaccagaagacaaatggcactcaaacctaccatttgcatgctgtcgtatttcattcaggcattcagyggtagmattgcagtgggaaggaagaggtgtgaggcagacttcagcctgtgggagctaagccatggctggcctctcgctttggctgctctgccatccttcacaactgtgcrcactgttgctcgtgctgagcttgcgtagctcagatatccctgtgtgccccatgagtaacatttatgccttttggtgccagaagaaaaactcattagaactgtatggaagagcatcctatgaaagacataaaagctgaaagaataaaaatcctgatttgctgtttttagaaggctaatcaatctttactccttcaga

SEQ ID NO: 9589 - DNA, 600 bp, Chicken  19866894205212_4
cagtatgtggaagggctttgggacacaaactatwctgttgttaggcgtgttttttgaaagcacaattatatgtaaggaaaatatggatgctgtaaaacctactcttgttagtctgtgaacttaaaccagaagacaaatggcactcaaacctaccatttgcatgctgtcgtatttcattcaggcattcagyggtagmattgcagtgggaaggaagaggtgtgaggcagacttcagcctgtgggagctaagccatggctggcctctcgctttggctgctctgccatccttcacaactgtgcrcactgttgctcgtgctgagcttgcgtagctcagatatccctgtgtgccccatgagtaacatttatgccttttggtgccagaagaaaaactcattagaactgtatggaagagcatcctatgaaagacataaaagctgaaagaataaaaatcctgatttgctgtttttagaaggctaatcaatctttactccttcagacaggaaatgtcatttgttcctactccttctagctctttggaggaacagttctgaaaaggggtattcacagttgtgcacaaagtaggtttcacgagctcccaggc

SEQ ID NO: 9590 - DNA, 600 bp, Chicken  19866894205213_1
acagtttcagttcctgggagacatgaggtattagtgaacagtggtgcccattttggactttattatttactgtttccttacatgtatcttctgttattagtttaaatgtaagtaatttacatcaatccatctcagcaaggtatacaacaacaacaaaaacaacgagtcattttaaatgaattttactttaaatcccaatctaaatgtatgtgttctgcaaagtgaagtcacctaaaacgatgaaaaaaagtaaagaatttacataaattctttctttgcagcttagcacaagttaaatayaagaaagccttccagatgacataaatcacagcactctctgaagtttaartccagatctgaacccaaacactgaaccttaccaatcattaataagtgcaaagtaatattttagaataaattgagtaggaaaagacaaaggaaagaaagcagtagaaccacccttgccaactcacatgtagcctaggagtagggacaagtcttagcacaacctgtcttgccgtgactcaatctcagagctctgtcaccccagcaaataagctccggccacctcactaaggcataaggagcctttggctgagg

SEQ ID NO: 9591 - DNA, 600 bp, Chicken  19866894205213_2
attttggactttattatttactgtttccttacatgtatcttctgttattagtttaaatgtaagtaatttacatcaatccatctcagcaaggtatacaacaacaacaaaaacaacgagtcattttaaatgaattttactttaaatcccaatctaaatgtatgtgttctgcaaagtgaagtcacctaaaacgatgaaaaaaagtaaagaatttacataaattctttctttgcagcttagcacaagttaaatayaagaaagccttccagatgacataaatcacagcactctctgaagtttaartccagatctgaacccaaacactgaaccttaccaatcattaataagtgcaaagtaatattttagaataaattgagtaggaaaagacaaaggaaagaaagcagtagaaccacccttgccaactcacatgtagcctaggagtagggacaagtcttagcacaacctgtcttgccgtgactcaatctcagagctctgtcaccccagcaaataagctccggccacctcactaaggcataaggagcctttggctgaggctacatcccacagggtgcatgtgctgaaaaatcactgctagaagcaaag

SEQ ID NO: 9592 - DNA, 600 bp, Chicken  19866894205213_3
tttggctgaggctacatcccacagggtgcatgtgctgaaaaatcactgctagaagcaaagtgccctgaaaacaacctcctaaaccaacccttaccttgcagggtcaggctcatacagtttataatacaaagtattaaaaacaattgtttcacataaatataaccccactcacagaagccttacaaaagtgtccattggctgttagcacatcactcttattttctgtgagtctgcagtatttttgactgttggtccatgacttctgcattatacttagcagggcactaaactctaacagayagatgcccagaaaaaatagcaagaactataaaaaatactgtccaaataacatgaattcctaccaacacgtgagccatctaattaataggtgactaatattaactgggatctttgagtactggaaaatgttatccatttgtatagagaaagtctgattctttatacagccacaaaaagacaaagagagaaaaaatataatggattaatgaataatatgagaagatgaataatatgcattatgttatgggaacataatgatatgccattaagtagctcacctattatccttcctaaatttca

SEQ ID NO: 9593 - DNA, 600 bp, Chicken  19866894205214_1
acatttctcatcagcatctccccccatacaagcagggaggtgctctggcccgggccccatgcaggggctgccaccagcgttgcacagcaatggggaccatttataaagagttgatgagattctaaacaactgctaccaataacttcgtctcactccaagttttccactgacagacatcttcagtttgttttcatttaattggtatcttattaaatcccctataaatagagcttgtgagcatagagcttcatgccggcaggggctgaagaccagggcagcactgagatgctcccagggagragataaaaggggctgacaaccgtgcaagagaaagraaccactctccatagggaatgagccagcctgccatggggagcacttgtgctacttgggaccttcttgctctcaatttaccctaatgtcagcttcaagcagccccagccctgtttgcgctgagatgctgctggggccaagctactgtcctgcagtgcatggagaagtcccaaagcactcatctgcaggagggacttggcctcctcgaagcgcacgtcattcatctggcagaactccaactgacctccatggatgagagacacaaaa

SEQ ID NO: 9594 - DNA, 600 bp, Chicken  19866894205214_2
ggaggtgctctggcccgggccccatgcaggggctgccaccagcgttgcacagcaatggggaccatttataaagagttgatgagattctaaacaactgctaccaataacttcgtctcactccaagttttccactgacagacatcttcagtttgttttcatttaattggtatcttattaaatcccctataaatagagcttgtgagcatagagcttcatgccggcaggggctgaagaccagggcagcactgagatgctcccagggagragataaaaggggctgacaaccgtgcaagagaaagraaccactctccatagggaatgagccagcctgccatggggagcacttgtgctacttgggaccttcttgctctcaatttaccctaatgtcagcttcaagcagccccagccctgtttgcgctgagatgctgctggggccaagctactgtcctgcagtgcatggagaagtcccaaagcactcatctgcaggagggacttggcctcctcgaagcgcacgtcattcatctggcagaactccaactgacctccatggatgagagacacaaaacatctgcaccccatcatacacttctcagcaaacaa

SEQ ID NO: 9595 - DNA, 600 bp, Chicken  19866894205217_1
catggccgggagcttccgtgttcctgtcattcacaccaggttcctcattcataaatctactggaaaatctccccagtttcactgcctgctttcccacagaccaggccaaactgcagctgaccttcccagcagccaactgcacctcagcactacggatttcctccccatttccgcgggatgctcacaccttcccataacaccacgccgccaaaggaagtgtcccacagcttcccctactccgcagccactaaaaatatcactgcccctcggtgctttcagccctactcaacactctggcaygtcyttcagccatgtgtactgcacagccaccacgttctgttgactttctgcatgtttcacacagcacacagttaacatgggaaggccgtggtgttcccctctgctgccaccctcccttcacacagccgtggcactgagcacacgaagcccaggaatctcatcagccatcaggatgggctcacacagcactgagcgcttcacagaggaactcctatcactcacaagtcttcagatgaaggtggaatttctcacctgtaacctacacaactacacaaagtacagcaaagttgtgcatgatgc

SEQ ID NO: 9596 - DNA, 600 bp, Chicken  19866894205217_2
gccgggagcttccgtgttcctgtcattcacaccaggttcctcattcataaatctactggaaaatctccccagtttcactgcctgctttcccacagaccaggccaaactgcagctgaccttcccagcagccaactgcacctcagcactacggatttcctccccatttccgcgggatgctcacaccttcccataacaccacgccgccaaaggaagtgtcccacagcttcccctactccgcagccactaaaaatatcactgcccctcggtgctttcagccctactcaacactctggcaygtcyttcagccatgtgtactgcacagccaccacgttctgttgactttctgcatgtttcacacagcacacagttaacatgggaaggccgtggtgttcccctctgctgccaccctcccttcacacagccgtggcactgagcacacgaagcccaggaatctcatcagccatcaggatgggctcacacagcactgagcgcttcacagaggaactcctatcactcacaagtcttcagatgaaggtggaatttctcacctgtaacctacacaactacacaaagtacagcaaagttgtgcatgatgcttcc

SEQ ID NO: 9597 - DNA, 600 bp, Chicken  19866894205218_1
acctttggttatagctgtaggttataatcctttgtaagttgtaacacagaatttaatttagctccagtgaaagcagcaaattagtatgaccccatgaagacctggctaaatttcattattccaagaatcagttgtataaattggtgattcttgtttggtgaaataaggcaatgctacgtttgtcagatgctccacttcaaaaatggggaaatttcatgtcactggaaaaaaatcacaattctgttgtttctattttgtgtccctttcctgcttttatcataatataaaagaaaacttctktgtcaaagtaggcagtggaatgggtcaataacttctgctagctcccagaacagttttattcattgcaagaaaatgatcaatagygcaggctacacagaagagcgttgctacttcttgcttaggtatcagtttgctggctgctgattcatgtttgtacttggggatataagcatactcctrcataattttatcaaagctattttcttttttgaattgtgtgacatttttattataaaatgctttgttaaaatgaattgatgaacctgaaaagcataaaaccctttgaatgactgatgaatt

SEQ ID NO: 9598 - DNA, 600 bp, Chicken  19866894205218_2
tatgaccccatgaagacctggctaaatttcattattccaagaatcagttgtataaattggtgattcttgtttggtgaaataaggcaatgctacgtttgtcagatgctccacttcaaaaatggggaaatttcatgtcactggaaaaaaatcacaattctgttgtttctattttgtgtccctttcctgcttttatcataatataaaagaaaacttctktgtcaaagtaggcagtggaatgggtcaataacttctgctagctcccagaacagttttattcattgcaagaaaatgatcaatagygcaggctacacagaagagcgttgctacttcttgcttaggtatcagtttgctggctgctgattcatgtttgtacttggggatataagcatactcctrcataattttatcaaagctattttcttttttgaattgtgtgacatttttattataaaatgctttgttaaaatgaattgatgaacctgaaaagcataaaaccctttgaatgactgatgaattaagtacaacttttttggtgataaaatacatcaatgtctaaaccttcctgtatcttctgttctgttaattaaatcaatgttgtgg

SEQ ID NO: 9599 - DNA, 600 bp, Chicken  19866894205218_3
tgtcagatgctccacttcaaaaatggggaaatttcatgtcactggaaaaaaatcacaattctgttgtttctattttgtgtccctttcctgcttttatcataatataaaagaaaacttctktgtcaaagtaggcagtggaatgggtcaataacttctgctagctcccagaacagttttattcattgcaagaaaatgatcaatagygcaggctacacagaagagcgttgctacttcttgcttaggtatcagtttgctggctgctgattcatgtttgtacttggggatataagcatactcctrcataattttatcaaagctattttcttttttgaattgtgtgacatttttattataaaatgctttgttaaaatgaattgatgaacctgaaaagcataaaaccctttgaatgactgatgaattaagtacaacttttttggtgataaaatacatcaatgtctaaaccttcctgtatcttctgttctgttaattaaatcaatgttgtgggaccctgcctctttaaagttattaattaataaaataaactttttttaagggaaaacaaattgttcaactctagttagttagraaatgctgttattc

SEQ ID NO: 9600 - DNA, 600 bp, Chicken  19866894205218_4
taagcatactcctrcataattttatcaaagctattttcttttttgaattgtgtgacatttttattataaaatgctttgttaaaatgaattgatgaacctgaaaagcataaaaccctttgaatgactgatgaattaagtacaacttttttggtgataaaatacatcaatgtctaaaccttcctgtatcttctgttctgttaattaaatcaatgttgtgggaccctgcctctttaaagttattaattaataaaataaactttttttaagggaaaacaaattgttcaactctagttagttagraaatgctgttattctcagtatactttcattgactgttttaaaatctgactgtgaaattacctcctgayttactgacaatgcgagattttaaatattctgcttcaaagagacacttgtgataaccttcaaatttgtttcttcttttctgtttgataagctctacttatataaagctaattttttttttctcccatgtgtaactgggaaaccaatgacagaagtgcagccaaaccattcccttttggtttcccaaaagaaagaaagaaaaaaaagtattcttgtttggtagggaaagctgaa

SEQ ID NO: 9601 - DNA, 600 bp, Chicken  19866894205218_5
aaatgctttgttaaaatgaattgatgaacctgaaaagcataaaaccctttgaatgactgatgaattaagtacaacttttttggtgataaaatacatcaatgtctaaaccttcctgtatcttctgttctgttaattaaatcaatgttgtgggaccctgcctctttaaagttattaattaataaaataaactttttttaagggaaaacaaattgttcaactctagttagttagraaatgctgttattctcagtatactttcattgactgttttaaaatctgactgtgaaattacctcctgayttactgacaatgcgagattttaaatattctgcttcaaagagacacttgtgataaccttcaaatttgtttcttcttttctgtttgataagctctacttatataaagctaattttttttttctcccatgtgtaactgggaaaccaatgacagaagtgcagccaaaccattcccttttggtttcccaaaagaaagaaagaaaaaaaagtattcttgtttggtagggaaagctgaaaacctgaaagcagcaagattcctatacacttgactgagttgtatattttggattcaaagaatgtacac

SEQ ID NO: 9602 - DNA, 600 bp, Chicken  19866894205219_1
tgcccggcatgtggctggatccactgctgtacaggaaacgttgagctcatgcttttcctgttgcagtggcactaacgtgggctctctgtcctctatccccagctgttttctcaaatcttttaggagatttatatttctgattaaattgcccaaaggttcaaaagttgctgtgacagcaggaaagaaacatgtgaccacatgcaagtccctttccttacactgttaagctgcaactatgtatgtatgctctaaggaatactcgccaacacagcacaatcttaaaaggctacaggtggttgrggagaaccacaacaactgcaaatacctccattttccaggatgtgacacaragtcaccagagccattcagggcagagcagagccccccccagcctccccagttctcctgtgctcaccaccacccacctctgcactctgtgctctgagaaacatgttggcttctttccccatagatgctgaaaaatagaagcagtggctgtctcctccaagcactctaacatgctcagactaaaggtgcccagggaaagcaacaaaagtgcccacctcctctctgctccatcgcacagcacggccaccaatg

SEQ ID NO: 9603 - DNA, 600 bp, Chicken  19866894205219_2
gcttttcctgttgcagtggcactaacgtgggctctctgtcctctatccccagctgttttctcaaatcttttaggagatttatatttctgattaaattgcccaaaggttcaaaagttgctgtgacagcaggaaagaaacatgtgaccacatgcaagtccctttccttacactgttaagctgcaactatgtatgtatgctctaaggaatactcgccaacacagcacaatcttaaaaggctacaggtggttgrggagaaccacaacaactgcaaatacctccattttccaggatgtgacacaragtcaccagagccattcagggcagagcagagccccccccagcctccccagttctcctgtgctcaccaccacccacctctgcactctgtgctctgagaaacatgttggcttctttccccatagatgctgaaaaatagaagcagtggctgtctcctccaagcactctaacatgctcagactaaaggtgcccagggaaagcaacaaaagtgcccacctcctctctgctccatcgcacagcacggccaccaatgccacgcacaccaggccctgggtggccatcatccagctgagacctgtgcag

SEQ ID NO: 9604 - DNA, 600 bp, Chicken  19866894205220_1
ttacctggcatttttgagatgttggagtcctcctgcggtcactttcactggaaggaaagctaaggtacgacaaactacccacaactattgccagaaacaaacaaacaaacaaacaaacaaacaaacaggaaggactaaaaaaaagcatggctagtattcgttgacaaactgctcaacttcagtcttatctatagccaaagtacttcaagtcctgctggctcattttagaagcccacctcaaaggtccctaagaaggaactcaattccacttggaactgttttcccccctcagacagtagygatacacgtkatatgccagtactgtaaatgagccagagaataggcaagcagctgtgaaaatactggaagatggaggcagacatcagtagatggggtttcttatactccttgtagtggtacacaaggcaagcatgttgcatcacttcgtggcaatgtacagcttacttgccctcctaagagtaatggcaaaactcagctgtgtacagaactgcctgctgaaagcttggttagatggaaagaaatactwcagatgtgagaaatgagtcaggtggacagtgaggactttgactatgttgtttg

SEQ ID NO: 9605 - DNA, 600 bp, Chicken  19866894205220_2
tttttgagatgttggagtcctcctgcggtcactttcactggaaggaaagctaaggtacgacaaactacccacaactattgccagaaacaaacaaacaaacaaacaaacaaacaaacaggaaggactaaaaaaaagcatggctagtattcgttgacaaactgctcaacttcagtcttatctatagccaaagtacttcaagtcctgctggctcattttagaagcccacctcaaaggtccctaagaaggaactcaattccacttggaactgttttcccccctcagacagtagygatacacgtkatatgccagtactgtaaatgagccagagaataggcaagcagctgtgaaaatactggaagatggaggcagacatcagtagatggggtttcttatactccttgtagtggtacacaaggcaagcatgttgcatcacttcgtggcaatgtacagcttacttgccctcctaagagtaatggcaaaactcagctgtgtacagaactgcctgctgaaagcttggttagatggaaagaaatactwcagatgtgagaaatgagtcaggtggacagtgaggactttgactatgttgtttgttgaaaatca

SEQ ID NO: 9606 - DNA, 431 bp, Chicken  19866894205220_3
ctaagaaggaactcaattccacttggaactgttttcccccctcagacagtagygatacacgtkatatgccagtactgtaaatgagccagagaataggcaagcagctgtgaaaatactggaagatggaggcagacatcagtagatggggtttcttatactccttgtagtggtacacaaggcaagcatgttgcatcacttcgtggcaatgtacagcttacttgccctcctaagagtaatggcaaaactcagctgtgtacagaactgcctgctgaaagcttggttagatggaaagaaatactwcagatgtgagaaatgagtcaggtggacagtgaggactttgactatgttgtttgttgaaaatcatttgtacatctggggatttttaatgagattttcattgaagtagaacacaccaagcaaactctgctttg

SEQ ID NO: 9607 - DNA, 600 bp, Chicken  19866894205231_1
tggcaaatggggacagaacatatccagacttgcacatgagagcttcaaggattcattggccctgacatcttctgccagaaatagagggagacattctgaaaatcacatccctattgataggccactgctgtaccagtccggccccagcacctgccccttcccttaccactgccctgtcctttgacagagccttatgtctaactcctggccattgttgatgaggtatctatatgtctccttcaacacaagtacaagcagctggaatccaagcaacaattaacagaatacattttgaggccmattttatatggaaaatcagatttcatgattgttgcagctccttttggacattacaaacgatctggattttaaagtgtgccatgtttcacttacacaactcttaattacactagcaagccttgtgacttcctgatgaacacacagcacatacctagtaaacattttttgggtggttggtagagtgttctgtcaactgccaaccttgctggaggcaggatttcatagaagagaaagtgattaagagatacatttggcaaaaacaccaaattttctggggtcattttgcatgttgactgctca

SEQ ID NO: 9608 - DNA, 600 bp, Chicken  19866894205235_1
aatttactttacaaaacctcagctctttaatcagagtagaaaatacgctttcccttcctctcattactgccataatcatgtcaagatgaatacagagtgattcaactctgacttcgtatcttacagtttaaagtcttgtcttgactatatgaagatctgatttcccgagtcaggttttgttctggtttaattactgtacttctcatttcgtgttgtcatatggctgtgaaactagcactgttttgtttaacaaatctctgcagctttctgcacagcgactttccaccttgttttaataarctgtaggatggcacagttaagagatttgaaatatttwattttgtaacttagctcttagttttctaaagacaggctgtgagtcatagtgtaaaatacacagcttttcttatactatcaaggcaagactgtgtatcagctcatgccacgtggctaacgaggtcattgtttcccatttggaaaaaaaagraatttgctttccagcactgtagaggattgataaggcatatgtttttgtttacaactttatctgctagtcttgaaaacaaatgccatggaatgagcactgtcttatggatgctg

SEQ ID NO: 9609 - DNA, 600 bp, Chicken  19866894205235_2
agaaaatacgctttcccttcctctcattactgccataatcatgtcaagatgaatacagagtgattcaactctgacttcgtatcttacagtttaaagtcttgtcttgactatatgaagatctgatttcccgagtcaggttttgttctggtttaattactgtacttctcatttcgtgttgtcatatggctgtgaaactagcactgttttgtttaacaaatctctgcagctttctgcacagcgactttccaccttgttttaataarctgtaggatggcacagttaagagatttgaaatatttwattttgtaacttagctcttagttttctaaagacaggctgtgagtcatagtgtaaaatacacagcttttcttatactatcaaggcaagactgtgtatcagctcatgccacgtggctaacgaggtcattgtttcccatttggaaaaaaaagraatttgctttccagcactgtagaggattgataaggcatatgtttttgtttacaactttatctgctagtcttgaaaacaaatgccatggaatgagcactgtcttatggatgctgtaaattctgcagtagccagctgccagcaccttctcat

SEQ ID NO: 9610 - DNA, 579 bp, Chicken  19866894205235_3
taattactgtacttctcatttcgtgttgtcatatggctgtgaaactagcactgttttgtttaacaaatctctgcagctttctgcacagcgactttccaccttgttttaataarctgtaggatggcacagttaagagatttgaaatatttwattttgtaacttagctcttagttttctaaagacaggctgtgagtcatagtgtaaaatacacagcttttcttatactatcaaggcaagactgtgtatcagctcatgccacgtggctaacgaggtcattgtttcccatttggaaaaaaaagraatttgctttccagcactgtagaggattgataaggcatatgtttttgtttacaactttatctgctagtcttgaaaacaaatgccatggaatgagcactgtcttatggatgctgtaaattctgcagtagccagctgccagcaccttctcatataatatctatagacacttgttttaaacatttgtttgttcttgatctcgctgacttcagtgcatttaattgttaatggtacgcataaatgcatgtctgtagacaagagcacaggggtattgaaagcaaa

SEQ ID NO: 9611 - DNA, 599 bp, Chicken  19866894205236_1
  misc_feature (1)..(48): n is any nucleotide
nnnnnnnnnnnnnnnnnnnnnnnnnnnnnnnnnnnnnnnnnnnnnnnnatcctcccctactcctgaagctgcaaacagaacccaccagacagcatcccataaagattctgactttgtgctttggaaatattgcatcctaccaaaaatcaatatatcagggtgaaggttgcgcctgtaaagtcagcatacatctgtctgtaagacatctgagtaaacatttcttcctatttttgaatcatgacattttaataatgtctgcttcttgatctgtggaatccaaattcttcactaattaaattytactgcactttgcagagttactccaggggccaactttctccttgttgttctaggctgcatttaaaaattttcttaaatacttctcctactaccactgctgttaccactgttacttyttaccactaacgacactcctctaactgcttyaaggtacactgcagatactccaaaatgaatgytcaaaaagaccttgccaagggatgtggtgttgtgaagttttaatactcttgggatggtaatgaaatggtttgatgatgaataatgagtgtataagatgttctgtaaaaggtaattctcta

SEQ ID NO: 9612 - DNA, 600 bp, Chicken  19866894205236_2
tgctttggaaatattgcatcctaccaaaaatcaatatatcagggtgaaggttgcgcctgtaaagtcagcatacatctgtctgtaagacatctgagtaaacatttcttcctatttttgaatcatgacattttaataatgtctgcttcttgatctgtggaatccaaattcttcactaattaaattytactgcactttgcagagttactccaggggccaactttctccttgttgttctaggctgcatttaaaaattttcttaaatacttctcctactaccactgctgttaccactgttacttyttaccactaacgacactcctctaactgcttyaaggtacactgcagatactccaaaatgaatgytcaaaaagaccttgccaagggatgtggtgttgtgaagttttaatactcttgggatggtaatgaaatggtttgatgatgaataatgagtgtataagatgttctgtaaaaggtaattctctaaaatgttcagataaattaactaaaggttttaaacggggggaaaaaaaaaggcagtaaatccctgaacagagtctctcatacagaattaaattggatgtaattcacttttgattagtc

SEQ ID NO: 9613 - DNA, 600 bp, Chicken  19866894205236_3
caatatatcagggtgaaggttgcgcctgtaaagtcagcatacatctgtctgtaagacatctgagtaaacatttcttcctatttttgaatcatgacattttaataatgtctgcttcttgatctgtggaatccaaattcttcactaattaaattytactgcactttgcagagttactccaggggccaactttctccttgttgttctaggctgcatttaaaaattttcttaaatacttctcctactaccactgctgttaccactgttacttyttaccactaacgacactcctctaactgcttyaaggtacactgcagatactccaaaatgaatgytcaaaaagaccttgccaagggatgtggtgttgtgaagttttaatactcttgggatggtaatgaaatggtttgatgatgaataatgagtgtataagatgttctgtaaaaggtaattctctaaaatgttcagataaattaactaaaggttttaaacggggggaaaaaaaaaggcagtaaatccctgaacagagtctctcatacagaattaaattggatgtaattcacttttgattagtcataagaaattaaggtcatgccttttccataa

SEQ ID NO: 9614 - DNA, 600 bp, Chicken  19866894205236_4
gtcagcatacatctgtctgtaagacatctgagtaaacatttcttcctatttttgaatcatgacattttaataatgtctgcttcttgatctgtggaatccaaattcttcactaattaaattytactgcactttgcagagttactccaggggccaactttctccttgttgttctaggctgcatttaaaaattttcttaaatacttctcctactaccactgctgttaccactgttacttyttaccactaacgacactcctctaactgcttyaaggtacactgcagatactccaaaatgaatgytcaaaaagaccttgccaagggatgtggtgttgtgaagttttaatactcttgggatggtaatgaaatggtttgatgatgaataatgagtgtataagatgttctgtaaaaggtaattctctaaaatgttcagataaattaactaaaggttttaaacggggggaaaaaaaaaggcagtaaatccctgaacagagtctctcatacagaattaaattggatgtaattcacttttgattagtcataagaaattaaggtcatgccttttccataatttgtcaaaactttcagaacacttaaggccca

SEQ ID NO: 9615 - DNA, 600 bp, Chicken  19866894205236_5
gaattttcaacaatcctttctcctcattactccttgtgctttctagagtgatctctggaagactgaggtttgagacccctgagaaattttgtgaaggatgaaagtgaaaaagaatcaaagtcaattttgcacaatcaattggaaggaaggtcttacagaactaatgattattaaatgcaatgggactccagtgagaatcaaatcctttcccttttcctgtgatccgggttcatagaagctgcctaagcatttggaaatgcttgagtagctgattttttataaagagcatttaactctttyctggattttgtaaaagatttccttgagaagttatagctcagctagaagaatctcattatttatcagtcctcatctttccatgaagtatatacttaatcatgacattttgcatttaataaatttcctgtatagaatttcaacgaacatatcatgacacagtcactgaaacacaggctttccttcagttgtagttctgtgttctgtaataaacagggtacactatgaaacgctaaagtatgttgtgtttcaaactggaggaagagatgagcaacagctaaataaaataaaataaattacttc

SEQ ID NO: 9616 - DNA, 599 bp, Chicken  19866894205238_1
  misc_feature (1)..(46): n is any nucleotide
nnnnnnnnnnnnnnnnnnnnnnnnnnnnnnnnnnnnnnnnnnnnnncaaagcagaagtgagagcagagtaacagtccccttgttttaagatgaaattctaggtttcctgacatgaactctttgccttacacgtaatatgcttaaaagaggcgtcttgtttgcgttctccataatcagttgttattctgtttctttggtgaaataaaaggaaaggtccttgaaacagatgagattgcttataccagcaggctgccttcgaaactgccagggcaaaatcaaggtgaaagaactgctctgttytgttgtgcaagctgcttttgaaaccaagatagaaaaagaagtagatgctgtggctgtaaaatcctggttttcacagtactagaaagccttgaaagctttcagaaagattaatcccccagtaagagtatcgcatctgtgctgctccttgggaaaaattatgwcagtagcattagggcattattcccaagaaagatgaatgtaggtgacctgccagatttcataatgaccttatgatatgaacagatgagataaacacacagaagaaataagttagagagagaggctcatcatgggccacg

SEQ ID NO: 9617 - DNA, 600 bp, Chicken  19866894205238_2
cgttctccataatcagttgttattctgtttctttggtgaaataaaaggaaaggtccttgaaacagatgagattgcttataccagcaggctgccttcgaaactgccagggcaaaatcaaggtgaaagaactgctctgttytgttgtgcaagctgcttttgaaaccaagatagaaaaagaagtagatgctgtggctgtaaaatcctggttttcacagtactagaaagccttgaaagctttcagaaagattaatcccccagtaagagtatcgcatctgtgctgctccttgggaaaaattatgwcagtagcattagggcattattcccaagaaagatgaatgtaggtgacctgccagatttcataatgaccttatgatatgaacagatgagataaacacacagaagaaataagttagagagagaggctcatcatgggccacgctggctacagcagcactccttttcctatataagatgctttgtagctccaagagtttttaagttaaacatatrcatrtatgtataatgaattgctttcttaagaagaatgccaatatgtgttcaaacattcttttgataagtattagtgctctttaacgtctt

SEQ ID NO: 9618 - DNA, 600 bp, Chicken  19866894205238_3
cacagtactagaaagccttgaaagctttcagaaagattaatcccccagtaagagtatcgcatctgtgctgctccttgggaaaaattatgwcagtagcattagggcattattcccaagaaagatgaatgtaggtgacctgccagatttcataatgaccttatgatatgaacagatgagataaacacacagaagaaataagttagagagagaggctcatcatgggccacgctggctacagcagcactccttttcctatataagatgctttgtagctccaagagtttttaagttaaacatatrcatrtatgtataatgaattgctttcttaagaagaatgccaatatgtgttcaaacattcttttgataagtattagtgctctttaacgtctttatcaatgacggaattgagtgcaccctcagcaagtttgctgatgacaccaagctgagcggtgcggttgacacagtggaargaagggatgccattcagagggacctcaacagacttgaaaggcgggcctgggtgaatctaatgaggttcaacacagcaaagtgcaaggtttggcactagggctggaggaaccccaggcatccatacagact

SEQ ID NO: 9619 - DNA, 600 bp, Chicken  19866894205238_4
gtactagaaagccttgaaagctttcagaaagattaatcccccagtaagagtatcgcatctgtgctgctccttgggaaaaattatgwcagtagcattagggcattattcccaagaaagatgaatgtaggtgacctgccagatttcataatgaccttatgatatgaacagatgagataaacacacagaagaaataagttagagagagaggctcatcatgggccacgctggctacagcagcactccttttcctatataagatgctttgtagctccaagagtttttaagttaaacatatrcatrtatgtataatgaattgctttcttaagaagaatgccaatatgtgttcaaacattcttttgataagtattagtgctctttaacgtctttatcaatgacggaattgagtgcaccctcagcaagtttgctgatgacaccaagctgagcggtgcggttgacacagtggaargaagggatgccattcagagggacctcaacagacttgaaaggcgggcctgggtgaatctaatgaggttcaacacagcaaagtgcaaggtttggcactagggctggaggaaccccaggcatccatacagactggaa

SEQ ID NO: 9620 - DNA, 456 bp, Chicken  19866894205238_5
agatgagataaacacacagaagaaataagttagagagagaggctcatcatgggccacgctggctacagcagcactccttttcctatataagatgctttgtagctccaagagtttttaagttaaacatatrcatrtatgtataatgaattgctttcttaagaagaatgccaatatgtgttcaaacattcttttgataagtattagtgctctttaacgtctttatcaatgacggaattgagtgcaccctcagcaagtttgctgatgacaccaagctgagcggtgcggttgacacagtggaargaagggatgccattcagagggacctcaacagacttgaaaggcgggcctgggtgaatctaatgaggttcaacacagcaaagtgcaaggtttggcactagggctggaggaaccccaggcatccatacagactggaaggagcagtccttgagagcagca

SEQ ID NO: 9621 - DNA, 600 bp, Chicken  19866894205247_1
tcaccgatgaaatgtcaacgtgctgatgtacaggaagacaaaaaggaatatccactcctgtaattgcagcagagcattcttataggtttgagagccagaaaggtactcagaagtctatgtagtggagagtttctgtctctgtttcacaaattaaaaataagaaataatacattttcagaaagataaattatttgcaggaaatagctttctccaaatattggcctaaacagtttttgattcagaaaggttatagaaagaatggtaattagtaaaattgtttgcgtcagagcatttatatgktgtatatggatatgactccatgaaagctcacatttaggtaatgatttggttgcatcagagtggttaaacacyagagtcctcaaaaacagagtccacttacgaaagattctgacacaaacaaactagttttagggagaaatatttctttggctgtgggcatatggatgctaaactcatacaagtgaatggaaaaatattttttgttgtttcagtgtgtgagatatatggcagagcaaagtttctgtcatgttgaaatggactaccagtcaacacagtccccggattctagccacactctat

SEQ ID NO: 9622 - DNA, 600 bp, Chicken  19866894205247_2
agcattcttataggtttgagagccagaaaggtactcagaagtctatgtagtggagagtttctgtctctgtttcacaaattaaaaataagaaataatacattttcagaaagataaattatttgcaggaaatagctttctccaaatattggcctaaacagtttttgattcagaaaggttatagaaagaatggtaattagtaaaattgtttgcgtcagagcatttatatgktgtatatggatatgactccatgaaagctcacatttaggtaatgatttggttgcatcagagtggttaaacacyagagtcctcaaaaacagagtccacttacgaaagattctgacacaaacaaactagttttagggagaaatatttctttggctgtgggcatatggatgctaaactcatacaagtgaatggaaaaatattttttgttgtttcagtgtgtgagatatatggcagagcaaagtttctgtcatgttgaaatggactaccagtcaacacagtccccggattctagccacactctatgtgtgagacttgcaatgctatcacctatccctaagccaattaatttattaagggaagcaaagtccaggtcta

SEQ ID NO: 9623 - DNA, 599 bp, Chicken  19866894205253_1
  misc_feature (1)..(112): n is any nucleotide
nnnnnnnnnnnnnnnnnnnnnnnnnnnnnnnnnnnnnnnnnnnnnnnnnnnnnnnnnnnnnnnnnnnnnnnnnnnnnnnnnnnnnnnnnnnnnnnnnnnnnnnnnnnnnnnnctccactgaggaaggttgcaatcagttcttaagggctgtgatttataaagaaaaattcatctctcaaatggttctagttctttccccaagttaaaaccacctaccatctaataactgcactctgtcatacagtgacaagtgactgtgagcacaggttaggagacaaagaagattaactcagatggggrgagatgacctagttttaaactcacctctgttacacagtgatgcttatagctgtagagtgcaatgccaagagcttctgtccctctgctcaatcactgctgtgcagcattccatccatccctgtctsgcagagggggacgctactcccagtacacggctgcagtgggaagcatgtcattttaaacacccaacaacatatattcctgcaaacagctactcaagtgctgtatacatatttcaaaagcttcagcagacctgaacaccaccttcattccatttgcttctgttccaagtttacctc

SEQ ID NO: 9624 - DNA, 600 bp, Chicken  19866894205253_2
ggttgcaatcagttcttaagggctgtgatttataaagaaaaattcatctctcaaatggttctagttctttccccaagttaaaaccacctaccatctaataactgcactctgtcatacagtgacaagtgactgtgagcacaggttaggagacaaagaagattaactcagatggggrgagatgacctagttttaaactcacctctgttacacagtgatgcttatagctgtagagtgcaatgccaagagcttctgtccctctgctcaatcactgctgtgcagcattccatccatccctgtctsgcagagggggacgctactcccagtacacggctgcagtgggaagcatgtcattttaaacacccaacaacatatattcctgcaaacagctactcaagtgctgtatacatatttcaaaagcttcagcagacctgaacaccaccttcattccatttgcttctgttccaagtttacctcactgcagcatttgtatcatgctgctactaagaatatgcttgagttttcttgccactagcgcatagtcaagtacaaggrcagaactaatgctctccatcaggtcaagaaggcataactgtgtcccag

SEQ ID NO: 9625 - DNA, 446 bp, Chicken  19866894205253_3
tccctctgctcaatcactgctgtgcagcattccatccatccctgtctsgcagagggggacgctactcccagtacacggctgcagtgggaagcatgtcattttaaacacccaacaacatatattcctgcaaacagctactcaagtgctgtatacatatttcaaaagcttcagcagacctgaacaccaccttcattccatttgcttctgttccaagtttacctcactgcagcatttgtatcatgctgctactaagaatatgcttgagttttcttgccactagcgcatagtcaagtacaaggrcagaactaatgctctccatcaggtcaagaaggcataactgtgtcccagtgttcctcagggtcctgtcccttcacacatcctcagttacgcacaggccctagcataatacttaaatgcttcggcaatagtaataagcatttcagcta

SEQ ID NO: 9626 - DNA, 600 bp, Chicken  19866894205255_1
atcttgaccagaaaatgtataagggcttctcaggagaaagaaagctaataaaagctctggcccaatactcctggtggtgccagcacccagcagcagccaacagcactgaagctggagcagagatttttatgagtatcagtgtagagcaacttcttcagttcctggggaaatttatctatatatatataaagcagaattgagtagcagatgctttaggtaacagaagataaatgtgtagatattgacaggtactgactgttccaaagaaggtaagggaactggtaaaaggctaaaaacaamaaaaaaaagaatctactcatgtatgtttttgaggcaatgtttcacaacatttgaggcaataccagcaaagttggtaataaagatttagctatttgattgttgaatgggtaaatgaaccctgctatgccctccagggcttaagaggggaccacagtcacatgtaatgtagagtagggaactagcatgtccttgggagtattaaaggaagggtttacgtgaggagtagaccctccctttccccgttgaaacttgtctctcccatcctccatcccaaaatcggcaactgtaatgctacctcca

SEQ ID NO: 9627 - DNA, 600 bp, Chicken  19866894205255_2
tcacatgtaatgtagagtagggaactagcatgtccttgggagtattaaaggaagggtttacgtgaggagtagaccctccctttccccgttgaaacttgtctctcccatcctccatcccaaaatcggcaactgtaatgctacctccactgaacatgcttgtagtattcccactcttgtgtcatttgctgacacttactgaaaacagggaccttgacaaaacagtctacattgggagaaaaaacattagtgtcattgtgatgctaataaaggacgctatagttaggagctatgtgtatgcayctcttttgatttattcatcatacatcagtatatttctcatttattataaggaataaatggcctttcttttttcaaattatcttgataatgccaaaaaagaagaatcagacacatgttcaaatgtttcaggctatctacagttaaaaggaagctgaatttaaactaagaaaaagtgcaggtttctttgtttctctctgtccttgaatcattcttttaaaacaccatctcattatagtcaaaggtcctaatttcaagaacgtcggactccatgggggtttcatcttctttttgctattcact

SEQ ID NO: 9628 - DNA, 600 bp, Chicken  19866894205261_1
ggcaagttctttaccttaatataattgtgcaggctccatgttctgaaagtgagcttgcattattgtcactcaattactaagggaatgattcccaatggcacagagtaaatgacttccatagtctgaacctgcactagttaaactagaatagactttcctactaggttgtgtcagttaaaaaaaagtttcattatttcttagcactaataattaaaatgttatcttttctattttagacttttcgattatgtcagtagatgacagttattaaagcagtggttcctcgttgattaacaacaytacacagcttttttttttttttttatcatcctgatgactactkatttgggtagtctcatgaaggcagtaataatactagaaatcagtctgacaaacaaaaatacccaggaacaatcatcaagtatctctccatttaattctagtacacaaatgtaactgtgatgcagggcatgaaacagaaggttccattttccaccgcagtaatgacagactcaacctacacctccatcattactgttgaatgttcatgctctaatatctgcaggattttggagaagatccagaccttaaggaatatgg

SEQ ID NO: 9629 - DNA, 600 bp, Chicken  19866894205261_2
tgaaagtgagcttgcattattgtcactcaattactaagggaatgattcccaatggcacagagtaaatgacttccatagtctgaacctgcactagttaaactagaatagactttcctactaggttgtgtcagttaaaaaaaagtttcattatttcttagcactaataattaaaatgttatcttttctattttagacttttcgattatgtcagtagatgacagttattaaagcagtggttcctcgttgattaacaacaytacacagcttttttttttttttttatcatcctgatgactactkatttgggtagtctcatgaaggcagtaataatactagaaatcagtctgacaaacaaaaatacccaggaacaatcatcaagtatctctccatttaattctagtacacaaatgtaactgtgatgcagggcatgaaacagaaggttccattttccaccgcagtaatgacagactcaacctacacctccatcattactgttgaatgttcatgctctaatatctgcaggattttggagaagatccagaccttaaggaatatggtaaatgaccatcacctccgccagctctgggcacagaacttctt

SEQ ID NO: 9630 - DNA, 600 bp, Chicken  19866894205267_1
agatgtcagtttggcaatcacttctgccagctcctgcagcacacacagttgcatctcaatggggcccatgggattgtgtgcattgattttagctaggcattctctgatcagattcatctcaaccaaggggaagccttcagttccccagactctctcttaactccagggtctgggagcagcctttgtagactgaagcaaagaaggcattcagtgtctctgccttctcactgctccctattaccgggacatctaccttggttaagccatgttggttatctcatatcacctccttctcttccrygtccctttgcatacmttccagcaggwtctgctccatggtcttccctggcacagaagtgaggctaacaggtcgataattccctaggtcaatctttctttccctcttaaaagtaagtgcagtaatgccttttttcyagtcactggggacttcacctgacctccgtgacttttcaaatatcactgagagtgccttgtcagcaacactggccagtttcctcaggactctgggatgcatctcattgggaaccatagactttcagatgacctttgtgtacagcatgagagagattgttcccctac

SEQ ID NO: 9631 - DNA, 600 bp, Chicken  19866894205267_2
gatgtcagtttggcaatcacttctgccagctcctgcagcacacacagttgcatctcaatggggcccatgggattgtgtgcattgattttagctaggcattctctgatcagattcatctcaaccaaggggaagccttcagttccccagactctctcttaactccagggtctgggagcagcctttgtagactgaagcaaagaaggcattcagtgtctctgccttctcactgctccctattaccgggacatctaccttggttaagccatgttggttatctcatatcacctccttctcttccrygtccctttgcatacmttccagcaggwtctgctccatggtcttccctggcacagaagtgaggctaacaggtcgataattccctaggtcaatctttctttccctcttaaaagtaagtgcagtaatgccttttttcyagtcactggggacttcacctgacctccgtgacttttcaaatatcactgagagtgccttgtcagcaacactggccagtttcctcaggactctgggatgcatctcattgggaaccatagactttcagatgacctttgtgtacagcatgagagagattgttcccctact

SEQ ID NO: 9632 - DNA, 600 bp, Chicken  19866894205267_3
atcacttctgccagctcctgcagcacacacagttgcatctcaatggggcccatgggattgtgtgcattgattttagctaggcattctctgatcagattcatctcaaccaaggggaagccttcagttccccagactctctcttaactccagggtctgggagcagcctttgtagactgaagcaaagaaggcattcagtgtctctgccttctcactgctccctattaccgggacatctaccttggttaagccatgttggttatctcatatcacctccttctcttccrygtccctttgcatacmttccagcaggwtctgctccatggtcttccctggcacagaagtgaggctaacaggtcgataattccctaggtcaatctttctttccctcttaaaagtaagtgcagtaatgccttttttcyagtcactggggacttcacctgacctccgtgacttttcaaatatcactgagagtgccttgtcagcaacactggccagtttcctcaggactctgggatgcatctcattgggaaccatagactttcagatgacctttgtgtacagcatgagagagattgttcccctacttcccaccttccaaac

SEQ ID NO: 9633 - DNA, 600 bp, Chicken  19866894205267_4
cagctcctgcagcacacacagttgcatctcaatggggcccatgggattgtgtgcattgattttagctaggcattctctgatcagattcatctcaaccaaggggaagccttcagttccccagactctctcttaactccagggtctgggagcagcctttgtagactgaagcaaagaaggcattcagtgtctctgccttctcactgctccctattaccgggacatctaccttggttaagccatgttggttatctcatatcacctccttctcttccrygtccctttgcatacmttccagcaggwtctgctccatggtcttccctggcacagaagtgaggctaacaggtcgataattccctaggtcaatctttctttccctcttaaaagtaagtgcagtaatgccttttttcyagtcactggggacttcacctgacctccgtgacttttcaaatatcactgagagtgccttgtcagcaacactggccagtttcctcaggactctgggatgcatctcattgggaaccatagactttcagatgacctttgtgtacagcatgagagagattgttcccctacttcccaccttccaaaccatttgctcaa

SEQ ID NO: 9634 - DNA, 600 bp, Chicken  19866894205267_5
ttcagttccccagactctctcttaactccagggtctgggagcagcctttgtagactgaagcaaagaaggcattcagtgtctctgccttctcactgctccctattaccgggacatctaccttggttaagccatgttggttatctcatatcacctccttctcttccrygtccctttgcatacmttccagcaggwtctgctccatggtcttccctggcacagaagtgaggctaacaggtcgataattccctaggtcaatctttctttccctcttaaaagtaagtgcagtaatgccttttttcyagtcactggggacttcacctgacctccgtgacttttcaaatatcactgagagtgccttgtcagcaacactggccagtttcctcaggactctgggatgcatctcattgggaaccatagactttcagatgacctttgtgtacagcatgagagagattgttcccctacttcccaccttccaaaccatttgctcaagggctctgtaaagagcagctgacagtgaagactgaggcaaaaaactagttgagtacctcagccctctccttgtccattgttactagtttgcctgtattgctcagtagg

SEQ ID NO: 9635 - DNA, 600 bp, Chicken  19866894205268_1
gtgaaaggcaagcagacaagacacataaacaagtctgaaattattaggttggaaatgaggatgttggtgacattggtcttttccttctgcctggctataacagcaatcaggcagatgtttcccacaatgcctagaacagtctccaaactgtaagaagtagccagaaaaacagtaagatcagtgacattcctgcactgattagaaaggtgtgaggggaagcttcggtttgagctcaagttcttattgttcaggaaaggaaaagcatcatgaactgcccttgtcttattcatcctggacccyaaactgtttatccaaaaaggtgataaccaaatgcaatctgggtcttctggagctggtctaaaaagttatctgctctatttcactgcagaaggtctgggtaggtctgcaaaggaaaggaaaaaggttgcttagttatgttacaagagataagtcaaaagtgcagtgggggaaagtaagacagagaagcaagcaccagtaattctgtgtatcttcagctcctttacatatggctaatcacatcatgaaatgggatgatttgcacagatttccatactacagtctagcaaatctattgaaata

SEQ ID NO: 9636 - DNA, 600 bp, Chicken  19866894205273_1
cagtggacatgaatgggggaaatggtcagaaccccctcgtcctctctgtgggtaccctccagcacacctttctggcatcagagtttgtgctccagggacaatagcatcggaagaaaaactgctatttgctgtagactggtactgtctttgtgcctgagcagtctgcctcgctgtgcatctcttgccctcacagctctgctggctcctggcctttccctgtgggctccgtgcagtccccgcatccggtactgccagccaatggatcattgatcactaaatagatggaaactgagctccagygcaaaatctggcatttttcaggctctagaccagaggggacagctctgctaatccaagctgacctgccagagacctgccacaataggaggggcaagaggaattgattgtctaggaggatctgaggcagaaagagctagaagggaaagtgcagctggctctttaggcacactctgggagttcagaagcccagcagttgcgagaggatgtcagtcctgatgggttctgttatcagccaaaaaatcgtggactgtaagtagcagaaatgtgtaaatgagtggaaaaaaaaatctgtttgtatca

SEQ ID NO: 9637 - DNA, 600 bp, Chicken  19866894205286_1
atcaggaaaaacttctttacacaaagggttgttaagcactggaataggctccccagggaggtggttgagtcaccatccctgaatgtgtttaaaaaccatttggatgtggtgctcagggacatgatttagtggagtgttgttggagttagggtagtatggttaggccgtggttggacttgatgaccttgaaggtcttttccaacctgagaacttctatgattctatgtttcttggttctgttccagtaagaaaaaaacccagaatatcatctctaacaaacaagtcttgtcaaacacaccwtcaaatttcaaatggaaaaacataaaacagggtttcaattgctcaaattcttttttttttcccccagcattcccagccaacatcgcatctgtccatgcctctctaataaaactatgagaaaagtaactatacctactgtatcactctacccactaacayaccaagctagttttccaacagcagatacatcataacacacaagttacaaaacgacccagggctgtgtgctgaagttctagcgcaaacattgtaactgcaagtgccatcaaaccatttcttattaacatttccatacaccaa

SEQ ID NO: 9638 - DNA, 600 bp, Chicken  19866894205286_2
ttaggccgtggttggacttgatgaccttgaaggtcttttccaacctgagaacttctatgattctatgtttcttggttctgttccagtaagaaaaaaacccagaatatcatctctaacaaacaagtcttgtcaaacacaccwtcaaatttcaaatggaaaaacataaaacagggtttcaattgctcaaattcttttttttttcccccagcattcccagccaacatcgcatctgtccatgcctctctaataaaactatgagaaaagtaactatacctactgtatcactctacccactaacayaccaagctagttttccaacagcagatacatcataacacacaagttacaaaacgacccagggctgtgtgctgaagttctagcgcaaacattgtaactgcaagtgccatcaaaccatttcttattaacatttccatacaccaaagaaaacatatgttggaatgaggcctgcattcaaagtattagtcttgaaggccaaaatgcacttggatcaaatttatattcccttccatattccattacattttgttgccatgcaatatctggcagcagagaggcaatctgagaaaatagcatctgacc

SEQ ID NO: 9639 - DNA, 532 bp, Chicken  19866894205289_1
atgtgcagaaaggtgatcatccacctcccagcagcacgcacacgcattcctttggccttctggaaggtgtccttgatggccatcatgaagtcaatggtgtgttccagggggaagttcctgtacacaatctgcagagaaaggagaaacaggagagatcccatcactgctctgcggcagctcttcaaaacataaagcagtcttgagggcattcttagttcagcagcttgccggtcattcaggcagcaatcacaacactccggcggtccataccccgctattaatacgtaaggaggttgagcmttctctcagcttctccacccgtggtgtttgcttacatgcaaagcctacctcccagcagccacagtcacacacgcacgcacgcacgcacacgcgcacacgcgcacacacacagtcacacacacatgtcatagaatcagctccttgcgttgggtgccttaaggccagacatagctcagtgcctccggctacttgctgagaaaagtgatctgagggtgacagctcattctggaaa

SEQ ID NO: 9640 - DNA, 599 bp, Chicken  19866894205313_1
  misc_feature (1)..(71): n is any nucleotide
nnnnnnnnnnnnnnnnnnnnnnnnnnnnnnnnnnnnnnnnnnnnnnnnnnnnnnnnnnnnnnnnnnnnnnntgtgtccttctaccctgtctgtgctgagagcttcagtcacagctggctcctagtaacagagatagaaagagtggctgtcccagttccagcaaacccattcacctccagtgcagtgacatatccagacagtgaagactggtttggggttttttggcttcttcactatttggctgtctgactcttgcagtgtgttatccagacgtgtttccctggctggagctctttactrctcagyagcagaccttctgtcaccgtgtagcagctatgctccctgccttgggatgcccactcaggaccagttccrtgctggctggtgagtgaccagctcagtagatagcccatgtatgraaataggtagaagaaaggtctggttttacagagcatgatggcttctgctgagccttgggtggccctggggagttggtcagtggcactgtggaggaagaggactttagccctggctccccacggaggtgagggaaaaatcccagtggagtcctgatctggaggggctgttctcagcaaggg

SEQ ID NO: 9641 - DNA, 599 bp, Chicken  19866894205313_2
  misc_feature (1)..(65): n is any nucleotide
nnnnnnnnnnnnnnnnnnnnnnnnnnnnnnnnnnnnnnnnnnnnnnnnnnnnnnnnnnnnnnnnntgtgtccttctaccctgtctgtgctgagagcttcagtcacagctggctcctagtaacagagatagaaagagtggctgtcccagttccagcaaacccattcacctccagtgcagtgacatatccagacagtgaagactggtttggggttttttggcttcttcactatttggctgtctgactcttgcagtgtgttatccagacgtgtttccctggctggagctctttactrctcagyagcagaccttctgtcaccgtgtagcagctatgctccctgccttgggatgcccactcaggaccagttccrtgctggctggtgagtgaccagctcagtagatagcccatgtatgraaataggtagaagaaaggtctggttttacagagcatgatggcttctgctgagccttgggtggccctggggagttggtcagtggcactgtggaggaagaggactttagccctggctccccacggaggtgagggaaaaatcccagtggagtcctgatctggaggggctgttctcagcaagggtgaggg

SEQ ID NO: 9642 - DNA, 600 bp, Chicken  19866894205313_3
tccttctaccctgtctgtgctgagagcttcagtcacagctggctcctagtaacagagatagaaagagtggctgtcccagttccagcaaacccattcacctccagtgcagtgacatatccagacagtgaagactggtttggggttttttggcttcttcactatttggctgtctgactcttgcagtgtgttatccagacgtgtttccctggctggagctctttactrctcagyagcagaccttctgtcaccgtgtagcagctatgctccctgccttgggatgcccactcaggaccagttccrtgctggctggtgagtgaccagctcagtagatagcccatgtatgraaataggtagaagaaaggtctggttttacagagcatgatggcttctgctgagccttgggtggccctggggagttggtcagtggcactgtggaggaagaggactttagccctggctccccacggaggtgagggaaaaatcccagtggagtcctgatctggaggggctgttctcagcaagggtgagggagcagaagggaaggttgtgtgaagttgacttggggacgttcatcagtggcaggctcccaagcttgtctgc

SEQ ID NO: 9643 - DNA, 600 bp, Chicken  19866894205313_4
cctagtaacagagatagaaagagtggctgtcccagttccagcaaacccattcacctccagtgcagtgacatatccagacagtgaagactggtttggggttttttggcttcttcactatttggctgtctgactcttgcagtgtgttatccagacgtgtttccctggctggagctctttactrctcagyagcagaccttctgtcaccgtgtagcagctatgctccctgccttgggatgcccactcaggaccagttccrtgctggctggtgagtgaccagctcagtagatagcccatgtatgraaataggtagaagaaaggtctggttttacagagcatgatggcttctgctgagccttgggtggccctggggagttggtcagtggcactgtggaggaagaggactttagccctggctccccacggaggtgagggaaaaatcccagtggagtcctgatctggaggggctgttctcagcaagggtgagggagcagaagggaaggttgtgtgaagttgacttggggacgttcatcagtggcaggctcccaagcttgtctgcttcagtctgaaaccacaaatgctcactggccacagctctagaac

SEQ ID NO: 9644 - DNA, 599 bp, Chicken  19866894205314_1
  misc_feature (1)..(68): n is any nucleotide
nnnnnnnnnnnnnnnnnnnnnnnnnnnnnnnnnnnnnnnnnnnnnnnnnnnnnnnnnnnnnnnnnnnntaatgagcaggggcatgtacagctccatcaggtgctcacagtccagcctgacattgggtgtctctggggacagggacatatgtcgaagtatcccagagatttaatgaacacccaacaatcagtcttctaaggaagagcagacaactcccaaacttacaggcttcaattttgtttctcaagagctcagacaagtcaatgtggcttgaaatcagtggtggcagcccaaactctrctgtcagtggccttgtgtcagcacaggcttggagggaagttctgaaatcagtgggatgattgcaggtttgcatgcatatagctgacagatttcgtcctcgatattcatgatctttcctgtggcattaactaaatgtgtataataatttatgttgtcatttaaatttaaaagagactttctgggcagcgctatttttcctgttaaatcttgcgaagcacaccttgaactacatttcaatatgaatagttaactaatgcagatcactggaaaacagacagtgtataatgcgagaagaacca

SEQ ID NO: 9645 - DNA, 600 bp, Chicken  19866894205320_1
tggaggggttgtatgtctcaaagatgaaaagaaactaagctgaccattcttgtatgtatggggtagatctgagatttaatattatgtatttgtggagcagaccgcagttctcgcaccttcattatattgttagtaatacagacacaacccccaaacaatcctggtgaatcagagctatggttttttctcttttaagaaatgcatccgatgagataaagtctcctgatctgtaaattaaagaagacttagggaagttgctactggatctgcctttgtagaaataaccagctaggtgtctgrcattcctgaagttctactgtgcatycagatttttgctaactattgaagttcagtattcyctctttaaaaaaagccttgttcttctcctggcaggttggagaaaaagaactaartatttaacttgaactaagccaaggaatatgttcatcctgaattacaaccaaggaagatctgccatctacagttgctgtgacaaagacgatggggataaaacaaaagcacctgctgtgaatgaccccatcaacaatacttctaattttyatcttgcctttttaaaagtactatacagcaatgggaaac

SEQ ID NO: 9646 - DNA, 600 bp, Chicken  19866894205320_2
gaaaagaaactaagctgaccattcttgtatgtatggggtagatctgagatttaatattatgtatttgtggagcagaccgcagttctcgcaccttcattatattgttagtaatacagacacaacccccaaacaatcctggtgaatcagagctatggttttttctcttttaagaaatgcatccgatgagataaagtctcctgatctgtaaattaaagaagacttagggaagttgctactggatctgcctttgtagaaataaccagctaggtgtctgrcattcctgaagttctactgtgcatycagatttttgctaactattgaagttcagtattcyctctttaaaaaaagccttgttcttctcctggcaggttggagaaaaagaactaartatttaacttgaactaagccaaggaatatgttcatcctgaattacaaccaaggaagatctgccatctacagttgctgtgacaaagacgatggggataaaacaaaagcacctgctgtgaatgaccccatcaacaatacttctaattttyatcttgcctttttaaaagtactatacagcaatgggaaacacttcatctaatgttttgttgcctt

SEQ ID NO: 9647 - DNA, 600 bp, Chicken  19866894205320_3
ggggtagatctgagatttaatattatgtatttgtggagcagaccgcagttctcgcaccttcattatattgttagtaatacagacacaacccccaaacaatcctggtgaatcagagctatggttttttctcttttaagaaatgcatccgatgagataaagtctcctgatctgtaaattaaagaagacttagggaagttgctactggatctgcctttgtagaaataaccagctaggtgtctgrcattcctgaagttctactgtgcatycagatttttgctaactattgaagttcagtattcyctctttaaaaaaagccttgttcttctcctggcaggttggagaaaaagaactaartatttaacttgaactaagccaaggaatatgttcatcctgaattacaaccaaggaagatctgccatctacagttgctgtgacaaagacgatggggataaaacaaaagcacctgctgtgaatgaccccatcaacaatacttctaattttyatcttgcctttttaaaagtactatacagcaatgggaaacacttcatctaatgttttgttgccttatttggccttagtaactacccttctaacagagct

SEQ ID NO: 9648 - DNA, 600 bp, Chicken  19866894205320_4
caccttcattatattgttagtaatacagacacaacccccaaacaatcctggtgaatcagagctatggttttttctcttttaagaaatgcatccgatgagataaagtctcctgatctgtaaattaaagaagacttagggaagttgctactggatctgcctttgtagaaataaccagctaggtgtctgrcattcctgaagttctactgtgcatycagatttttgctaactattgaagttcagtattcyctctttaaaaaaagccttgttcttctcctggcaggttggagaaaaagaactaartatttaacttgaactaagccaaggaatatgttcatcctgaattacaaccaaggaagatctgccatctacagttgctgtgacaaagacgatggggataaaacaaaagcacctgctgtgaatgaccccatcaacaatacttctaattttyatcttgcctttttaaaagtactatacagcaatgggaaacacttcatctaatgttttgttgccttatttggccttagtaactacccttctaacagagcttgttattcaaacaaccagcactatttgaaaaccaatttcttattatgaaaataa

SEQ ID NO: 9649 - DNA, 492 bp, Chicken  19866894205320_5
tggatctgcctttgtagaaataaccagctaggtgtctgrcattcctgaagttctactgtgcatycagatttttgctaactattgaagttcagtattcyctctttaaaaaaagccttgttcttctcctggcaggttggagaaaaagaactaartatttaacttgaactaagccaaggaatatgttcatcctgaattacaaccaaggaagatctgccatctacagttgctgtgacaaagacgatggggataaaacaaaagcacctgctgtgaatgaccccatcaacaatacttctaattttyatcttgcctttttaaaagtactatacagcaatgggaaacacttcatctaatgttttgttgccttatttggccttagtaactacccttctaacagagcttgttattcaaacaaccagcactatttgaaaaccaatttcttattatgaaaataaaatagcttgtgatgacttcacaaacttgttttcaaattaa

SEQ ID NO: 9650 - DNA, 600 bp, Chicken  19866894205325_1
gcacacagacatccagagggacttcatcccagaggcacttctttgttcagtgcacgtgaacaaagaagagcaggctgagggttttcaaatcctttgacccatagcaagaaaggcatcaggccaaaaataaaattaccacgggtccctaatggtccaaacccacatctgccacctgtcaaggggggctgctaacaagtaggagccagggaagacacaaggtaaagtttctgaatcctacccaaggctgttaactaagtctctgctttatcaggctctgggctgatctgttcagtttaaaarggggcaggtagccgggctcctgcctgggactcccatgccctggtaagacacagggagctgggctgccatgcatctaccccagcaggaaagcatttccacatcgggctgtgcagcaccgaggtcggcacacaccaggctttcattaccttgctgtaactctgagttctgagatccaccaacactggtttttagatttttccaacacagtgtgaaatttgcttggtgttgctcccatgcacccttcaccccatgcactgtttcaaggctacctccactcccagtcttatctcacaattgtat

SEQ ID NO: 9651 - DNA, 600 bp, Chicken  19866894205329_1
gcccttttgctgagaagagggtgggctgccagacttctggggctgagcatccctatcaagcctcagctgggagagagcttggaggaatggactgacagtgctttgacataggccaggccccacataaatagtatcagcctgactttctgggttaaatttgaggtctggggcagttatatctgctgttgtagtcagatccatgtacagctagggcagcagtgaaggtcgcctattcttttccatgatgttacaggaacttcccagctgttgactagcttggaagagacacagctttcacawtttgcatctacaggttttaccgcaaggttcagtcttacccccttttttacagcttaaagccattctcctttctataagcaggttcttggtgttatttggattcattttgccttttctccattttgccactgtacacattattctttgttaatttatggattgctgtgagtctggcttcactcttattaaatattgtgcattttaaaggtgtttagttctttcactgctagtattaatcgcttcactatcaattccctattcccatctgttgttttgaaatagcattatatattattatgc

SEQ ID NO: 9652 - DNA, 600 bp, Chicken  19866894205338_1
ctttgtattgaatcccatcaaatcactatttccccctcctctttctttccaataaacaatcagccccgtgttgatttgattacgagctgctgatgcagcattgctgaatccaagacctgagtgtatattttggcaaaaatagtgctattcccagctaagagaacaagatggcttgccaagaggctgagctttcctggtggacatgagatgagatggaggcagctcggagccactgccttcctgggaagcaggaccagatcctggcatggcacagcttagcactggcacctggcacagctkctattcccactgcacctctgctttgttcccttctctacagtgatgggctagcctgggtggagagcgatatgcaaaaacctgcctttggtcctgatagatacaatcaccttgctttaaaataaatacgtgtggttttgcagcctcagttaactagaggtaccaaggcaccatgctcatagcagttatttgtgttgaaatgcctctccgaaggaagagctgtggctctttggtgttaggtgctgcagctgagcaaagcgaggtgtcccatctcagcagggtgggatatgccaagcaggagca

SEQ ID NO: 9653 - DNA, 596 bp, Chicken  19866894205342_1
tgggctccaatgagcccctcatccctatgggcatggaccccaatgggctccatgtcctcagaccccactggtcctgctatacccacagggacaaaccccactgaactccatggcctcattcatctccatgtcctcatgtccccagatcacacatcttggtgtccctatagaccccactgaatcctgagacaccggattccatttcaggagcttttgtcctatttataagtccctgtcacagggtctaggagacaggaaaacccccgaaaaccataacagccatcccatggctacacccawccccatgactaaacccattggcacggctacacccatcaccactcgccaacacccatcctcgtggcaacatccactgccagggcaacacctatacctgtctccacccatcacctgtcaacacccactgccacggctacacccatcacctggctactcctggccccatccccatggcacatcactatggcaatgcctctgtgacacctcgtggcactgttcccttgggtctcacctcccacaccccaaggcctggcccatgccctccccctgccatagcagagccctgcagaatgatc

SEQ ID NO: 9654 - DNA, 600 bp, Chicken  19866894205343_1
ctcgtgaagacagcgcgtccactggaagtctatgaaattcacactaaaatcagattgcatgtagggttctacagacttcagaatgtaaagcaaaaacctccctgagcccccaaagagctgacagtgtattctgataacaaatcaacactggagcttctatctgttgcatgtagggaatatgaaaagggggaaaatcagacatcataaaatttttacactcttgtaaggtaatgtgatccataaactcaggaattccaaataaaaagctgatgacagcacaaaaggcttcagggagctgcraacgtcacaagagatctctaacgccacatctgctggaaaaaatcagaaaataacaaagttactgctgattgcagagctagcctattcagtccctgctttgtgyatcttagagtacgtgatagtttcatgttaatgggcacattggtgccacagaagaccaatataaagtgctgtccgcaatcgacagtccatmttttgtgatctttgcttcataccagatctacagtaaagcagtgccttcactgttttgcctgtgcaatgctgacatccattactgtgtattttctttcttttattact

SEQ ID NO: 9655 - DNA, 537 bp, Chicken  19866894205343_2
gagcccccaaagagctgacagtgtattctgataacaaatcaacactggagcttctatctgttgcatgtagggaatatgaaaagggggaaaatcagacatcataaaatttttacactcttgtaaggtaatgtgatccataaactcaggaattccaaataaaaagctgatgacagcacaaaaggcttcagggagctgcraacgtcacaagagatctctaacgccacatctgctggaaaaaatcagaaaataacaaagttactgctgattgcagagctagcctattcagtccctgctttgtgyatcttagagtacgtgatagtttcatgttaatgggcacattggtgccacagaagaccaatataaagtgctgtccgcaatcgacagtccatmttttgtgatctttgcttcataccagatctacagtaaagcagtgccttcactgttttgcctgtgcaatgctgacatccattactgtgtattttctttcttttattactctatttttggtttttcaacactgattttatgagtgacagg

SEQ ID NO: 9656 - DNA, 447 bp, Chicken  19866894205343_3
atcagacatcataaaatttttacactcttgtaaggtaatgtgatccataaactcaggaattccaaataaaaagctgatgacagcacaaaaggcttcagggagctgcraacgtcacaagagatctctaacgccacatctgctggaaaaaatcagaaaataacaaagttactgctgattgcagagctagcctattcagtccctgctttgtgyatcttagagtacgtgatagtttcatgttaatgggcacattggtgccacagaagaccaatataaagtgctgtccgcaatcgacagtccatmttttgtgatctttgcttcataccagatctacagtaaagcagtgccttcactgttttgcctgtgcaatgctgacatccattactgtgtattttctttcttttattactctatttttggtttttcaacactgattttatgagtgacagg

SEQ ID NO: 9657 - DNA, 600 bp, Chicken  19866894205359_1
ctaagttgaaggtaaatataacatatagtaaagaaatatttccaagaatgtagtttatcctaccaaaaacagtatcaagtaccttttcaattactttttctgaatttaacagttgtcacctaacttacgtagtgctttctaattggcagtttaatgatggctgcaagctaaacattggactgattaaaaaaaattgagagagaaaaaagcactacagtatcagttgctaatggtttctatgctaagaataggagataatcaacgctcagcagtatagctgtttggatcaacacagaatayttccatgaaaaaattgtgacttctgctacgttggggtgaggggagacaccacaggaattgtgcatgttttagatcactgctttctttcatgtctgtacagaaacagctcaacaaccccgctggaactatcagcaccagaaattacagactgactccaatgctagaaattaaatgctcacttggaaagtatatgaaaagctgatgaggttgtgtatgccaaccaagtattgtgcacactcccttagcgtgcagagccttgcaactttgcattatgccattttatcctaacattaccacatg

SEQ ID NO: 9658 - DNA, 600 bp, Chicken  19866894205370_1
attatcaatgtctcctagattggttatggactccccaaatctggctgcatatgagtcactcccactgagctctatgtccagttctaccatctctgccttctgaaggaaaacattattaaaggcacattaacagaggctcttccgagggacactcctcaaaataataaaactgcttggagcagtataaaatcttactcaactccttgctgcagaagccagcattatcaaagatatctatcaatatttagcatgagaatgagaaggaataagacagctgttctttaaaagtgagaacaacawgttccyatagcaaacacctgtaaacagcagaaggcttgtatcagagtacaggagctcactgctctgagaaaactgtgtgcattaaagtctacacagccagcctctgtgggtgtgttgcagagtcctgctgagatcatcaccatgcttctaaagttgtttttcccatatcctgtgtgatacaggagaagaaatctttttgcttgttatatgagaacaactgtggtactatgtatttttaagagaaaatacttacagaacctgaattgatatagacataaactcttccttcttctctgatgg

SEQ ID NO: 9659 - DNA, 600 bp, Chicken  19866894205370_2
aatgtctcctagattggttatggactccccaaatctggctgcatatgagtcactcccactgagctctatgtccagttctaccatctctgccttctgaaggaaaacattattaaaggcacattaacagaggctcttccgagggacactcctcaaaataataaaactgcttggagcagtataaaatcttactcaactccttgctgcagaagccagcattatcaaagatatctatcaatatttagcatgagaatgagaaggaataagacagctgttctttaaaagtgagaacaacawgttccyatagcaaacacctgtaaacagcagaaggcttgtatcagagtacaggagctcactgctctgagaaaactgtgtgcattaaagtctacacagccagcctctgtgggtgtgttgcagagtcctgctgagatcatcaccatgcttctaaagttgtttttcccatatcctgtgtgatacaggagaagaaatctttttgcttgttatatgagaacaactgtggtactatgtatttttaagagaaaatacttacagaacctgaattgatatagacataaactcttccttcttctctgatggtacttt

SEQ ID NO: 9660 - DNA, 600 bp, Chicken  19866894205376_1
gctttctagcttgatatgaaaccaaccaaccctataatttatttccagcttcttataaattgtagtaaatgtgattaaatatgttccactttgcattttaaaattcatagtcctactctagagtaggcaatggtatgcttccagaaggaattctaaacgtggtgaagatggagttctgcagagttagcagaacaagcgcagtttcatttacatctaattacagaagcaaaagaggtctgagcactctttggtgcaatttggttgcattactgaccggtttctttatgtcctagttaatayaaaattattttgaagagttactgtttcacaggaagctgtgaaggaaacagaagaatgtgagcaagaaattgaaaagctgaaacaattcctaaagaatcacttggctgaaaaatcacatgaatatcagccacagactcagaagacttcttgtccagaggtgggtttcatgtcatgccctaaatttatgacaacrtgtagcactgagaaatagtagtgtgtttttctccctgctccagtcaagcaggcaattcaatactgtggtgtgactgtacgtacataagttgctgtataccaagagat

SEQ ID NO: 9661 - DNA, 600 bp, Chicken  19866894205376_2
aagcgcagtttcatttacatctaattacagaagcaaaagaggtctgagcactctttggtgcaatttggttgcattactgaccggtttctttatgtcctagttaatayaaaattattttgaagagttactgtttcacaggaagctgtgaaggaaacagaagaatgtgagcaagaaattgaaaagctgaaacaattcctaaagaatcacttggctgaaaaatcacatgaatatcagccacagactcagaagacttcttgtccagaggtgggtttcatgtcatgccctaaatttatgacaacrtgtagcactgagaaatagtagtgtgtttttctccctgctccagtcaagcaggcaattcaatactgtggtgtgactgtacgtacataagttgctgtataccaagagatataattagtatcagtttcaattcgggcatatgtttgatatcactgcttttgatgtgttatttgtacctgaatcaacttccagtgacaattaagtgctgttgtcagctgttgtggtgaaacaatatgcaccgttgatcgcttgcctgtgctcatcatcctgctaatgcagcagtacatgttaactggggtagca

SEQ ID NO: 9662 - DNA, 514 bp, Chicken  19866894205378_1
acttttaaaggaataatagcagctgcaagttcatctctggtagtcattgctcactgtatattttcctttcagagttatttgttatacattcagatcagaaactgaacgaggagctccaggtgaaaatcaaaacaaaataattcattttataattacattgttccagtaaaaagttttggtaaataagaaataattcacaaatttttataacaccttcaatacacctagctttcaagatatggaaaagtaatgactgccaaggtagactgaagatgatgtctcacagtataggaaaatacwatgtaataagttaaagctgtaaacacacagctatatttttctacgtcttctaaaatgatgttccctcctcagaaagccaggttaaggcacagtctctgctttaacaacaggtctcctgcatcctgggctgctgttcaaattattggagaaacgagatagtcttctctgcctttccttctctttcctcttacaccaccgcaacattatacaaaca

SEQ ID NO: 9663 - DNA, 600 bp, Chicken  19866894205382_1
tccttcggaggcttatttccaacaatgtagttattagagaccgcatctaggatgagagaccagtccactgtggagaggtaacacaggtcagagttcttctcaatccgtatggccccgcgggttatgttcctcaagttgtgaagcccgatctccttcagatttgtcatttcgaagatcaccaaggcatagttgtagaagaggttcctcccgcgaatgaccgtgaggttggggaagagatcgctgaggctttccaagcccgccacacggaacagcagcaagtagtcagttatgacggtcagyttcgggaagcggaagttgcggtaatcctctgctttagagatgagcaggatctgaaggaaaccctcaacgaccgtacagttctccaggcgtttcagctcatggatatcattgcgaatgtcaacgtttggcccacaaactgaaaacgtagaagaaaaaaggaaagttagcaataaagcatccttaagacctttaaagttrcaatgcacgtaggctattcccatggccatacacccgctgggtgggttttttgttttgttttaacttaataattaggctgcaatgttaaaataggaaatgagt

SEQ ID NO: 9664 - DNA, 600 bp, Chicken  19866894205382_2
aggttcctcccgcgaatgaccgtgaggttggggaagagatcgctgaggctttccaagcccgccacacggaacagcagcaagtagtcagttatgacggtcagyttcgggaagcggaagttgcggtaatcctctgctttagagatgagcaggatctgaaggaaaccctcaacgaccgtacagttctccaggcgtttcagctcatggatatcattgcgaatgtcaacgtttggcccacaaactgaaaacgtagaagaaaaaaggaaagttagcaataaagcatccttaagacctttaaagttrcaatgcacgtaggctattcccatggccatacacccgctgggtgggttttttgttttgttttaacttaataattaggctgcaatgttaaaataggaaatgagtgctcggtttacatctatcctgaatatttacatcattgaacccatcactatgagcactaccagcagcagcacagcgctatgagccacgtccttcagcagacaaagaagccttgttttattattgctgtggaaaagagaactgcaatagattgaggaacacaaactgagtgcgtctgcatgccctgccgcaagtcaaaat

SEQ ID NO: 9665 - DNA, 600 bp, Chicken  19866894205383_1
taatgcactgtaggataccattgacattcttggccaccagggcacacgcctggctcacagccaacctgttgtccaccacaacacccaggcctttctccacagagctcctctccagcaggtcagctcccaacctgtacagatgtatgtggttgttcctctccaggtacaagactctacacttgctcttgtgaagccccatctggttcctccctgcccagatgtctggtctgtccaggcctttttgaatagctgatagcacagcctctttctgatgggaagaaaggaaaaaggagcccacarcttctgactgctgaaggtagttccttgtccttgtaagtgtcatagttctctcttgatgcaactaggtatatggcaagcttagttgtttcttttacatgtcacctttgaagctattaagctaaactgaatcactrcaaattgtgagacaatttgcattcctgtttaaaaaaatctatagtctgagtaaatcaccctctcagttaaactaaaatataagacaacagtaaagagcaaaacttatctgttgacagcagtgatagaccatctttgcttaaaacacattgtttaattaaaaacaaa

SEQ ID NO: 9666 - DNA, 600 bp, Chicken  19866894205383_2
tacagatgtatgtggttgttcctctccaggtacaagactctacacttgctcttgtgaagccccatctggttcctccctgcccagatgtctggtctgtccaggcctttttgaatagctgatagcacagcctctttctgatgggaagaaaggaaaaaggagcccacarcttctgactgctgaaggtagttccttgtccttgtaagtgtcatagttctctcttgatgcaactaggtatatggcaagcttagttgtttcttttacatgtcacctttgaagctattaagctaaactgaatcactrcaaattgtgagacaatttgcattcctgtttaaaaaaatctatagtctgagtaaatcaccctctcagttaaactaaaatataagacaacagtaaagagcaaaacttatctgttgacagcagtgatagaccatctttgcttaaaacacattgtttaattaaaaacaaatggagttaacatgaattaaacctatgagtgcaagtacaatcaacagtcaagtcaatctaagaatggtctgacctttaaaagagaatgttttcactcgttaaacacattgctggctttttggatagaaacaaagt

SEQ ID NO: 9667 - DNA, 528 bp, Chicken  19866894205386_1
tcaggttctgacatcagtgcctgagccatataccatagagtcctaaatattgtatcttcataagagccacagggccacgtagctgcaaattctagctctgacagtcctcattatatcatttactctctcagtcttaataaaatggaatagtgtgcttttactttctcctatgcattatttttataaaacaaaaaggagaaataatgcttggcatccaaaccagcagtagctctgatgtgaggaatgcatgttgatcaaaataatgtagaattgtattcttcaaggtaaaattcaactgcrttctcacttgaggctttggaggccctaggacgctctaagctcatggaaataggattggggtttgttcccatatatttatccagtgttgcaattatataagtctgttttaccttcgcatttaggtacagtttgaaaaactgatattattattattattatcattattattttgctgtggaaacaacagctctattgggaccatttgaggtatttttcatgtaaaacctt

SEQ ID NO: 9668 - DNA, 599 bp, Chicken  19866894205402_1
  misc_feature (1)..(194): n is any nucleotide
nnnnnnnnnnnnnnnnnnnnnnnnnnnnnnnnnnnnnnnnnnnnnnnnnnnnnnnnnnnnnnnnnnnnnnnnnnnnnnnnnnnnnnnnnnnnnnnnnnnnnnnnnnnnnnnnnnnnnnnnnnnnnnnnnnnnnnnnnnnnnnnnnnnnnnnnnnnnnnnnnnnnnnnnnnnnnnnnnnnnnnnnnnnnnnnnnnatggagacatatccagtaaagggctgttgaagtttgccgtttctgcagaatccctgcagcacaccattgtaatctttgttgtggatatgtctagaccttggactgytatggagtctttagagaagtgggccggtgtcttgcgagagcatattgataagctgaaaattcctccagaagaaaygagaggcatgcaacagaagagtaagtctttgtgcacccctctgytattgctttttgtttttttttcaacctgtctcttgccactttctttggtaatgagtgatttcttctggttagcgttttgagaatgtgtggaataccggttgctttgaagttacgatcgtaacgctgattcagatggactgttaggctttaaaagaactcttacagttctgttgtgctagc

SEQ ID NO: 9669 - DNA, 599 bp, Chicken  19866894205402_2
  misc_feature (1)..(119): n is any nucleotide
nnnnnnnnnnnnnnnnnnnnnnnnnnnnnnnnnnnnnnnnnnnnnnnnnnnnnnnnnnnnnnnnnnnnnnnnnnnnnnnnnnnnnnnnnnnnnnnnnnnnnnnnnnnnnnnnnnnnnnnatggagacatatccagtaaagggctgttgaagtttgccgtttctgcagaatccctgcagcacaccattgtaatctttgttgtggatatgtctagaccttggactgytatggagtctttagagaagtgggccggtgtcttgcgagagcatattgataagctgaaaattcctccagaagaaaygagaggcatgcaacagaagagtaagtctttgtgcacccctctgytattgctttttgtttttttttcaacctgtctcttgccactttctttggtaatgagtgatttcttctggttagcgttttgagaatgtgtggaataccggttgctttgaagttacgatcgtaacgctgattcagatggactgttaggctttaaaagaactcttacagttctgttgtgctagcaaactttcaggtgaattgtctaaattcttggcagtgatgagattttgataattgtttgtttaagaccgtttctta

SEQ ID NO: 9670 - DNA, 599 bp, Chicken  19866894205402_3
  misc_feature (1)..(75): n is any nucleotide
nnnnnnnnnnnnnnnnnnnnnnnnnnnnnnnnnnnnnnnnnnnnnnnnnnnnnnnnnnnnnnnnnnnnnnnnnnnatggagacatatccagtaaagggctgttgaagtttgccgtttctgcagaatccctgcagcacaccattgtaatctttgttgtggatatgtctagaccttggactgytatggagtctttagagaagtgggccggtgtcttgcgagagcatattgataagctgaaaattcctccagaagaaaygagaggcatgcaacagaagagtaagtctttgtgcacccctctgytattgctttttgtttttttttcaacctgtctcttgccactttctttggtaatgagtgatttcttctggttagcgttttgagaatgtgtggaataccggttgctttgaagttacgatcgtaacgctgattcagatggactgttaggctttaaaagaactcttacagttctgttgtgctagcaaactttcaggtgaattgtctaaattcttggcagtgatgagattttgataattgtttgtttaagaccgtttcttaacggtcaactgtgcagaatgatgtttttaaaagcggtgtcagaa

SEQ ID NO: 9671 - DNA, 599 bp, Chicken  19866894205402_4
  misc_feature (1)..(62): n is any nucleotide
nnnnnnnnnnnnnnnnnnnnnnnnnnnnnnnnnnnnnnnnnnnnnnnnnnnnnnnnnnnnnnatggagacatatccagtaaagggctgttgaagtttgccgtttctgcagaatccctgcagcacaccattgtaatctttgttgtggatatgtctagaccttggactgytatggagtctttagagaagtgggccggtgtcttgcgagagcatattgataagctgaaaattcctccagaagaaaygagaggcatgcaacagaagagtaagtctttgtgcacccctctgytattgctttttgyttttttttcaacctgtctcttgccactttctttggtaatgagtgatttcttctggttagcgttttgagaatgtgtggaataccggttgctttgaagttacgatcgtaacgctgattcagatggactgttaggctttaaaagaactcttacagttctgttgtgctagcaaactttcaggtgaattgtctaaattcttggcagtgatgagattttgataattgtttgtttaagaccgtttcttaacggtcaactgtgcagaatgatgtttttaaaagcggtgtcagaattcagtagcaaag

SEQ ID NO: 9672 - DNA, 600 bp, Chicken  19866894205402_5
gtgtggaataccggttgctttgaagttacgatcgtaacgctgattcagatggactgttaggctttaaaagaactcttacagttctgttgtgctagcaaactttcaggtgaattgtctaaattcttggcagtgatgagattttgataattgtttgtttaagaccgtttcttaacggtcaactgtgcagaatgatgtttttaaaagcggtgtcagaattcagtagcaaagtgagctgtctgctttcctgtgggatccaaggcacgttccattccctactgtggatgttcccaatatattttygtgagcctcagaccgtggtcctggttcgtctcactctggctgttcttaccctgtgactttaggaatgttgcataaatgtagtttctttgagttctccttgctgaagctctgcacatttgtttctaatgaacattgccgtttgtgcagctttggtcagaattgtttttctgatttgtcctttcttccacattcctctcatcctgccgcagaagtatttcctatttagaaaaggtacggtgacttcattttgcactcagctctgccgtaaaatggaaggacagaacacatcccactttctcc

SEQ ID NO: 9673 - DNA, 600 bp, Chicken  19866894205406_1
catggcagcggcatattgtggccatgcaatataatccacctgccaggcttccttgagtttatatcttagccattgtcctccagagaggttttatctgtttggctcccttaagggcagaacatgtctcatgttcatggataacctgttcaattgtgtccatggtcacttccacccctcgtcccaagccctgttgcatctctgtcttcatggtctgatgtattccccatgacatcctggtcgctaaattggaggaaaaaaatgtatatgatggaatgaccacattggcacattggcatgaaygcaytggctggatggtcacactcagagagttgtggtcagtggctccgagtctaggtggagacggtgacaagtggtgctcctcggggatcagtgttgggactggtgctatttaacatctttgtgggtgatacggacagtgagattgagtgcaccctcagcacgtttgcagacaacaccaagctgagtggtacagctgacatgctggagggaagggatgccactcagagggacctggactggcttgagaggtgagcccaagccagcctcagcaaggccatgtgcaatgccctgcacctgggt

SEQ ID NO: 9674 - DNA, 600 bp, Chicken  19866894205406_2
gcagcggcatattgtggccatgcaatataatccacctgccaggcttccttgagtttatatcttagccattgtcctccagagaggttttatctgtttggctcccttaagggcagaacatgtctcatgttcatggataacctgttcaattgtgtccatggtcacttccacccctcgtcccaagccctgttgcatctctgtcttcatggtctgatgtattccccatgacatcctggtcgctaaattggaggaaaaaaatgtatatgatggaatgaccacattggcacattggcatgaaygcaytggctggatggtcacactcagagagttgtggtcagtggctccgagtctaggtggagacggtgacaagtggtgctcctcggggatcagtgttgggactggtgctatttaacatctttgtgggtgatacggacagtgagattgagtgcaccctcagcacgtttgcagacaacaccaagctgagtggtacagctgacatgctggagggaagggatgccactcagagggacctggactggcttgagaggtgagcccaagccagcctcagcaaggccatgtgcaatgccctgcacctgggtcagg

SEQ ID NO: 9675 - DNA, 600 bp, Chicken  19866894205412_1
acacattcagccttcacacaaacacacctttttcctttgacttcctgtcttgttctctctctctgcttttgcttctgtgcttataagatttccgatcacggctttttgatcgcctcctgtcccggctgcgagacctatgttttctttctgatctatcatggcttctgcttcttcttcggtcacgactcctggacatttataggagaaatgtcaatgtcagctggatctcctaaaacagaaccccactttctatattccagtatatttactgtttacagaaaacaactatttacaaaaagwcttagtgtgctgtatgcaaatatttctcagtatgcaaggtctggcttaacactgccttcttcatttcaaacatccaaccttgcaacttaagaatatccatcatgrattgaaatccttggaaaattaaggaggggagggagaaaactgtatgaaaatgctctgttcctgtacctgcttcgccttctttctctgcttcttgatctcttgtggtctcgtgaacggctgcaccttctgtcagacgttctgctcgaatgcctgctccgggagcggctcctcttacgcctctctctatcacgggcc

SEQ ID NO: 9676 - DNA, 600 bp, Chicken  19866894205412_2
ttgatcgcctcctgtcccggctgcgagacctatgttttctttctgatctatcatggcttctgcttcttcttcggtcacgactcctggacatttataggagaaatgtcaatgtcagctggatctcctaaaacagaaccccactttctatattccagtatatttactgtttacagaaaacaactatttacaaaaagwcttagtgtgctgtatgcaaatatttctcagtatgcaaggtctggcttaacactgccttcttcatttcaaacatccaaccttgcaacttaagaatatccatcatgrattgaaatccttggaaaattaaggaggggagggagaaaactgtatgaaaatgctctgttcctgtacctgcttcgccttctttctctgcttcttgatctcttgtggtctcgtgaacggctgcaccttctgtcagacgttctgctcgaatgcctgctccgggagcggctcctcttacgcctctctctatcacgggccctctctttttctttttcttcctcttcacgccttctcttcctttcccgctcttctctctctcgttccctctctttctctctctcttctcgttcttgtttctctttc

SEQ ID NO: 9677 - DNA, 525 bp, Chicken  19866894205412_3
catgggtcagccctctgcttaccataggaagcctccaagcaatttttacattcaataaaactactaactaaagatgtgcttacttttaaatcttctacagtagcttttattttggcataacccatgtgctgctttcccatcaaatggtcgtctaccctggactgtgcatctcctacaattaagaaggctccacaaacttcacaaacttccatttgcttttcctgtgctgcaaagctctcaatcgtctgcaaaagaacatattagatgaaaagaaaaacaaatgttagacaggtgacagcraagacatkcagaattttaccattaatgttgttaagtccgataccgctggcaaaagctccaagtcctaacagtacggcctgcttcggaagcactgtacccaccaggatgagcagggcaaccataagccatgtattgccactcccatcctactgggagagagaaagcaaatggctctatggtgttcagttgtttacaaggctaaagaccaggaaacaacatcacaaa

SEQ ID NO: 9678 - DNA, 517 bp, Chicken  19866894205412_4
agccctctgcttaccataggaagcctccaagcaatttttacattcaataaaactactaactaaagatgtgcttacttttaaatcttctacagtagcttttattttggcataacccatgtgctgctttcccatcaaatggtcgtctaccctggactgtgcatctcctacaattaagaaggctccacaaacttcacaaacttccatttgcttttcctgtgctgcaaagctctcaatcgtctgcaaaagaacatattagatgaaaagaaaaacaaatgttagacaggtgacagcraagacatkcagaattttaccattaatgttgttaagtccgataccgctggcaaaagctccaagtcctaacagtacggcctgcttcggaagcactgtacccaccaggatgagcagggcaaccataagccatgtattgccactcccatcctactgggagagagaaagcaaatggctctatggtgttcagttgtttacaaggctaaagaccaggaaacaacatcacaaa

SEQ ID NO: 9679 - DNA, 600 bp, Chicken  19866894205414_1
tttctgtcattaattcaaaaggattatctcaagcatcatcaaaaactgtcatcctgtctcagaaagcatcgttttcacttcagttaccacacatctattttgaacctcatttccaattttctatggatttattccaataatattaacacttattttctgactactttctcataaaaatatagttccctactctgaatacagatcaaaattgattatcaccatagaaaagtatatttccaaaatgcacaaaacaggaatacatttcaaaatctaccacactaaagattcctaacaaaattraattcttgtrcatgaggtaggatgcctgatgccctcatttacagagcttccagagagcttttccaaaatgtaatctttccattatagctatagtcattctgtaaacaaaaagcagttaatgaccatttctgtatgtacccaaaacgtgtctggcactacagtttgcaaaagtgaatttcctgtttacaagctcatattctttttggaattaaaatgcatactaaaaaaaaaatgtcccacacagctcctcatctgatttcaagcaagaaaatattttgatgagcatttttgcttcaatta

SEQ ID NO: 9680 - DNA, 600 bp, Chicken  19866894205414_2
taattcaaaaggattatctcaagcatcatcaaaaactgtcatcctgtctcagaaagcatcgttttcacttcagttaccacacatctattttgaacctcatttccaattttctatggatttattccaataatattaacacttattttctgactactttctcataaaaatatagttccctactctgaatacagatcaaaattgattatcaccatagaaaagtatatttccaaaatgcacaaaacaggaatacatttcaaaatctaccacactaaagattcctaacaaaattraattcttgtrcatgaggtaggatgcctgatgccctcatttacagagcttccagagagcttttccaaaatgtaatctttccattatagctatagtcattctgtaaacaaaaagcagttaatgaccatttctgtatgtacccaaaacgtgtctggcactacagtttgcaaaagtgaatttcctgtttacaagctcatattctttttggaattaaaatgcatactaaaaaaaaaatgtcccacacagctcctcatctgatttcaagcaagaaaatattttgatgagcatttttgcttcaattataaaattatc

SEQ ID NO: 9681 - DNA, 599 bp, Chicken  19866894205417_1
  misc_feature (1)..(147): n is any nucleotide
nnnnnnnnnnnnnnnnnnnnnnnnnnnnnnnnnnnnnnnnnnnnnnnnnnnnnnnnnnnnnnnnnnnnnnnnnnnnnnnnnnnnnnnnnnnnnnnnnnnnnnnnnnnnnnnnnnnnnnnnnnnnnnnnnnnnnnnnnnnnnnnnnnncaaatatctaaagacacttttattctccgaggcctttgctccaggagtcactctacaaaattgcctctgtgttcctctgtgcgtggctgtaaacacttttatagcatatgacattttatagtatcttcacttggttccgattaaagcttttcrtggagatgtaatttttctccctcaccctccaggtattcaaagccaccactcactgaaagtcacaactgtttcaggcaaacccacagggtttgactgcacattgaaaatctttgttttaagcaaaatatttgctaaggaaactttcagtcagaaatgtcagcrcactgaaaaatcacttaatgtgctgttctgggcactgactgacagatttgactggcaaaaagaatgagagaattgcaaaccagatattgaatacctgcttccaattattccacccaggagctctgcctgcagcagga

SEQ ID NO: 9682 - DNA, 600 bp, Chicken  19866894205417_2
acttttattctccgaggcctttgctccaggagtcactctacaaaattgcctctgtgttcctctgtgcgtggctgtaaacacttttatagcatatgacattttatagtatcttcacttggttccgattaaagcttttcrtggagatgtaatttttctccctcaccctccaggtattcaaagccaccactcactgaaagtcacaactgtttcaggcaaacccacagggtttgactgcacattgaaaatctttgttttaagcaaaatatttgctaaggaaactttcagtcagaaatgtcagcrcactgaaaaatcacttaatgtgctgttctgggcactgactgacagatttgactggcaaaaagaatgagagaattgcaaaccagatattgaatacctgcttccaattattccacccaggagctctgcctgcagcaggagagcagaagttgtcctcttcttcccatactggtaattgaagcacagctccttcctgaggacaaagcagcactgtgtgctgctcctgggaggctggggctgtgtggtgatggrgcgcgaggctctgcagctcgcccacatcagccagaagcacacaatcacagt

SEQ ID NO: 9683 - DNA, 581 bp, Chicken  19866894205417_3
tgttttaagcaaaatatttgctaaggaaactttcagtcagaaatgtcagcrcactgaaaaatcacttaatgtgctgttctgggcactgactgacagatttgactggcaaaaagaatgagagaattgcaaaccagatattgaatacctgcttccaattattccacccaggagctctgcctgcagcaggagagcagaagttgtcctcttcttcccatactggtaattgaagcacagctccttcctgaggacaaagcagcactgtgtgctgctcctgggaggctggggctgtgtggtgatggrgcgcgaggctctgcagctcgcccacatcagccagaagcacacaatcacagtgaacgttttcccccaaagcactyggatttggagctgaccccaacattttagctctgtgggagagctcctgggctggtgggagagaggatggctattgttatagctgcactcctaggatgtgccttatgggagctgcttggggaagaaagggaagaaacaagttataaagacaacatagtgagcccagcaaatattgtgatacaaaacaggggcctgtgggaatttgtaat

SEQ ID NO: 9684 - DNA, 507 bp, Chicken  19866894205417_4
tgttctgggcactgactgacagatttgactggcaaaaagaatgagagaattgcaaaccagatattgaatacctgcttccaattattccacccaggagctctgcctgcagcaggagagcagaagttgtcctcttcttcccatactggtaattgaagcacagctccttcctgaggacaaagcagcactgtgtgctgctcctgggaggctggggctgtgtggtgatggrgcgcgaggctctgcagctcgcccacatcagccagaagcacacaatcacagtgaacgttttcccccaaagcactyggatttggagctgaccccaacattttagctctgtgggagagctcctgggctggtgggagagaggatggctattgttatagctgcactcctaggatgtgccttatgggagctgcttggggaagaaagggaagaaacaagttataaagacaacatagtgagcccagcaaatattgtgatacaaaacaggggcctgtgggaatttgtaat

SEQ ID NO: 9685 - DNA, 600 bp, Chicken  19866894205420_1
tgtttgtaatgtgaatggatggctatttattagacttgtcacagtatatatttaacacatctatagctggctagctgggattatgacattaggcagtatttattgtacgcaatccagcaaatattacaggaggaataaattttaagaaaaagtgatgcaaccagcagcgtaatgaaggcacaaagcacaagaaacgtagttttaaacagagattcccagctgtgctgaaggaggggaatatggaggatgtgaggaagtccaggtgcagatttcaagttctttaaagtgccccagcactcygtcgaacagctgacctttccctcatgaaatggacatttttcatttagaaaaggaaatgagaatcttcttctttgatttttttttttttttttttttttgcactgattaagtagagttaaaaagttctgtggggactattttctataggaagcaatttcatcaaaatcaagcatttcacaggcaggtgttagtttgacatttttactattttgtgttaaggtggtattgaatattgtatttcatcctaatggattccaattatttttaatwttttttttgcattctgtgttttttaccttt

SEQ ID NO: 9686 - DNA, 600 bp, Chicken  19866894205420_2
ttcaagttctttaaagtgccccagcactcygtcgaacagctgacctttccctcatgaaatggacatttttcatttagaaaaggaaatgagaatcttcttctttgatttttttttttttttttttttttgcactgattaagtagagttaaaaagttctgtggggactattttctataggaagcaatttcatcaaaatcaagcatttcacaggcaggtgttagtttgacatttttactattttgtgttaaggtggtattgaatattgtatttcatcctaatggattccaattatttttaatwttttttttgcattctgtgttttttaccttttcatgtttagttctacttgtcagtgctttgcaatcatgacactttttgcacaatcaggctaaaatgttttactctaaacaaccgtgtagtatgctcgattggcttttaatgattgtttaaatcagaaatactgaacttccaatgaatccatctggatgaggcttgcttttaacgaagaagagactataagggcaaagatttcccgaagaataccaaatttccttttaaaagattttcctgtaatcttcagaaaatgcagatttcttagaa

SEQ ID NO: 9687 - DNA, 599 bp, Chicken  19866894205421_1
  misc_feature (1)..(113): n is any nucleotide
nnnnnnnnnnnnnnnnnnnnnnnnnnnnnnnnnnnnnnnnnnnnnnnnnnnnnnnnnnnnnnnnnnnnnnnnnnnnnnnnnnnnnnnnnnnnnnnnnnnnnnnnnnnnnnnnnatgaaatactgattactaagaacttattaaggactactttgcacccaattattctgacatttgacttgatttgacagttgaattgagttgaagattcctccaaaacagtagagatgattttaatttatatcttcataattttaagataattgttcaggacagattcattaatacaccactacaaaaygtactttctcttggagcatcatggttcaagtgatagacaaatcgtaaaaacatagggtcttaaacatgaatgtactgtattctctcatattttcagatttggcaactgccgtcatggtatctcttgcataagaaaaagcatcttactgccagcttccaggaattttcactgaccattaaattgagaaaaacaaaaaaatatttacagattgttaaatatttttcctgtaaagtgattaaacttattaaatgaaattatatccaatttccaatgttgtaactttgctgtacaattacatg

SEQ ID NO: 9688 - DNA, 600 bp, Chicken  19866894205421_2
actttctcttggagcatcatggttcaagtgatagacaaatcgtaaaaacatagggtcttaaacatgaatgtactgtattctctcatattttcagatttggcaactgccgtcatggtatctcttgcataagaaaaagcatcttactgccagcttccaggaattttcactgaccattaaattgagaaaaacaaaaaaatatttacagattgttaaatatttttcctgtaaagtgattaaacttattaaatgaaattatatccaatttccaatgttgtaactttgctgtacaattacatgcaratttactgtcattacattgtttcccagtaatttctaaaatgtttctgaaatttagtgcatttcacctggaaattctctgaaacacctactctatcttttttaaatttgcaaataagaattagcagaaaaatattaccccttactttaaattcagtgagtataatttcagagaacaaagtttgctttagcaaacgttgacaaatattgattcccaagaaaccttctctgaaatatgtgaagagatacatatacagaaaatgaagaaaggtatttgttgtgccaactaactggataaaaaaa

SEQ ID NO: 9689 - DNA, 599 bp, Chicken  19866894205441_1
  misc_feature (1)..(40): n is any nucleotide
nnnnnnnnnnnnnnnnnnnnnnnnnnnnnnnnnnnnnnnntgctccgggtgcaggagggaggtgtagggaagccttcctgctcacttccaacctcagctggtgactgggaatgaaaagctgtgggacttcagctgccctcatcccaattccctgtaggaatcctccatcagaggacacgacagcctacggcaggcctagaaagggtggtaggagcctgcaccgtcatggactgcagcagtgtccctcagggtccagctgtcccagtcccagcaaaagatgaactggaaggaactctgtgycgtgtctcctaccacaaggcatccagcagactcctggccgggctggaaaagcaatgaggcacagaaatgctgtaagaggcactgycacgcctcggctttgctccctgtacagagcagygcccagcagtctgcctgctgcaaggccagcacgcgctcagacagccacagggacaaagcccggccagctgacacagagggacagagcacttccagctgtgtatccgttttgaaaacagggatgtgaaaaagcagaatgccgtttcctactggttctgcactgggcagcctgacttcctgct

SEQ ID NO: 9690 - DNA, 600 bp, Chicken  19866894205441_2
ttccaacctcagctggtgactgggaatgaaaagctgtgggacttcagctgccctcatcccaattccctgtaggaatcctccatcagaggacacgacagcctacggcaggcctagaaagggtggtaggagcctgcaccgtcatggactgcagcagtgtccctcagggtccagctgtcccagtcccagcaaaagatgaactggaaggaactctgtgycgtgtctcctaccacaaggcatccagcagactcctggccgggctggaaaagcaatgaggcacagaaatgctgtaagaggcactgycacgcctcggctttgctccctgtacagagcagygcccagcagtctgcctgctgcaaggccagcacgcgctcagacagccacagggacaaagcccggccagctgacacagagggacagagcacttccagctgtgtatccgttttgaaaacagggatgtgaaaaagcagaatgccgtttcctactggttctgcactgggcagcctgacttcctgctcacagttggacgtgtcaagcttgcttctacacaaactcccacacaacacccacttacgcagaatgcagacttcctgcctatggaca

SEQ ID NO: 9691 - DNA, 600 bp, Chicken  19866894205441_3
ctgtgggacttcagctgccctcatcccaattccctgtaggaatcctccatcagaggacacgacagcctacggcaggcctagaaagggtggtaggagcctgcaccgtcatggactgcagcagtgtccctcagggtccagctgtcccagtcccagcaaaagatgaactggaaggaactctgtgycgtgtctcctaccacaaggcatccagcagactcctggccgggctggaaaagcaatgaggcacagaaatgctgtaagaggcactgycacgcctcggctttgctccctgtacagagcagygcccagcagtctgcctgctgcaaggccagcacgcgctcagacagccacagggacaaagcccggccagctgacacagagggacagagcacttccagctgtgtatccgttttgaaaacagggatgtgaaaaagcagaatgccgtttcctactggttctgcactgggcagcctgacttcctgctcacagttggacgtgtcaagcttgcttctacacaaactcccacacaacacccacttacgcagaatgcagacttcctgcctatggacagacgttttccttgcagaacagaactgctttata

SEQ ID NO: 9692 - DNA, 600 bp, Chicken  19866894205444_1
cacccctctgtgaaaaatagagccaagagaattttttgtgcacttggagggtacgactgaatagtaaagtcatgtgagaaggaacagaaattgccaaattgtgttttggaaattcctgtggtgtgttattttctccatgttctactatcagcatcaggagatgtagcaatgagagcaggaagccctgtgcatgttctgggtgactgaattggtcagaattgaccagacccatcagaagcagagatctgggggagctgtgtgtgtggtctttctctccagttgaccagtgctgcagtcacrttctaattcctttacagaattaagtattttgaattttaaagcctgaataagaatggggttgagggtctaactgcaagttccagcatgtaacttttgctgaatagggatgtactgacacaccctcctgctgggaaagaggtctgtcttagagttgagcgtagttcttcaaggtaccgtccttgtgcttgagttcaactgttacaccaatatacactggtactaaaatgccacacttyagatgtttacattttagtttctctttcacaatggcttcttccactgacacttctgcatgaagac

SEQ ID NO: 9693 - DNA, 600 bp, Chicken  19866894205444_2
agcagagatctgggggagctgtgtgtgtggtctttctctccagttgaccagtgctgcagtcacrttctaattcctttacagaattaagtattttgaattttaaagcctgaataagaatggggttgagggtctaactgcaagttccagcatgtaacttttgctgaatagggatgtactgacacaccctcctgctgggaaagaggtctgtcttagagttgagcgtagttcttcaaggtaccgtccttgtgcttgagttcaactgttacaccaatatacactggtactaaaatgccacacttyagatgtttacattttagtttctctttcacaatggcttcttccactgacacttctgcatgaagacatcagctgagaacttcagagtgctttgcattgcttagcttagcttctgtctgtagtaagttcactgcatcaagtgctacttaaactaatgtttctcacgcagacctggaagcatgaaataactgtagtaatatgctttaaatgttgattagaacagtagtggtaattaaygggatgagggcattcagtctgtctttcataagctgcgtgtatcttttaggaatgaactcaaacttg

SEQ ID NO: 9694 - DNA, 600 bp, Chicken  19866894205444_3
gtaccgtccttgtgcttgagttcaactgttacaccaatatacactggtactaaaatgccacacttyagatgtttacattttagtttctctttcacaatggcttcttccactgacacttctgcatgaagacatcagctgagaacttcagagtgctttgcattgcttagcttagcttctgtctgtagtaagttcactgcatcaagtgctacttaaactaatgtttctcacgcagacctggaagcatgaaataactgtagtaatatgctttaaatgttgattagaacagtagtggtaattaaygggatgagggcattcagtctgtctttcataagctgcgtgtatcttttaggaatgaactcaaacttgaatgtaaacatggatatgagcagtattaaagagccaccacaatctcgattgaggaaatggactacagtagacagcatttctgtgaacacatccttagagcaaaactccagcaaacatggtatgttaagtacatctttaaatagcatctgacctaccacctcagaatttcaagttctgtgtataagatgcaggtttgctttatttattcttgtagttgtaacacttgtgttgctg

SEQ ID NO: 9695 - DNA, 600 bp, Chicken  19866894205448_1
acataggtacatgtgatcttgattttatgctggcagcaggaattaggcgtaggaggaaatgcagcatctctgcaactaaaggagtaaatttgttattaaaaggaaaacagtggaggcagaagaagctgcaaggtgaagcacactctctctgcttagaaatgaaatgtttgtgccggtcaccagcaggagagcaacatgggtcagctctggtgatgcagcagagaggagactgccacactgtttttctgacatctcactcagtactgcagtggttacttcgttaaccaccggagaaatggyggatgctgaagagcatcwgcccacaacagtattttgtgctgacaaatagtacttcaagaggtgaataactccatgttgctagaagagccatcctcgttccctagcaaagcttgttttccatctcttttctaacggaacatcacaaaattatatgttgcaaaccacaattctctattacaagacttcatgatgttttttggttaacttccaagttccaacttccatttgctttaccttacttagctaggagatcaaattaggtgcggtagcacagactttgaagtgtccgtcaatatggct

SEQ ID NO: 9696 - DNA, 600 bp, Chicken  19866894205448_2
ttgattttatgctggcagcaggaattaggcgtaggaggaaatgcagcatctctgcaactaaaggagtaaatttgttattaaaaggaaaacagtggaggcagaagaagctgcaaggtgaagcacactctctctgcttagaaatgaaatgtttgtgccggtcaccagcaggagagcaacatgggtcagctctggtgatgcagcagagaggagactgccacactgtttttctgacatctcactcagtactgcagtggttacttcgttaaccaccggagaaatggyggatgctgaagagcatcwgcccacaacagtattttgtgctgacaaatagtacttcaagaggtgaataactccatgttgctagaagagccatcctcgttccctagcaaagcttgttttccatctcttttctaacggaacatcacaaaattatatgttgcaaaccacaattctctattacaagacttcatgatgttttttggttaacttccaagttccaacttccatttgctttaccttacttagctaggagatcaaattaggtgcggtagcacagactttgaagtgtccgtcaatatggctaattagtagttcttgtta

SEQ ID NO: 9697 - DNA, 600 bp, Chicken  19866894205448_3
aagacgcctgcctgctcaacgtcctggccctcagtaatactccctctgtcaaacagaactagcttctcataatgaatgcacagccatggaactgataaatttactttgatgggctttttaatacttgcttttttaaaacaaacttctatctagtaactactctaaggtcaaatcctagagcttctacctagcactgctcaagtaaaatggtacagctagtggatgggaggccttccagaggtagaccttggcacctggacatctttttgtataaggctgaccttatcctgatgtgcaccrgagccctggtcctggccatgggactggagcccattctggcctccacaggccacagccacggctcttgaggaacagaaagggaaggtgccatcaaaagtgccatcagaagcccgttgttcggtgtcctgttctgtcattcctcaggccaattataccacccagctccaggatacatgactcttacatgacgtgggaactgctggtgccttgtctcatctcagctcacctctsacctcactcagagctgtgtgtcagctttctgacagtgccaagtcctgtacaggagcccggggaaaacag

SEQ ID NO: 9698 - DNA, 600 bp, Chicken  19866894205448_4
cttccagaggtagaccttggcacctggacatctttttgtataaggctgaccttatcctgatgtgcaccrgagccctggtcctggccatgggactggagcccattctggcctccacaggccacagccacggctcttgaggaacagaaagggaaggtgccatcaaaagtgccatcagaagcccgttgttcggtgtcctgttctgtcattcctcaggccaattataccacccagctccaggatacatgactcttacatgacgtgggaactgctggtgccttgtctcatctcagctcacctctsacctcactcagagctgtgtgtcagctttctgacagtgccaagtcctgtacaggagcccggggaaaacagcctgcaagaacctggaccaacctcacagstgtgctttcctcaattctttgctgacacaggagacaagacaataatccctacaattacaggattgctatagctttgaggaatgaagattcctatccttgtcccaaagattttgaaartatttttgaatttgtgaaatcattttttcctcatctctgatccacactattaatacagacccragcaggagtgagttggctgtag

SEQ ID NO: 9699 - DNA, 600 bp, Chicken  19866894205448_5
cccattctggcctccacaggccacagccacggctcttgaggaacagaaagggaaggtgccatcaaaagtgccatcagaagcccgttgttcggtgtcctgttctgtcattcctcaggccaattataccacccagctccaggatacatgactcttacatgacgtgggaactgctggtgccttgtctcatctcagctcacctctsacctcactcagagctgtgtgtcagctttctgacagtgccaagtcctgtacaggagcccggggaaaacagcctgcaagaacctggaccaacctcacagstgtgctttcctcaattctttgctgacacaggagacaagacaataatccctacaattacaggattgctatagctttgaggaatgaagattcctatccttgtcccaaagattttgaaartatttttgaatttgtgaaatcattttttcctcatctctgatccacactattaatacagacccragcaggagtgagttggctgtaggctcagtatgtgaaaggaaagggcagaagagccacatctctgtacagatctcaagcrttcctacagcagcctctccagctgaatgagatctggggaca

SEQ ID NO: 9700 - DNA, 600 bp, Chicken  19866894205448_6
caattataccacccagctccaggatacatgactcttacatgacgtgggaactgctggtgccttgtctcatctcagctcacctctsacctcactcagagctgtgtgtcagctttctgacagtgccaagtcctgtacaggagcccggggaaaacagcctgcaagaacctggaccaacctcacagstgtgctttcctcaattctttgctgacacaggagacaagacaataatccctacaattacaggattgctatagctttgaggaatgaagattcctatccttgtcccaaagattttgaaartatttttgaatttgtgaaatcattttttcctcatctctgatccacactattaatacagacccragcaggagtgagttggctgtaggctcagtatgtgaaaggaaagggcagaagagccacatctctgtacagatctcaagcrttcctacagcagcctctccagctgaatgagatctggggacaaacagacacctgttactgcctagctttcacatcagtctttgtcagctgatcatatttgtacgtgtgcttgtgtatgtaccaatgctattaagaaactgtttttcaatagtaaatatt

SEQ ID NO: 9701 - DNA, 600 bp, Chicken  19866894205448_7
gtctcatctcagctcacctctsacctcactcagagctgtgtgtcagctttctgacagtgccaagtcctgtacaggagcccggggaaaacagcctgcaagaacctggaccaacctcacagstgtgctttcctcaattctttgctgacacaggagacaagacaataatccctacaattacaggattgctatagctttgaggaatgaagattcctatccttgtcccaaagattttgaaartatttttgaatttgtgaaatcattttttcctcatctctgatccacactattaatacagacccragcaggagtgagttggctgtaggctcagtatgtgaaaggaaagggcagaagagccacatctctgtacagatctcaagcrttcctacagcagcctctccagctgaatgagatctggggacaaacagacacctgttactgcctagctttcacatcagtctttgtcagctgatcatatttgtacgtgtgcttgtgtatgtaccaatgctattaagaaactgtttttcaatagtaaatattaagacctcagcctctttttttccaccttcatacagaattatcagtctctgaagaaggattaaa

SEQ ID NO: 9702 - DNA, 600 bp, Chicken  19866894205448_8
cggggaaaacagcctgcaagaacctggaccaacctcacagstgtgctttcctcaattctttgctgacacaggagacaagacaataatccctacaattacaggattgctatagctttgaggaatgaagattcctatccttgtcccaaagattttgaaartatttttgaatttgtgaaatcattttttcctcatctctgatccacactattaatacagacccragcaggagtgagttggctgtaggctcagtatgtgaaaggaaagggcagaagagccacatctctgtacagatctcaagcrttcctacagcagcctctccagctgaatgagatctggggacaaacagacacctgttactgcctagctttcacatcagtctttgtcagctgatcatatttgtacgtgtgcttgtgtatgtaccaatgctattaagaaactgtttttcaatagtaaatattaagacctcagcctctttttttccaccttcatacagaattatcagtctctgaagaaggattaaacagccattctcagctatatcaagcctccagagctccatttaaagtcactaggtgctgtacataggcagcatctctaaaa

SEQ ID NO: 9703 - DNA, 600 bp, Chicken  19866894205452_1
acccctagaatataaatgtatgtttttatgatataagggagcattagtcctaagcaactgaagctatgcacacacacatccacaagtaataaaggggaaataacatctgacatattttttccagtttctaaacttttgtttgaatctagatgcacacggtaactttaacttaatgcagaattactatataacaaaataatgctgccattttagtggtctttactatgggatgtattataaatcttgcatgcctatcaaaatagcaagaggaacaactcagatttgaagactttcactttktataaagctttattattaagtatttctcaaaatgaggagccgtgaagctgaactagttatttttttcctcatgtctggatagaagaaggaaaccacactgctaatctgcagtgggttgtgtttgaagtgactgcactgctgagacaatgaaagccatatgaaaaagggtttaagcagtgtattgcaggggctttaccagttgtgatggagcccacagttattccacagaacagcagtgtgcattaagataatggaaaattaaatgagggaaaaaaatgcagatcagatgaagaaatttag

SEQ ID NO: 9704 - DNA, 600 bp, Chicken  19866894205453_1
ccttccaaaagtatttttaccctccagggataatgcattttctgttcacatttagtcaaatgaagtgggatccacctatcatggtggatatcagcagagataggggttagtctcttgtcctggtcgaatctttgactgtgaactagaagctggggaaccagaattcatgacacagaatacattttgagagctacaaggaaaataaaccagtggtaagctggcctctgtttcatgctctccgtatctatggtttagccacttgcatatcaactctgctgggtttacaggagtaaatgagtrtctgattaggagtaaatagtgtctgattagaaaacagttgtgataataaattgtccactgagggaaggaatgccccaccattagctttacaacaaatatgtcactcctgcaaccagcccttagcaacagactgtacagagctgcagtggaggtgatgtattgcttgtgctttctttgctctttgttctggcagttaccccaacgtcaacattcacaactttacaacaagctggagggatggaatggctttcaatgcattgatacacaagcacaggtatgtggggggaaggtgtcctgatg

SEQ ID NO: 9705 - DNA, 600 bp, Chicken  19866894205456_1
agattatccattctttgctgtactttcagacttggagaagagactcagtcttgagggagcagcaaagttcattaactggcaagggaagggatgttagttgtgagagctcacctgtgtgaattcaagaggaaacagaacagcagatttctctcagctaattctaaagctgccaactcagtaacaaactggccctgggaagccatgccgtgggagctgaggccctcaaagtctggagtactcctcgtgcagggtttgtgctagaggtggctgtgtgtccctgcgctgccctgtggcggtggraggggttctggtgggaggcagccctgctgcactgcaccctcccagcagggcctggctgttatcctgcagtgccgtgggtcataacttatcctgtgtttggccacttgttgggctgggccttgatcagttgctgataagctgtgatacaggctgttgccttttatgaatttttgcgtgcaggctgactatgctcctgcaggaagggatggggctgtgctgggaggaagaagggctggaaacattcatagggagcaggaagactgctgttcttttctaagcctgagcctttttacctttttt

SEQ ID NO: 9706 - DNA, 599 bp, Chicken  19866894205458_1
  misc_feature (1)..(74): n is any nucleotide
nnnnnnnnnnnnnnnnnnnnnnnnnnnnnnnnnnnnnnnnnnnnnnnnnnnnnnnnnnnnnnnnnnnnnnnnnngtggtggtgaaaaacctgcgcctggtaggtgtctggtggggcagcggagactggatctgcgtgcaaagtacctttgtttcagagggaagtggtgggtccctggtgtgcaagcaggtgactgcatcctctggtgtcttggcaaggtgggaatgaggtttcccacaggtgtcagtgtcagatgtacttgagaggcactggaaaaagcacagaaacagagaggatgggktcctggggcragtcctgtgaaaattgtcctgcaggaaggagttggcctcatggctcaaagccatgaggacagctggagaacctaatataccagtgttggctcagataataggttcgtgctgtggtggcagcctttcccagggagcagaaaaggctccctygggatgtggctgaccgtgggttttgtctgcttgctgggacagcacctgactgctggactccagccctgtggctgggcatggcctgtgtggacatcagagactggagaatgactgccactagcctgcactgtgtagcatg

SEQ ID NO: 9707 - DNA, 599 bp, Chicken  19866894205458_2
  misc_feature (1)..(64): n is any nucleotide
nnnnnnnnnnnnnnnnnnnnnnnnnnnnnnnnnnnnnnnnnnnnnnnnnnnnnnnnnnnnnnnngtggtggtgaaaaacctgcgcctggtaggtgtctggtggggcagcggagactggatctgcgtgcaaagtacctttgtttcagagggaagtggtgggtccctggtgtgcaagcaggtgactgcatcctctggtgtcttggcaaggtgggaatgaggtttcccacaggtgtcagtgtcagatgtacttgagaggcactggaaaaagcacagaaacagagaggatgggktcctggggcragtcctgtgaaaattgtcctgcaggaaggagttggcctcatggctcaaagccatgaggacagctggagaacctaatataccagtgttggctcagataataggttcgtgctgtggtggcagcctttcccagggagcagaaaaggctccctygggatgtggctgaccgtgggttttgtctgcttgctgggacagcacctgactgctggactccagccctgtggctgggcatggcctgtgtggacatcagagactggagaatgactgccactagcctgcactgtgtagcatgcagtgacctc

SEQ ID NO: 9708 - DNA, 600 bp, Chicken  19866894205458_3
aagtggtgggtccctggtgtgcaagcaggtgactgcatcctctggtgtcttggcaaggtgggaatgaggtttcccacaggtgtcagtgtcagatgtacttgagaggcactggaaaaagcacagaaacagagaggatgggktcctggggcragtcctgtgaaaattgtcctgcaggaaggagttggcctcatggctcaaagccatgaggacagctggagaacctaatataccagtgttggctcagataataggttcgtgctgtggtggcagcctttcccagggagcagaaaaggctccctygggatgtggctgaccgtgggttttgtctgcttgctgggacagcacctgactgctggactccagccctgtggctgggcatggcctgtgtggacatcagagactggagaatgactgccactagcctgcactgtgtagcatgcagtgacctcagggttgaattgtctgcctctaacatgaaacttttccctaacagaaacaagaggaggagatcacacagctgtgcaatgactttgagagacaactgaaaggtcagaatgtgctcgaagcccctgtgtctgtgtgctgaggaagtctccttgg

SEQ ID NO: 9709 - DNA, 600 bp, Chicken  19866894205459_1
gcttgcaaatgtaagataacctttaacatacttggatgcatactctgctatatgtttaactacatttgcctatgattctctgggaattttagtaagaattgagataactttgttgtttcatttaggaaataaattttactcttatgggcaataaaattcttaaatgaacaacagagtataaatctaaggagggaaaggtccatttctaggtaagatgttcatgaaagagacaacgcacaatgctgttgaacttaattttaacagaaaatttgaaacaagctacactatcaacactgtgcyttgttgtgtagctactgtacagcactgtccttgtgaatgtttttacccttcagaaactgaaggaaaatttgtctttcaatttaatggtaggtcagcttctgagcactttgagcaggacatatgggtagagattctaacttgccattaaaactgttaatcatcacacctatctttccctgcagaagtcatgttggacaaaaytggcaataaagactataagccagcaaaagctgtctctacttgcttgctttcttgtcttgtattgctgtatttgaatgctaaattactccagagacactg

SEQ ID NO: 9710 - DNA, 600 bp, Chicken  19866894205459_2
atttctaggtaagatgttcatgaaagagacaacgcacaatgctgttgaacttaattttaacagaaaatttgaaacaagctacactatcaacactgtgcyttgttgtgtagctactgtacagcactgtccttgtgaatgtttttacccttcagaaactgaaggaaaatttgtctttcaatttaatggtaggtcagcttctgagcactttgagcaggacatatgggtagagattctaacttgccattaaaactgttaatcatcacacctatctttccctgcagaagtcatgttggacaaaaytggcaataaagactataagccagcaaaagctgtctctacttgcttgctttcttgtcttgtattgctgtatttgaatgctaaattactccagagacactgaaatataatgcttttgtactactgaaactcaaagtgttggtacatagagcttccaattgtcactggttaagagtatatctaaagctaaatcctaaatkatagagtttacttgcttgaagtggttttataaatatcttatagggctttaggaaaaataagtgacttctccagaactgtgaaattctacaatgtgttttcgca

SEQ ID NO: 9711 - DNA, 600 bp, Chicken  19866894205459_3
ctgagcactttgagcaggacatatgggtagagattctaacttgccattaaaactgttaatcatcacacctatctttccctgcagaagtcatgttggacaaaaytggcaataaagactataagccagcaaaagctgtctctacttgcttgctttcttgtcttgtattgctgtatttgaatgctaaattactccagagacactgaaatataatgcttttgtactactgaaactcaaagtgttggtacatagagcttccaattgtcactggttaagagtatatctaaagctaaatcctaaatkatagagtttacttgcttgaagtggttttataaatatcttatagggctttaggaaaaataagtgacttctccagaactgtgaaattctacaatgtgttttcgcaagtgcttctttttacacagggaaaattcaactctggttattaatttaacttgattctaaagctccaaaaaacaaagaatttttgtttgtttgcttgtttgtttgtggtttgttttttccttcattcattttcattgcttctggtaaaaatataaacaataaatgaatataatagaatcagtttagttaagagttctg

SEQ ID NO: 9712 - DNA, 599 bp, Chicken  19866894205464_1
  misc_feature (1)..(241): n is any nucleotide
nnnnnnnnnnnnnnnnnnnnnnnnnnnnnnnnnnnnnnnnnnnnnnnnnnnnnnnnnnnnnnnnnnnnnnnnnnnnnnnnnnnnnnnnnnnnnnnnnnnnnnnnnnnnnnnnnnnnnnnnnnnnnnnnnnnnnnnnnnnnnnnnnnnnnnnnnnnnnnnnnnnnnnnnnnnnnnnnnnnnnnnnnnnnnnnnnnnnnnnnnnnnnnnnnnnnnnnnnnnnnnnnnnnnnnnnnnnnnnnnnatgttatgaggctttaaaatgcttggcagcatcactcctgctgagatacctcctgtgcrttttgatgctgtttttttcccctcattgatgtgaaagtagggtggctttttgcgtgtgtaatagttatactccatcggcaccactttgcttccaaagtctattatactatataaktttttacattaaataatacgattgtcctstgaacagtctcaggaaagttctaaagtgytgacctatagttgctttgagccctgggcttagcatctggttatgtggtgacctgaattaaactgaggtttttatttggcacattttagtcacatttaccaatgggagcaaggccttacccacttct

SEQ ID NO: 9713 - DNA, 599 bp, Chicken  19866894205464_2
  misc_feature (1)..(126): n is any nucleotide
nnnnnnnnnnnnnnnnnnnnnnnnnnnnnnnnnnnnnnnnnnnnnnnnnnnnnnnnnnnnnnnnnnnnnnnnnnnnnnnnnnnnnnnnnnnnnnnnnnnnnnnnnnnnnnnnnnnnnnnnnnnnnnatgttatgaggctttaaaatgcttggcagcatcactcctgctgagatacctcctgtgcrttttgatgctgtttttttcccctcattgatgtgaaagtagggtggctttttgcgtgtgtaatagttatactccatcggcaccactttgcttccaaagtctattatactatataaktttttacattaaataatacgattgtcctstgaacagtctcaggaaagttctaaagtgytgacctatagttgctttgagccctgggcttagcatctggttatgtggtgacctgaattaaactgaggtttttatttggcacattttagtcacatttaccaatgggagcaaggccttacccacttctggaggatacttattgatcattgtagatacagcacatcggtgaacacagtagaaatgaacgtgtgtgtgactaaagtttatttaactttggataaatggatgaggtttgacttata

SEQ ID NO: 9714 - DNA, 599 bp, Chicken  19866894205464_3
  misc_feature (1)..(97): n is any nucleotide
nnnnnnnnnnnnnnnnnnnnnnnnnnnnnnnnnnnnnnnnnnnnnnnnnnnnnnnnnnnnnnnnnnnnnnnnnnnnnnnnnnnnnnnnnnnnnnnnnatgttatgaggctttaaaatgcttggcagcatcactcctgctgagatacctcctgtgcrttttgatgctgtttttttcccctcattgatgtgaaagtagggtggctttttgcgtgtgtaatagttatactccatcggcaccactttgcttccaaagtctattatactatataaktttttacattaaataatacgattgtcctstgaacagtctcaggaaagttctaaagtgytgacctatagttgctttgagccctgggcttagcatctggttatgtggtgacctgaattaaactgaggtttttatttggcacattttagtcacatttaccaatgggagcaaggccttacccacttctggaggatacttattgatcattgtagatacagcacatcggtgaacacagtagaaatgaacgtgtgtgtgactaaagtttatttaactttggataaatggatgaggtttgacttatatcagggcacacagtttaatattcttcagt

SEQ ID NO: 9715 - DNA, 599 bp, Chicken  19866894205464_4
  misc_feature (1)..(68): n is any nucleotide
nnnnnnnnnnnnnnnnnnnnnnnnnnnnnnnnnnnnnnnnnnnnnnnnnnnnnnnnnnnnnnnnnnnnatgttatgaggctttaaaatgcttggcagcatcactcctgctgagatacctcctgtgcrttttgatgctgtttttttcccctcattgatgtgaaagtagggtggctttttgcgtgtgtaatagttatactccatcggcaccactttgcttccaaagtctattatactatataaktttttacattaaataatacgattgtcctstgaacagtctcaggaaagttctaaagtgytgacctatagttgctttgagccctgggcttagcatctggttatgtggtgacctgaattaaactgaggtttttatttggcacattttagtcacatttaccaatgggagcaaggccttacccacttctggaggatacttattgatcattgtagatacagcacatcggtgaacacagtagaaatgaacgtgtgtgtgactaaagtttatttaactttggataaatggatgaggtttgacttatatcagggcacacagtttaatattcttcagtattcttcagcagtgaatgaaactgtacaa

SEQ ID NO: 9716 - DNA, 600 bp, Chicken  19866894205468_1
ttcatctacttccttagaaatgaagataatataagaaaaaggttacatatgtgcatagagcccaaaagtaatgcttcattatatttaagtgacatgtatgaagaaccttaatatgttgtcaaactgttgcactagtagaatctgaaagttctgtatcaaaagaagtggcaagttatacgttaaatgtttccttttgcttttcgttggaagtcatttctgtaattttatttctgcttccttagcagaaagggaaactctctcataccctgagtgttgttgatctcagtcacataaagatgytttcattgaacaagcagttctaattccagatcaattctaagttaaacagaaaaatcttacatcatactccacactttctactggcgtctaacattaagtttgttatgtgattgacagttcagtgaatattgccatttagaccggtgcaggactagtgatcacagaataatgtacatgtaagacacagtgacagaagcwgccccttttctcaattcagaagaaatgcactaagactrcgaaccaacccaaagttctgtatgtcccctatcagtgcagtctaagctctgtggatgtgttggt

SEQ ID NO: 9717 - DNA, 600 bp, Chicken  19866894205468_2
tatgaagaaccttaatatgttgtcaaactgttgcactagtagaatctgaaagttctgtatcaaaagaagtggcaagttatacgttaaatgtttccttttgcttttcgttggaagtcatttctgtaattttatttctgcttccttagcagaaagggaaactctctcataccctgagtgttgttgatctcagtcacataaagatgytttcattgaacaagcagttctaattccagatcaattctaagttaaacagaaaaatcttacatcatactccacactttctactggcgtctaacattyagtttgttatgtgattgacagttcagtgaatattgccatttagaccggtgcaggactagtgatcacagaataatgtacatgtaagacacagtgacagaagcwgccccttttctcaattcagaagaaatgcactaagactrcgaaccaacccaaagttctgtatgtcccctatcagtgcagtctaagctctgtggatgtgttggtggatttatcctcctcctccctactgtggaattaaagttgatcataggagattgcaagccagaactagaacagagtttgaggctgccttctggggag

SEQ ID NO: 9718 - DNA, 600 bp, Chicken  19866894205468_3
atgaagaaccttaatatgttgtcaaactgttgcactagtagaatctgaaagttctgtatcaaaagaagtggcaagttatacgttaaatgtttccttttgcttttcgttggaagtcatttctgtaattttatttctgcttccttagcagaaagggaaactctctcataccctgagtgttgttgatctcagtcacataaagatgytttcattgaacaagcagttctaattccagatcaattctaagttaaacagaaaaatcttacatcatactccacactttctactggcgtctaacattaygtttgttatgtgattgacagttcagtgaatattgccatttagaccggtgcaggactagtgatcacagaataatgtacatgtaagacacagtgacagaagcwgccccttttctcaattcagaagaaatgcactaagactrcgaaccaacccaaagttctgtatgtcccctatcagtgcagtctaagctctgtggatgtgttggtggatttatcctcctcctccctactgtggaattaaagttgatcataggagattgcaagccagaactagaacagagtttgaggctgccttctggggaga

SEQ ID NO: 9719 - DNA, 600 bp, Chicken  19866894205468_4
tttcgttggaagtcatttctgtaattttatttctgcttccttagcagaaagggaaactctctcataccctgagtgttgttgatctcagtcacataaagatgytttcattgaacaagcagttctaattccagatcaattctaagttaaacagaaaaatcttacatcatactccacactttctactggcgtctaacattaagtttgttatgtgattgacagttcagtgaatattgccatttagaccggtgcaggactagtgatcacagaataatgtacatgtaagacacagtgacagaagcwgccccttttctcaattcagaagaaatgcactaagactrcgaaccaacccaaagttctgtatgtcccctatcagtgcagtctaagctctgtggatgtgttggtggatttatcctcctcctccctactgtggaattaaagttgatcataggagattgcaagccagaactagaacagagtttgaggctgccttctggggagaaactcacagtgctgacaggaaaragggagagmcatgttcctgaatacagttatcataatagccattactccagatttatggtcagggaatttccgaatgca

SEQ ID NO: 9720 - DNA, 600 bp, Chicken  19866894205468_5
ccttagcagaaagggaaactctctcataccctgagtgttgttgatctcagtcacataaagatgytttcattgaacaagcagttctaattccagatcaattctaagttaaacagaaaaatcttacatcatactccacactttctactggcgtctaacattaagtttgttatgtgattgacagttcagtgaatattgccatttagaccggtgcaggactagtgatcacagaataatgtacatgtaagacacagtgacagaagcwgccccttttctcaattcagaagaaatgcactaagactrcgaaccaacccaaagttctgtatgtcccctatcagtgcagtctaagctctgtggatgtgttggtggatttatcctcctcctccctactgtggaattaaagttgatcataggagattgcaagccagaactagaacagagtttgaggctgccttctggggagaaactcacagtgctgacaggaaaragggagagmcatgttcctgaatacagttatcataatagccattactccagatttatggtcagggaatttccgaatgcagtcaagagaagacactgaaaagagatgatcatggtcag

SEQ ID NO: 9721 - DNA, 600 bp, Chicken  19866894205468_6
agtgaatattgccatttagaccggtgcaggactagtgatcacagaataatgtacatgtaagacacagtgacagaagcwgccccttttctcaattcagaagaaatgcactaagactrcgaaccaacccaaagttctgtatgtcccctatcagtgcagtctaagctctgtggatgtgttggtggatttatcctcctcctccctactgtggaattaaagttgatcataggagattgcaagccagaactagaacagagtttgaggctgccttctggggagaaactcacagtgctgacaggaaaragggagagmcatgttcctgaatacagttatcataatagccattactccagatttatggtcagggaatttccgaatgcagtcaagagaagacactgaaaagagatgatcatggtcaggcacttacagttctttggtgatctgaaagcagtttctgctctgaggcacatagtggctgaatggaaatagagacctcagatgatacagagaaatagagaggagttatacatttcctaggatgcatttcaagccacatgctgatttagcagtttttgtccaaaagtgttttctctttccctttcc

SEQ ID NO: 9722 - DNA, 600 bp, Chicken  19866894205468_7
tgccatttagaccggtgcaggactagtgatcacagaataatgtacatgtaagacacagtgacagaagcwgccccttttctcaattcagaagaaatgcactaagactrcgaaccaacccaaagttctgtatgtcccctatcagtgcagtctaagctctgtggatgtgttggtggatttatcctcctcctccctactgtggaattaaagttgatcataggagattgcaagccagaactagaacagagtttgaggctgccttctggggagaaactcacagtgctgacaggaaaragggagagmcatgttcctgaatacagttatcataatagccattactccagatttatggtcagggaatttccgaatgcagtcaagagaagacactgaaaagagatgatcatggtcaggcacttacagttctttggtgatctgaaagcagtttctgctctgaggcacatagtggctgaatggaaatagagacctcagatgatacagagaaatagagaggagttatacatttcctaggatgcatttcaagccacatgctgatttagcagtttttgtccaaaagtgttttctctttccctttccctttccctt

SEQ ID NO: 9723 - DNA, 600 bp, Chicken  19866894205470_1
cattttcttatgctctttattctgttttctaatccactgcatttgagctcagttggcttttgcatagctgtcaaaaactcagtgtgaggaatgaggacagtctgggaggtttgatttttattctgctttagagagaaggcaaaggagtaagagattgctgtcaaaaacaactgtaagggagatgcagcaagacttgctggtggtgtgctcttgctacttccttctactttcatttttttgtagaagaattcatttggagcaccataatattttgctgttcttcaccctggtgagcatttskctcagtgagagaggaaccctggcattgaatcaaggcaggcacgatggcattcgggatttcaccttggcctctggcagtgtactttatttatactaacaattgctgcctctgctgtgctcagcaacagctgatgcttctgctaaaataatcagcaaaggggcagctagctttattgctgttttctttgttgtcagggtctcaagtgagaaataagaagttgtcgattctatcatagctatttttgttactgcgtggaatcggagctgttactgtgagggcttttctcccactataactat

SEQ ID NO: 9724 - DNA, 600 bp, Chicken  19866894205470_2
attttcttatgctctttattctgttttctaatccactgcatttgagctcagttggcttttgcatagctgtcaaaaactcagtgtgaggaatgaggacagtctgggaggtttgatttttattctgctttagagagaaggcaaaggagtaagagattgctgtcaaaaacaactgtaagggagatgcagcaagacttgctggtggtgtgctcttgctacttccttctactttcatttttttgtagaagaattcatttggagcaccataatattttgctgttcttcaccctggtgagcatttskctcagtgagagaggaaccctggcattgaatcaaggcaggcacgatggcattcgggatttcaccttggcctctggcagtgtactttatttatactaacaattgctgcctctgctgtgctcagcaacagctgatgcttctgctaaaataatcagcaaaggggcagctagctttattgctgttttctttgttgtcagggtctcaagtgagaaataagaagttgtcgattctatcatagctatttttgttactgcgtggaatcggagctgttactgtgagggcttttctcccactataactatt

SEQ ID NO: 9725 - DNA, 600 bp, Chicken  19866894205473_1
tcccacatcaaggcagcgccgtcgggctcccaggagcgctatcgcttgcccaaagggctcggagcacttactttattttgtaatgcggcccctcagcctgtgatgtgccagacgtggcgtgtctaagaagccgggctgttccttatcagcctctcgcactgtctcagaacccttctgctaagtgtcttttgtcccctaataaactgataagctgctggtaatccgctgatcgctgataggcagggcggccctgctctccctccctgcacagataaggtggctctttgccagcgggcagcrggtgatacagctcagcccgcagcagggagcgggtgggctctgagagtgtgtgccccccacccctggctsgtgtgaggagagagaacaggaccgggttggactctcctgggggttctgcatcacttgggcaggcaggtcctgcatccgtcctgcagagygtgggcgtcgtgtcctgttcccaaatgtgcatcctggccctgctgttggmtgcacaacggtgccaggctggggcagggagtcctgtggctgcctgtgctcctggagggagactggaaagaaagggaaggtgggagggaagag

SEQ ID NO: 9726 - DNA, 600 bp, Chicken  19866894205473_2
actttattttgtaatgcggcccctcagcctgtgatgtgccagacgtggcgtgtctaagaagccgggctgttccttatcagcctctcgcactgtctcagaacccttctgctaagtgtcttttgtcccctaataaactgataagctgctggtaatccgctgatcgctgataggcagggcggccctgctctccctccctgcacagataaggtggctctttgccagcgggcagcrggtgatacagctcagcccgcagcagggagcgggtgggctctgagagtgtgtgccccccacccctggctsgtgtgaggagagagaacaggaccgggttggactctcctgggggttctgcatcacttgggcaggcaggtcctgcatccgtcctgcagagygtgggcgtcgtgtcctgttcccaaatgtgcatcctggccctgctgttggmtgcacaacggtgccaggctggggcagggagtcctgtggctgcctgtgctcctggagggagactggaaagaaagggaaggtgggagggaagaggaaaaaaggcatgcgtttcctcctcttccctctctgttgcagcactcytgctctccgctgtcaggagat

SEQ ID NO: 9727 - DNA, 600 bp, Chicken  19866894205473_3
ctgtctcagaacccttctgctaagtgtcttttgtcccctaataaactgataagctgctggtaatccgctgatcgctgataggcagggcggccctgctctccctccctgcacagataaggtggctctttgccagcgggcagcrggtgatacagctcagcccgcagcagggagcgggtgggctctgagagtgtgtgccccccacccctggctsgtgtgaggagagagaacaggaccgggttggactctcctgggggttctgcatcacttgggcaggcaggtcctgcatccgtcctgcagagygtgggcgtcgtgtcctgttcccaaatgtgcatcctggccctgctgttggmtgcacaacggtgccaggctggggcagggagtcctgtggctgcctgtgctcctggagggagactggaaagaaagggaaggtgggagggaagaggaaaaaaggcatgcgtttcctcctcttccctctctgttgcagcactcytgctctccgctgtcaggagatgggcaggagggaggagcgcagcacccttttggtgttaattatctacgaagccatgcagctgtggtgcacacagctccggtgctggggct

SEQ ID NO: 9728 - DNA, 600 bp, Chicken  19866894205473_4
aagctgctggtaatccgctgatcgctgataggcagggcggccctgctctccctccctgcacagataaggtggctctttgccagcgggcagcrggtgatacagctcagcccgcagcagggagcgggtgggctctgagagtgtgtgccccccacccctggctsgtgtgaggagagagaacaggaccgggttggactctcctgggggttctgcatcacttgggcaggcaggtcctgcatccgtcctgcagagygtgggcgtcgtgtcctgttcccaaatgtgcatcctggccctgctgttggmtgcacaacggtgccaggctggggcagggagtcctgtggctgcctgtgctcctggagggagactggaaagaaagggaaggtgggagggaagaggaaaaaaggcatgcgtttcctcctcttccctctctgttgcagcactcytgctctccgctgtcaggagatgggcaggagggaggagcgcagcacccttttggtgttaattatctacgaagccatgcagctgtggtgcacacagctccggtgctggggctgctgccacctttgcayctgccctgtgctgtgcaggagtaaarccctctcc

SEQ ID NO: 9729 - DNA, 600 bp, Chicken  19866894205473_5
tgtgccccccacccctggctsgtgtgaggagagagaacaggaccgggttggactctcctgggggttctgcatcacttgggcaggcaggtcctgcatccgtcctgcagagygtgggcgtcgtgtcctgttcccaaatgtgcatcctggccctgctgttggmtgcacaacggtgccaggctggggcagggagtcctgtggctgcctgtgctcctggagggagactggaaagaaagggaaggtgggagggaagaggaaaaaaggcatgcgtttcctcctcttccctctctgttgcagcactcytgctctccgctgtcaggagatgggcaggagggaggagcgcagcacccttttggtgttaattatctacgaagccatgcagctgtggtgcacacagctccggtgctggggctgctgccacctttgcayctgccctgtgctgtgcaggagtaaarccctctcccacttccctgcatccakagcagcacagggctgcaatgcagcaccgcttcccttgggctccccatcccagcaaacagctgcgagcctgcgtgagccgtggggctgtgggacagcccagctccagagggggatcacttcctt

SEQ ID NO: 9730 - DNA, 545 bp, Chicken  19866894205473_6
gttcccaaatgtgcatcctggccctgctgttggmtgcacaacggtgccaggctggggcagggagtcctgtggctgcctgtgctcctggagggagactggaaagaaagggaaggtgggagggaagaggaaaaaaggcatgcgtttcctcctcttccctctctgttgcagcactcytgctctccgctgtcaggagatgggcaggagggaggagcgcagcacccttttggtgttaattatctacgaagccatgcagctgtggtgcacacagctccggtgctggggctgctgccacctttgcayctgccctgtgctgtgcaggagtaaarccctctcccacttccctgcatccakagcagcacagggctgcaatgcagcaccgcttcccttgggctccccatcccagcaaacagctgcgagcctgcgtgagccgtggggctgtgggacagcccagctccagagggggatcacttccttcccagcactcacatcactgctatttaatttgccaggcgatacggggaagggaacgaagtgctgcattttgt

SEQ ID NO: 9731 - DNA, 519 bp, Chicken  19866894205473_7
ctgttggmtgcacaacggtgccaggctggggcagggagtcctgtggctgcctgtgctcctggagggagactggaaagaaagggaaggtgggagggaagaggaaaaaaggcatgcgtttcctcctcttccctctctgttgcagcactcytgctctccgctgtcaggagatgggcaggagggaggagcgcagcacccttttggtgttaattatctacgaagccatgcagctgtggtgcacacagctccggtgctggggctgctgccacctttgcayctgccctgtgctgtgcaggagtaaarccctctcccacttccctgcatccakagcagcacagggctgcaatgcagcaccgcttcccttgggctccccatcccagcaaacagctgcgagcctgcgtgagccgtggggctgtgggacagcccagctccagagggggatcacttccttcccagcactcacatcactgctatttaatttgccaggcgatacggggaagggaacgaagtgctgcattttgt

SEQ ID NO: 9732 - DNA, 494 bp, Chicken  19866894205473_8
ctggggcagggagtcctgtggctgcctgtgctcctggagggagactggaaagaaagggaaggtgggagggaagaggaaaaaaggcatgcgtttcctcctcttccctctctgttgcagcactcytgctctccgctgtcaggagatgggcaggagggaggagcgcagcacccttttggtgttaattatctacgaagccatgcagctgtggtgcacacagctccggtgctggggctgctgccacctttgcayctgccctgtgctgtgcaggagtaaarccctctcccacttccctgcatccakagcagcacagggctgcaatgcagcaccgcttcccttgggctccccatcccagcaaacagctgcgagcctgcgtgagccgtggggctgtgggacagcccagctccagagggggatcacttccttcccagcactcacatcactgctatttaatttgccaggcgatacggggaagggaacgaagtgctgcattttgt

SEQ ID NO: 9733 - DNA, 600 bp, Chicken  19866894205478_1
aaaataagcttgttagtaaacctctatttttagagacaatcttcataactttgttgacaatgctttaatgcgagtttttgtagtgagcctttccaaagctttatgtctgacttttagatttttaatttgcggttgtattaatctattttgaattattaaaattcatctcctacgtttagactctaagtgagaaaaaataaaagcaaatatcttgtttgggatgcctctattcattaatgttaaagaactgaaaaaaattatgcagaatgaatagcatcatttctgatgaataaaaatatrctgtttctttacaaacgtcaaatatttttggtgtaaaacgaaatggcttcagattatgaaaatgttgatattttttataaattctgtaatttaaaattaaataagcacatattgaatgcagcatcttctgaagtctrggtgatttggattaaagcatggcttatgcttaacatggtcctttagaagactacctctgatcattactaagtaaaagtagtaaaatattctagcttttattcttagagaaatcttttcagcatatattttttttcatttctgtgtaagtatgtgtaactaatc

SEQ ID NO: 9734 - DNA, 600 bp, Chicken  19866894205478_2
ttaatctattttgaattattaaaattcatctcctacgtttagactctaagtgagaaaaaataaaagcaaatatcttgtttgggatgcctctattcattaatgttaaagaactgaaaaaaattatgcagaatgaatagcatcatttctgatgaataaaaatatrctgtttctttacaaacgtcaaatatttttggtgtaaaacgaaatggcttcagattatgaaaatgttgatattttttataaattctgtaatttaaaattaaataagcacatattgaatgcagcatcttctgaagtctrggtgatttggattaaagcatggcttatgcttaacatggtcctttagaagactacctctgatcattactaagtaaaagtagtaaaatattctagcttttattcttagagaaatcttttcagcatatattttttttcatttctgtgtaagtatgtgtaactaatcctttactaaaattgcaaatgtttcctaagcatatcctcacaacattttatcatagtttttaagaactrttctttgtcttcataacagtctcaaattaatatttgcataaaattcttcagatcatttcataattttgt

SEQ ID NO: 9735 - DNA, 600 bp, Chicken  19866894205478_3
tattttttataaattctgtaatttaaaattaaataagcacatattgaatgcagcatcttctgaagtctrggtgatttggattaaagcatggcttatgcttaacatggtcctttagaagactacctctgatcattactaagtaaaagtagtaaaatattctagcttttattcttagagaaatcttttcagcatatattttttttcatttctgtgtaagtatgtgtaactaatcctttactaaaattgcaaatgtttcctaagcatatcctcacaacattttatcatagtttttaagaactrttctttgtcttcataacagtctcaaattaatatttgcataaaattcttcagatcatttcataattttgtttaataggctttcccttttaagattacagccttttctataaattgcaaattatgcaaagtacgcctacttaagtttcgcaaattttcattgccaaatgacaattgtttcactgttcatctgttcaaaggattacttcttaaattagtgaactaaaatgataaagtgcatgtttctgttctcttatttataacccataattttcctaaggccaatttaagatatattgtctt

SEQ ID NO: 9736 - DNA, 599 bp, Chicken  19866894205479_1
  misc_feature (1)..(183): n is any nucleotide
nnnnnnnnnnnnnnnnnnnnnnnnnnnnnnnnnnnnnnnnnnnnnnnnnnnnnnnnnnnnnnnnnnnnnnnnnnnnnnnnnnnnnnnnnnnnnnnnnnnnnnnnnnnnnnnnnnnnnnnnnnnnnnnnnnnnnnnnnnnnnnnnnnnnnnnnnnnnnnnnnnnnnnnnnnnnnnnnnnnnnnnatttgatcccattgatccagatgagtagtaatcaatatagagtttactgtatgtaattaatatcttgaactctgtgaggatgataacatgataacatgatcaagagaaaacaaaagscttatttttaggtgctctaactatcatwatcaagggagggtaccactgatgtgaatggaatgtaaaagacaactacacaaccactcaggcacaacttagtcaaacaacatgtggtagacatgttcccatggcagggggattggagcttgatgatccttgtggtcccttccaacccaatccattctataattctatgatctgtcaaagctactagttggagttaagcctgatttacagatgtaaatctttcaaatgtaatagaaaaaatgtagaacaccaataactcagtaatttgatgg

SEQ ID NO: 9737 - DNA, 599 bp, Chicken  19866894205479_2
  misc_feature (1)..(155): n is any nucleotide
nnnnnnnnnnnnnnnnnnnnnnnnnnnnnnnnnnnnnnnnnnnnnnnnnnnnnnnnnnnnnnnnnnnnnnnnnnnnnnnnnnnnnnnnnnnnnnnnnnnnnnnnnnnnnnnnnnnnnnnnnnnnnnnnnnnnnnnnnnnnnnnnnnnnnnnnnnnatttgatcccattgatccagatgagtagtaatcaatatagagtttactgtatgtaattaatatcttgaactctgtgaggatgataacatgataacatgatcaagagaaaacaaaagscttatttttaggtgctctaactatcatwatcaagggagggtaccactgatgtgaatggaatgtaaaagacaactacacaaccactcaggcacaacttagtcaaacaacatgtggtagacatgttcccatggcagggggattggagcttgatgatccttgtggtcccttccaacccaatccattctataattctatgatctgtcaaagctactagttggagttaagcctgatttacagatgtaaatctttcaaatgtaatagaaaaaatgtagaacaccaataactcagtaatttgatggtctcaaaaatatrtctttcagtgttttt

SEQ ID NO: 9738 - DNA, 600 bp, Chicken  19866894205479_3
tgctctaactatcatwatcaagggagggtaccactgatgtgaatggaatgtaaaagacaactacacaaccactcaggcacaacttagtcaaacaacatgtggtagacatgttcccatggcagggggattggagcttgatgatccttgtggtcccttccaacccaatccattctataattctatgatctgtcaaagctactagttggagttaagcctgatttacagatgtaaatctttcaaatgtaatagaaaaaatgtagaacaccaataactcagtaatttgatggtctcaaaaatatrtctttcagtgtttttcaccaaaattcagagaaatatatwttttttcttatattacaacatgaatgtgtattataccatacagaaaacacatgggaggaatgtttttatagtacacctaatcacaagattgctgagataagaaaacaaatgtgtgtgtatgtgtttgtgtaaatttttgtcttttctttaggagaaaaagggggagtggttggtgtctcactccaatttataggagggagaggaggttcttttaatatatgtatacccgacagcgaggttaagaaacaatggttcaaatat

SEQ ID NO: 9739 - DNA, 574 bp, Chicken  19866894205479_4
tgaatggaatgtaaaagacaactacacaaccactcaggcacaacttagtcaaacaacatgtggtagacatgttcccatggcagggggattggagcttgatgatccttgtggtcccttccaacccaatccattctataattctatgatctgtcaaagctactagttggagttaagcctgatttacagatgtaaatctttcaaatgtaatagaaaaaatgtagaacaccaataactcagtaatttgatggtctcaaaaatatrtctttcagtgtttttcaccaaaattcagagaaatatatwttttttcttatattacaacatgaatgtgtattataccatacagaaaacacatgggaggaatgtttttatagtacacctaatcacaagattgctgagataagaaaacaaatgtgtgtgtatgtgtttgtgtaaatttttgtcttttctttaggagaaaaagggggagtggttggtgtctcactccaatttataggagggagaggaggttcttttaatatatgtatacccgacagcgaggttaagaaacaatggttcaaatattggtccagccagg

SEQ ID NO: 9740 - DNA, 600 bp, Chicken  19866894205483_1
tcacataaccttctgggctcaagatgaaattgtttccctcccccttcaacaattgcataggatgttctcctttatagtaaattccaaacaaattaatggattccaacatgcaccatcaaatttatatttcctcttccacagagtcctacccctgtaagtaatccttaaaattcgtcatgaagctttcaaaacaatttatgcaaacaaacatcaagcggagctatttgtattggcagcacatttcacttaacaacctacaacaaggaacagatggtcagagctctggaaacagctacaaakwgaacagtaggagcaagtccatcagaagcacttttttcccccaattttgtgaagattacagacttgttcatgtttatttctttgattaggctgttattttatrtactcatgaatccttcccttgcatttcatggaataaatcccccagaatcacattccccaactgtgcctcgtttacagaagcactgttttatgaactgagctatctgttcctcactgatccggcatgttctgaagtggtggggaaggaagtgaaacaacatgcagatgttaagacaaatttaaagcaagcatcttaac

SEQ ID NO: 9741 - DNA, 600 bp, Chicken  19866894205483_2
cacataaccttctgggctcaagatgaaattgtttccctcccccttcaacaattgcataggatgttctcctttatagtaaattccaaacaaattaatggattccaacatgcaccatcaaatttatatttcctcttccacagagtcctacccctgtaagtaatccttaaaattcgtcatgaagctttcaaaacaatttatgcaaacaaacatcaagcggagctatttgtattggcagcacatttcacttaacaacctacaacaaggaacagatggtcagagctctggaaacagctacaaakwgaacagtaggagcaagtccatcagaagcacttttttcccccaattttgtgaagattacagacttgttcatgtttatttctttgattaggctgttattttatrtactcatgaatccttcccttgcatttcatggaataaatcccccagaatcacattccccaactgtgcctcgtttacagaagcactgttttatgaactgagctatctgttcctcactgatccggcatgttctgaagtggtggggaaggaagtgaaacaacatgcagatgttaagacaaatttaaagcaagcatcttaaca

SEQ ID NO: 9742 - DNA, 600 bp, Chicken  19866894205483_3
caacatgcaccatcaaatttatatttcctcttccacagagtcctacccctgtaagtaatccttaaaattcgtcatgaagctttcaaaacaatttatgcaaacaaacatcaagcggagctatttgtattggcagcacatttcacttaacaacctacaacaaggaacagatggtcagagctctggaaacagctacaaakwgaacagtaggagcaagtccatcagaagcacttttttcccccaattttgtgaagattacagacttgttcatgtttatttctttgattaggctgttattttatrtactcatgaatccttcccttgcatttcatggaataaatcccccagaatcacattccccaactgtgcctcgtttacagaagcactgttttatgaactgagctatctgttcctcactgatccggcatgttctgaagtggtggggaaggaagtgaaacaacatgcagatgttaagacaaatttaaagcaagcatcttaacaattcatatttgtctttaccccttcgcccagccctgagtctctatattaaagcagtcagaagcaaatgagctgcacagctgcatccatcacacacaccatttg

SEQ ID NO: 9743 - DNA, 600 bp, Chicken  19866894205497_1
acagctgcttctttctaaacatgaaatgttgactttggtaacagataactgtcagcagactgaaggtgaagaagcgaagccatcttttccatctcctttgtgaggttactttccatatgtgcagagagatagcaaatagacaaacttcctctctaatcctggctgttatctatttcagttttccttattacagcctgtacagtcagaacgtgtcactcagtgatatgtttggttgtgttgcgtactcaggtattgtaacagtgtgcaaatgctcatatgtaactgtttattactttatgragttctactgttcagatttaataaactgatctcagtctctttgttgtacagagttaaatgcacacaggtacgtttccttctacctgaagcttgtctttgactagaaattaaagtatgcttaattccatccaagtaagatggagctgcagcactcctgtgtcactgcagtttgtcatcagccaaagcacatcaggcctgcgtggatgttttttattgtgtgaattgcaataaatatttataatggtaaataatgacaactccatgaatagctaaatcctgcccaaagtttcaagcaattta

SEQ ID NO: 9744 - DNA, 600 bp, Chicken  19866894205500_1
taacagccaggctcacctaatcagggcagaaataaaccgagagatttcagtcttctgctttttttggaaaggagcagcactcttcagctggctcccactcaaaagagaggatgctcgaatatggttatttttaggagccgcacagatatgtaatgtgcattaaagcatagtgatgtgctaagaaataaatctcatttctaccccccttcccgaatcactagggaagcagttctccaggaaaaacgtgttgtgtaattaaaaaaaatagaaagcatttattaagaggaaatgtttgttttytaaggtttatttagaaagtcttgagagatgggaataaaacctcaaatcctaggagttttccagatattcatttaagggaaaaaaaatgttgaggatgggttgtttcccgaaatgcaaaacatcagggaggaatctgaaaagagctttactttctgtgcaaaatctctattgttgcttggcaaacaatgggagctctgggcgactgtaaggctgtgagaatgaatagggaatccgcaggatgtgtgccgggtcagtgctttggggtctctgtcctaaagcccctttctcagcttgccacaa

SEQ ID NO: 9745 - DNA, 599 bp, Chicken  19866894205505_1
  misc_feature (1)..(106): n is any nucleotide
nnnnnnnnnnnnnnnnnnnnnnnnnnnnnnnnnnnnnnnnnnnnnnnnnnnnnnnnnnnnnnnnnnnnnnnnnnnnnnnnnnnnnnnnnnnnnnnnnnnnnnnnnncacagttctctgatggtggtacaggcacagtgctccacagcccacagtaatggtcagaacccgtagtagtggtcaaaacctagcaatggtctaatttttctaattaaaaaaatccccctatcatcttctaatcattgcagaggattttgttaaagcactttccacagcatgggtgaatttagtttatacatttyttgacgtaagaagacaagtcttttaagaaaaagagaaggacagaatatcatgtgcggcttaaacaaccccagcaaggtttgggaccttctgaaccttccagacgtcctcaagctggagctccaacacgaccaagagatgaggtcagcactgagcatctctccctgagcttctctccagaccaaacaaagagacttcccttggacaactcagtaccaagggtctactctgggcttccttccctccctccgtactcacagggackgcagctccaacctgggcaggtggctcctactgccta

SEQ ID NO: 9746 - DNA, 600 bp, Chicken  19866894205505_2
ctttccacagcatgggtgaatttagtttatacatttyttgacgtaagaagacaagtcttttaagaaaaagagaaggacagaatatcatgtgcggcttaaacaaccccagcaaggtttgggaccttctgaaccttccagacgtcctcaagctggagctccaacacgaccaagagatgaggtcagcactgagcatctctccctgagcttctctccagaccaaacaaagagacttcccttggacaactcagtaccaagggtctactctgggcttccttccctccctccgtactcacagggackgcagctccaacctgggcaggtggctcctactgcctactggcagctgcagcatcccacccccagctgcttgtrttgccggccatggttaagtcgctgatctacacagagccaccttaacaggaattttggatgggtcttagcgaaggggaggaaaaaagaggacataatgtttaattataagaaatgattgaaataggcacagacataccccgggtgcctctgcactgcagcaagctctaaacttgttatcgttaatggtttaaatttcactgtgctaatcatttcaggacacaagccttt

SEQ ID NO: 9747 - DNA, 600 bp, Chicken  19866894205505_3
aaggacagaatatcatgtgcggcttaaacaaccccagcaaggtttgggaccttctgaaccttccagacgtcctcaagctggagctccaacacgaccaagagatgaggtcagcactgagcatctctccctgagcttctctccagaccaaacaaagagacttcccttggacaactcagtaccaagggtctactctgggcttccttccctccctccgtactcacagggackgcagctccaacctgggcaggtggctcctactgcctactggcagctgcagcatcccacccccagctgcttgtrttgccggccatggttaagtcgctgatctacacagagccaccttaacaggaattttggatgggtcttagcgaaggggaggaaaaaagaggacataatgtttaattataagaaatgattgaaataggcacagacataccccgggtgcctctgcactgcagcaagctctaaacttgttatcgttaatggtttaaatttcactgtgctaatcatttcaggacacaagcctttcttgataatctaatgaattattccaacatccttcagcaaaaaaaatcctccatgacagcactaattacaaga

SEQ ID NO: 9748 - DNA, 600 bp, Chicken  19866894205506_1
cctggctcagtatttattgcgcttttatctgcctcgaaacaaacactgcaagcaatctgaaaggtcatccgtttcttcttctgcttttgcaaaatggcatttctaagagcagccactccagccgtgccctttggtaaaccacaggagatccaaacggccgcagccagagctggagggcagcggggagggagagcagccagagctcactgtgctgcactgctcggcccacgagcagcggctctgcacggccgcacgccttctgtccaccggccgtgttgtgctcagagctgcagctgcccrgtgagcagccccacacgttgctaaggygatgggcgcccatcgcagccccacacactcagaatagctccggagcctgaagctggcagtctgaagacgcccgtttcgctccattaaaggcacagcctgctcacactgtgagaagcaaaattgggatttttcttctcagcgtggtctgtggcacagcaagcgttaattgaaattaaaagaaaccaaagattaattgtctttctctgctaagatagaggggtttttcaaggatgtgattacctgtctgttcagatccatcctatatcctgttta

SEQ ID NO: 9749 - DNA, 600 bp, Chicken  19866894205506_2
tctgcctcgaaacaaacactgcaagcaatctgaaaggtcatccgtttcttcttctgcttttgcaaaatggcatttctaagagcagccactccagccgtgccctttggtaaaccacaggagatccaaacggccgcagccagagctggagggcagcggggagggagagcagccagagctcactgtgctgcactgctcggcccacgagcagcggctctgcacggccgcacgccttctgtccaccggccgtgttgtgctcagagctgcagctgcccrgtgagcagccccacacgttgctaaggygatgggcgcccatcgcagccccacacactcagaatagctccggagcctgaagctggcagtctgaagacgcccgtttcgctccattaaaggcacagcctgctcacactgtgagaagcaaaattgggatttttcttctcagcgtggtctgtggcacagcaagcgttaattgaaattaaaagaaaccaaagattaattgtctttctctgctaagatagaggggtttttcaaggatgtgattacctgtctgttcagatccatcctatatcctgtttaagccttacagctcttttatcaggaaaa

SEQ ID NO: 9750 - DNA, 600 bp, Chicken  19866894205513_1
aacagattggaaagaaagtgaaaagaattctgaaatttgactgcattgtactgaaaaggtttcttagaggagaaaaaggaaattatacagctgaaaatgagcattactgctattgctttgttcaaaaacactctcaatgttactccttttcagtacgaagaatgtataaaatcagtaaggcagctcatgtggattagtatggaaattgagtttatatctgaaatatctgaatatctgaagtttcacaagaatcgcggattcttaaagagaaacaaatgctgttgatttaaattaagaatkcttatgtaagtaaatttagttaaattttcccaaagttctcagcttagacactgcaggcagagaaggacagattgcaatcctagtctggagtttctggacagaaaaggcactcaactcaaagcagacaatacaaccgccttaacagtgctttcccctatttcacctgtacaaggactgcagtcactacactgaacattcatctgcatttcaaatttgaaaattaagaattaattaatgtgattttctcctccttattttctggcacgctcccttctctaggaaggaagatggtgggtagga

SEQ ID NO: 9751 - DNA, 599 bp, Chicken  19866894205518_1
  misc_feature (1)..(57): n is any nucleotide
nnnnnnnnnnnnnnnnnnnnnnnnnnnnnnnnnnnnnnnnnnnnnnnnnnnnnnnnnccaggagatgagaaataaccccaaactccatacagaaaccctccagaagaccagcaacacacccaaactgttctgaaaccctccaggagaccagggaccctccaaacctgctggcacaccatgcaaacagcctgtgcacaccccagtctggctgcagatgcagctgcaggaggcactgagctgcaaagcatgtggcaccagcagtgtttttcagcagaccttggtgtgattgtacctttcagstgtggtaactgtttactctcataccaggcagtgatggaaaaaaacaaagctataaaaccggcgtattgaacacagctaaacggaggaggaaagatgagcaacatcgcctatggaaagccaggaatgtaactgcaagctatgcagccattcagctaaaaatcaatgtttcctaaatggtttcgaatttctactggatttattcctcttgggtaaacaggacaaatacataccctacaaaagtacaacttgtattgccaagcgcaatactccaaaggttttcagttactctctcaggccca

SEQ ID NO: 9752 - DNA, 600 bp, Chicken  19866894205527_1
gcttatttaacgaactcagtgggatgtatttcttacacaagattttcttctcctgctgtacacctcctcctgatccaactgaaagtagagcagttaatgaactgtgtaatctcttcaaaggctaccacaccatgtggaagaagttaaccacactgggctgtcccacagggcacatctgaccccttcagacatgcagctgcagagcaaggcagacctcacgagtgctgagctgtgtgctgcagcccctgccctatcagtgggtatcttattgtttctccatgagcccaagtgacagcaacygtgtggtggcaatgtgaaccccagcatgtgtcaaaagccacactgctgccactttctctactgtacttgttatggaggagcttgctccaattcatcaccactgctgtcatgccatttgctacctactcaaatgtaactgatgattcagatcttcatttcccaaaggaaagttacaattttgtgccactgacaaaatgtatagattcattaacctgtggttacaaggcctgcttacacaactctttctcctttcgaaagcattgaggcttcattgagcaatcagactgaacataaagcagt

SEQ ID NO: 9753 - DNA, 600 bp, Chicken  19866894205538_1
gaggacaggaagggatgctctctgcccccactcgtgtctctgcactgactttgtctcattggaaaggggcttggaggcattcagcattcgctgccatcagttggctgcctcccttcaatccatactgccttgggatctgagaggtgtaaatatggagggatcctgctgaaatcaaagagagaatgttctcactgggaggacactggcatgaatgaagcaaaatgagatccatagggaataaaatgctagtgctgggggaaaaaaagaagtcaagattcacagcactagtccagaagaatwgtagctcatatcatattaaaaaaaacccatagttctcatttcctccttatccctgtaggacaggaaagaacatcctgctcttttaatatgagcaaaatrcaagttatttttggaaggaaaaaaaatcacgctcagagcacatttttcaaaagacatctctaatctgtgattctgatgatgcacgtggagcagagcgcatccttctgcatccagaaacccagctttatcacctcagcaccatccacactcaggcaggttcctgttggttgaacaggggtcagcaatgctgtgtcgggatgt

SEQ ID NO: 9754 - DNA, 600 bp, Chicken  19866894205538_2
gttggctgcctcccttcaatccatactgccttgggatctgagaggtgtaaatatggagggatcctgctgaaatcaaagagagaatgttctcactgggaggacactggcatgaatgaagcaaaatgagatccatagggaataaaatgctagtgctgggggaaaaaaagaagtcaagattcacagcactagtccagaagaatwgtagctcatatcatattaaaaaaaacccatagttctcatttcctccttatccctgtaggacaggaaagaacatcctgctcttttaatatgagcaaaatrcaagttatttttggaaggaaaaaaaatcacgctcagagcacatttttcaaaagacatctctaatctgtgattctgatgatgcacgtggagcagagcgcatccttctgcatccagaaacccagctttatcacctcagcaccatccacactcaggcaggttcctgttggttgaacaggggtcagcaatgctgtgtcgggatgtcagcagtgcccagaagccacctccaaggggtgctgggggcagtggtggggagctcagcccgggtattgggtcattcatggtgagctctgcaaggggctt

SEQ ID NO: 9755 - DNA, 599 bp, Chicken  19866894205546_1
  misc_feature (1)..(89): n is any nucleotide
nnnnnnnnnnnnnnnnnnnnnnnnnnnnnnnnnnnnnnnnnnnnnnnnnnnnnnnnnnnnnnnnnnnnnnnnnnnnnnnnnnnnnnnnnagtgtgttataagtacacagacccaccaggtaataaatcatcaagaaatcactagtcaagagctctatagaataaagaatgcattagtgggtgtgtggaacagtattgtttgagtaaagaaaaaacaactaaacatggctcctttaaggaggacctttagaagtatcttagaggtcactgaaaggatcaagaagtagattaatagtaataraaataaatgactgatttcttctatcctgatttcccataggtctttaaagggaactaagaagcagtgggttaagagaggaggccctggcatgtacagtaaaaaaagaaacaacaacaaaacataggaaactggtaaaaggagtaaatgaacagttcttacaggtaatggagatcaacagtggattctgaaaggatttttgttgctgacctatgaagtttaatacattcataaatgacatagaataatcagtggtaagttttgtggatggcacaaaattgttaaattattaagatgagagc

SEQ ID NO: 9756 - DNA, 600 bp, Chicken  19866894205547_1
atttcttggccgaggtaaagctattgaagaagtctcaggtcaactagcttggagaggtgctgatacagtcagtatagaattacattctgtactcttctgggtggaaagctgtactagtcctttcaacagaacaatgaaggatgatattgacaaacaggaactatgtttgagattgaaaacactatccagaaggcagaaatagtttcacatagacagaaaagtagtaagtctcctaacactaaaggaaacattgatcataagtggcttctattgatccgcttctgatgccaaaaagtcccragctcacggagctgaaataaatatgcactttactgcaagtgatttgttcttcacatggctcaaatggtaatttaattcagccaaaatgtttcaaacagtcatccatctgtgcagtgcctgagccttgcagatctttatgacctctacaagggtgacttcagcgttttcttgcctttgttgcttttcaacatcctagtaaatctaactgtagaggagagtggaggaaaactaactgaattcatagatagaaattaatttgaataatcacgatccatacaatgtcatggtttctgtatgaat

SEQ ID NO: 9757 - DNA, 599 bp, Chicken  19866894205561_1
  misc_feature (1)..(28): n is any nucleotide
nnnnnnnnnnnnnnnnnnnnnnnnnnnntgagtcctgtagggattcctaaatgctatataggtgctcttgagtactatagggactcctgagtgctatacagagactcctaaatgctataggggcttctaagtgctctatagggactcctgagtcctatatagggcttcctaaatgctatagggaactcctgaactccacatagggactcctgagtgcaatggggattcctaaatgctctatagggactcctgagctttacacagggactcttaaaatgctataggggctcctaaatgccrtgtagggtctcctgaatgctgtataggggtttctgggtgccgcagggcctctcccacacagggaaacccatagagagctctcccatcccaaatcccattgggttttcccatccgagtgggacagaatcccaatggccgcrttgtcygaatggagccccattcccccccggccccaaaagaggccgaggatgcggtgtggggttacggggccgcaggtgccccccaccccattacaacgtcggctcatggcaagaaaggaaaggagagatttgaactggttttactcaatgggaacggtg

SEQ ID NO: 9758 - DNA, 600 bp, Chicken  19866894205561_2
gggactcctgagtcctatatagggcttcctaaatgctatagggaactcctgaactccacatagggactcctgagtgcaatggggattcctaaatgctctatagggactcctgagctttacacagggactcttaaaatgctataggggctcctaaatgccrtgtagggtctcctgaatgctgtataggggtttctgggtgccgcagggcctctcccacacagggaaacccatagagagctctcccatcccaaatcccattgggttttcccatccgagtgggacagaatcccaatggccgcrttgtcygaatggagccccattcccccccggccccaaaagaggccgaggatgcggtgtggggttacggggccgcaggtgccccccaccccattacaacgtcggctcatggcaagaaaggaaaggagagatttgaactggttttactcaatgggaacggtggcgtcccaaacgtggcctctgccccttccatccggaaagggttcccaacttccgtctgaaagcggtggaatataaaaaaaaaggaaatatcataaagtggcaaatcctgcctggctgcaaataaattatcttcggttctcg

SEQ ID NO: 9759 - DNA, 600 bp, Chicken  19866894205561_3
cctgagtcctatatagggcttcctaaatgctatagggaactcctgaactccacatagggactcctgagtgcaatggggattcctaaatgctctatagggactcctgagctttacacagggactcttaaaatgctataggggctcctaaatgccrtgtagggtctcctgaatgctgtataggggtttctgggtgccgcagggcctctcccacacagggaaacccatagagagctctcccatcccaaatcccattgggttttcccatccgagtgggacagaatcccaatggccgcrttgtcygaatggagccccattcccccccggccccaaaagaggccgaggatgcggtgtggggttacggggccgcaggtgccccccaccccattacaacgtcggctcatggcaagaaaggaaaggagagatttgaactggttttactcaatgggaacggtggcgtcccaaacgtggcctctgccccttccatccggaaagggttcccaacttccgtctgaaagcggtggaatataaaaaaaaaggaaatatcataaagtggcaaatcctgcctggctgcaaataaattatcttcggttctcgattata

SEQ ID NO: 9760 - DNA, 600 bp, Chicken  19866894205564_1
ttactaaatccaaaatgaaactagatgctaattaactgtcttctagaagaaggaagacaatctgttgttgctcaaataatttaaaaacggtacttaaacacaaacagatcagaaataaaaaggtactacaaactctataaaagaggtgtagaccaaagagcagtgtcaaatgaagaaaatctcctccagcagccgtctctcctccaactcgcctgctctgcttctggagccacgaggggtctggcaccaagatgacgacctgtggttcacacgaccaggcacgtgtgttttgttcttgcygtaggattctctgtagtggtgtcctggggcagatattggactcatagcttgaaccatgtcaagaagagaagcttcatacctacagaaacacacaaagaaagcgaagatccattaagaatcacatcatcatgtaggaattgaatcccatccttccaccttcaccattcacagtagatctacacttgtctgatggggtccgtcagmccagaatgagttctgttatctaagttcctgtgaggaataccaacacagaggcagtgaaaaagaggtgagcaaagcatggattcttgggttatttta

SEQ ID NO: 9761 - DNA, 600 bp, Chicken  19866894205564_2
caactcgcctgctctgcttctggagccacgaggggtctggcaccaagatgacgacctgtggttcacacgaccaggcacgtgtgttttgttcttgcygtaggattctctgtagtggtgtcctggggcagatattggactcatagcttgaaccatgtcaagaagagaagcttcatacctacagaaacacacaaagaaagcgaagatccattaagaatcacatcatcatgtaggaattgaatcccatccttccaccttcaccattcacagtagatctacacttgtctgatggggtccgtcagmccagaatgagttctgttatctaagttcctgtgaggaataccaacacagaggcagtgaaaaagaggtgagcaaagcatggattcttgggttattttaagctatctcatcagcttttccatttgatgtgtgtaatgtcttagtcacactccggagattgaggactgaagggggagatatgacagccaagtacacagcacaggtacgaggacccacacaggtaatggtgaagtgacttatatgcatgctgcacttttttgaatagacctctacacttgatttagtttcctggggatttgaaaa

SEQ ID NO: 9762 - DNA, 599 bp, Chicken  19866894205565_1
  misc_feature (1)..(22): n is any nucleotide
nnnnnnnnnnnnnnnnnnnnnncccggggatccgttactttctgaagggaagctggcactgacgcgagcagttctcagccctgtgccgttccctgctggctccaacacgacctcccgcatcaggcagggctcagctttgcagcccggcgtttgtaaacatgcagatgtgcgagcgctcccagcacagcctcctgctttaatgaagtcacgaaccaacagtgagaactcaatggaaaaatggagtcacggtgattttcgtctcaagtttgtgaaaactggaggacagtttctacgtcaaasactttgttgcaacaccaccgcttccaacactgctccgtctgcctacaagttacgctgtgcccctcagctcctctcctgctcagcacctcgcctgccacacacgggctgaaagggaacgagccacgccgctgctgctgtttacttccccgctacagcgagagttacatttcaccactgatctcgcttcccactaaagggcaccggggcaacctccgtccggcagcaccattaggtccaagcgcgtttcttttctcacttccacctgaagagcgcggggcgaccgccttctcattcccttt

SEQ ID NO: 9763 - DNA, 599 bp, Chicken  19866894205566_1
  misc_feature (1)..(6): n is any nucleotide
nnnnnnccgggctgcacccaccccagggacacggcagtaccacgcagtgccggcacagcggggcgcagcgccccaccgaccccatggctgcagtgggggttgcagtgccgcctcccggcacccggagcctatttataggagtttgagcagaagcaatttacatcttcataaaaatgaggttagggcaaaataagggagctctgccaaagctgcacagcctctgcttagcaatgggaagggtgaagggacctccgagccacagagctggaaccggggggtcacacctggacagggacctcwgctgcccaggagtgtgcactgagctgagggcgcacggcctgcagtgcagctcacacccctctgtgctcactgctgggggctgaaagctcccgcatcacacggcaccaaaggagcccccaaggcagagcagctcccagcgcccaccctgcagacgtgcagatggatgcggccacagagcagctcctgcccccgcagagtgctgcaacacagtgagccacatggagcatcgattttaggacttctctgctccatgcgcctgactgacagccctattgctgctgctcaggtttgtttccatg

SEQ ID NO: 9764 - DNA, 600 bp, Chicken  19866894205567_1
agaaagaaatgggggaaggaagcacccaaacttattttgttaatggtacaaatccgttttgtcctgtcttacgggagaggaagttatgaacgtgtcactgttccttttgctccagttcttatgattttcatcactgagaaaagaattgtctagttttccttgagctgctgaaaagagtttttttccttttccccctctgtgttattctgtgaaacatatgtagtaaacctatattggttgatactctggaaattacctcaattatgttctgttgttctggatttgaacatgtacatctasaaagacttttccaacagttgtagaaataacttagtgattgcagtttgaccaggtgttggtggttagggggggaagcttttgtactctattaagtaaractcagtaatgtttcccttgccgtattttatctgttgtctgtgtgctgtgtgaacaatttaaaagtaataattgctytaggaagaagaagcttgaatggaagcataatagtataaacattacataatttcattcagtaaaggtgaaacttttagaatgtacgatgcttgtctggattggtaaattagagagatgaccagatga

SEQ ID NO: 9765 - DNA, 600 bp, Chicken  19866894205567_2
ctgttccttttgctccagttcttatgattttcatcactgagaaaagaattgtctagttttccttgagctgctgaaaagagtttttttccttttccccctctgtgttattctgtgaaacatatgtagtaaacctatattggttgatactctggaaattacctcaattatgttctgttgttctggatttgaacatgtacatctasaaagacttttccaacagttgtagaaataacttagtgattgcagtttgaccaggtgttggtggttagggggggaagcttttgtactctattaagtaaractcagtaatgtttcccttgccgtattttatctgttgtctgtgtgctgtgtgaacaatttaaaagtaataattgctytaggaagaagaagcttgaatggaagcataatagtataaacattacataatttcattcagtaaaggtgaaacttttagaatgtacgatgcttgtctggattggtaaattagagagatgaccagatgactatgtattaattttaatatttaaacaggaaatttagaaagctttgtttttggttgctctggaaagaactgaaagaaactgattgtattgttgaagt

SEQ ID NO: 9766 - DNA, 600 bp, Chicken  19866894205567_3
gagtttttttccttttccccctctgtgttattctgtgaaacatatgtagtaaacctatattggttgatactctggaaattacctcaattatgttctgttgttctggatttgaacatgtacatctasaaagacttttccaacagttgtagaaataacttagtgattgcagtttgaccaggtgttggtggttagggggggaagcttttgtactctattaagtaaractcagtaatgtttcccttgccgtattttatctgttgtctgtgtgctgtgtgaacaatttaaaagtaataattgctytaggaagaagaagcttgaatggaagcataatagtataaacattacataatttcattcagtaaaggtgaaacttttagaatgtacgatgcttgtctggattggtaaattagagagatgaccagatgactatgtattaattttaatatttaaacaggaaatttagaaagctttgtttttggttgctctggaaagaactgaaagaaactgattgtattgttgaagtgttagttcttttgtgtatatatcttttcttattttaaattgtcatattgctgctattccattcccagcagctactgt

SEQ ID NO: 9767 - DNA, 600 bp, Chicken  19866894205576_1
aaggaaatgggagagccctgagaagcagtgcaggaaagcagacgctgaaatgccaggagattatttgtctttgcctgataaaagagggaattcatgtgctgctggcgagaaaggctttaaatctccgggagaatgtgacgaggaacacactgcatgaacatgatcctttggcaaactaaatccggttcacaatactgcagtcaaggcagcgatctcattgcaaagctgtgcacagcacatcttgaaagccatcattagggttcagagttaacggaggaaacgtttcaacctctgctctgrtcggcaatggggctgggtagggctgagccaggctggctgggggcacatcaggtgcacagctttctctttcccatggcataagtaagtgtgacaagagctgagatcgcaccttctgttgttcactcaaatggaatttcatctttctgaaagcttccccaggacagagctgcccggaaagcaggaagatgctaattctccagcagggcggtcctttcagatcaccacggtcacacctgaggggagctaagcccggagctttgtgcctctgtttgcctttcagcacatgtgtgtggggaagat

SEQ ID NO: 9768 - DNA, 600 bp, Chicken  19866894205582_1
gaaaaatatatctttttctgtatctttttttgcttgtttgtttttaggtttttaagtttgaagtacagtattcccttaaaaaaaaatctactcactgaagactggtagcttatcttcagattagtctgtgaaaatcgtgcattgatttaaataataattgtatttaaatattatataaactataatcaaaacaacaaaacaccactaccttgtaagaaaacccagaaaaagtccaaagaagatgactgaacagaaaaccagcagcctggaatggtaaacccatacaacaactaaactaastaccagctaggaagcaattactgaaaagcaagacagctgggtycttgttggttagctgccagggagccacctagatagccaacatgccagtcacattaaccgcatctcaacagtcaaggagatgaggaactaggcagtctgtggaaatggaatgtgaggagctgaacagaagagcagaagaaagccagttagcaagacacttagaagctcgrgcaaaccttggctactctgggatccatacaagcagacagagaaaaagctaactactcatcaagtgatgatctgggatactgaggagtt

SEQ ID NO: 9769 - DNA, 600 bp, Chicken  19866894205582_2
ttaggtttttaagtttgaagtacagtattcccttaaaaaaaaatctactcactgaagactggtagcttatcttcagattagtctgtgaaaatcgtgcattgatttaaataataattgtatttaaatattatataaactataatcaaaacaacaaaacaccactaccttgtaagaaaacccagaaaaagtccaaagaagatgactgaacagaaaaccagcagcctggaatggtaaacccatacaacaactaaactaastaccagctaggaagcaattactgaaaagcaagacagctgggtycttgttggttagctgccagggagccacctagatagccaacatgccagtcacattaaccgcatctcaacagtcaaggagatgaggaactaggcagtctgtggaaatggaatgtgaggagctgaacagaagagcagaagaaagccagttagcaagacacttagaagctcgrgcaaaccttggctactctgggatccatacaagcagacagagaaaaagctaactactcatcaagtgatgatctgggatactgaggagtttgagagcttgccaggctagaaagaaagcctagagagtctagaa

SEQ ID NO: 9770 - DNA, 600 bp, Chicken  19866894205582_3
taagaaaacccagaaaaagtccaaagaagatgactgaacagaaaaccagcagcctggaatggtaaacccatacaacaactaaactaastaccagctaggaagcaattactgaaaagcaagacagctgggtycttgttggttagctgccagggagccacctagatagccaacatgccagtcacattaaccgcatctcaacagtcaaggagatgaggaactaggcagtctgtggaaatggaatgtgaggagctgaacagaagagcagaagaaagccagttagcaagacacttagaagctcgrgcaaaccttggctactctgggatccatacaagcagacagagaaaaagctaactactcatcaagtgatgatctgggatactgaggagtttgagagcttgccaggctagaaagaaagcctagagagtctagaaaagaagccacatagctgttgacaagctgtttgattggtacaaaacctggcaagaaaataaaagctcacctccctgcccattttctgttgatagctgtgacagaatgaacattcctgtggaacatttttgttcatcaaaaaggcaccattcttctggaaaaaaatctgca

SEQ ID NO: 9771 - DNA, 600 bp, Chicken  19866894205582_4
accaagatatagaagttccccacaagtctatgttcctactgcttgtattttctcacttctagaatattatctgtaaaaagtctagatgacgttttgcttcagagctgcaaagattcagttaaaataaaaagcagttttccaccaacacttcagcaaattgtttccaccaacacttcagttggaaaactttctggccaaattctgaagttttcacattttcctgacctaaagaagtatacagtactagcaagggtgagaaagctattatgttgctgaagacggcttttaaagtttcagagwgtagctcagtaaggyagtaacacttctaatgccacagaagcccatcgctgaagtttttgtggaactcaacatcacaacacgtgatagctgagaaatggttctggttaataaagattgctgaatagataaactgttacaaagacactcctgtattcttaaggtagatatattttccatgtctttggccaaaaaaaatcagtggcattggggaggtgaaagaaagaaataggcttatccttacgctggcgagagagggtgagctatgttccaagttcatattttttattctcattctgacga

SEQ ID NO: 9772 - DNA, 600 bp, Chicken  19866894205582_5
ttccccacaagtctatgttcctactgcttgtattttctcacttctagaatattatctgtaaaaagtctagatgacgttttgcttcagagctgcaaagattcagttaaaataaaaagcagttttccaccaacacttcagcaaattgtttccaccaacacttcagttggaaaactttctggccaaattctgaagttttcacattttcctgacctaaagaagtatacagtactagcaagggtgagaaagctattatgttgctgaagacggcttttaaagtttcagagwgtagctcagtaaggyagtaacacttctaatgccacagaagcccatcgctgaagtttttgtggaactcaacatcacaacacgtgatagctgagaaatggttctggttaataaagattgctgaatagataaactgttacaaagacactcctgtattcttaaggtagatatattttccatgtctttggccaaaaaaaatcagtggcattggggaggtgaaagaaagaaataggcttatccttacgctggcgagagagggtgagctatgttccaagttcatattttttattctcattctgacgatcacaaacacttact

SEQ ID NO: 9773 - DNA, 599 bp, Chicken  19866894205585_1
  misc_feature (1)..(67): n is any nucleotide
nnnnnnnnnnnnnnnnnnnnnnnnnnnnnnnnnnnnnnnnnnnnnnnnnnnnnnnnnnnnnnnnnnntgtgggacttacaagttgagtgtctcaataagctggcagaaggtaaaacatgatcctctcctttctgaccacaaagctgaaggctgaacaagactcttagcctgattattccacactgcagtttaccttcttactcactagaccaagaaactctttcaacacttacaacataaatgcataaattattccactgtctttgcaactgccactgcttatgcaccaaactaaaattwaaaaaaaaattgaagatcaagcattagcagtgcattcctagtcagtaggatattgcatgtgatatgatgtctctctgactttctcattaaaaaggagtttttcttaagagaaaaaagattgcagtgccggtttatgccatgtgcaattaagacacctgaagtgcacagaccagccttgcataaaagaggtattgattgtaaaagaaaaatcaatgcagcattggatctgcaatagccaaagagatcactctaaggaaattcgaaaacttccactcaaattaaaaataaatttgatttca

SEQ ID NO: 9774 - DNA, 600 bp, Chicken  19866894205590_1
atcccaggccatttttagtgcgtttccccatcagtgactgagcctgcaggtaactgagagtgttcacatgcagtaatgagaagttctagtgcactgtgctgagacaaatccaaggccacgtctcttcagctccgcagaatttctgcagggtttatctcagtcgtagagatgagcttctcactgtgacgatgcaaccttctccgctccacacagaccctgcgtgaccccacaggctgaacggaacggagcaaacagagccgtcagcacacgctgagcaactggagagagccattaacaggwtagtcaaaaacaccgtccttcactgcgaaagttattcctttctggatgcagccggagcactttggatcatctctatcagacaccgcagtaggactgaagcagagtgaactccatgaggtatttcagtctgttctgtttaccttccactgtgtgtgggttgttacacctaacggctgctatgatgtcctctccattccctccataacaatgtattaaacttctttacccagcgccaagcttcagcacatcaatttgctgttcctcaggaacccgagacgaccatttggaggctgccttttg

SEQ ID NO: 9775 - DNA, 600 bp, Chicken  19866894205594_1
tccatacgtcattaaatccacctactgaacagtcacactgcaattaagctgcaatgcttaagccctttctacccaaagaatgtcattccatccaaaactgttgttcactaactggggaaaaaaagcaaaaattaagaacttggacatcaacactgctattacatacactcacaaatacacatctatgtgcatttgtaaagtacatgtatgaattcatacatccataaacaatgtgtggtttttaagcgtcatatttttctcttaagtcataggtaactaaaacatatgtgaagacctctkataagacttttatgacagtgaatggcaacataatatcatagactaatgtacagttctrtacatcaagaaaaatatataacgatatatttaaactgaaacatttcctatatactttccctgaacctttycttttwatctttcctctgtaaataacaaagtaattttgaatcaatatcacattaaactacaatccttttttcttgtttttatccaatgcagcatgtgaccctcagttcatacaatagcttacaacatgaaaagctatgattacctcataagacatcatctgaaattcatctc

SEQ ID NO: 9776 - DNA, 600 bp, Chicken  19866894205594_2
taagccctttctacccaaagaatgtcattccatccaaaactgttgttcactaactggggaaaaaaagcaaaaattaagaacttggacatcaacactgctattacatacactcacaaatacacatctatgtgcatttgtaaagtacatgtatgaattcatacatccataaacaatgtgtggtttttaagcgtcatatttttctcttaagtcataggtaactaaaacatatgtgaagacctctkataagacttttatgacagtgaatggcaacataatatcatagactaatgtacagttctrtacatcaagaaaaatatataacgatatatttaaactgaaacatttcctatatactttccctgaacctttycttttwatctttcctctgtaaataacaaagtaattttgaatcaatatcacattaaactacaatccttttttcttgtttttatccaatgcagcatgtgaccctcagttcatacaatagcttacaacatgaaaagctatgattacctcataagacatcatctgaaattcatctcataaacaacaacaaaaaaatctctgaattactgatcacttctgtgtgtcacacactga

SEQ ID NO: 9777 - DNA, 534 bp, Chicken  19866894205594_3
aaattaagaacttggacatcaacactgctattacatacactcacaaatacacatctatgtgcatttgtaaagtacatgtatgaattcatacatccataaacaatgtgtggtttttaagcgtcatatttttctcttaagtcataggtaactaaaacatatgtgaagacctctkataagacttttatgacagtgaatggcaacataatatcatagactaatgtacagttctrtacatcaagaaaaatatataacgatatatttaaactgaaacatttcctatatactttccctgaacctttycttttwatctttcctctgtaaataacaaagtaattttgaatcaatatcacattaaactacaatccttttttcttgtttttatccaatgcagcatgtgaccctcagttcatacaatagcttacaacatgaaaagctatgattacctcataagacatcatctgaaattcatctcataaacaacaacaaaaaaatctctgaattactgatcacttctgtgtgtcacacactgaatat

SEQ ID NO: 9778 - DNA, 528 bp, Chicken  19866894205594_4
agaacttggacatcaacactgctattacatacactcacaaatacacatctatgtgcatttgtaaagtacatgtatgaattcatacatccataaacaatgtgtggtttttaagcgtcatatttttctcttaagtcataggtaactaaaacatatgtgaagacctctkataagacttttatgacagtgaatggcaacataatatcatagactaatgtacagttctrtacatcaagaaaaatatataacgatatatttaaactgaaacatttcctatatactttccctgaacctttycttttwatctttcctctgtaaataacaaagtaattttgaatcaatatcacattaaactacaatccttttttcttgtttttatccaatgcagcatgtgaccctcagttcatacaatagcttacaacatgaaaagctatgattacctcataagacatcatctgaaattcatctcataaacaacaacaaaaaaatctctgaattactgatcacttctgtgtgtcacacactgaatat

SEQ ID NO: 9779 - DNA, 600 bp, Chicken  19866894205598_1
ggtgacagtaatatggaagatgtctctacatgcaactgctgtcaaagtgacgcttctcctatctagacagacagatgtaacatcttccttagacacgctttcataacagtataactgcattgagtggggttttcttgccccaggggaaaacagactatgggcgctgggggcagaaactggaaaatggatgttctgtacaaacacaaggaggaacttctgtactgtgagggcagagcaggctgctcggaggtctggaggagtcttcttctctggagattctcaagacccatctggacactytcctgtgtgtaagctgtgrtaaggaacatgcttatagcagggcttggactgaaaatctccaagatcccttctaagacttactcttgtttgtacagtagtgacagcaagaatagtaactgagaaagctttgctgaaatggaaaactagcttggagctccaagccagcagctggtcggaagagatgcttcagcacaacyctatgctgctgcaggtttcccactgccaatctgctgctacctgtattgttgttgaaaagtctcctttttggaggggtattcaaagagatctgagagcagactg

SEQ ID NO: 9780 - DNA, 600 bp, Chicken  19866894205598_2
atgtctctacatgcaactgctgtcaaagtgacgcttctcctatctagacagacagatgtaacatcttccttagacacgctttcataacagtataactgcattgagtggggttttcttgccccaggggaaaacagactatgggcgctgggggcagaaactggaaaatggatgttctgtacaaacacaaggaggaacttctgtactgtgagggcagagcaggctgctcggaggtctggaggagtcttcttctctggagattctcaagacccatctggacactytcctgtgtgtaagctgtgrtaaggaacatgcttatagcagggcttggactgaaaatctccaagatcccttctaagacttactcttgtttgtacagtagtgacagcaagaatagtaactgagaaagctttgctgaaatggaaaactagcttggagctccaagccagcagctggtcggaagagatgcttcagcacaacyctatgctgctgcaggtttcccactgccaatctgctgctacctgtattgttgttgaaaagtctcctttttggaggggtattcaaagagatctgagagcagactgcagttaacactgcgctcac

SEQ ID NO: 9781 - DNA, 559 bp, Chicken  19866894205598_3
caaacacaaggaggaacttctgtactgtgagggcagagcaggctgctcggaggtctggaggagtcttcttctctggagattctcaagacccatctggacactytcctgtgtgtaagctgtgrtaaggaacatgcttatagcagggcttggactgaaaatctccaagatcccttctaagacttactcttgtttgtacagtagtgacagcaagaatagtaactgagaaagctttgctgaaatggaaaactagcttggagctccaagccagcagctggtcggaagagatgcttcagcacaacyctatgctgctgcaggtttcccactgccaatctgctgctacctgtattgttgttgaaaagtctcctttttggaggggtattcaaagagatctgagagcagactgcagttaacactgcgctcactaatgaaactcatttcaggaggtggcccgggcttggtagttgctttggtgacaaatattcactcagaaatgtgctgaacttgtggtatgaaaagctctggttttgagcagatttgcatatttagatattaccaagca

SEQ ID NO: 9782 - DNA, 599 bp, Chicken  19866894205600_1
  misc_feature (1)..(42): n is any nucleotide
nnnnnnnnnnnnnnnnnnnnnnnnnnnnnnnnnnnnnnnnnntcctgggaagcctccagcagtctggaaaatgccaggacctgagggagaaaaaagttctgaatacagtgttctggggcccagtacagatcctgaaatcctccaaattacagaaagctaactgcacacctccatgaattctccagcagcaccacatctcctaacaaaagcctagtttcctttgctgcacgtggttcacttgttaagtagcatgtgatgcttctttcaaatggaacaataatgctgctttctacccccaaygattacaagcatttgcagcaaggcacttacagaaaaccatattcccaaatgatgaacttaagcaagtagcggtatcattctacaccaataataaagctgaaattatactgatactataactaattgtagattttatgcaggcatgttgctcctcttccttccacaatctggtcatagatttttaataagaagacagctaataaagcatagggagaatgttgcttaaaacagcaaccataaatcccacatgtagggaaaaatatctccctgaaaaaaaaatgtatttctatatattactt

SEQ ID NO: 9783 - DNA, 600 bp, Chicken  19866894205602_1
gaagatgagcttacttggatcaaaatgatttgggcactgtaaatgagcattcaaagctctgagatgattttgggaaaccagaccctcatgttttagagcagatagccctgccagcagtgaggagccatccagggggctcctttgagccccgactttaccggtgccctctgtaactgcagatcctatagagctgaatcccaatgagatgcctgatggtccccagcctcctccccctcctctctcccacatctctctgtatttctagccccatgcctagatcatgccccatttgtctatttkttctgttgaatcggagagaaaatgttgggacccagctgctgctctctgacctatggctgtctgcaggaaagggctgagccttcactttggcctggacctcctgccagaaaaagtatctgcttctccgccagggatgtttaaaaattcatgtgtatagacagaaaccgagggcagtttttaagaaaatgtcaaggcagtccttgatggtgtgctttctcaggaagaaatgccaacagatcttggacaaggcttgaaatctgacattaaagaaggcttggctggatctctgaagctatctgc

SEQ ID NO: 9784 - DNA, 600 bp, Chicken  19866894205605_1
accacttggaaagagcagagacctataaacatggagagtgtggcttcagctttatcgttataagctaaagagcagcatgtccattaccaacagctggaaaatgaggcaatgactaaaaatggcattattgtgctcctcatggatgttttactaggaaagatcagagggctggaggctcttctgacagagaaagctcatcagggattttttactttatggcacgatagttttctacaggttttggctaatgtatgtcagagatgaacccaacagcctcacccaagtccaaaaagcagcacrcgtgaattgtttagacccctactctgctctactacaaatggagggtggaaaaggtttggtargcctgcaaactatcatagaagacrtaccccacctctgctccagcttccacagttgaatgccttctgtagcgttactgttttaagtgaaatctaaccttgattatgtggcagggacctgttacgttaattgacaacatggtgctaaatatatttgcgatacaatatttgattataaaatgttaacagcgcttgaggtattgccataatagctacagatctcagctgctaacaaggcctt

SEQ ID NO: 9785 - DNA, 600 bp, Chicken  19866894205605_2
agctaaagagcagcatgtccattaccaacagctggaaaatgaggcaatgactaaaaatggcattattgtgctcctcatggatgttttactaggaaagatcagagggctggaggctcttctgacagagaaagctcatcagggattttttactttatggcacgatagttttctacaggttttggctaatgtatgtcagagatgaacccaacagcctcacccaagtccaaaaagcagcacrcgtgaattgtttagacccctactctgctctactacaaatggagggtggaaaaggtttggtargcctgcaaactatcatagaagacrtaccccacctctgctccagcttccacagttgaatgccttctgtagcgttactgttttaagtgaaatctaaccttgattatgtggcagggacctgttacgttaattgacaacatggtgctaaatatatttgcgatacaatatttgattataaaatgttaacagcgcttgaggtattgccataatagctacagatctcagctgctaacaaggccttgctttgtcattcactttacaaatgtggaataaaagacagtccttgtctctgagaccgtgagg

SEQ ID NO: 9786 - DNA, 600 bp, Chicken  19866894205605_3
ccaacagctggaaaatgaggcaatgactaaaaatggcattattgtgctcctcatggatgttttactaggaaagatcagagggctggaggctcttctgacagagaaagctcatcagggattttttactttatggcacgatagttttctacaggttttggctaatgtatgtcagagatgaacccaacagcctcacccaagtccaaaaagcagcacrcgtgaattgtttagacccctactctgctctactacaaatggagggtggaaaaggtttggtargcctgcaaactatcatagaagacrtaccccacctctgctccagcttccacagttgaatgccttctgtagcgttactgttttaagtgaaatctaaccttgattatgtggcagggacctgttacgttaattgacaacatggtgctaaatatatttgcgatacaatatttgattataaaatgttaacagcgcttgaggtattgccataatagctacagatctcagctgctaacaaggccttgctttgtcattcactttacaaatgtggaataaaagacagtccttgtctctgagaccgtgaggtttagagagacgtrtctgagcact

SEQ ID NO: 9787 - DNA, 600 bp, Chicken  19866894205605_4
atagaagacrtaccccacctctgctccagcttccacagttgaatgccttctgtagcgttactgttttaagtgaaatctaaccttgattatgtggcagggacctgttacgttaattgacaacatggtgctaaatatatttgcgatacaatatttgattataaaatgttaacagcgcttgaggtattgccataatagctacagatctcagctgctaacaaggccttgctttgtcattcactttacaaatgtggaataaaagacagtccttgtctctgagaccgtgaggtttagagagacgtrtctgagcactgaagagaaacccagtaacttgcctgaagtcttaacactcagtcagcaagagagccaggcatgaaaaacatgtttcctgagccctggtcatgctgtgctcacttgatcacttcatttttaaataaatctggtgtttaaagtgctgtttataattatygtgccgagggaagttgataaggtcagtgcacaaccacttaagacagagcagagytgtatttgaaggcgctgtagagcataggtagtgcaaacgtagatgggggtggtgagttttgaagaatggtggtgtaataa

SEQ ID NO: 9788 - DNA, 600 bp, Chicken  19866894205605_5
taacagcgcttgaggtattgccataatagctacagatctcagctgctaacaaggccttgctttgtcattcactttacaaatgtggaataaaagacagtccttgtctctgagaccgtgaggtttagagagacgtrtctgagcactgaagagaaacccagtaacttgcctgaagtcttaacactcagtcagcaagagagccaggcatgaaaaacatgtttcctgagccctggtcatgctgtgctcacttgatcacttcatttttaaataaatctggtgtttaaagtgctgtttataattatygtgccgagggaagttgataaggtcagtgcacaaccacttaagacagagcagagytgtatttgaaggcgctgtagagcataggtagtgcaaacgtagatgggggtggtgagttttgaagaatggtggtgtaataaaccgaactaacatgtgaagaaggaaaaaatcagacctttgtgtctgagcgagtgtcaggatgcgggggaggactgaagcagaggagggaaaagcacaggggagaacatacggattcctcttctgctcttgcattcagtctcccatgctggggaaggtcacagcatt

SEQ ID NO: 9789 - DNA, 600 bp, Chicken  19866894205605_6
ccttgctttgtcattcactttacaaatgtggaataaaagacagtccttgtctctgagaccgtgaggtttagagagacgtrtctgagcactgaagagaaacccagtaacttgcctgaagtcttaacactcagtcagcaagagagccaggcatgaaaaacatgtttcctgagccctggtcatgctgtgctcacttgatcacttcatttttaaataaatctggtgtttaaagtgctgtttataattatygtgccgagggaagttgataaggtcagtgcacaaccacttaagacagagcagagytgtatttgaaggcgctgtagagcataggtagtgcaaacgtagatgggggtggtgagttttgaagaatggtggtgtaataaaccgaactaacatgtgaagaaggaaaaaatcagacctttgtgtctgagcgagtgtcaggatgcgggggaggactgaagcagaggagggaaaagcacaggggagaacatacggattcctcttctgctcttgcattcagtctcccatgctggggaaggtcacagcattcataaacagactgaaaatgctgcagctgtaaggcaggcaatcagagtaattcaa

SEQ ID NO: 9790 - DNA, 600 bp, Chicken  19866894205612_1
ttctcttatattatatttcacatctttgggaattactgtgctttaaagcataagtgcattttagatggaagacattaagcaactgcctagtccctcagaggacttttcagttgtgggtttgctaggagtagaagaacagcaggtgacaatcgctaccacaacaatgcacttaacagcaatattgcactaaccaagacttcttgattcccatccataaactgattcatcaactcgacaggaatcgccaacacttcctcaccctctaacagtcccatgtggcccatgagaaagtccaatgcwgagtggaggctaacagtggactgttgtggcctgaatgaagtcacaccactgctgagtgctgttgtgtgggacatgcaagaacttcagtatgaactgaagtcaaaagtagccaggtggtatgccacaactaagattgccaatacagttttctcagtccctctggcagcagagtgcaggtcacagtttgctttcacttgaaggagtgtccagtacgcctggagtcagctgacccaggggtggaaacagccctgtcatttgtcatgggttgttccatattggaacggggggaagctcctgagt

SEQ ID NO: 9791 - DNA, 464 bp, Chicken  19866894205612_2
ggtcacagtttgctttcacttgaaggagtgtccagtacgcctggagtcagctgacccaggggtggaaacagccctgtcatttgtcatgggttgttccatattggaacggggggaagctcctgagtgccagcaatacattgatggcatcagcgtgtggggcaacacagtagaaggttttgaggtagggaagaaaataacccaagtccttttgaaaactggctgtgccataaagctgcacatggaatccagtactactgatgctacatggagtaaatgaaccacactgatttcacaatgggyttgtatggtcatccagggatcttggaagtgatcatcagatagytcaaaggcaaaaattttggaatatcaccagaagaggaaattatgcatgctgaagaggccctactgtataatgaattaccaaagaatgagaagaaatatgtcttgttcactgatgggtcctg

SEQ ID NO: 9792 - DNA, 421 bp, Chicken  19866894205612_3
gagtcagctgacccaggggtggaaacagccctgtcatttgtcatgggttgttccatattggaacggggggaagctcctgagtgccagcaatacattgatggcatcagcgtgtggggcaacacagtagaaggttttgaggtagggaagaaaataacccaagtccttttgaaaactggctgtgccataaagctgcacatggaatccagtactactgatgctacatggagtaaatgaaccacactgatttcacaatgggyttgtatggtcatccagggatcttggaagtgatcatcagatagytcaaaggcaaaaattttggaatatcaccagaagaggaaattatgcatgctgaagaggccctactgtataatgaattaccaaagaatgagaagaaatatgtcttgttcactgatgggtcctg

SEQ ID NO: 9793 - DNA, 600 bp, Chicken  19866894205621_1
acacacacacactgggacatcctgttgcatacaattttcttccctctcagcattcactacagatgtagctttgtctttgctttgtatttgactaacactaacagcatcacaattcaggtagaagtctaggcctttaatttgcaattatattaaaataagatacaggacagaccaagatacacttgaaagttgagaggcaagtcatgtaatactgaagaaagatgtgattttccctaagagactcaattctttatatattttgtaaccttctcttgtatctaagaggttacatcactgacrtacactccaaatattacacctgcttgtatattaggcaattatcatgccaagagaatattttgcttttgtttttactcctggctctgcacttgtttctgcagattgcactgattcaaaagtcagtgaccttggctaatttgtgaaggagaattaacactcaagcaagtgttccraaatccctcttcctgctaacttgccagaagaaggaccaaagtcataatatgcacgttagcattgggaaaaaaagagggagagtgctaacttaaatctttcaatcctgagaaaggagagaagaccaag

SEQ ID NO: 9794 - DNA, 600 bp, Chicken  19866894205621_2
aagatacacttgaaagttgagaggcaagtcatgtaatactgaagaaagatgtgattttccctaagagactcaattctttatatattttgtaaccttctcttgtatctaagaggttacatcactgacrtacactccaaatattacacctgcttgtatattaggcaattatcatgccaagagaatattttgcttttgtttttactcctggctctgcacttgtttctgcagattgcactgattcaaaagtcagtgaccttggctaatttgtgaaggagaattaacactcaagcaagtgttccraaatccctcttcctgctaacttgccagaagaaggaccaaagtcataatatgcacgttagcattgggaaaaaaagagggagagtgctaacttaaatctttcaatcctgagaaaggagagaagaccaagagaaacagaaataaaatacattgagcgtctaagtagtgaaatgtttttatctcttgtcaaactcrtgtgggaacccagraaccaaagaacataggtgaaaaataaaagctccctatttgttgttacttgaagaataaaaaaggtcatgcatgcaaaagcaggtttccaaagcc

SEQ ID NO: 9795 - DNA, 600 bp, Chicken  19866894205621_3
ttgtttttactcctggctctgcacttgtttctgcagattgcactgattcaaaagtcagtgaccttggctaatttgtgaaggagaattaacactcaagcaagtgttccraaatccctcttcctgctaacttgccagaagaaggaccaaagtcataatatgcacgttagcattgggaaaaaaagagggagagtgctaacttaaatctttcaatcctgagaaaggagagaagaccaagagaaacagaaataaaatacattgagcgtctaagtagtgaaatgtttttatctcttgtcaaactcrtgtgggaacccagraaccaaagaacataggtgaaaaataaaagctccctatttgttgttacttgaagaataaaaaaggtcatgcatgcaaaagcaggtttccaaagccaactctattttttctaggacttcagcgagagaaagaattagtcaacagagccacagcttggcctcactttcccaccactaaatgcttytggatgcctgatctttaagcttattatcttcacctttgctaaattcattctacgtactgattttgccttagcgactctattagaagctgctagttaaattgagc

SEQ ID NO: 9796 - DNA, 600 bp, Chicken  19866894205621_4
ggctctgcacttgtttctgcagattgcactgattcaaaagtcagtgaccttggctaatttgtgaaggagaattaacactcaagcaagtgttccraaatccctcttcctgctaacttgccagaagaaggaccaaagtcataatatgcacgttagcattgggaaaaaaagagggagagtgctaacttaaatctttcaatcctgagaaaggagagaagaccaagagaaacagaaataaaatacattgagcgtctaagtagtgaaatgtttttatctcttgtcaaactcrtgtgggaacccagraaccaaagaacataggtgaaaaataaaagctccctatttgttgttacttgaagaataaaaaaggtcatgcatgcaaaagcaggtttccaaagccaactctattttttctaggacttcagcgagagaaagaattagtcaacagagccacagcttggcctcactttcccaccactaaatgcttytggatgcctgatctttaagcttattatcttcacctttgctaaattcattctacgtactgattttgccttagcgactctattagaagctgctagttaaattgagctacctcacaaagta

SEQ ID NO: 9797 - DNA, 600 bp, Chicken  19866894205621_5
cttaaatctttcaatcctgagaaaggagagaagaccaagagaaacagaaataaaatacattgagcgtctaagtagtgaaatgtttttatctcttgtcaaactcrtgtgggaacccagraaccaaagaacataggtgaaaaataaaagctccctatttgttgttacttgaagaataaaaaaggtcatgcatgcaaaagcaggtttccaaagccaactctattttttctaggacttcagcgagagaaagaattagtcaacagagccacagcttggcctcactttcccaccactaaatgcttytggatgcctgatctttaagcttattatcttcacctttgctaaattcattctacgtactgattttgccttagcgactctattagaagctgctagttaaattgagctacctcacaaagtacttaacaacacatttacatgtcctttacctgacagggtcttaggtgtggatcttgctgttcaagaggtcaaactctaaagtttcagagggaggggaagaggagggacaatattttttgtagcagaaggaccacaatttgaatcacaataatttctctggatggcaaatccttcccacaaata

SEQ ID NO: 9798 - DNA, 600 bp, Chicken  19866894205633_1
aatacacagccgtttgctcattctactccaagtggaatgagggagagaactggaaacaaaatagaactcttgggttgagttaaaactaatttactaagacagggaaggaaaatagaaacaaaaatgcaattataattatatatatccacagtgcaattacttgccacacatcaaacaatgcccagccaacaacacaactgtttgtcaaccaccagctcatcagcactacaatgtctcaccactgctgacacatgcccagcaaccccccagcagtgggccgtccacagccaactcctcagygcttcatggccttccacatggtgtcatgtggtatagagtaacgcctggcctaattcaggcacctgtcctagttctgcccagcaccctgctgctgtgccatcatggtggcagctgttccttgccaaatggccctgcccagcctggccctagactcgctccctcactcagcaacagccaaaatgttggtgtactgtctcatatgaaaccaggatagctgcactctttgaggagaacccaggtgaaatgtacattttcagctatgtgacagagtggttttgcttttgttccttctctgccctc

SEQ ID NO: 9799 - DNA, 599 bp, Chicken  19866894205638_1
  misc_feature (1)..(109): n is any nucleotide
nnnnnnnnnnnnnnnnnnnnnnnnnnnnnnnnnnnnnnnnnnnnnnnnnnnnnnnnnnnnnnnnnnnnnnnnnnnnnnnnnnnnnnnnnnnnnnnnnnnnnnnnnnnnntgtggtggagctggagaacctgaccaagcgtgagtcctgcactgccaagctgtcccttggtggggacccctggcgtggtgctgcacgggctgtgatcctgcagctgtggcagctccacagcctggggcttcctgttggcctggggcagcagggaggctgcaggttggtgtcatggagggggctgtgagtgytgtccaaagcacccacagcctgggtcccgttcatgtgcctcgctgcaaagagctctraggtctgttctgcacctgatgttgaagtgctcctcrtgcacagggcgttcagcaccatctctctctctctgctagtgaatgagctgtggtcagtgctgcccagccccaagggcgctgaggacggagtcccggacacagccacctctttccccagcagcagccacagcccacgccccagggtgatgtggaaagarcaggacagccactcagccagcaccatggtcctcgcagggagcacactg

SEQ ID NO: 9800 - DNA, 599 bp, Chicken  19866894205638_2
  misc_feature (1)..(52): n is any nucleotide
nnnnnnnnnnnnnnnnnnnnnnnnnnnnnnnnnnnnnnnnnnnnnnnnnnnntgtggtggagctggagaacctgaccaagcgtgagtcctgcactgccaagctgtcccttggtggggacccctggcgtggtgctgcacgggctgtgatcctgcagctgtggcagctccacagcctggggcttcctgttggcctggggcagcagggaggctgcaggttggtgtcatggagggggctgtgagtgytgtccaaagcacccacagcctgggtcccgttcatgtgcctcgctgcaaagagctctraggtctgttctgcacctgatgttgaagtgctcctcrtgcacagggcgttcagcaccatctctctctctctgctagtgaatgagctgtggtcagtgctgcccagccccaagggcgctgaggacggagtcccggacacagccacctctttccccagcagcagccacagcccacgccccagggtgatgtggaaagarcaggacagccactcagccagcaccatggtcctcgcagggagcacactgagtgatacgtcctaccggtgagctgaaggagaygtggggaggagggaggttggcacg

SEQ ID NO: 9801 - DNA, 599 bp, Chicken  19866894205638_3
  misc_feature (1)..(16): n is any nucleotide
nnnnnnnnnnnnnnnntgtggtggagctggagaacctgaccaagcgtgagtcctgcactgccaagctgtcccttggtggggacccctggcgtggtgctgcacgggctgtgatcctgcagctgtggcagctccacagcctggggcttcctgttggcctggggcagcagggaggctgcaggttggtgtcatggagggggctgtgagtgytgtccaaagcacccacagcctgggtcccgttcatgtgcctcgctgcaaagagctctraggtctgttctgcacctgatgttgaagtgctcctcrtgcacagggcgttcagcaccatctctctctctctgctagtgaatgagctgtggtcagtgctgcccagccccaagggcgctgaggacggagtcccggacacagccacctctttccccagcagcagccacagcccacgccccagggtgatgtggaaagarcaggacagccactcagccagcaccatggtcctcgcagggagcacactgagtgatacgtcctaccggtgagctgaaggagaygtggggaggagggaggttggcacggcaagtcccctttcctaacagccttccccrtgctta

SEQ ID NO: 9802 - DNA, 600 bp, Chicken  19866894205638_4
gggcagcagggaggctgcaggttggtgtcatggagggggctgtgagtgytgtccaaagcacccacagcctgggtcccgttcatgtgcctcgctgcaaagagctctraggtctgttctgcacctgatgttgaagtgctcctcrtgcacagggcgttcagcaccatctctctctctctgctagtgaatgagctgtggtcagtgctgcccagccccaagggcgctgaggacggagtcccggacacagccacctctttccccagcagcagccacagcccacgccccagggtgatgtggaaagarcaggacagccactcagccagcaccatggtcctcgcagggagcacactgagtgatacgtcctaccggtgagctgaaggagaygtggggaggagggaggttggcacggcaagtcccctttcctaacagccttccccrtgcttaccgtaccgctggatggggactcagcagtgttctcctgttgggctgctgccctaacgtgtttgtctgcagagaaggcatcaacatcgaggtggaagtggcgattgaatcagtaccacatcccacccgagagcagagcctgtgcagcccacagtcagggca

SEQ ID NO: 9803 - DNA, 600 bp, Chicken  19866894205638_5
atgtgcctcgctgcaaagagctctraggtctgttctgcacctgatgttgaagtgctcctcrtgcacagggcgttcagcaccatctctctctctctgctagtgaatgagctgtggtcagtgctgcccagccccaagggcgctgaggacggagtcccggacacagccacctctttccccagcagcagccacagcccacgccccagggtgatgtggaaagarcaggacagccactcagccagcaccatggtcctcgcagggagcacactgagtgatacgtcctaccggtgagctgaaggagaygtggggaggagggaggttggcacggcaagtcccctttcctaacagccttccccrtgcttaccgtaccgctggatggggactcagcagtgttctcctgttgggctgctgccctaacgtgtttgtctgcagagaaggcatcaacatcgaggtggaagtggcgattgaatcagtaccacatcccacccgagagcagagcctgtgcagcccacagtcagggcagtctctctcaggggactccctggagggcaccagcgataggtgcagcgtcacaggcgtcccagcggagtgcagaggacagca

SEQ ID NO: 9804 - DNA, 600 bp, Chicken  19866894205638_6
ctcctcrtgcacagggcgttcagcaccatctctctctctctgctagtgaatgagctgtggtcagtgctgcccagccccaagggcgctgaggacggagtcccggacacagccacctctttccccagcagcagccacagcccacgccccagggtgatgtggaaagarcaggacagccactcagccagcaccatggtcctcgcagggagcacactgagtgatacgtcctaccggtgagctgaaggagaygtggggaggagggaggttggcacggcaagtcccctttcctaacagccttccccrtgcttaccgtaccgctggatggggactcagcagtgttctcctgttgggctgctgccctaacgtgtttgtctgcagagaaggcatcaacatcgaggtggaagtggcgattgaatcagtaccacatcccacccgagagcagagcctgtgcagcccacagtcagggcagtctctctcaggggactccctggagggcaccagcgataggtgcagcgtcacaggcgtcccagcggagtgcagaggacagcacagcagtgagctgggagatccctgagctgcagagcacccacttcagctcccacc

SEQ ID NO: 9805 - DNA, 600 bp, Chicken  19866894205646_1
cctgctttctgagtagcctcagctataggcgcagtaaacagagatttccagggtggttaaaagaggtcaactttagaatctatcactgtctcactgctgctgtttgtgttattctgaatgataactggtacgaatgaggccgtgcagagtatacagaagaaatgttttaagggcagaccttcccatggcatcagagtgttccaggtttcttgattaccttgctaaaggatgtatttttgttcaattcaaagtatctccagtccaagtttgctattggtttcctacgtgttttacagaatkatgccatatagcaaatagttgtttcgyggtggtgttwtgttctttggtttttttaatgatttacttttatcttctatctgaaagatatgaatttgtatctggatgtcatttgtgacagatgaaaggtttatgtagcctaagctgtatttgttttaaaaacttgcaattctaactctagaaatgcgtatttatttggaaaatatgcattccatacacttgcattcagattgattcccacagatagtcctgtctcactttgtgagtaaggaagctaaatctaactcaggtaggatttgtatt

SEQ ID NO: 9806 - DNA, 600 bp, Chicken  19866894205646_2
ggcgcagtaaacagagatttccagggtggttaaaagaggtcaactttagaatctatcactgtctcactgctgctgtttgtgttattctgaatgataactggtacgaatgaggccgtgcagagtatacagaagaaatgttttaagggcagaccttcccatggcatcagagtgttccaggtttcttgattaccttgctaaaggatgtatttttgttcaattcaaagtatctccagtccaagtttgctattggtttcctacgtgttttacagaatkatgccatatagcaaatagttgtttcgyggtggtgttwtgttctttggtttttttaatgatttacttttatcttctatctgaaagatatgaatttgtatctggatgtcatttgtgacagatgaaaggtttatgtagcctaagctgtatttgttttaaaaacttgcaattctaactctagaaatgcgtatttatttggaaaatatgcattccatacacttgcattcagattgattcccacagatagtcctgtctcactttgtgagtaaggaagctaaatctaactcaggtaggatttgtattagcagttattttatacccttttatcct

SEQ ID NO: 9807 - DNA, 600 bp, Chicken  19866894205646_3
acagagatttccagggtggttaaaagaggtcaactttagaatctatcactgtctcactgctgctgtttgtgttattctgaatgataactggtacgaatgaggccgtgcagagtatacagaagaaatgttttaagggcagaccttcccatggcatcagagtgttccaggtttcttgattaccttgctaaaggatgtatttttgttcaattcaaagtatctccagtccaagtttgctattggtttcctacgtgttttacagaatkatgccatatagcaaatagttgtttcgyggtggtgttwtgttctttggtttttttaatgatttacttttatcttctatctgaaagatatgaatttgtatctggatgtcatttgtgacagatgaaaggtttatgtagcctaagctgtatttgttttaaaaacttgcaattctaactctagaaatgcgtatttatttggaaaatatgcattccatacacttgcattcagattgattcccacagatagtcctgtctcactttgtgagtaaggaagctaaatctaactcaggtaggatttgtattagcagttattttatacccttttatcctgaaatgcgtg

SEQ ID NO: 9808 - DNA, 599 bp, Chicken  19866894205659_1
  misc_feature (1)..(47): n is any nucleotide
nnnnnnnnnnnnnnnnnnnnnnnnnnnnnnnnnnnnnnnnnnnnnnnagagaacacgtgatgctaataactcacagcccctggaaggtaaaaaaaagagaaaaagaaaaaaaagaaaaagaaaggaaggaaaagaaggaaaggtctgaagaatagaagaaagaaagcaagcagttttctactttctttttattgagtaaagtagacaacagaagtctctgacaaaggctagaaccaataagagggaaaaaaagacgcaggagtttgtgatctgaaaaggaaaaaggtacagacagaggarggagtaggatatgcagcaagtggttgattcagctgtcctaggaactgcagactaaagcccaaactgagacgcagtcattacaattccatctcaaacagtttatacaccatggtttcccacacctcaaaagaacagctcactaaccatctataaaatgcttgttaaatcagggaatacttggttagctcagactggggaagagttgtagtgcctgcactactcacaagaaaattcccagataaagaaggtgagatcacagttacaggaaaccttgtattttgagtaagacagagctctac

SEQ ID NO: 9809 - DNA, 599 bp, Chicken  19866894205664_1
  misc_feature (1)..(181): n is any nucleotide
nnnnnnnnnnnnnnnnnnnnnnnnnnnnnnnnnnnnnnnnnnnnnnnnnnnnnnnnnnnnnnnnnnnnnnnnnnnnnnnnnnnnnnnnnnnnnnnnnnnnnnnnnnnnnnnnnnnnnnnnnnnnnnnnnnnnnnnnnnnnnnnnnnnnnnnnnnnnnnnnnnnnnnnnnnnnnnnnnnnnnaccttcctctctgatgttggagggggtttccgtatgcctggcattctcatgcatgcagaccctgtggctagcacctactactgacattgctgttttgtacaggttattggatggggttytgttgctgttggtgctcataagtgggcagtatattaggaagctagaaaagtgctgtaagggtatatggcatcagcagcttttcgttataatacataactaactattgaattgtctcgtagttaaagcaatagtttcagggatttgacgagtatgcttcyttttawaggtagcgtgttctttagcatcagcggcttatgcttgcttgttctctctaacaaagaggtgaagctagtgctttagtgtggaagggttcaaaatgcttctcaatttgctcatgggatcagaaaccagaaattct

SEQ ID NO: 9810 - DNA, 599 bp, Chicken  19866894205664_2
  misc_feature (1)..(22): n is any nucleotide
nnnnnnnnnnnnnnnnnnnnnnaccttcctctctgatgttggagggggtttccgtatgcctggcattctcatgcatgcagaccctgtggctagcacctactactgacattgctgttttgtacaggttattggatggggttytgttgctgttggtgctcataagtgggcagtatattaggaagctagaaaagtgctgtaagggtatatggcatcagcagcttttcgttataatacataactaactattgaattgtctcgtagttaaagcaatagtttcagggatttgacgagtatgcttcyttttawaggtagcgtgttctttagcatcagcggcttatgcttgcttgttctctctaacaaagaggtgaagctagtgctttagtgtggaagggttcaaaatgcttctcaatttgctcatgggatcagaaaccagaaattcttgaatgctgctgctgactctcataatacattgaagtacctataggtgtgttgcataaaatcaccaactcatttataggagtggtgactgactactctggggaaggcagcttaataaaaacccaagcaaaaatagcscctgaagaggggtctcagttccc

SEQ ID NO: 9811 - DNA, 599 bp, Chicken  19866894205664_3
  misc_feature (1)..(16): n is any nucleotide
nnnnnnnnnnnnnnnnaccttcctctctgatgttggagggggtttccgtatgcctggcattctcatgcatgcagaccctgtggctagcacctactactgacattgctgttttgtacaggttattggatggggttytgttgctgttggtgctcataagtgggcagtatattaggaagctagaaaagtgctgtaagggtatatggcatcagcagcttttcgttataatacataactaactattgaattgtctcgtagttaaagcaatagtttcagggatttgacgagtatgcttcyttttawaggtagcgtgttctttagcatcagcggcttatgcttgcttgttctctctaacaaagaggtgaagctagtgctttagtgtggaagggttcaaaatgcttctcaatttgctcatgggatcagaaaccagaaattcttgaatgctgctgctgactctcataatacattgaagtacctataggtgtgttgcataaaatcaccaactcatttataggagtggtgactgactactctggggaaggcagcttaataaaaacccaagcaaaaatagcscctgaagaggggtctcagttcccaaaacg

SEQ ID NO: 9812 - DNA, 492 bp, Chicken  19866894205664_4
cagggatttgacgagtatgcttcyttttawaggtagcgtgttctttagcatcagcggcttatgcttgcttgttctctctaacaaagaggtgaagctagtgctttagtgtggaagggttcaaaatgcttctcaatttgctcatgggatcagaaaccagaaattcttgaatgctgctgctgactctcataatacattgaagtacctataggtgtgttgcataaaatcaccaactcatttataggagtggtgactgactactctggggaaggcagcttaataaaaacccaagcaaaaatagcscctgaagaggggtctcagttcccaaaacgtgtactgattattaagagggaattatccttctgagcaaagttggtaacaatttttcatggaattcagtaggaaaaaagaaaaatagcattgttacaaagtaggcactcttttctttcctttatgctttctgattttcttctttcaagtaatctctgattgagg

SEQ ID NO: 9813 - DNA, 600 bp, Chicken  19866894205667_1
tacaacagatgtatcaacattacagccttataatttgaggtgttggtttatttaaaacagaagctaaacatccctgttcatgaaaataaatgtactctcagagactgcaaacaacaataccttatgcaagtaatctcttttaaaatgtgttttaatgatggagagtgggccttttgaccaagaaagtgggagtgcattttgaaatatcttttattgccattggcaagtaagaaaagaagaggttaccacaatgtttttatgtatactatctgtcagcacaagagctgctgtaaaggaacrggagatagggcagtgatgtaaagacacccatcttggtctgaaggagcaggtacagcaaggatctcttgcagaaccacaagcaagagaagaactggtaaggagagctttgtgaagagagaggtgtcaaaatcagttgaagaaagtcatgttccaactgtctcccttcagagtcatttttagggtacctcctagggctgtgtcatatctgaagaacatatgtaccactctactagaatagctctatctccctttatggtcctaatttcaagcaaaatttgatcaaattccaactccccctac

SEQ ID NO: 9814 - DNA, 600 bp, Chicken  19866894205670_1
gcctgaccatactggtttcttatcagcccttggaagatgacacagttggtttctttgccctaggtgcaggcttttctcaaggatacttggatcgatactctaaagactgcagtaaagactggcctgagagatgcaggcaaaggctggtacaacctggagcagagcagctgggatgtctaccagatgtccaaactacataagctgatgaagcgcatcagattcatcctgcaggactcggtgcgctatctggtgcagaactcactgatcagattcatccagcttttgctggatgcttgccayggtgtcttgaattgctcagagggtatggaatggggagatgacctcatcagtagtccctacaggtaaggaagagagagaggaaaagaaggtcaaagggtggaaagagcagaatagtgaagtgccactgtctttctaagtactgtctttgcaagcgagctttgcactgcrggaggggtttaggttgggctgttctcyctgctcctccacctgamatgactggtttgaaaagtgtctgcaggtcttctgtaaagcagctctataaggttatgacttctgcgggtcttcggttgtaatgattgc

SEQ ID NO: 9815 - DNA, 600 bp, Chicken  19866894205670_2
tgggatgtctaccagatgtccaaactacataagctgatgaagcgcatcagattcatcctgcaggactcggtgcgctatctggtgcagaactcactgatcagattcatccagcttttgctggatgcttgccayggtgtcttgaattgctcagagggtatggaatggggagatgacctcatcagtagtccctacaggtaaggaagagagagaggaaaagaaggtcaaagggtggaaagagcagaatagtgaagtgccactgtctttctaagtactgtctttgcaagcgagctttgcactgcrggaggggtttaggttgggctgttctcyctgctcctccacctgamatgactggtttgaaaagtgtctgcaggtcttctgtaaagcagctctataaggttatgacttctgcgggtcttcggttgtaatgattgccacttccttctgcctwctcagatgagaggtctcagtgtctttactggtaacaccagaatgcagtytttcttactttgatctgcacagggggtgtcctcctctcctctgctttcatctcctgctgttttagtattagtaccagttgtgtactgctgctgcatagttgtg

SEQ ID NO: 9816 - DNA, 600 bp, Chicken  19866894205670_3
cataagctgatgaagcgcatcagattcatcctgcaggactcggtgcgctatctggtgcagaactcactgatcagattcatccagcttttgctggatgcttgccayggtgtcttgaattgctcagagggtatggaatggggagatgacctcatcagtagtccctacaggtaaggaagagagagaggaaaagaaggtcaaagggtggaaagagcagaatagtgaagtgccactgtctttctaagtactgtctttgcaagcgagctttgcactgcrggaggggtttaggttgggctgttctcyctgctcctccacctgamatgactggtttgaaaagtgtctgcaggtcttctgtaaagcagctctataaggttatgacttctgcgggtcttcggttgtaatgattgccacttccttctgcctwctcagatgagaggtctcagtgtctttactggtaacaccagaatgcagtytttcttactttgatctgcacagggggtgtcctcctctcctctgctttcatctcctgctgttttagtattagtaccagttgtgtactgctgctgcatagttgtgtactgttgtctcaaaaggcatccctgc

SEQ ID NO: 9817 - DNA, 600 bp, Chicken  19866894205670_4
catcagattcatcctgcaggactcggtgcgctatctggtgcagaactcactgatcagattcatccagcttttgctggatgcttgccayggtgtcttgaattgctcagagggtatggaatggggagatgacctcatcagtagtccctacaggtaaggaagagagagaggaaaagaaggtcaaagggtggaaagagcagaatagtgaagtgccactgtctttctaagtactgtctttgcaagcgagctttgcactgcrggaggggtttaggttgggctgttctcyctgctcctccacctgamatgactggtttgaaaagtgtctgcaggtcttctgtaaagcagctctataaggttatgacttctgcgggtcttcggttgtaatgattgccacttccttctgcctwctcagatgagaggtctcagtgtctttactggtaacaccagaatgcagtytttcttactttgatctgcacagggggtgtcctcctctcctctgctttcatctcctgctgttttagtattagtaccagttgtgtactgctgctgcatagttgtgtactgttgtctcaaaaggcatccctgctcttcctcatctcccac

SEQ ID NO: 9818 - DNA, 600 bp, Chicken  19866894205670_5
cagagggtatggaatggggagatgacctcatcagtagtccctacaggtaaggaagagagagaggaaaagaaggtcaaagggtggaaagagcagaatagtgaagtgccactgtctttctaagtactgtctttgcaagcgagctttgcactgcrggaggggtttaggttgggctgttctcyctgctcctccacctgamatgactggtttgaaaagtgtctgcaggtcttctgtaaagcagctctataaggttatgacttctgcgggtcttcggttgtaatgattgccacttccttctgcctwctcagatgagaggtctcagtgtctttactggtaacaccagaatgcagtytttcttactttgatctgcacagggggtgtcctcctctcctctgctttcatctcctgctgttttagtattagtaccagttgtgtactgctgctgcatagttgtgtactgttgtctcaaaaggcatccctgctcttcctcatctcccactgcaggcctcgaaggaatccaatctttgttattgatcttgtgctagatggcagtggtgttcacttcagcccccctgaagagagttttaaggagtccctcctttc

SEQ ID NO: 9819 - DNA, 600 bp, Chicken  19866894205670_6
aggaagagagagaggaaaagaaggtcaaagggtggaaagagcagaatagtgaagtgccactgtctttctaagtactgtctttgcaagcgagctttgcactgcrggaggggtttaggttgggctgttctcyctgctcctccacctgamatgactggtttgaaaagtgtctgcaggtcttctgtaaagcagctctataaggttatgacttctgcgggtcttcggttgtaatgattgccacttccttctgcctwctcagatgagaggtctcagtgtctttactggtaacaccagaatgcagtytttcttactttgatctgcacagggggtgtcctcctctcctctgctttcatctcctgctgttttagtattagtaccagttgtgtactgctgctgcatagttgtgtactgttgtctcaaaaggcatccctgctcttcctcatctcccactgcaggcctcgaaggaatccaatctttgttattgatcttgtgctagatggcagtggtgttcacttcagcccccctgaagagagttttaaggagtccctcctttctctgttggacaagggaatcctggtgactcatgctgtcccacagctggag

SEQ ID NO: 9820 - DNA, 599 bp, Chicken  19866894205674_1
  misc_feature (1)..(5): n is any nucleotide
nnnnnagccctatcctgactgtccttgggtgtttccagggatgagacatctttcgtgtctcctctcctctcaaccagttgtgactccctgaggcaggtgaagatttcctctatcttctaatccaaaatcttcttcatagaatcgtagaatcatagaatgggcctgggttgaaaaggaccacaatgatcatctggtttcaacccccctgctatgtgcagggtcaccaaccaccagaccaggctgcccagagccacatccagcctggccttgaatgcctccagggatggggcatccacagcytccttgggcaacctgttccagtgcgtcaccactctctgagtgaaaaaattcctcctgatatctaacctaaacctcccctgtctcagtttaaaaccattcccccttgtcctatcgatgcccttttgaaacacaggcagaaaaatcctcctttctccttagagacgtggacactgggaagagacagagcaaatatcagatgtgtgcatcagcagaacagccaacagctccaggaattctgcaggagcatctccattcctcaggggctcatcgagattgacagtgtttgtcatgggaaacga

SEQ ID NO: 9821 - DNA, 600 bp, Chicken  19866894205677_1
aggggtagtagtaacattcaccattaatggaaattggaaatgaaagaaaatgagagtgccaaaaatctatcagatccatttcaaaataggcagaacatgttcaaataaaggacaaacacattgattttaaagaaaatgtggcttgaatgccacaggtcacataaatgtagacatagtgaaaaatgtaatcaacagggtttctgttgtccttacgcacagtgcatcatgtagattctaagaaacagctctggagttcacacaggggaacagcaatgagagccatcatatagagtgtgtgaraagtgyccagtgtgcattacatgaccaaaagagaagagatccaaaatggtagcagctgaacatgaaatcctcttaggagccaatgggcttagaggactcacaggtcagagagcagatacgtgaggtacaggcaggcagtattgccatgacttacacactaattatctctgygtggtgaaaaaagcctcaacaaagtaaatatcctaagctaacatttagatcatacctataccattgccactgcctgtggacaggtaaatgttttaaaattattaaataaattaaagattagaaaagttc

SEQ ID NO: 9822 - DNA, 600 bp, Chicken  19866894205677_2
agtagtaacattcaccattaatggaaattggaaatgaaagaaaatgagagtgccaaaaatctatcagatccatttcaaaataggcagaacatgttcaaataaaggacaaacacattgattttaaagaaaatgtggcttgaatgccacaggtcacataaatgtagacatagtgaaaaatgtaatcaacagggtttctgttgtccttacgcacagtgcatcatgtagattctaagaaacagctctggagttcacacaggggaacagcaatgagagccatcatatagagtgtgtgaraagtgyccagtgtgcattacatgaccaaaagagaagagatccaaaatggtagcagctgaacatgaaatcctcttaggagccaatgggcttagaggactcacaggtcagagagcagatacgtgaggtacaggcaggcagtattgccatgacttacacactaattatctctgygtggtgaaaaaagcctcaacaaagtaaatatcctaagctaacatttagatcatacctataccattgccactgcctgtggacaggtaaatgttttaaaattattaaataaattaaagattagaaaagttcagctcc

SEQ ID NO: 9823 - DNA, 600 bp, Chicken  19866894205677_3
catagtgaaaaatgtaatcaacagggtttctgttgtccttacgcacagtgcatcatgtagattctaagaaacagctctggagttcacacaggggaacagcaatgagagccatcatatagagtgtgtgaraagtgyccagtgtgcattacatgaccaaaagagaagagatccaaaatggtagcagctgaacatgaaatcctcttaggagccaatgggcttagaggactcacaggtcagagagcagatacgtgaggtacaggcaggcagtattgccatgacttacacactaattatctctgygtggtgaaaaaagcctcaacaaagtaaatatcctaagctaacatttagatcatacctataccattgccactgcctgtggacaggtaaatgttttaaaattattaaataaattaaagattagaaaagttcagctccttgggagtactgaatttatgctctgttgcgcagtttgattctctgcaaatcttgataggatattttgaactccataaacagataatacattttcaaatattttgtttctgtacttcacaatacatctctgctgtgagaatgacagctcaccatattgcatattat

SEQ ID NO: 9824 - DNA, 600 bp, Chicken  19866894205677_4
aaataaattaaagattagaaaagttcagctccttgggagtactgaatttatgctctgttgcgcagtttgattctctgcaaatcttgataggatattttgaactccataaacagataatacattttcaaatattttgtttctgtacttcacaatacatctctgctgtgagaatgacagctcaccatattgcatattataaggaaacaaagattctaccattcaagattcactgacttgatggcagaaagtataactgtcaatatagtaatttctgaatgcatttctccttccaaagcctayaaaaaaaaatcattaatgaaaccagacctgattctttgtaagtttgacatttgttgcttagacattaccaaacctaccaccttaggtattagcaaaaacaatcatgtattttaagaagggacgtaatcattggacacatcaaaaaggtgcattagaagcatcmgaactgcattatctacaaaacacaggtaaggaggatacgcaaacaaactcgttaaatgaacatrtcacccatgccaaatataggtaaggtattttctttctaacagtggaagtctgtcttgaactctgtctacacag

SEQ ID NO: 9825 - DNA, 600 bp, Chicken  19866894205677_5
tgtgagaatgacagctcaccatattgcatattataaggaaacaaagattctaccattcaagattcactgacttgatggcagaaagtataactgtcaatatagtaatttctgaatgcatttctccttccaaagcctayaaaaaaaaatcattaatgaaaccagacctgattctttgtaagtttgacatttgttgcttagacattaccaaacctaccaccttaggtattagcaaaaacaatcatgtattttaagaagggacgtaatcattggacacatcaaaaaggtgcattagaagcatcmgaactgcattatctacaaaacacaggtaaggaggatacgcaaacaaactcgttaaatgaacatrtcacccatgccaaatataggtaaggtattttctttctaacagtggaagtctgtcttgaactctgtctacacagaacgttactttggcaattaaatctcctgataagcacacagtgtctgtaatttatctggtatagaggcagacctgaattatgtttcaaaatcaaagcagttttgatacagaacacatatcttatgtgggctaaactatgtcaatatttaacttcactacattaa

SEQ ID NO: 9826 - DNA, 600 bp, Chicken  19866894205677_6
cactgacttgatggcagaaagtataactgtcaatatagtaatttctgaatgcatttctccttccaaagcctayaaaaaaaaatcattaatgaaaccagacctgattctttgtaagtttgacatttgttgcttagacattaccaaacctaccaccttaggtattagcaaaaacaatcatgtattttaagaagggacgtaatcattggacacatcaaaaaggtgcattagaagcatcmgaactgcattatctacaaaacacaggtaaggaggatacgcaaacaaactcgttaaatgaacatrtcacccatgccaaatataggtaaggtattttctttctaacagtggaagtctgtcttgaactctgtctacacagaacgttactttggcaattaaatctcctgataagcacacagtgtctgtaatttatctggtatagaggcagacctgaattatgtttcaaaatcaaagcagttttgatacagaacacatatcttatgtgggctaaactatgtcaatatttaacttcactacattaatgtaacgttacaaaagctctaatagagcagaatttattataaagtagtataatttatttaaaat

SEQ ID NO: 9827 - DNA, 577 bp, Chicken  19866894205677_7
gtccatacgaccagaaaaagaataacgctctcctcattctggatctgcagaagtataaagaaccaacacgttcttcatccttaagcttcttttctgagtaaactgcaacagacttctgtttaagatatatggaacagaactaacatcttgtaaagaaagacaattttggcataaaagtgacatgctgaaacaattactacaaggtgttctttaacatacgtatttactaacatacagacactttgcaaactgagcaacctttgtctattgtgcaaatttagaaaaacagaactatatttsagcttattccttctttgtctgcactttcactatgctgtttcctgctttatttctcttgacttgcttgtttattgctcctcaaaatagtaaactgaaaatcctacctaatatatattcttttcacgatcagcttttacccattctacatttcactactatctgtctcctagactttctcttacttctctgtaatctaaatctccatgaaattttagatgaaaagaattgtttagtctactaactggtcttagtaacagaagatcaaatcatgctgcaa

SEQ ID NO: 9828 - DNA, 600 bp, Chicken  19866894205687_1
cgaaaacaaaaaacaatgacaaatttcatccaaacacaagaagggaggagagttcttcagcagcaataattaaccaagtttcaacatgctcgagatgcctgtggaaactacctgacaaattgatgggctttatgaaggaagatgaagagctgtttcaggcgcgactgagagggagagtggttagctcatgggtctatgtggaaagacatttctttttataacttccttagtagtaataaaaattagaattagtcaggtttttttacacaattcttgtggaaagtttcttctgagagagargaaagaaggcctctctcctgaaaacgcagggtatgctcccatttcaaacaaatttctactgggcaacctttccgactggaaaccccttraagaaatcctgtgccatcctgcaagttcattcattctgggctatttaagttttcatagggaaacagcagctcctacagctcagctttcctgcaggaggtagtcactggagacacatcacaaggaacagcctcttcaaactacatgaaatacgtagctagctgttgccagcctcctgatttcactccattcctgtctcctaattaaatccca

SEQ ID NO: 9829 - DNA, 600 bp, Chicken  19866894205687_2
tcgagatgcctgtggaaactacctgacaaattgatgggctttatgaaggaagatgaagagctgtttcaggcgcgactgagagggagagtggttagctcatgggtctatgtggaaagacatttctttttataacttccttagtagtaataaaaattagaattagtcaggtttttttacacaattcttgtggaaagtttcttctgagagagargaaagaaggcctctctcctgaaaacgcagggtatgctcccatttcaaacaaatttctactgggcaacctttccgactggaaaccccttraagaaatcctgtgccatcctgcaagttcattcattctgggctatttaagttttcatagggaaacagcagctcctacagctcagctttcctgcaggaggtagtcactggagacacatcacaaggaacagcctcttcaaactacatgaaatacgtagctagctgttgccagcctcctgatttcactccattcctgtctcctaattaaatcccatagcattttcccttgcatgtgaatgaagtggggttatgcctaatcatgagagactttcaagcagaatgtttgccttctgggttctctct

SEQ ID NO: 9830 - DNA, 600 bp, Chicken  19866894205687_3
agctttcctgcaggaggtagtcactggagacacatcacaaggaacagcctcttcaaactacatgaaatacgtagctagctgttgccagcctcctgatttcactccattcctgtctcctaattaaatcccatagcattttcccttgcatgtgaatgaagtggggttatgcctaatcatgagagactttcaagcagaatgtttgccttctgggttctctctacagtcagtgcttcatgatccatttgtctggtggcagttgattttagctgtctgtttgcagtggggattgtaagggattgmacagaatgaagttgaaactcagggcaacaaaggacagggaatgctggtttggtggcacccaaacagtttcatcatagcttatcctgcagtctcggccaaatgaaagacaagaatagattgtgatcattggagcaaaggctaaattgttgcttcctagaaaacttgcttatatcggtcttaccaacagagcccactggcagaggaccctgtcagtagccaccgaagataggacgcgatggataaaagccctgtgattgatatcctcttaaaatattcataatttagtgtatatcacatgta

SEQ ID NO: 9831 - DNA, 600 bp, Chicken  19866894205687_4
ggataaaagccctgtgattgatatcctcttaaaatattcataatttagtgtatatcacatgtagccagaacagtgctactctaactcatctcttccatttcagcacttaggctgtctctcaaagtctgtcatcatggtgaggattgcagctcttcttggcagttgtagagggcacatagaggagccactcagtcattgccaaaggcaaacatccatttcatagcagacctttcactttctacagattgtcttaaccaccagaggagaaagattatctgttggtagcaacagatgctcccrccatagctcctgaccttgcagggatcctcaccatttctgatctccccatcattaaagtgaaataaataaataaatccaatctttctattctactctcctttgaagatccccttcagttactgcagcataatcatggatttttgcagataaggttgctccattgagaaggctgtgggtgatggtttcctcgtgccccttttaaggtcttgatcttgggggtttttttttgaagttaaattaccagagagaaccttcccttgagagcagatgtagctcctctgctggattttttttttttcc

SEQ ID NO: 9832 - DNA, 600 bp, Chicken  19866894205700_1
ttggcagctggattgcaaagaacagcccttcacctgcacttaggatgcttcgatgtttgaaaactgctggtacaaagagtacagtgaaaaattccctcagcaggggaaataaacaaattaagccaagtatttccagtacataaagagtctcacatcttgattacaaaccattgcctatgataatggtatttcattaagaaaaccttcaaatttaatatctcaaagtcattttcacaaagcattctgatgttttagcattctgttttaagggttattaagtactttattcaatccattcakcttattcaaactcccaggttttagcctggcttcttaaggaagcaaggccgatacaattaggatgccagtcttttaattaatagatggacccgcgggtctttttcacctaaatatggaagagcacaaaagatttcaaccttatgaaattgcaaaacatttcacgaagccagtgacttggcagacaaaaggatcctattagggcaccaactgaaagaaaggcaggggagccaagctaccttttccacctcaaatcaagatggcaaatagctatggaagaaatagagctgaataaaaagacat

SEQ ID NO: 9833 - DNA, 600 bp, Chicken  19866894205701_1
cggataattaggctttaatgggaacattctgggttagtttctacttattctgtgagtctgatttaatgctgtggctgccttggttgtccctgcagttgaactctgctgatctctcctggccagatcttgaatagatgctggttctggccaatggcacattggcttttaatgcctcctttattctgggaggtgctacttctctgggagaaccttcatcattgcagaaaagctttctgttccttgcaactcccatttgccaaggtgcaaaagtattcttttaaacacatggtagcttacttmacccagagcaaaatcaacatgaagaatctggtatgtgcatttatctcctcgccatgtaaaggtagaaccaataaaagcatcgtgaggaactgtttgaaattcaaacactttgtttctgtacccatgcaaatgctttaagtccaaaatttttgaaaggtagaaataatgaatcagctcaaagaccccaaactacaagcttctaagtctgagaactgccaagatgaggaaatcattggacaccagatggtgtgtgaattcacagtgccctacactaattgtgccaggaaaagatctcttttc

SEQ ID NO: 9834 - DNA, 422 bp, Chicken  19866894205701_2
gtgtgaattcacagtgccctacactaattgtgccaggaaaagatctcttttctaacacgcacgtactcctaaatatatactatattttattttcagtcaaatgcttgttcattatgccaaccttaaccgtaaccctaaatcatcaaatgcaagctaactccatactggagaccatgtaaacccaggtggtgctgcagaatatggaacagtagctgtttgccagaagcatatttaaaaccttgggataggaaagatgtgattaaatgtggaagaatcaggaagtatgaaggaaatgagagraagaagaagaaagagatcacatttgtaaagcacaataaatgatggagaaaaaaatccgaatcttgacaaaatgccctgggaaggaaagaaaaccacttccaagcaagctctaatctcaaaaa

SEQ ID NO: 9835 - DNA, 600 bp, Chicken  19866894205704_1
ggcgtccctcgttttgttggaaagccttgctgggcgggaaggaagggcaattgctgctgatggaggcttacccaggcatgcgagttctgcaattactcctgcttttggcctgcaaaatcctcgttgcattcttctggtgctcatttagtgaatgctgctgcagctgactgctacacagcttttactgagcaatacctcagccaggcaaattgctgtctgctatgtccctgggcggcgggagctgacacctgaaaacaaaatccaccttcaagccgcttccttggcaagaaggaaaatgcrgtcccccggcccagcctycccgtccagctgcatgcatgctggggacgtggtcagacagaggtcagagcactcagaaaaaccaagcaggygtcatgcacattcrctgcatcactgaaccgcttcagcgagccgggagcagcctctcaygtcccgtgccrgtggtgcacagctgctgctggggaattgctgccgattctcctgccctcccacctccttcaaggggccttctctgcagctcccagatcctgctggcagcgtgggatgggcacggggagctccagtcattagggaacaaggcrg

SEQ ID NO: 9836 - DNA, 600 bp, Chicken  19866894205704_2
ggaaagccttgctgggcgggaaggaagggcaattgctgctgatggaggcttacccaggcatgcgagttctgcaattactcctgcttttggcctgcaaaatcctcgttgcattcttctggtgctcatttagtgaatgctgctgcagctgactgctacacagcttttactgagcaatacctcagccaggcaaattgctgtctgctatgtccctgggcggcgggagctgacacctgaaaacaaaatccaccttcaagccgcttccttggcaagaaggaaaatgcrgtcccccggcccagcctycccgtccagctgcatgcatgctggggacgtggtcagacagaggtcagagcactcagaaaaaccaagcaggygtcatgcacattcrctgcatcactgaaccgcttcagcgagccgggagcagcctctcaygtcccgtgccrgtggtgcacagctgctgctggggaattgctgccgattctcctgccctcccacctccttcaaggggccttctctgcagctcccagatcctgctggcagcgtgggatgggcacggggagctccagtcattagggaacaaggcrgaggccaccaggtgcagtg

SEQ ID NO: 9837 - DNA, 600 bp, Chicken  19866894205704_3
caattactcctgcttttggcctgcaaaatcctcgttgcattcttctggtgctcatttagtgaatgctgctgcagctgactgctacacagcttttactgagcaatacctcagccaggcaaattgctgtctgctatgtccctgggcggcgggagctgacacctgaaaacaaaatccaccttcaagccgcttccttggcaagaaggaaaatgcrgtcccccggcccagcctycccgtccagctgcatgcatgctggggacgtggtcagacagaggtcagagcactcagaaaaaccaagcaggygtcatgcacattcrctgcatcactgaaccgcttcagcgagccgggagcagcctctcaygtcccgtgccrgtggtgcacagctgctgctggggaattgctgccgattctcctgccctcccacctccttcaaggggccttctctgcagctcccagatcctgctggcagcgtgggatgggcacggggagctccagtcattagggaacaaggcrgaggccaccaggtgcagtgggtgtgcaggaagggaacggtcagtgcatctaaaagaaagtgccggtgcggtctgctctgctcattaatga

SEQ ID NO: 9838 - DNA, 600 bp, Chicken  19866894205704_4
tttggcctgcaaaatcctcgttgcattcttctggtgctcatttagtgaatgctgctgcagctgactgctacacagcttttactgagcaatacctcagccaggcaaattgctgtctgctatgtccctgggcggcgggagctgacacctgaaaacaaaatccaccttcaagccgcttccttggcaagaaggaaaatgcrgtcccccggcccagcctycccgtccagctgcatgcatgctggggacgtggtcagacagaggtcagagcactcagaaaaaccaagcaggygtcatgcacattcrctgcatcactgaaccgcttcagcgagccgggagcagcctctcaygtcccgtgccrgtggtgcacagctgctgctggggaattgctgccgattctcctgccctcccacctccttcaaggggccttctctgcagctcccagatcctgctggcagcgtgggatgggcacggggagctccagtcattagggaacaaggcrgaggccaccaggtgcagtgggtgtgcaggaagggaacggtcagtgcatctaaaagaaagtgccggtgcggtctgctctgctcattaatgatatatttggcagag

SEQ ID NO: 9839 - DNA, 600 bp, Chicken  19866894205704_5
gtgaatgctgctgcagctgactgctacacagcttttactgagcaatacctcagccaggcaaattgctgtctgctatgtccctgggcggcgggagctgacacctgaaaacaaaatccaccttcaagccgcttccttggcaagaaggaaaatgcrgtcccccggcccagcctycccgtccagctgcatgcatgctggggacgtggtcagacagaggtcagagcactcagaaaaaccaagcaggygtcatgcacattcrctgcatcactgaaccgcttcagcgagccgggagcagcctctcaygtcccgtgccrgtggtgcacagctgctgctggggaattgctgccgattctcctgccctcccacctccttcaaggggccttctctgcagctcccagatcctgctggcagcgtgggatgggcacggggagctccagtcattagggaacaaggcrgaggccaccaggtgcagtgggtgtgcaggaagggaacggtcagtgcatctaaaagaaagtgccggtgcggtctgctctgctcattaatgatatatttggcagagtatgttaattgggtgaggttgaattccaaagaaggccttgctac

SEQ ID NO: 9840 - DNA, 600 bp, Chicken  19866894205704_6
tgcagctgactgctacacagcttttactgagcaatacctcagccaggcaaattgctgtctgctatgtccctgggcggcgggagctgacacctgaaaacaaaatccaccttcaagccgcttccttggcaagaaggaaaatgcrgtcccccggcccagcctycccgtccagctgcatgcatgctggggacgtggtcagacagaggtcagagcactcagaaaaaccaagcaggygtcatgcacattcrctgcatcactgaaccgcttcagcgagccgggagcagcctctcaygtcccgtgccrgtggtgcacagctgctgctggggaattgctgccgattctcctgccctcccacctccttcaaggggccttctctgcagctcccagatcctgctggcagcgtgggatgggcacggggagctccagtcattagggaacaaggcrgaggccaccaggtgcagtgggtgtgcaggaagggaacggtcagtgcatctaaaagaaagtgccggtgcggtctgctctgctcattaatgatatatttggcagagtatgttaattgggtgaggttgaattccaaagaaggccttgctacagccaggccaa

SEQ ID NO: 9841 - DNA, 466 bp, Chicken  19866894205704_7
rgtcccccggcccagcctycccgtccagctgcatgcatgctggggacgtggtcagacagaggtcagagcactcagaaaaaccaagcaggygtcatgcacattcrctgcatcactgaaccgcttcagcgagccgggagcagcctctcaygtcccgtgccrgtggtgcacagctgctgctggggaattgctgccgattctcctgccctcccacctccttcaaggggccttctctgcagctcccagatcctgctggcagcgtgggatgggcacggggagctccagtcattagggaacaaggcrgaggccaccaggtgcagtgggtgtgcaggaagggaacggtcagtgcatctaaaagaaagtgccggtgcggtctgctctgctcattaatgatatatttggcagagtatgttaattgggtgaggttgaattccaaagaaggccttgctacagccaggccaaggttttt

SEQ ID NO: 9842 - DNA, 600 bp, Chicken  19866894205714_1
agacagacagtgtgagtgcagcccagctcagctggcttcaactgcgtatccgtgtatgaatttacttaaatactattaaagtatttgaagtgaccatctgggtagaagtgctgcagctgaactttactgtaactaaccagaaagcacacgctggcccagtgaaatgcattttccttaattacacaagatgctgcagcagatttaagcaagtgcaaagattggccttacagagctgctgcccacctgactcagctcagcctgctccagcagaattggctcaagctgctcatgtgccccagygccttccagaatgaaagttatcccatggggagacgctacaaaaggtgcctgtcccagcacagtcaaaatagatacagatacctatttaactttttatgttacatttgggattctattatgcaacagtgatatttcaggttggatattaggaaaaatttcttcttcgaaagagtggtcaagcgctggaacaggctgcccagggaggtggttgagtcactgtccctggaggtgttcaaaacacctgtagatatggtacgaagggatatgggttagtgggcaaatgttggcagaaggtggatg

SEQ ID NO: 9843 - DNA, 600 bp, Chicken  19866894205714_2
tatttcaggttggatattaggaaaaatttcttcttcgaaagagtggtcaagcgctggaacaggctgcccagggaggtggttgagtcactgtccctggaggtgttcaaaacacctgtagatatggtacgaagggatatgggttagtgggcaaatgttggcagaaggtggatggttggactggacagtcttggagggcttcttcaatcttggtgattctacgattctatgcttttattataagtggagctacacagctgtggtatacttcagaggaggaacatggagcaaaattcatcctcygctgaagagcaggaaaagggtgagatgtcataattcaaactgatactgtgtactttttatcttcaaaagaaaaaaaaaactactataaaatgaatttcatttccttttctgccattcattcagtggaaaataataaagaaaaaagaaaaacagaccttctataaattaaatgtcctcctggagctcattgtgcatcttgtagcatatatgaccggcactgtaaagagctgaaatttgtgtaaactcaaacatttgttaaccatatactttacgtagtgctctttttgttgaaagaaaggc

SEQ ID NO: 9844 - DNA, 600 bp, Chicken  19866894205720_1
ctttgttcctttctttctcagttttagtattaagttggttttgctgttaatatttgttgtgtaggaaacaggctgcaagcaaagctgcatgtatgtccctgagtacttaataagagaactctgcttaaaacctgaaatcactcactggctgtaagcacgtgtggtcacttacagccagaaattagccaacgctgaggtccttgacttgaaggaaatcagtctgtgtttctgcttcatttggttacctcactgacagccaaaggagcttcaggaaatctttgtctgtggttttgaagagcyagttgtagtcaatgcaggagagatgcaatagtgtgggctcagggtttggcgcatgaaaaggcttcagttgagcattgcatgttgagaaatgaagtttatgcatatgtcctgaaatctctcttagctgctgtaattttaaagcaaagatatttcagatcatttgcaaattaggtgttgtggctgtttttccaacttgtattacatgtcttttgaatgctcgtttcctaaaagcctacctaaggacacaagcagagtagttttattgtcagatgtgttgtgtttttccttcttctgttggtt

SEQ ID NO: 9845 - DNA, 600 bp, Chicken  19866894205720_2
tagagcactgagggacatgtgtgtggagggagagctgcaatgagtaacaacagcctgtgagtccttcgttatgttgaaatacttgaattagagctgcctttcttgacttttgcttagcatcagtgtgtcattccttggtttctttatactttctctttattccagcagcatccgcaaacccaaaagctgctttgaagtccaagatcgttgctgaattcagagtaagtttgctagtaggaatgttctgttgcactaacctctgtccttagactgtaacttttgtgtagcttacatgcaccrgcagcataagcttggtcagaagctctactattcagtctccttttgttccttggtgtatattggctgctagatgtctcagttgcaatttctgttagagctgtgaccccttctgtgaactgttatggacagtggggcagctgaaaagcattctgagctgcatggagactccctgcagaagtagtgattttcctttggaataacctggtacagcagagcagttccccttctcaggagcaacatgaaatcgaaatgctgcacttggaagggctggctgcacagacagtgcccaggtgtatgggc

SEQ ID NO: 9846 - DNA, 599 bp, Chicken  19866894205721_1
  misc_feature (1)..(77): n is any nucleotide
nnnnnnnnnnnnnnnnnnnnnnnnnnnnnnnnnnnnnnnnnnnnnnnnnnnnnnnnnnnnnnnnnnnnnnnnnnnnnatttcccagtcgggagcgcggctcacagcgccgtcttctcgcctgaggcaggcggtgtcttggctgctgcccggcctttctggcctccctgagagtaaggggttgggggagatagtgctaatctagatttgtagttatcagcactaatatttatggatacacaatcaaaggcaagtctgcaaaacatcctagtgtgatagcccaaaccacccaacagcgcacrgtcagcagggtcgtgctgttttcctatgccttttcttccctaccttttgaaagctgaagcatgttcgttgatactggatgaccaaccaacttgcagcatgsaaggagcagccatcaccaactgtgtttgtcatggacagaaagttcacagatgatttaggttaagcaaaaaagcaactccaagggagaaggaaacacactgctgtcttattttgttcatgtctgacaatcaattcagcaaagaagtcacatacctctgacagaagaacaagccataaatgagttctggtgcacactaac

SEQ ID NO: 9847 - DNA, 600 bp, Chicken  19866894205721_2
acagcgccgtcttctcgcctgaggcaggcggtgtcttggctgctgcccggcctttctggcctccctgagagtaaggggttgggggagatagtgctaatctagatttgtagttatcagcactaatatttatggatacacaatcaaaggcaagtctgcaaaacatcctagtgtgatagcccaaaccacccaacagcgcacrgtcagcagggtcgtgctgttttcctatgccttttcttccctaccttttgaaagctgaagcatgttcgttgatactggatgaccaaccaacttgcagcatgsaaggagcagccatcaccaactgtgtttgtcatggacagaaagttcacagatgatttaggttaagcaaaaaagcaactccaagggagaaggaaacacactgctgtcttattttgttcatgtctgacaatcaattcagcaaagaagtcacatacctctgacagaagaacaagccataaatgagttctggtgcacactaacttctgaaacaagtctgctctccactcatgaacgacgaacatctgtgcaagtcttgccctcagctgcattcacgcattacctttcctgactgcctttactaat

SEQ ID NO: 9848 - DNA, 600 bp, Chicken  19866894205729_1
tgttctaaaaaatgttctaaaaatacagaaattcatctgagatgattgtctccatagggtttagtgacaattggatttttctctttgttcagaacactttcaacctgaatcaaagtcaccctgaacttctgtgcactagttacatgtaaggaagacacatcccaaagcaaatgaaaatcagtcaagatgtttgaaaacaaagaccctgcagcagtgaaatgatacttatttctgttcccagatgaaggggcagaaaaatcacaaatatcttccctttctcattctttcattttctctctytctaacattacatatatattccctgggtgcagtattaagcttacttgcctggagtaagacagccatgcattttaccagcagcctcaactgtaggttgaaagtctgtgtacagctgaaactcttcttagcatgaccagcacaactgcatttagtgcccagagaayaatacctaaagacactctagctatatcattcyaaatgtggtactcataattctgcagtcttcagctttgtacttcttcactgcgggtgctctaatatgcttactgggctgggtgtcttgaaaggatatatcagtca

SEQ ID NO: 9849 - DNA, 600 bp, Chicken  19866894205729_2
aagcaaatgaaaatcagtcaagatgtttgaaaacaaagaccctgcagcagtgaaatgatacttatttctgttcccagatgaaggggcagaaaaatcacaaatatcttccctttctcattctttcattttctctctytctaacattacatatatattccctgggtgcagtattaagcttacttgcctggagtaagacagccatgcattttaccagcagcctcaactgtaggttgaaagtctgtgtacagctgaaactcttcttagcatgaccagcacaactgcatttagtgcccagagaayaatacctaaagacactctagctatatcattcyaaatgtggtactcataattctgcagtcttcagctttgtacttcttcactgcgggtgctctaatatgcttactgggctgggtgtcttgaaaggatatatcagtcatttgaaagcctttatatatggtctcacaaacggaggtgaataacatttggatggcagagaagttactattctcatttgttatttctacttttttccaaaagtttaccacctgtactgtacggatgggcaaaccatacayraagcgtatcctgaaaccattgcag

SEQ ID NO: 9850 - DNA, 600 bp, Chicken  19866894205729_3
acaaagaccctgcagcagtgaaatgatacttatttctgttcccagatgaaggggcagaaaaatcacaaatatcttccctttctcattctttcattttctctctytctaacattacatatatattccctgggtgcagtattaagcttacttgcctggagtaagacagccatgcattttaccagcagcctcaactgtaggttgaaagtctgtgtacagctgaaactcttcttagcatgaccagcacaactgcatttagtgcccagagaayaatacctaaagacactctagctatatcattcyaaatgtggtactcataattctgcagtcttcagctttgtacttcttcactgcgggtgctctaatatgcttactgggctgggtgtcttgaaaggatatatcagtcatttgaaagcctttatatatggtctcacaaacggaggtgaataacatttggatggcagagaagttactattctcatttgttatttctacttttttccaaaagtttaccacctgtactgtacggatgggcaaaccatacayraagcgtatcctgaaaccattgcagttaacagcctgatcctttcaagcaaacccaaa

SEQ ID NO: 9851 - DNA, 600 bp, Chicken  19866894205729_4
caactgcatttagtgcccagagaayaatacctaaagacactctagctatatcattcyaaatgtggtactcataattctgcagtcttcagctttgtacttcttcactgcgggtgctctaatatgcttactgggctgggtgtcttgaaaggatatatcagtcatttgaaagcctttatatatggtctcacaaacggaggtgaataacatttggatggcagagaagttactattctcatttgttatttctacttttttccaaaagtttaccacctgtactgtacggatgggcaaaccatacayraagcgtatcctgaaaccattgcagttaacagcctgatcctttcaagcaaacccaaattgattctctgctgtagactgcagcaggagatgctttaacaaaaaactcagtggtttacgtgrtatgctcaggacagctgtttaatcaaacaccttaaaatttgttcctccctagaatggatctaagcagcttgaaaccttgaaatcatgaaaatactataaaggtgtctttttctttttttcttagcaatataattgcatatttccttttgcatgtaatgtaggtattcctgttaatctctt

SEQ ID NO: 9852 - DNA, 600 bp, Chicken  19866894205729_5
aactgcatttagtgcccagagaayaatacctaaagacactctagctatatcattcyaaatgtggtactcataattctgcagtcttcagctttgtacttcttcactgcgggtgctctaatatgcttactgggctgggtgtcttgaaaggatatatcagtcatttgaaagcctttatatatggtctcacaaacggaggtgaataacatttggatggcagagaagttactattctcatttgttatttctacttttttccaaaagtttaccacctgtactgtacggatgggcaaaccatacayraagcgtatcctgaaaccattgcagttaacagcctgatcctttcaagcaaacccaaattgattctctgctgtagactgcagcaggagatgctttaacaaaaaactcagtggtttacgtgrtatgctcaggacagctgtttaatcaaacaccttaaaatttgttcctccctagaatggatctaagcagcttgaaaccttgaaatcatgaaaatactataaaggtgtctttttctttttttcttagcaatataattgcatatttccttttgcatgtaatgtaggtattcctgttaatctcttg

SEQ ID NO: 9853 - DNA, 600 bp, Chicken  19866894205729_6
atgcttactgggctgggtgtcttgaaaggatatatcagtcatttgaaagcctttatatatggtctcacaaacggaggtgaataacatttggatggcagagaagttactattctcatttgttatttctacttttttccaaaagtttaccacctgtactgtacggatgggcaaaccatacayraagcgtatcctgaaaccattgcagttaacagcctgatcctttcaagcaaacccaaattgattctctgctgtagactgcagcaggagatgctttaacaaaaaactcagtggtttacgtgrtatgctcaggacagctgtttaatcaaacaccttaaaatttgttcctccctagaatggatctaagcagcttgaaaccttgaaatcatgaaaatactataaaggtgtctttttctttttttcttagcaatataattgcatatttccttttgcatgtaatgtaggtattcctgttaatctcttgctttgctgtctcaaaataaataaaataaaataaaataaaataaaataaaataaaataaaagagaggtctgtcagtatcaaacactcatgatgcctaatgagagtgtggagctcctcctg

SEQ ID NO: 9854 - DNA, 600 bp, Chicken  19866894205729_7
acagctgtttaatcaaacaccttaaaatttgttcctccctagaatggatctaagcagcttgaaaccttgaaatcatgaaaatactataaaggtgtctttttctttttttcttagcaatataattgcatatttccttttgcatgtaatgtaggtattcctgttaatctcttgctttgctgtctcaaaataaataaaataaaataaaataaaataaaataaaataaaataaaagagaggtctgtcagtatcaaacactcatgatgcctaatgagagtgtggagctcctcctgggagtgattsatccccttctaagagagttacctgagagaatgaatggctttccagtgatactcaactctgaccattcctcgactaaaaacccacracatgactgagcaacaccagaaaacacacctaacacttaaacactctgctggatgtctgacatatgatcaaatttcagttgattcacatttcttcttaccatgtagtctgtcttagaagaaaaaggcatttcagccacttccttcactagattactacctcacttctcaattttgacattagaacactctcctagtacttgatataggtttctcc

SEQ ID NO: 9855 - DNA, 600 bp, Chicken  19866894205729_8
ataaaggtgtctttttctttttttcttagcaatataattgcatatttccttttgcatgtaatgtaggtattcctgttaatctcttgctttgctgtctcaaaataaataaaataaaataaaataaaataaaataaaataaaataaaagagaggtctgtcagtatcaaacactcatgatgcctaatgagagtgtggagctcctcctgggagtgattsatccccttctaagagagttacctgagagaatgaatggctttccagtgatactcaactctgaccattcctcgactaaaaacccacracatgactgagcaacaccagaaaacacacctaacacttaaacactctgctggatgtctgacatatgatcaaatttcagttgattcacatttcttcttaccatgtagtctgtcttagaagaaaaaggcatttcagccacttccttcactagattactacctcacttctcaattttgacattagaacactctcctagtacttgatataggtttctcctcttttaatgctatcatatacttttagaatatttcctctttcttctatgccaaatggatcaaccattaccatttatggaatttaa

SEQ ID NO: 9856 - DNA, 600 bp, Chicken  19866894205734_1
attttctcaactctgttatggacctgtacttagcagatgaataattgcaactgagcttgctctctaaccttgccccagccataaagctccaaggcacttttgcttagtcgttttctgcagcaattcagttactttcagtcctatagccatatccatggacaaatatttcaattccaaccccttatttacctacttttcagtaatacaaggttacctcacacattttatttgtcctctccaaaacataggcatgtagcaacttaatcctgcagtgctactgaaggaaaacggagacgtggratgcaaagggacctgattaagatcataagggtgatcaaaactgggccacatgctaaatgactttggcactgccccttccctctattgaaagaaccagtcagccttccctggggaacctgggagcttcctttgttattgaacaaaactaaagctaaaacgcagtttaatgtaaaaatatccattgactgagctgttccattcccaacatgtgcccatccctcctcattttaccaccaccactcctttaccctcccactataagcatgcttgtttctggcctaaatacaggtgttctggaag

SEQ ID NO: 9857 - DNA, 600 bp, Chicken  19866894205734_2
aacaaaactaaagctaaaacgcagtttaatgtaaaaatatccattgactgagctgttccattcccaacatgtgcccatccctcctcattttaccaccaccactcctttaccctcccactataagcatgcttgtttctggcctaaatacaggtgttctggaagcaattacagctctgtaggaacagaatatgatgcacggcatctcatcagtgctctcccttcattaagggaatgacctcttgtttcctttctgacctcacctattgtttaggaaatgaatggacataggagtgagaaaayttgttttggcaatgggatctgtattttccaagcctctattatactgaattctgcccagaaatataaatcagaatagttaccaaaaaaaaaaaaaaaaagcacaaaggagcttatcattccctattttattccttattttggtagtaactatacaaagtcaaagtcactgcataaaaatccactatgcaaatttattagaaaagttactctttcttctaaatattaaaaaaaaaaaaaaaaaatctaccggaaaaagtggaaaaaaaagcaagttatcactgtcagagtttcccctaagac

SEQ ID NO: 9858 - DNA, 600 bp, Chicken  19866894205734_3
cttttaacagaggaacagcagatgcataagtatattttagggggaataaaatagttgtgagtgagagggagaatgtgtcagtctttgaatatctctgtgaccagaactacagctgatagataggcctagagctgttaaacgtcccgactctgggctttcactgaaaagtgttgtgcacagctctgttccctgcctttttcggatgctgtctttgcactgtccggtgcagctctatgtttcacacactgtagtcataacaacatggctgcaaagcccctccatcagaatcacaattctagmtgccttgggcatggccgcaattacaggggcttgagttaaaaatgggctcagactgtacggctgtgtgtcctgacatctgctccagaagaatgacaagaaggtaggaaagtgatgtgagctaaaattcccttataacgttttttaaaaatggccgtttttgagtaccctgacctggaagaataaaatgggcaggatgagcaagcttaggataagccaagggatctctttgtcccactggactctgaatgccaaagattttagctgcatcaagattttaccctccctccttaaactcttcct

SEQ ID NO: 9859 - DNA, 600 bp, Chicken  19866894205738_1
agaacagtaccatatattcagtgtcaagaacatgcccagaacatcagcagaaaggcagcacagagaacaacttaacacaaccagcttttcacccaacaaaaccctgcttctccatccaaacattacttgaagcagccctccttaacagaacgagtgtgctttagaaaaagggttaggagtggatttaagaaatatgtaagagaatgtgtgtgtcagaaatcttagtacaaataaacaatttttttttttctccttgcctggtgcttgtgaaacacagagagcctctcacaagcaaagtgytggcgattgttctcatggagcacaagcagcaaggtgccagccagggtgctgcacagtgcctcagggtgctgcacactcactcatacagcctgagggggcccatctcatgaacagcagctcctggctgcccactcccccgccccaggggcttccctgcatgccagcactgtgtgaccaaaatggggtaaagctgcatctgggactcttacatgagcattttggtttccaaagaattagaaaatttccagcacatcactgaacaaatatttcagtgtaattcttctgatcaagggatacctt

SEQ ID NO: 9860 - DNA, 600 bp, Chicken  19866894205742_1
accagaaggtaaatatcttcctcctcttctgtacagacaaatatgtcagctcttaagtcagtgctttcctgctcaagagagagagcaccagacatacagcacatggcaccctgtggttttacctgcacaaccatgggaaggacctgaggaagtgagatggcaaacttacctcaaccctagaagctcaggtatgcaaactgcaaggaaaaatagcagccaaaagtggttctagaaaaattactgccctggtttctgttgggtaggcacctacggggagcagaagggctgatggtacttctraccctaatgaaagaaattctgcttcacatttacaaaaaggatattccgatcgggactagaactagaggggcctctagccatgaaggggaaaagggcaacttggatttacaggaccatgtggatgygatgacctggaacaccagaaccacaggagtacaaggctgtagaggatactggtgtactgtgtaccctaatgccattaggttataaagaggcagaacctgtctgtatttctggagtgacagggggatcccaacagctgacttattggaggccaaagtgagcctaactgggaaggag

SEQ ID NO: 9861 - DNA, 600 bp, Chicken  19866894205742_2
cacaaccatgggaaggacctgaggaagtgagatggcaaacttacctcaaccctagaagctcaggtatgcaaactgcaaggaaaaatagcagccaaaagtggttctagaaaaattactgccctggtttctgttgggtaggcacctacggggagcagaagggctgatggtacttctraccctaatgaaagaaattctgcttcacatttacaaaaaggatattccgatcgggactagaactagaggggcctctagccatgaaggggaaaagggcaacttggatttacaggaccatgtggatgygatgacctggaacaccagaaccacaggagtacaaggctgtagaggatactggtgtactgtgtaccctaatgccattaggttataaagaggcagaacctgtctgtatttctggagtgacagggggatcccaacagctgacttattggaggccaaagtgagcctaactgggaaggagtgccaaaaagtaccccattgtgactggtccaaaggctctatgcatcttaggcatagactgcctcaggagagggtatttcaagaactagggttctttcaagaaccctattccttctctttcaagaa

SEQ ID NO: 9862 - DNA, 600 bp, Chicken  19866894205754_1
caggttgcctagagatgtggtggatgccccttccctagggtcattcaaggccaggctggactagtttctgagcaacctgatgtagctgtggtctcccggttcattgcaggggagttggactagatgacctttaaacgtcccttccaactgtaagtattctatgattgtaagtaaaagtagtcctagatagattagggaatagtagagacaaagtagtgtatcacatggaggaaatgctagagcagtcttttcatctctaatctgcatggagcacccttgtgcaactttgttttaattctyatggtcctggaacactaaaatggagggctgcccaacctgaatcacctgcaccaagtaaatggacctgtgtatctgcctgctgcatatcctttccaagatggagtcacatactccataatatgcaggaaagtgagcttcataggrgttgtagatttttgatttctggtgtgtacttgtaattgttcactgcccaaaagtatgttgtgctttgtaattggattgatgaatttgccttactctttagagggggtatttatttggtggatcagatttacagaatgctgtcttttccaccttttt

SEQ ID NO: 9863 - DNA, 600 bp, Chicken  19866894205754_2
caactgtaagtattctatgattgtaagtaaaagtagtcctagatagattagggaatagtagagacaaagtagtgtatcacatggaggaaatgctagagcagtcttttcatctctaatctgcatggagcacccttgtgcaactttgttttaattctyatggtcctggaacactaaaatggagggctgcccaacctgaatcacctgcaccaagtaaatggacctgtgtatctgcctgctgcatatcctttccaagatggagtcacatactccataatatgcaggaaagtgagcttcataggrgttgtagatttttgatttctggtgtgtacttgtaattgttcactgcccaaaagtatgttgtgctttgtaattggattgatgaatttgccttactctttagagggggtatttatttggtggatcagatttacagaatgctgtcttttccacctttttttttttyccctttgcaaaaggggattctgctgaaatgctaaacaacccctattcttggtgatcaaaataagttttacctttcaagtcttttctgtattgaagaatagatgttgtgcgtaagaaaactagcaagatactttcaca

SEQ ID NO: 9864 - DNA, 600 bp, Chicken  19866894205754_3
tggaacactaaaatggagggctgcccaacctgaatcacctgcaccaagtaaatggacctgtgtatctgcctgctgcatatcctttccaagatggagtcacatactccataatatgcaggaaagtgagcttcataggrgttgtagatttttgatttctggtgtgtacttgtaattgttcactgcccaaaagtatgttgtgctttgtaattggattgatgaatttgccttactctttagagggggtatttatttggtggatcagatttacagaatgctgtcttttccacctttttttttttyccctttgcaaaaggggattctgctgaaatgctaaacaacccctattcttggtgatcaaaataagttttacctttcaagtcttttctgtattgaagaatagatgttgtgcgtaagaaaactagcaagatactttcacactgaggatagattgggggcagtatcctctggtggacgagatgaagactgaaagttcaatcagaaatttaaatacagatttatcctaggtgggtcatgtctgacatgtggagcagcagtcgatcaacccaaaaagaccactgcacagttgatccaggtatcctt

SEQ ID NO: 9865 - DNA, 600 bp, Chicken  19866894205769_1
aagaaagtatcccccgtggggtggtgggggctgagagtgcctcggctccatccccacaggtggcacagggtctccccgtggtcctatgggcactgttcctgtggtcttataaacgcagtgctctgagatgtaatggtgctttctgggcataaaaggtgttttttttcgccccccaaaacggcattattgtcccatgttggcagagggaggctgcagtccatccctggggaggtggcacggcgccttcctgtggccccggggatgtggtgtccccatggccttaggggcactgtgtccctrtascctgaggatgctgtgcccatggccttagggttgcagtgtccccatgccctaggacacagtgtccccatggccactgggtcacagcgccctatggccctgggatgtgatgtctccgtggccttaggggtatggtgtccctatggccccgaggacccggtgccccataggccccccccttgacctccactgtatccccaggccgagccgcacgtcgcactgcccgccaggtccccgaggagctgctgaacaatgtggagctgcgggaggcggtgggggctctgccctccaactacaact

SEQ ID NO: 9866 - DNA, 600 bp, Chicken  19866894205769_2
aaagtatcccccgtggggtggtgggggctgagagtgcctcggctccatccccacaggtggcacagggtctccccgtggtcctatgggcactgttcctgtggtcttataaacgcagtgctctgagatgtaatggtgctttctgggcataaaaggtgttttttttcgccccccaaaacggcattattgtcccatgttggcagagggaggctgcagtccatccctggggaggtggcacggcgccttcctgtggccccggggatgtggtgtccccatggccttaggggcactgtgtccctrtascctgaggatgctgtgcccatggccttagggttgcagtgtccccatgccctaggacacagtgtccccatggccactgggtcacagcgccctatggccctgggatgtgatgtctccgtggccttaggggtatggtgtccctatggccccgaggacccggtgccccataggccccccccttgacctccactgtatccccaggccgagccgcacgtcgcactgcccgccaggtccccgaggagctgctgaacaatgtggagctgcgggaggcggtgggggctctgccctccaactacaacttcg

SEQ ID NO: 9867 - DNA, 600 bp, Chicken  19866894205771_1
tgatttaaaaatgcaaccttaatttttaacttgtacaaagcttttttacatttaacattacatttaacatgcagtctaggaagtgtggtcttcatggtcatagtgctttgagctatgccttttttttaaggccttttttctaggaactaatattaatggttgcgtcattcagttcatgctttataaaaataattgcattaacaatcagtacagctagctttttcattatcatgacaagaataatgatgcattaatagagaatgaaatgtgttcagagcatcgagaaaattttaaattgtyaatggcatagatatttcagctacaggcagaaaatgggatgggtttaataattgttgaagcaggtaagagaaagcargtaagaaatgtcaaatattgcaggcccaacatgtacaaactcgtaagtgagaacctacattccagcaacatttcctattgcaagttttccaagattttgacgagaacttggaacaaaagctgttctgttcctcctggggtttacgtcaccagttgtcttattattcctgatccattgccaatcatattgtaagctctgagaaagggatgaaaaagcagcttttc

SEQ ID NO: 9868 - DNA, 600 bp, Chicken  19866894205771_2
taggaagtgtggtcttcatggtcatagtgctttgagctatgccttttttttaaggccttttttctaggaactaatattaatggttgcgtcattcagttcatgctttataaaaataattgcattaacaatcagtacagctagctttttcattatcatgacaagaataatgatgcattaatagagaatgaaatgtgttcagagcatcgagaaaattttaaattgtyaatggcatagatatttcagctacaggcagaaaatgggatgggtttaataattgttgaagcaggtaagagaaagcargtaagaaatgtcaaatattgcaggcccaacatgtacaaactcgtaagtgagaacctacattccagcaacatttcctattgcaagttttccaagattttgacgagaacttggaacaaaagctgttctgttcctcctggggtttacgtcaccagttgtcttattattcctgatccattgccaatcatattgtaagctctgagaaagggatgaaaaagcagcttttctcctttaaagagatttgaactttgaaatcttattactgtgaccattaattgcagaaaaggacagactgaaatgcca

SEQ ID NO: 9869 - DNA, 600 bp, Chicken  19866894205775_1
aggttataacacagaaggaattgtaagaacggagtgcatttcctgatggatttcctcaggaatgagccttcggagccgtgctgtggcagctctgtctgtatggcccagcctcaaaaaatgtgcacatgaagcagagctgggaggtactgccaatagtgaggatcatcgcgttggaatgagatgaccttcttgactgtagtgatagaaattcaataatgtgaactgcaaagtcatgttcttgggattcaccagctggaagcaacagagaaggaaagagatcagagtgtcatctgagtgagwgaagctgtcagggaaccagagctgccaacacggcaccgcagtggaaagagaagacacgaagatgggttaggtgaggtttttagcacaggaggaattattggtgcttttacaccaggctcaggcaagattttctgtgaaatatttatacgattccagtcaacactgttgcaaaaagatgaactggaatcagcgcagactggcagctagaacaagaacggaaatggagcatcagcctgagggagagggaaaaagagtacagtttgatcagcaggatggcagagaagcaacgtgtatgtcctt

SEQ ID NO: 9870 - DNA, 599 bp, Chicken  19866894205781_1
  misc_feature (1)..(29): n is any nucleotide
nnnnnnnnnnnnnnnnnnnnnnnnnnnnngtgctcgcaagcctcctccgatttactccttccccactcacacatttaaatattcacaagatgggcctgcagaaaacctgtgttataaagcaaagtagccaacactagctaaacagatgcccttacaaatacccaacccacctctttggttgcacaatctccgcattctacttacaaaatcaagtgaatacaaagacagactgaaagcctatggcagatccagcccagccctacccatttctggtgggctggcatcagtgccctttacatyatcccttctttgtttcagccacagatgtcattaacatgctgcttaccccctcttccagctcactgatgaagacaccaaagaagactggacstaaccctaatccctgtggtgcacctatagataagcaccacctagaagagttcccatcaacatcatagtgatgaaggactgttgtcttgaggtgtgcatagctattagagctaatgwcttcacctgtcatagtttatttgcagtgaacaccatggagagaacctaccaacctcactaacagcttgtgaagaaaaaaatgaaagaaggaa

SEQ ID NO: 9871 - DNA, 600 bp, Chicken  19866894205781_2
gggcctgcagaaaacctgtgttataaagcaaagtagccaacactagctaaacagatgcccttacaaatacccaacccacctctttggttgcacaatctccgcattctacttacaaaatcaagtgaatacaaagacagactgaaagcctatggcagatccagcccagccctacccatttctggtgggctggcatcagtgccctttacatyatcccttctttgtttcagccacagatgtcattaacatgctgcttaccccctcttccagctcactgatgaagacaccaaagaagactggacstaaccctaatccctgtggtgcacctatagataagcaccacctagaagagttcccatcaacatcatagtgatgaaggactgttgtcttgaggtgtgcatagctattagagctaatgwcttcacctgtcatagtttatttgcagtgaacaccatggagagaacctaccaacctcactaacagcttgtgaagaaaaaaatgaaagaaggaacggtacatggtcacccaggatggctctgtgtttagtaggcacaccaagttcatctgcttatggtgttttatcccacttctcttcctactttc

SEQ ID NO: 9872 - DNA, 600 bp, Chicken  19866894205781_3
atcaagtgaatacaaagacagactgaaagcctatggcagatccagcccagccctacccatttctggtgggctggcatcagtgccctttacatyatcccttctttgtttcagccacagatgtcattaacatgctgcttaccccctcttccagctcactgatgaagacaccaaagaagactggacstaaccctaatccctgtggtgcacctatagataagcaccacctagaagagttcccatcaacatcatagtgatgaaggactgttgtcttgaggtgtgcatagctattagagctaatgwcttcacctgtcatagtttatttgcagtgaacaccatggagagaacctaccaacctcactaacagcttgtgaagaaaaaaatgaaagaaggaacggtacatggtcacccaggatggctctgtgtttagtaggcacaccaagttcatctgcttatggtgttttatcccacttctcttcctactttctgtctcagttttatctgtatgctgttaatctttttaaacattctctcaccttgttggctgcatttcaagaataggtggcatgagtcaactgcagtggaccagtgtaaaatgttgta

SEQ ID NO: 9873 - DNA, 600 bp, Chicken  19866894205783_1
tagttgcaagatgagccttaaagtcgtcttaccgaaattctcttctaaattggctgaaaaggcttgtcttttatacagatagctgaagtaacttgcttttcaccagtctttgctgtttactttcatgcttgctatttccattcctcaaagcttacggttcaagctgctttagagcgaattgattcagagtacaacagtagaggacgtctggggttttctcagggctacttttctcaagtagaactgctttaaaggaaggctgtctgatacttctaaagcaaaacataaaactcattttgwatgtgtaattgctttcaactcaatcagccatgcaagtgccttttaagttgttcatataatgccaattttgatggtactacttcatccatgtgatttcttgaccagtgttgcttatcagataattttatcagccatggagatgatcccttcaatccagtgtagctagagatgccaggaaaactgtgtcagcttttgggctgcccatctccatagcccttacctcggggtagtgcctttgcacttctgtctctctctagctcratctttttaaccattcaacgcacagttttattctatctg

SEQ ID NO: 9874 - DNA, 556 bp, Chicken  19866894205783_2
gtctgatacttctaaagcaaaacataaaactcattttgwatgtgtaattgctttcaactcaatcagccatgcaagtgccttttaagttgttcatataatgccaattttgatggtactacttcatccatgtgatttcttgaccagtgttgcttatcagataattttatcagccatggagatgatcccttcaatccagtgtagctagagatgccaggaaaactgtgtcagcttttgggctgcccatctccatagcccttacctcggggtagtgcctttgcacttctgtctctctctagctcratctttttaaccattcaacgcacagttttattctatctgtatctccctaaaaattgtactggtttttatccagatgagaaaagatattagttatatatatatatttttttctggccaaagaagtttttaatatgaaactatcccaggttggtattggctgttaaacttaacctccttcaccattccagttctacaaagggtaaccagcagtttgaacaaaagagaactttttctacagtccactttgaatatttag

SEQ ID NO: 9875 - DNA, 600 bp, Chicken  19866894205784_1
ccccatggtgggtagtgttggatgtagcagactaactcttaattaaagagtgattttcttgaagtctctaatagactcattgttgctattagagcctggcctttttggtgatatcctcaaaaccttttgcaaacatgagtgatcactgaaagactgaatgctgcaggaaggggttagagtgtaaactggaacagttggttgtgggtgacacatcagcaaagcattacatgtttcttgaatcttcttccagcaacttttctgcctgttagtgtggctaatttcttgcagtttggtgttaaygtgccattaaaaaraaaaaaaaacaacaaaaaagcttcatgccaacaggtagaagaacaggtataattgcttggggaaaggtattccctcagttccctgtcttgggaagagatgtaacctgatgtaagagaagaggtggagagggcaaagtgttttctagaaggtagttttaaaaccttaatgatgttaatgtaaaactagtctgcagtgatgatagtacttgaactctctataaacttaagataatgagtaattgtttagggttgccctgtgatgttggctactgaaagtgttgacgag

SEQ ID NO: 9876 - DNA, 600 bp, Chicken  19866894205784_2
gtgttggatgtagcagactaactcttaattaaagagtgattttcttgaagtctctaatagactcattgttgctattagagcctggcctttttggtgatatcctcaaaaccttttgcaaacatgagtgatcactgaaagactgaatgctgcaggaaggggttagagtgtaaactggaacagttggttgtgggtgacacatcagcaaagcattacatgtttcttgaatcttcttccagcaacttttctgcctgttagtgtggctaatttcttgcagtttggtgttaaygtgccattaaaaaraaaaaaaaacaacaaaaaagcttcatgccaacaggtagaagaacaggtataattgcttggggaaaggtattccctcagttccctgtcttgggaagagatgtaacctgatgtaagagaagaggtggagagggcaaagtgttttctagaaggtagttttaaaaccttaatgatgttaatgtaaaactagtctgcagtgatgatagtacttgaactctctataaacttaagataatgagtaattgtttagggttgccctgtgatgttggctactgaaagtgttgacgagtctgttacccagga

SEQ ID NO: 9877 - DNA, 600 bp, Chicken  19866894205788_1
tgtaacacagcttttaagctcttgacaaatgtaattttctcagcaaatatgagactacttggaacacaattttataagccctctactttgaccatgttactgcccttctgtcacccctgtacgggttcctctcttctccatcacagcaaataaaaaaagatttgattgttaaaaagtactttcagacttttactgacatattaattatcttctaatgactactcagacactgagtctcacctctattcggttcataatacctatctcagccaagtattttttttctaacagcccttcctygctgctttcacattcaaaaggtgccagcaaaccctattttcttttcaagagtcatcttaagagtcatcccaattgagatgccaaaaacacaacaggatttaaaaatggttagtgttgagaaactattgcttatttgacatgttctatacatccacacagatttctcccttttcttttatttaaactgctttgtcagtggtccaagatacagtgaataacaccatgtatcctcttggatcttcattacaggcagtgtaatagcagtaatactagattgttagaacatggtatagtttaaaa

SEQ ID NO: 9878 - DNA, 600 bp, Chicken  19866894205788_2
agtcatcccaattgagatgccaaaaacacaacaggatttaaaaatggttagtgttgagaaactattgcttatttgacatgttctatacatccacacagatttctcccttttcttttatttaaactgctttgtcagtggtccaagatacagtgaataacaccatgtatcctcttggatcttcattacaggcagtgtaatagcagtaatactagattgttagaacatggtatagtttaaaaagcacaagtggagatttgagccttctccctttccctttcttagttatggcttagaaaaaamaaatgctttcatccagttgagcatggtyattagagataacttttattacacatttactatatttactacactggcctcaaaatttaaatatctaaagaacttaataattactgcatttttwaatataaagcacttgaatatacctacatgcwgtctgctacgtagtccttcatctaattcatgccactgtgataactcagattaagtgaggactattcacattaacaaaatttgaaaaactcagcctataattcattgaaactattgaacatcataatttttatgttgaatatctcagac

SEQ ID NO: 9879 - DNA, 600 bp, Chicken  19866894205788_3
caacaggatttaaaaatggttagtgttgagaaactattgcttatttgacatgttctatacatccacacagatttctcccttttcttttatttaaactgctttgtcagtggtccaagatacagtgaataacaccatgtatcctcttggatcttcattacaggcagtgtaatagcagtaatactagattgttagaacatggtatagtttaaaaagcacaagtggagatttgagccttctccctttccctttcttagttatggcttagaaaaaamaaatgctttcatccagttgagcatggtyattagagataacttttattacacatttactatatttactacactggcctcaaaatttaaatatctaaagaacttaataattactgcatttttwaatataaagcacttgaatatacctacatgcwgtctgctacgtagtccttcatctaattcatgccactgtgataactcagattaagtgaggactattcacattaacaaaatttgaaaaactcagcctataattcattgaaactattgaacatcataatttttatgttgaatatctcagacattaatagtcacagtgtaagcctctgag

SEQ ID NO: 9880 - DNA, 600 bp, Chicken  19866894205788_4
aactgctttgtcagtggtccaagatacagtgaataacaccatgtatcctcttggatcttcattacaggcagtgtaatagcagtaatactagattgttagaacatggtatagtttaaaaagcacaagtggagatttgagccttctccctttccctttcttagttatggcttagaaaaaamaaatgctttcatccagttgagcatggtyattagagataacttttattacacatttactatatttactacactggcctcaaaatttaaatatctaaagaacttaataattactgcatttttwaatataaagcacttgaatatacctacatgcwgtctgctacgtagtccttcatctaattcatgccactgtgataactcagattaagtgaggactattcacattaacaaaatttgaaaaactcagcctataattcattgaaactattgaacatcataatttttatgttgaatatctcagacattaatagtcacagtgtaagcctctgagaaccacagaactcgtgagtcatattctacctcaagtaattacatacttgcttaataacagtgactaccaccctcattttttttgtctgtattc

SEQ ID NO: 9881 - DNA, 600 bp, Chicken  19866894205788_5
aataacaccatgtatcctcttggatcttcattacaggcagtgtaatagcagtaatactagattgttagaacatggtatagtttaaaaagcacaagtggagatttgagccttctccctttccctttcttagttatggcttagaaaaaamaaatgctttcatccagttgagcatggtyattagagataacttttattacacatttactatatttactacactggcctcaaaatttaaatatctaaagaacttaataattactgcatttttwaatataaagcacttgaatatacctacatgcwgtctgctacgtagtccttcatctaattcatgccactgtgataactcagattaagtgaggactattcacattaacaaaatttgaaaaactcagcctataattcattgaaactattgaacatcataatttttatgttgaatatctcagacattaatagtcacagtgtaagcctctgagaaccacagaactcgtgagtcatattctacctcaagtaattacatacttgcttaataacagtgactaccaccctcattttttttgtctgtattcaaaaatcagaaagaatttactttttaaaata

SEQ ID NO: 9882 - DNA, 600 bp, Chicken  19866894205791_1
cttctctttctcactttgtgctctagcctttttgttttttcttttcctccttcatttcagattccattctaagtacggtatcttcccacttcagagtctcctcccttcttcagtctttgtcagaacaaaatttgtagtgctcaccatgatttggcacttcaaggccaagcatcttgagagaccactctggcatcaaagggaaaggaggtgttactagatgaagtctgccagcttcagctggtaggtaaagtggttgttttacagcacctcagctcttagcatcttttcaatcacaacagkaccactgtgtggttgtgaaacttcctgtgaggttgaattcwaaatcctttccagcttctgggaagtttcatttactgttagattaaacctacaagatgggacatcttccttctttaggggccccggtgatgagcagaggcatacagtaccaacagtgtcagcagaaggccccatatcaacaggttggctcactgtctgctgagcccagcagatatcagcgcaatgcctcaacagcccatccttcctttgcctgtaccacccaagmagaaggccttgctctctgaggctgctctctgtctc

SEQ ID NO: 9883 - DNA, 600 bp, Chicken  19866894205791_2
ttttcctccttcatttcagattccattctaagtacggtatcttcccacttcagagtctcctcccttcttcagtctttgtcagaacaaaatttgtagtgctcaccatgatttggcacttcaaggccaagcatcttgagagaccactctggcatcaaagggaaaggaggtgttactagatgaagtctgccagcttcagctggtaggtaaagtggttgttttacagcacctcagctcttagcatcttttcaatcacaacagkaccactgtgtggttgtgaaacttcctgtgaggttgaattcwaaatcctttccagcttctgggaagtttcatttactgttagattaaacctacaagatgggacatcttccttctttaggggccccggtgatgagcagaggcatacagtaccaacagtgtcagcagaaggccccatatcaacaggttggctcactgtctgctgagcccagcagatatcagcgcaatgcctcaacagcccatccttcctttgcctgtaccacccaagmagaaggccttgctctctgaggctgctctctgtctctgctgcttggccatgctcaggagctcactgctgcagccaaa

SEQ ID NO: 9884 - DNA, 600 bp, Chicken  19866894205791_3
acctcagctcttagcatcttttcaatcacaacagkaccactgtgtggttgtgaaacttcctgtgaggttgaattcwaaatcctttccagcttctgggaagtttcatttactgttagattaaacctacaagatgggacatcttccttctttaggggccccggtgatgagcagaggcatacagtaccaacagtgtcagcagaaggccccatatcaacaggttggctcactgtctgctgagcccagcagatatcagcgcaatgcctcaacagcccatccttcctttgcctgtaccacccaagmagaaggccttgctctctgaggctgctctctgtctctgctgcttggccatgctcaggagctcactgctgcagccaaacacagcagtggttacagtaacggagtggtacatccctcgtggacagtgtgtgactgtggccactgcttgccatttatcagtactgggggatttccagcttcagcacttttacagatcacaagtgcagtatggtaagcaaggcgatgccttttagctcgatcgtgctgttgtttctgtgcagatactggggtttttgctcgtattgaagcctttcagaatgactg

SEQ ID NO: 9885 - DNA, 599 bp, Chicken  19866894205792_1
  misc_feature (1)..(203): n is any nucleotide
nnnnnnnnnnnnnnnnnnnnnnnnnnnnnnnnnnnnnnnnnnnnnnnnnnnnnnnnnnnnnnnnnnnnnnnnnnnnnnnnnnnnnnnnnnnnnnnnnnnnnnnnnnnnnnnnnnnnnnnnnnnnnnnnnnnnnnnnnnnnnnnnnnnnnnnnnnnnnnnnnnnnnnnnnnnnnnnnnnnnnnnnnnnnnnnnnnnnnnnnnnntattatctcatccaaatgcatgctgtgtgttttgaatctgaggtctttcactgagttttgggtgatggtatctcattccaaatatcatggcaatctytaacatcttgtcttatacctgacattttaggggtggggagggaaatcaagtctggaatacttcggttacaccagagacaaaaagcacctgaattttactgtgacaaaaatgaagcaactctaaattctcagaaggcaagataacatccaaggaagagcagttcagagcacaacactcataattagctcaacatccattcattcaaaataataatgaaatactaacacactaccaatacaaatataaaacatttagcctaattagttgaaagcaagtttataacaagttggccrgtkaaa

SEQ ID NO: 9886 - DNA, 600 bp, Chicken  19866894205792_2
caatctytaacatcttgtcttatacctgacattttaggggtggggagggaaatcaagtctggaatacttcggttacaccagagacaaaaagcacctgaattttactgtgacaaaaatgaagcaactctaaattctcagaaggcaagataacatccaaggaagagcagttcagagcacaacactcataattagctcaacatccattcattcaaaataataatgaaatactaacacactaccaatacaaatataaaacatttagcctaattagttgaaagcaagtttataacaagttggccrgtkaaatctgtttttggtattatcatgcttaagacattttctgccagaaaagacacagtcaagagaaaaagcatctctcatgcagtctgtatagagcctccaagttaggacatatacaaacagagacatcaacactcraaaatggtatgataacattactaatgaggcggtttaagaacttacatcaggtttgccaaactaatccttccagacttacaatgaagtttgtttccgagacttgctgtttttcacagatgaaaaagaccatctgtgtccatccacagagtccggtgctcaagc

SEQ ID NO: 9887 - DNA, 600 bp, Chicken  19866894205792_3
tctytaacatcttgtcttatacctgacattttaggggtggggagggaaatcaagtctggaatacttcggttacaccagagacaaaaagcacctgaattttactgtgacaaaaatgaagcaactctaaattctcagaaggcaagataacatccaaggaagagcagttcagagcacaacactcataattagctcaacatccattcattcaaaataataatgaaatactaacacactaccaatacaaatataaaacatttagcctaattagttgaaagcaagtttataacaagttggccrgtkaaatctgtttttggtattatcatgcttaagacattttctgccagaaaagacacagtcaagagaaaaagcatctctcatgcagtctgtatagagcctccaagttaggacatatacaaacagagacatcaacactcraaaatggtatgataacattactaatgaggcggtttaagaacttacatcaggtttgccaaactaatccttccagacttacaatgaagtttgtttccgagacttgctgtttttcacagatgaaaaagaccatctgtgtccatccacagagtccggtgctcaagctgc

SEQ ID NO: 9888 - DNA, 592 bp, Chicken  19866894205792_4
aaggcaagataacatccaaggaagagcagttcagagcacaacactcataattagctcaacatccattcattcaaaataataatgaaatactaacacactaccaatacaaatataaaacatttagcctaattagttgaaagcaagtttataacaagttggccrgtkaaatctgtttttggtattatcatgcttaagacattttctgccagaaaagacacagtcaagagaaaaagcatctctcatgcagtctgtatagagcctccaagttaggacatatacaaacagagacatcaacactcraaaatggtatgataacattactaatgaggcggtttaagaacttacatcaggtttgccaaactaatccttccagacttacaatgaagtttgtttccgagacttgctgtttttcacagatgaaaaagaccatctgtgtccatccacagagtccggtgctcaagctgcctaaactttttcaggtagctgaaggggttctaatgaagctcttccccaaaaaataaacatcaaaacacatcaaaaataaactcagaatcatctcactcaacagcctttcagtatgccagaacaagta

SEQ ID NO: 9889 - DNA, 600 bp, Chicken  19866894205793_1
gcttaaaaccggtgaaaaactgacctcaggttctggtcactctgctgcatttctctcttcagatcatttccagattccatttggcttaagtcaccgcttttaatagttaagctctctttactccctgcctttcccactcccgatggagctatgcctattgcttctgagcattatttgaaacagtgcctaaacatacgtatacaaaaatagcctggaaatactccagaggctacaattgattcataaatatcacttattctgtagcacctcattatatattgtatgaaaagaatagatcarctggaacytcygtgcaattggacagatacttaggcattattatttttaaccagccatgtattacagcatttctgagcaacgcagacttctgcagaccttcaaggccaatccaatgctgaccatcagcatctgaactctcccctttccatcctacctctcaccactgctcttgctgggcccacagatctcctctgcagacctcttccatcattttgcaagagggaaggaaaatcactggatcctccacaccctgtttaagtcccttgatttactcatgtacctaaacacagatgccagaac

SEQ ID NO: 9890 - DNA, 600 bp, Chicken  19866894205793_2
ccggtgaaaaactgacctcaggttctggtcactctgctgcatttctctcttcagatcatttccagattccatttggcttaagtcaccgcttttaatagttaagctctctttactccctgcctttcccactcccgatggagctatgcctattgcttctgagcattatttgaaacagtgcctaaacatacgtatacaaaaatagcctggaaatactccagaggctacaattgattcataaatatcacttattctgtagcacctcattatatattgtatgaaaagaatagatcarctggaacytcygtgcaattggacagatacttaggcattattatttttaaccagccatgtattacagcatttctgagcaacgcagacttctgcagaccttcaaggccaatccaatgctgaccatcagcatctgaactctcccctttccatcctacctctcaccactgctcttgctgggcccacagatctcctctgcagacctcttccatcattttgcaagagggaaggaaaatcactggatcctccacaccctgtttaagtcccttgatttactcatgtacctaaacacagatgccagaactcaccttc

SEQ ID NO: 9891 - DNA, 600 bp, Chicken  19866894205793_3
gtgaaaaactgacctcaggttctggtcactctgctgcatttctctcttcagatcatttccagattccatttggcttaagtcaccgcttttaatagttaagctctctttactccctgcctttcccactcccgatggagctatgcctattgcttctgagcattatttgaaacagtgcctaaacatacgtatacaaaaatagcctggaaatactccagaggctacaattgattcataaatatcacttattctgtagcacctcattatatattgtatgaaaagaatagatcarctggaacytcygtgcaattggacagatacttaggcattattatttttaaccagccatgtattacagcatttctgagcaacgcagacttctgcagaccttcaaggccaatccaatgctgaccatcagcatctgaactctcccctttccatcctacctctcaccactgctcttgctgggcccacagatctcctctgcagacctcttccatcattttgcaagagggaaggaaaatcactggatcctccacaccctgtttaagtcccttgatttactcatgtacctaaacacagatgccagaactcaccttctgc

SEQ ID NO: 9892 - DNA, 600 bp, Chicken  19866894205798_1
gggctctgagctgtaggtgtccctgttcattgcaggggagttggaccacatgacctttaagggtcccttccaaatcatatcattctgtgattctatgaaactgagaatacgagatgactgttggattaactcactccttaactatggtttgtattgttttgtcttgtagctgtggtgatcctggcctttgtaatttgctggttgcctttccacattggcaggatcatatttataagcacccgggacaccagaacgatgctgttctcccaatacttcaacatctttgccctgcagctgttytacctgagtgcctccatcaatcccatcctctacaacctcatctcacagaggtaccgggcagcagtctgcaggctactgctgccatgccggcgcatgagaagggccctggtgggaacaaaagtgtccaggacctacacagagaccagcagtggcataagacatgggtaaatgggcggctccgagctccgagcccagcaatgggcttcacgaggcattccgtgcaaggaagggcgcttcctcctgcagagagtcacagaaaggtggacatctgccagggctttgggagtgtgtaactctttg

SEQ ID NO: 9893 - DNA, 600 bp, Chicken  19866894205798_2
tgccatgccggcgcatgagaagggccctggtgggaacaaaagtgtccaggacctacacagagaccagcagtggcataagacatgggtaaatgggcggctccgagctccgagcccagcaatgggcttcacgaggcattccgtgcaaggaagggcgcttcctcctgcagagagtcacagaaaggtggacatctgccagggctttgggagtgtgtaactctttgtgtgctgaaatgcttggatttttgccaacggagcaagcagggaccgtgaaataatgagaacgatgtgaatgccaacgcyaaaggaaaagctggaggataatactgtgggtttggtttatctcgtgttgttcagccacgtttgtactctgcgattcctggtgctttctaaacaccttgacatcagggactgcaaagcaaggagtgactcgcagagagcctgtgctgttttaaagcagttttctcataaggagatggacacagaaggaattgccctccgccatcagcacttytggaagaagrggacgcctggttttattaaccagtcctgtaaccatgaatgggagtttccaggacaatttagctggctcttgccctggga

SEQ ID NO: 9894 - DNA, 600 bp, Chicken  19866894205798_3
taactctttgtgtgctgaaatgcttggatttttgccaacggagcaagcagggaccgtgaaataatgagaacgatgtgaatgccaacgcyaaaggaaaagctggaggataatactgtgggtttggtttatctcgtgttgttcagccacgtttgtactctgcgattcctggtgctttctaaacaccttgacatcagggactgcaaagcaaggagtgactcgcagagagcctgtgctgttttaaagcagttttctcataaggagatggacacagaaggaattgccctccgccatcagcacttytggaagaagrggacgcctggttttattaaccagtcctgtaaccatgaatgggagtttccaggacaatttagctggctcttgccctgggaaagcctatcctctgcactcagccctgttgatctgccccatgccattaaacacatctcttaattactggcaaccaatttagatatcrctgcttacatcctcttggcagtgtttggttagcattagtgtgtaaccacccggcaccaggctaccccggtacagaggtcgtgaggtttgagattcccctggggtaaattaaggggaaacatcaac

SEQ ID NO: 9895 - DNA, 600 bp, Chicken  19866894205798_4
tgtgctgaaatgcttggatttttgccaacggagcaagcagggaccgtgaaataatgagaacgatgtgaatgccaacgcyaaaggaaaagctggaggataatactgtgggtttggtttatctcgtgttgttcagccacgtttgtactctgcgattcctggtgctttctaaacaccttgacatcagggactgcaaagcaaggagtgactcgcagagagcctgtgctgttttaaagcagttttctcataaggagatggacacagaaggaattgccctccgccatcagcacttytggaagaagrggacgcctggttttattaaccagtcctgtaaccatgaatgggagtttccaggacaatttagctggctcttgccctgggaaagcctatcctctgcactcagccctgttgatctgccccatgccattaaacacatctcttaattactggcaaccaatttagatatcrctgcttacatcctcttggcagtgtttggttagcattagtgtgtaaccacccggcaccaggctaccccggtacagaggtcgtgaggtttgagattcccctggggtaaattaaggggaaacatcaacaaatggccgg

SEQ ID NO: 9896 - DNA, 600 bp, Chicken  19866894205798_5
ctaaacaccttgacatcagggactgcaaagcaaggagtgactcgcagagagcctgtgctgttttaaagcagttttctcataaggagatggacacagaaggaattgccctccgccatcagcacttytggaagaagrggacgcctggttttattaaccagtcctgtaaccatgaatgggagtttccaggacaatttagctggctcttgccctgggaaagcctatcctctgcactcagccctgttgatctgccccatgccattaaacacatctcttaattactggcaaccaatttagatatcrctgcttacatcctcttggcagtgtttggttagcattagtgtgtaaccacccggcaccaggctaccccggtacagaggtcgtgaggtttgagattcccctggggtaaattaaggggaaacatcaacaaatggccggttaatgattttattcaaattatttattgcctggtgatttttggtgctatataagaaatcacagaatcgtagaatggcttggattggaaggaagcttaaaaaccatctaactccaaccctgtaccgtgggcagtgccacccagcagctcaggctgcccagggctcc

SEQ ID NO: 9897 - DNA, 599 bp, Chicken  19866894205813_1
  misc_feature (1)..(195): n is any nucleotide
nnnnnnnnnnnnnnnnnnnnnnnnnnnnnnnnnnnnnnnnnnnnnnnnnnnnnnnnnnnnnnnnnnnnnnnnnnnnnnnnnnnnnnnnnnnnnnnnnnnnnnnnnnnnnnnnnnnnnnnnnnnnnnnnnnnnnnnnnnnnnnnnnnnnnnnnnnnnnnnnnnnnnnnnnnnnnnnnnnnnnnnnnnnnnnnnnnntcctgctatttcctgcctgcatgtcatgatgagactatatagtgccagattatgtttccctctgactgtgtctttatcaatacattgaatgatctcattatataktttttcggtactggaacttgattgcctatacagttaaatcagggaataacagggaaagcccctgtcatcttttcagccttggcccagccatacccaattcccagtcacagcctggaatttagaatggaacagaaatcattccaaatagacacaaaccgtgtgttggaggctgtgtaaacttaatattatggagtagacagatgatgctacatggttttgtgtctggggtataggtaatgtcagtgtcatattcactaatgttaatgttttaagttcttgtatggattcttatgggatca

SEQ ID NO: 9898 - DNA, 600 bp, Chicken  19866894205813_2
cctatacagttaaatcagggaataacagggaaagcccctgtcatcttttcagccttggcccagccatacccaattcccagtcacagcctggaatttagaatggaacagaaatcattccaaatagacacaaaccgtgtgttggaggctgtgtaaacttaatattatggagtagacagatgatgctacatggttttgtgtctggggtataggtaatgtcagtgtcatattcactaatgttaatgttttaagttcttgtatggattcttatgggatcaggacattgtgatagactatcctacrggatttgatcagtttaagagctttgttctaygcaatgagtactcttcaaagctagcaaaattaaaatttaagagctaggataaaaaaatacaattgtagaattgtcaacaggagttaatgtatattccacctttaactgtaataacactaagtggctaccttcctactggtatgggcagggccaggggtatggtcctgagcactggcatgtgatagaaaaagaacttctagtttgtaagagcagtgatcccttttttwtatatatattagtttttatatatttatttattggtttgtcta

SEQ ID NO: 9899 - DNA, 600 bp, Chicken  19866894205813_3
aagcccctgtcatcttttcagccttggcccagccatacccaattcccagtcacagcctggaatttagaatggaacagaaatcattccaaatagacacaaaccgtgtgttggaggctgtgtaaacttaatattatggagtagacagatgatgctacatggttttgtgtctggggtataggtaatgtcagtgtcatattcactaatgttaatgttttaagttcttgtatggattcttatgggatcaggacattgtgatagactatcctacrggatttgatcagtttaagagctttgttctaygcaatgagtactcttcaaagctagcaaaattaaaatttaagagctaggataaaaaaatacaattgtagaattgtcaacaggagttaatgtatattccacctttaactgtaataacactaagtggctaccttcctactggtatgggcagggccaggggtatggtcctgagcactggcatgtgatagaaaaagaacttctagtttgtaagagcagtgatcccttttttwtatatatattagtttttatatatttatttattggtttgtctatttattgcaaatgttgtctggcactctctca

SEQ ID NO: 9900 - DNA, 450 bp, Chicken  19866894205813_4
ggattcttatgggatcaggacattgtgatagactatcctacrggatttgatcagtttaagagctttgttctaygcaatgagtactcttcaaagctagcaaaattaaaatttaagagctaggataaaaaaatacaattgtagaattgtcaacaggagttaatgtatattccacctttaactgtaataacactaagtggctaccttcctactggtatgggcagggccaggggtatggtcctgagcactggcatgtgatagaaaaagaacttctagtttgtaagagcagtgatcccttttttwtatatatattagtttttatatatttatttattggtttgtctatttattgcaaatgttgtctggcactctctcaatcaatgttgttcttttgaagttagcatttcctatggggagaatagactatcctgttgtttaggtatggatacaagc

SEQ ID NO: 9901 - DNA, 599 bp, Chicken  19866894205824_1
  misc_feature (1)..(97): n is any nucleotide
nnnnnnnnnnnnnnnnnnnnnnnnnnnnnnnnnnnnnnnnnnnnnnnnnnnnnnnnnnnnnnnnnnnnnnnnnnnnnnnnnnnnnnnnnnnnnnnnntgcccccatatcccccaacgcccccattgcccccatatcccccattgccccccacctgacccccatctccccccactgcagaggtgcagttccggccgtaccgcacggatgacttcatcacccgtctgtactacgagacgcagcggctgacggtgctgaaccagacgtgggtgctgaaggcgcgggtcaacgactccgagcgyaaccccaacctgtcctgcaagcgcaccctctccttccaactcatcctcaagagcaaagtcagctcccccctcgagtgctccttcctcctcctcgaggggccctacgacgacgtccagatcaaccccgtcatctaccacttcgtcttcaccaacgagaccaacgagaccgactacgtcccgctgcccatcgtcgactcggtggagtgcaacaaactgctggcggccaaaaacatcaacctgcgcctcttcctcttccagagacagaagtgagaggcgcccgccgcggccccgcgcctctc

SEQ ID NO: 9902 - DNA, 599 bp, Chicken  19866894205827_1
  misc_feature (1)..(26): n is any nucleotide
nnnnnnnnnnnnnnnnnnnnnnnnnngcatatttctgatagtatattttcttgtgttttccaatgtgcacagtgactgaggaatctactctggattagtatcttctttttaaagactatcaaattgttttgatgccataaattaatgctttcatttcaaatttttattagtgcatgcatcctatgctggagttcggtgggccagaccctcctgcttctctcctgaattacagtgttctcaataaatcccatgacagactgggattaggcagtaattttgacagatgaagcacctcccttkaagtactaatatcatcttctgccattgtcattttgaaactattagattataaggtaaatctaataataatcttacttttcctagacacacttttttcttattttagccttctggtggaatatttttcaaagtgtataatactagaggcaatccttcaatgtagacctactcctcagaagaattcttagcctacttatgtatggatattccactatttttttacttagtaattttaagttttattcttttttttttttttttaatgtaattttcaacaacttgaacaactcgaataactc

SEQ ID NO: 9903 - DNA, 600 bp, Chicken  19866894205843_1
gtccaaaaaaaaaaagaaaaaaaaggagcaactcaagactagtaaatattcaatgaagaaatttattgtagttcttataaagggaatatccacagcttccttcacatggacttgaatcaggcagaaactagagcgataggcataaaatgaaataacggatgcattatttctagtgggatttacatcaccatttggtctaattattcctgatatttcacccatcatattagaagcttcttcagggaaggaaataacagtttgtctccttgagaacaaagaacaaagtgtctctttgctctsaagaagctcagctatcattatgaagagaaagaatctgtccattatcaagaaatcccactagaaatcttgaatatcttaccaaataattccygagcacactaaaaacaccagcaaatgaaagaagcggaaatgatgggaccttggaaaagaaatagagatcacagatgcactacaacccacttattttcctgccacaaaacaatattaatccaaaaaacaaactatgcctggcatgtgcagctaatctaagcaagatagccacctctccttcctactcttttttttcagtgaagcacactt

SEQ ID NO: 9904 - DNA, 600 bp, Chicken  19866894205843_2
acagcttccttcacatggacttgaatcaggcagaaactagagcgataggcataaaatgaaataacggatgcattatttctagtgggatttacatcaccatttggtctaattattcctgatatttcacccatcatattagaagcttcttcagggaaggaaataacagtttgtctccttgagaacaaagaacaaagtgtctctttgctctsaagaagctcagctatcattatgaagagaaagaatctgtccattatcaagaaatcccactagaaatcttgaatatcttaccaaataattccygagcacactaaaaacaccagcaaatgaaagaagcggaaatgatgggaccttggaaaagaaatagagatcacagatgcactacaacccacttattttcctgccacaaaacaatattaatccaaaaaacaaactatgcctggcatgtgcagctaatctaagcaagatagccacctctccttcctactcttttttttcagtgaagcacactttcagccgtatctgtggccctgaattaaccagtgggaatgcatttacatacatttgcacagagagcaattggccatgagtgtttatgcacgg

SEQ ID NO: 9905 - DNA, 600 bp, Chicken  19866894205843_3
gtagccactcacaggacatatgaactcttttagattggatttcacgagaactgcatgttaagccttaggaggaatttaatacagatgtaggacttcatacagcttttaagaatataatttcttcggccatgtgcaagaattctttgttttggatcttgcattcaatactgcagtatctaggaagaagtattttaaaggaatgtactgagccttggggttcaggtgcaccattttgacaacttccaaaacagggcctttctgggtcagcttatgtctctgggtctggggaaaagagcaagygtttcccagcatcctgcatctctgcaggcaatcataccaagaaataaggaggaaaaaacaacaacaaaaaaccaccttagccagagacagaggactcaacaattccagcttcatggagaacaagttwtcccttctaaataaaggaacctatccaaatatttccaagggccttttccagtccctaaacgcagacatatgccattcagtcactgccaaagaggatattgaacatatacgaccttgtatgtagttattgtttaaatactttcagctgtattgcttgtgaaaattattggtcyt

SEQ ID NO: 9906 - DNA, 600 bp, Chicken  19866894205843_4
catgtgcaagaattctttgttttggatcttgcattcaatactgcagtatctaggaagaagtattttaaaggaatgtactgagccttggggttcaggtgcaccattttgacaacttccaaaacagggcctttctgggtcagcttatgtctctgggtctggggaaaagagcaagygtttcccagcatcctgcatctctgcaggcaatcataccaagaaataaggaggaaaaaacaacaacaaaaaaccaccttagccagagacagaggactcaacaattccagcttcatggagaacaagttwtcccttctaaataaaggaacctatccaaatatttccaagggccttttccagtccctaaacgcagacatatgccattcagtcactgccaaagaggatattgaacatatacgaccttgtatgtagttattgtttaaatactttcagctgtattgcttgtgaaaattattggtcyttgaaagcatagttttcaggtttagctgcagcatygtgattcataccaatatgtggtgctgagcatctgggaatctctgccagttcactggggtaaggatgcaccagcagatgcctggtgcagggtcc

SEQ ID NO: 9907 - DNA, 600 bp, Chicken  19866894205843_5
ygtttcccagcatcctgcatctctgcaggcaatcataccaagaaataaggaggaaaaaacaacaacaaaaaaccaccttagccagagacagaggactcaacaattccagcttcatggagaacaagttwtcccttctaaataaaggaacctatccaaatatttccaagggccttttccagtccctaaacgcagacatatgccattcagtcactgccaaagaggatattgaacatatacgaccttgtatgtagttattgtttaaatactttcagctgtattgcttgtgaaaattattggtcyttgaaagcatagttttcaggtttagctgcagcatygtgattcataccaatatgtggtgctgagcatctgggaatctctgccagttcactggggtaaggatgcaccagcagatgcctggtgcagggtcctgcccctgtaaagggcttcacagcaacatgctgccatgttgtgaagaattaaatactctttagatgattcacacagttcctgttgaactcagtaagaagtccgctgtgatctggagctcggatacggactttttgtggttactgtggtcctacaaagcatcctgtaaaggat

SEQ ID NO: 9908 - DNA, 600 bp, Chicken  19866894205843_6
taccaagaaataaggaggaaaaaacaacaacaaaaaaccaccttagccagagacagaggactcaacaattccagcttcatggagaacaagttwtcccttctaaataaaggaacctatccaaatatttccaagggccttttccagtccctaaacgcagacatatgccattcagtcactgccaaagaggatattgaacatatacgaccttgtatgtagttattgtttaaatactttcagctgtattgcttgtgaaaattattggtcyttgaaagcatagttttcaggtttagctgcagcatygtgattcataccaatatgtggtgctgagcatctgggaatctctgccagttcactggggtaaggatgcaccagcagatgcctggtgcagggtcctgcccctgtaaagggcttcacagcaacatgctgccatgttgtgaagaattaaatactctttagatgattcacacagttcctgttgaactcagtaagaagtccgctgtgatctggagctcggatacggactttttgtggttactgtggtcctacaaagcatcctgtaaaggatcgagtgtctcagggaactcactgccttcatcttct

SEQ ID NO: 9909 - DNA, 600 bp, Chicken  19866894205851_1
acgtgtttaaaagtagaataaaaacatgctaaataaaatttcttgagggggaaacagagagaggacattagaggagtttctttgtttttccttctgttgcgtttattaccccatggatcagtttaaattttccagtactacgattttattttttcttggacatttttttataaattttaatttacagcgttgcatttgtataatgagtataattacatttaattatatgtcatcttcccactgaaacttgtaattacagaattatgatgtacagtgacatccatgttaaatttagtaggraaaaatacaaaggaagaccatggcaaatgaatttgaaaaatgaaattattaaaggaaaaaagaaaactaaaaccagaagtaattgaattcaaccagttgaatctttagtgcttggacaggttcttatttcagttttcctgggaaaatatgattcagtttctttatcggatagcattcactttttcagatgcagaaagtaaattttacgatctttttctcttttttttatgatcactttttctctgtctagcagttacacaacattttgtccaagcatttcacttatgatttactactagg

SEQ ID NO: 9910 - DNA, 600 bp, Chicken  19866894205855_1
agcacgcaggaaacgtccttgatgccacgtaagcctatcagtagaacagacctcatatttcaggaaaaaaaaaatcaccttatggctgtgttgaaatcagacaaatttccagtgaagatgatgttttacaaggtaaggaaagatttgtctgtgcacggagatgaaaacactgataatgaaatttaaagttgtcactaaatgtgcaataaaagtgtgcaacttgcatttaaaaggaaaaataaaatgtttgacttgtgacagcttacttatgtacacctaggctagcaagcagaattaatrcatggtctttttttgcactctttatcttttgatgttgtgtgagttagtttctgctttttattttaaaagtagacaaaacagatgatactccttcatcgtcwtggtctaatggaagtacctgagagaagaagccagggctcttcagcctggagaagacaaggttcccaggagaccttatagcagcgttccagtacctgaagggggcctacaggaaagctggggagggactttttataacggcaggtagcagtactatgagcagaagtggctttaaactagaagagagtagatctagactag

SEQ ID NO: 9911 - DNA, 600 bp, Chicken  19866894205855_2
caaatttccagtgaagatgatgttttacaaggtaaggaaagatttgtctgtgcacggagatgaaaacactgataatgaaatttaaagttgtcactaaatgtgcaataaaagtgtgcaacttgcatttaaaaggaaaaataaaatgtttgacttgtgacagcttacttatgtacacctaggctagcaagcagaattaatrcatggtctttttttgcactctttatcttttgatgttgtgtgagttagtttctgctttttattttaaaagtagacaaaacagatgatactccttcatcgtcwtggtctaatggaagtacctgagagaagaagccagggctcttcagcctggagaagacaaggttcccaggagaccttatagcagcgttccagtacctgaagggggcctacaggaaagctggggagggactttttataacggcaggtagcagtactatgagcagaagtggctttaaactagaagagagtagatctagactaggtatcgggaagaaattctctaatgtgagggaggtgagacactggaacaggttgctcagtgaggctgtggatgccccctccctggaagcattcaagaccaag

SEQ ID NO: 9912 - DNA, 505 bp, Chicken  19866894205859_1
catagcttttctcatatttatgaaagtatagtaagagtttgcatttgtatcgtttgtatcaaattttatattgtgtcaaatttggaagggagtttcttggaacagtgctaagatacataaacaaattaaatgaattaagtgccctttatttagaagtatgatgttttctggttttggtgactctgaaagaaggatttttctgaggaaaatgttttgagttcctttaattttggtgcagtgatgtaggcattttgattatctacttttcttttcccagtaagttgatttaaggcttgcttraagtactgtctgagagggaatgaagcaaaaagctttgaagacttttttcagaacctttacaaacaaaattagatattatgagaatatttkcataatgtaatgtttcttactactgctgtgttttttgttccaggagtaaagtatttttgaaataactgccagaatgccaatgcatttcctttagttgaaattttaacctataaca

SEQ ID NO: 9913 - DNA, 415 bp, Chicken  19866894205859_2
agtttcttggaacagtgctaagatacataaacaaattaaatgaattaagtgccctttatttagaagtatgatgttttctggttttggtgactctgaaagaaggatttttctgaggaaaatgttttgagttcctttaattttggtgcagtgatgtaggcattttgattatctacttttcttttcccagtaagttgatttaaggcttgcttraagtactgtctgagagggaatgaagcaaaaagctttgaagacttttttcagaacctttacaaacaaaattagatattatgagaatatttkcataatgtaatgtttcttactactgctgtgttttttgttccaggagtaaagtatttttgaaataactgccagaatgccaatgcatttcctttagttgaaattttaacctataaca

SEQ ID NO: 9914 - DNA, 600 bp, Chicken  19866894205860_1
tatttcaaatagtaattgtacatgaaaaatcattatacaactgcatgcttaaccacgtgccactgaaaggctagttcttgctttttaacttcattcatcaattatgtggtcagatttgctgagaatggataattaatgagtgataattaatgaggaaagaccaagtctgctaacttagattgcttaggaaaatgattttgctttggacattatgtgttttaacacagccaaatgaaagggcagatagcaaggagcaaaatatataggtcacttgcagttcagaaaatggtcttctggtgwtcagtgacattgaaggacttcaaggaaatagtagctaattaagtgaacatgtgctcccgggaaacattatagctaagtaggtgaacatgtttttaagatgtataagtaaaaaaaaagttaaacagaatagagaaggctatatttgtgttcagcacttaacagatatttacaaggatacttacagatagttttggtgactatcttaaagaaggatattgaaatattaaatgataaagagataaatagaaagctcaagaactgggaaattaataaagtgtatctaagataatggtgtgaagt

SEQ ID NO: 9915 - DNA, 600 bp, Chicken  19866894205861_1
taagtaaaagcaaaatatgactttcatgaaagataatccaggagtgtgtatgctttaaatcctatcagtagcacattgcaaagagcaagtccaaggggaaatgagtgcaagacctgaggcagtccaggtagctgacataggtaggagacagagtgagctcactgagatgaaacaagtgcatgaaaatacaaggacagctactgttgtacagctctgttcttgaaggtgggaaatctagaaatgtcttgtaacctacctgtgagctagtctgggtactctctttccctttaactctccaaraaatggattacatgccagtacctaataaggttttgatttgcatctcataagaccagaggtgtttaatcaatgcagtagcaaaagacacaaaaactccaaatcaaatcacattcaagtaggagagaaacactgtaagcaccttacaagtgcctttaaggacaggaattcaacaggaatattgcaacctgctttactctgcattaacgcatagaatgaaaatagtgcttacttgtgtgtaatggtctacatgcaaaagaattacttacacaatccaaaactgacagaggcataaacagactg

SEQ ID NO: 9916 - DNA, 600 bp, Chicken  19866894205863_1
tggggcagtgggcagaaaagaggggcctgggaaatcccaaatggtggaggtggtcagtgtgggcaagacagcagtaagcagttggttacaaggggtcatccactctgggacatgccaccacaagcatggtatcctgtattgggtgctgggacacaggaaagcaaggcatggggctgttgttttcttctgttgctggaaatgtttatcctggggactaaggcaaagaggtttgtttttaatctatgcttctttaataattcctctgaatttcctatccaaaaatagcaagaggttatagargaaaatacaygactgctccttctcctctgaggcctggcagggagcaggctggctcagcaggcaccgaggtgtgtcctcccagggcttcctccagcatcttctggaaaggagcacggctccttcctctggtggacgcctccctgccgaccttcctgctccagaggacacggcagccaaggcaggtgctccacagattgtccctcgggaacacgaagctgcagctgagggctggaggtgtgatctgggccagcagttcttgtacactgccaggtttcagcattcagaccaagtgcttgagtc

SEQ ID NO: 9917 - DNA, 600 bp, Chicken  19866894205863_2
ggcagaaaagaggggcctgggaaatcccaaatggtggaggtggtcagtgtgggcaagacagcagtaagcagttggttacaaggggtcatccactctgggacatgccaccacaagcatggtatcctgtattgggtgctgggacacaggaaagcaaggcatggggctgttgttttcttctgttgctggaaatgtttatcctggggactaaggcaaagaggtttgtttttaatctatgcttctttaataattcctctgaatttcctatccaaaaatagcaagaggttatagargaaaatacaygactgctccttctcctctgaggcctggcagggagcaggctggctcagcaggcaccgaggtgtgtcctcccagggcttcctccagcatcttctggaaaggagcacggctccttcctctggtggacgcctccctgccgaccttcctgctccagaggacacggcagccaaggcaggtgctccacagattgtccctcgggaacacgaagctgcagctgagggctggaggtgtgatctgggccagcagttcttgtacactgccaggtttcagcattcagaccaagtgcttgagtcacccctcaaa

SEQ ID NO: 9918 - DNA, 600 bp, Chicken  19866894205864_1
cctgttgggttgtacccaaaaaccacctgctctctgctgctgctccacgcgatctttcctatttcctttgcagaaaacgatccaaacacctgagatgctgagcgcacattatgaaagtggagcgggatctcctgaaactaaatggagaattgataacaaaaacctgagattaatggctcaaaaggactgaaataggcagggaagaagaggtgcatcccagcacagcacagtgctgccacagggaaggagcatcccaaagaattattctgcactgggaagcagtgcgtcccaaggcagcgratgggcactgtgagttactcagagggtttccttggggtgctcccatgtgggtgattcccatggcacagctcatggggttccatttgcctccacatgccttccaagggatgcatcgcccgctgtgccatgagcggtgctttcacacacctgggaattatctgtggggatggaggtgggctgagctgtgtgcccgcctgaggggatgctcaccctgcagggactcagagcctgcgggcacctccaaaccccagctatgggattcccaaggagccacagacacatggagataatgagactgct

SEQ ID NO: 9919 - DNA, 600 bp, Chicken  19866894205866_1
gggcttctggatcacacttctgatgcagctgagacaagctctctgctttccaggtgtctaggctagataaagcattctcttcatcacccacttcctctgtaacgtgatcaaatccatcattccttttgttatttccttttgtgtttgctttgccccgcagtaatttgctaactgcaaaagaaggcaagtgctctgaaaacacaccagcctgctgcaagtaagtcctacttgtcagatgtgctgcttgtgaatcatgctgacagattggatctgtttacctcaaacaaactgtcagaaacrttcagtacccaaaccaaagcatggaaaaggctttcaaatacacatgtagatcagatcatagccyagcacatcatattttgcatatttcataaaggcatcacatgtacgtttgcatgtaacaggctgaacatgctgtttacaaagatatttggtattgttacaagaaaaaccaattaagcctcacgtggctaatggggtgggagcaggtttcctctggcttgctgtgcctggcatagtggctgctgagctgcaggtgggtctgcattgctgcagcctgagacctcaacagctctgggccac

SEQ ID NO: 9920 - DNA, 600 bp, Chicken  19866894205866_2
agataaagcattctcttcatcacccacttcctctgtaacgtgatcaaatccatcattccttttgttatttccttttgtgtttgctttgccccgcagtaatttgctaactgcaaaagaaggcaagtgctctgaaaacacaccagcctgctgcaagtaagtcctacttgtcagatgtgctgcttgtgaatcatgctgacagattggatctgtttacctcaaacaaactgtcagaaacrttcagtacccaaaccaaagcatggaaaaggctttcaaatacacatgtagatcagatcatagccyagcacatcatattttgcatatttcataaaggcatcacatgtacgtttgcatgtaacaggctgaacatgctgtttacaaagatatttggtattgttacaagaaaaaccaattaagcctcacgtggctaatggggtgggagcaggtttcctctggcttgctgtgcctggcatagtggctgctgagctgcaggtgggtctgcattgctgcagcctgagacctcaacagctctgggccacctcatgccaactgtatgacctgtggcacctgaatggcagctccagagagcagaatactcatcta

SEQ ID NO: 9921 - DNA, 600 bp, Chicken  19866894205870_1
gacagctctcatttcctgacactgaaaggtatttgagaaagcagtattgcatctgaaagtttaaatctttaaactctgcattatattttagatggcaaattgttatcagacgatgtgactcattatgttgtcccagactggaaggtcgttcaggactaccttgagattcttgagtttccagagctgaaaggtattattttcatgcaaacggcatgtcaagctgtgcaacatcaaaaaggtcgcaggtatttatcctataacaacttgtttatttttctactatagactgactttatacartatgtatttaagtagttaccctaaatcagaaaaatgccatgcttcagttgtttttaggtctttgaaaagtattaatataattttacagaagggaaagaaatgtgatcattaggcatcaatgcctgtaatagtttctgctcagtagtggcatcattaaacctgtaactttactaattaattggatggcttgtgacagcaataaaggacactttgcagcaacatgttgtatgccacagccagattttgtgcacctttctgttcctgctgtactgcagatggaacactcatctatgagggatc

SEQ ID NO: 9922 - DNA, 600 bp, Chicken  19866894205878_1
gtgttgcgaggtgtagttggaagagtgtgaaatttgatctgcaaataatgtaagaaaatctaattaaatttagactaatatgatgagtgccccagcagtaagggaaagggacatcttcagcatgttaatttttacttatccactctttgtttggtctatttggtttcttgaattccagcctttcttgcattcccttcttgtttgaagtttccagaggaggtctggggatcaagctttcttgctacttgaagggttgttcaaatatttatctgttgatttgggagtgtgacctcatttctygcttcctgatgtaayaamgagcagaagataacaatattttgattctctgaagttattgctgtaaagtaagtttacttgctattactcygttattgattagcacagtaacatcrtgcagcatgtcccacaccatagcagtgctggatggcagcctactgaaccaggactgcagcagacagacctcaaggcagacttgacactccatccttctcctgctcgcactgtgaaagtacctgtcaatgtctatggattcacatcagtgcaaaggcagcctttgtaagagagcgaagattcttgatt

SEQ ID NO: 9923 - DNA, 600 bp, Chicken  19866894205878_2
gttggaagagtgtgaaatttgatctgcaaataatgtaagaaaatctaattaaatttagactaatatgatgagtgccccagcagtaagggaaagggacatcttcagcatgttaatttttacttatccactctttgtttggtctatttggtttcttgaattccagcctttcttgcattcccttcttgtttgaagtttccagaggaggtctggggatcaagctttcttgctacttgaagggttgttcaaatatttatctgttgatttgggagtgtgacctcatttctygcttcctgatgtaayaamgagcagaagataacaatattttgattctctgaagttattgctgtaaagtaagtttacttgctattactcygttattgattagcacagtaacatcrtgcagcatgtcccacaccatagcagtgctggatggcagcctactgaaccaggactgcagcagacagacctcaaggcagacttgacactccatccttctcctgctcgcactgtgaaagtacctgtcaatgtctatggattcacatcagtgcaaaggcagcctttgtaagagagcgaagattcttgattctcaagttctygttg

SEQ ID NO: 9924 - DNA, 600 bp, Chicken  19866894205878_3
ggaagagtgtgaaatttgatctgcaaataatgtaagaaaatctaattaaatttagactaatatgatgagtgccccagcagtaagggaaagggacatcttcagcatgttaatttttacttatccactctttgtttggtctatttggtttcttgaattccagcctttcttgcattcccttcttgtttgaagtttccagaggaggtctggggatcaagctttcttgctacttgaagggttgttcaaatatttatctgttgatttgggagtgtgacctcatttctygcttcctgatgtaayaamgagcagaagataacaatattttgattctctgaagttattgctgtaaagtaagtttacttgctattactcygttattgattagcacagtaacatcrtgcagcatgtcccacaccatagcagtgctggatggcagcctactgaaccaggactgcagcagacagacctcaaggcagacttgacactccatccttctcctgctcgcactgtgaaagtacctgtcaatgtctatggattcacatcagtgcaaaggcagcctttgtaagagagcgaagattcttgattctcaagttctygttgttc

SEQ ID NO: 9925 - DNA, 600 bp, Chicken  19866894205878_4
gccccagcagtaagggaaagggacatcttcagcatgttaatttttacttatccactctttgtttggtctatttggtttcttgaattccagcctttcttgcattcccttcttgtttgaagtttccagaggaggtctggggatcaagctttcttgctacttgaagggttgttcaaatatttatctgttgatttgggagtgtgacctcatttctygcttcctgatgtaayaamgagcagaagataacaatattttgattctctgaagttattgctgtaaagtaagtttacttgctattactcygttattgattagcacagtaacatcrtgcagcatgtcccacaccatagcagtgctggatggcagcctactgaaccaggactgcagcagacagacctcaaggcagacttgacactccatccttctcctgctcgcactgtgaaagtacctgtcaatgtctatggattcacatcagtgcaaaggcagcctttgtaagagagcgaagattcttgattctcaagttctygttgttctcggatgctcactgcactgttcctgctccttttttgtctgggatgttcattgtatcagcataagcttctt

SEQ ID NO: 9926 - DNA, 600 bp, Chicken  19866894205878_5
tcttcagcatgttaatttttacttatccactctttgtttggtctatttggtttcttgaattccagcctttcttgcattcccttcttgtttgaagtttccagaggaggtctggggatcaagctttcttgctacttgaagggttgttcaaatatttatctgttgatttgggagtgtgacctcatttctygcttcctgatgtaayaamgagcagaagataacaatattttgattctctgaagttattgctgtaaagtaagtttacttgctattactcygttattgattagcacagtaacatcrtgcagcatgtcccacaccatagcagtgctggatggcagcctactgaaccaggactgcagcagacagacctcaaggcagacttgacactccatccttctcctgctcgcactgtgaaagtacctgtcaatgtctatggattcacatcagtgcaaaggcagcctttgtaagagagcgaagattcttgattctcaagttctygttgttctcggatgctcactgcactgttcctgctccttttttgtctgggatgttcattgtatcagcataagcttcttggggtctttaaaacttacaggataa

SEQ ID NO: 9927 - DNA, 600 bp, Chicken  19866894205878_6
taayaamgagcagaagataacaatattttgattctctgaagttattgctgtaaagtaagtttacttgctattactcygttattgattagcacagtaacatcrtgcagcatgtcccacaccatagcagtgctggatggcagcctactgaaccaggactgcagcagacagacctcaaggcagacttgacactccatccttctcctgctcgcactgtgaaagtacctgtcaatgtctatggattcacatcagtgcaaaggcagcctttgtaagagagcgaagattcttgattctcaagttctygttgttctcggatgctcactgcactgttcctgctccttttttgtctgggatgttcattgtatcagcataagcttcttggggtctttaaaacttacaggataaggagagaatcacgacatcatatgggtgatgggtattctgcactatgcattcaattaaggaaagcacaggggtttttttccatttcttaacagtggtgcttaaaaaatgttctctggaaatgaagtgttacctcaaaatcctgaatagtatggtttatatatttgctgctatttttgtgtttgtttttactcagtttca

SEQ ID NO: 9928 - DNA, 600 bp, Chicken  19866894205883_1
cagcaggtgctaggccctttccagcatgacgactccaggcactggctctaaggcatctacagcagtcctggacacagctgcagccatgtccattcttgcgctgcaccggaggaggttcaccatttgtcaaagtgacacatatcgtgtgagggttgcactgaagcccaacagattaatgtgtttaaagttgatgatgagagcggtgacgtaatggagcaacccatgaagtcatagaataatagaatcatagagtggcttgagttggaagggactccatggatcatcaagttccaacctccstgccacaggcagggctgccaacctccagacctggtattagatcaggttgcccagggccccatccaacctagaatatccaattgtgtaatcagcttaggcatccaactcccactgattgttgaagttgtgtgccctaccatagctgtttaaaggtcatgaataaagcttaaagacaagaggcttcttgctggcattgacgaattggagtaattggctgtcatgacacagcagcagcaatgcacagggaaactgtcagtgggaaggtgtcctggttgcagttaagcacagcttttggggcca

SEQ ID NO: 9929 - DNA, 600 bp, Chicken  19866894205892_1
accagctcttgaatcattttgtggatttacctaagcccactttcagctaagttaatgtgtttgggtttgtgttgcagtattcagttaggtacttcagctcacctgtgaaacagtaactcccagtggggcagaccagacggaaccttctatatatcaattctttgtgtctgatggtgctcgagactgcgcgttctggttggtcaggtttctggagtgccgatggcagcgaatctttactgtcccgcgaggagcttttacccagacagtgctgctaggaccatgctatgctgagcacatttyggcatactgtattcaatctctgcttgtaatgtataattaaacgtctcagaagacttctgcaagagttgaaaagtccatttaagacaacaatcggtactgcttattaaaattgggaagcagaagcacactgctgtgtttttggtcacattgctaatagtctttgctcccttatgcttcctcaaagtagttctcgagtaattctgtctctttttccagcccctgtgcatggacagttactcacagagtgcagtgtgttccactggaggtcagtgtgcaccagtgcaggctcagcatactgcc

SEQ ID NO: 9930 - DNA, 600 bp, Chicken  19866894205892_2
attccatctccttcacttgtgcctagaatgcctggaaattacaggcatagttcatccaaatgccctggctggccgtccagcttgcaagctgatggaaaaagctaggcagcacctcacattcgacaccttctcactttgtgattaaagctttcatttagttttgtctctctccatagttagcaaaggcctcaacgtgtgtgacagcacacattatcccatctcctttatcctcaagcaagctgatacgagtgagtgaatcagaccccgagcagtaggcttgcctgaaatggtgcctgtcaraactagcttgtttttaagtttgtcttcccaccttccctcaagaaagaaatatctgcttgtcacttcctactgttcgaaaccaatatcaactttcattcccaatgctttgcccctcaggagagccgcctctccyctcagccaccccgagggcttggcttggggtgcaggcrgccgctcaaccaccgtgaccaatggagtacacgttcaatctttgtgctttctctgttcttgtatcattaggctttagcttggcccggaaaccatttggagcaacgcatgtctggagcagcattatcagcg

SEQ ID NO: 9931 - DNA, 600 bp, Chicken  19866894205892_3
ctttgtgattaaagctttcatttagttttgtctctctccatagttagcaaaggcctcaacgtgtgtgacagcacacattatcccatctcctttatcctcaagcaagctgatacgagtgagtgaatcagaccccgagcagtaggcttgcctgaaatggtgcctgtcaraactagcttgtttttaagtttgtcttcccaccttccctcaagaaagaaatatctgcttgtcacttcctactgttcgaaaccaatatcaactttcattcccaatgctttgcccctcaggagagccgcctctccyctcagccaccccgagggcttggcttggggtgcaggcrgccgctcaaccaccgtgaccaatggagtacacgttcaatctttgtgctttctctgttcttgtatcattaggctttagcttggcccggaaaccatttggagcaacgcatgtctggagcagcattatcagcgcacttcagactcaagtggaagtgaaaaagcgtcgtcagaacctgaagtgctaccatgactgttttattggctcagatgcagtggatgtcgtgttttctcatcttctacggaacaagtattttggggatgttaa

SEQ ID NO: 9932 - DNA, 600 bp, Chicken  19866894205892_4
ccatagttagcaaaggcctcaacgtgtgtgacagcacacattatcccatctcctttatcctcaagcaagctgatacgagtgagtgaatcagaccccgagcagtaggcttgcctgaaatggtgcctgtcaraactagcttgtttttaagtttgtcttcccaccttccctcaagaaagaaatatctgcttgtcacttcctactgttcgaaaccaatatcaactttcattcccaatgctttgcccctcaggagagccgcctctccyctcagccaccccgagggcttggcttggggtgcaggcrgccgctcaaccaccgtgaccaatggagtacacgttcaatctttgtgctttctctgttcttgtatcattaggctttagcttggcccggaaaccatttggagcaacgcatgtctggagcagcattatcagcgcacttcagactcaagtggaagtgaaaaagcgtcgtcagaacctgaagtgctaccatgactgttttattggctcagatgcagtggatgtcgtgttttctcatcttctacggaacaagtattttggggatgttaatatttcctacgctaaaatagtgcgagtgtgtccagcg

SEQ ID NO: 9933 - DNA, 600 bp, Chicken  19866894205898_1
gctctgccatattctcacaacatgaaatactcagttgaggaaagaaaggaaccaaccagaacagagggcatagccttcaccacctggcaacttgctccctttgtctgggaatgatgtctaagcccaagttaaaagatcaatgaactgcaaaagatgtctcagtctgcctgggaatctgaagaacgattggaatttggttttgcttggatttcaatttactctgcccacattacagttctgtagcatactctcaacctaaaaatatttgttctgttgccagtgtcctattactgtaaaaarggaattaacgatattttgaacctgatgggtaagtgacaaaaacatatgacatgaagtgggggtgtggtggcagtgggagaggggataactgcgggaagagttatttcctaaataacccagtaagccaatattttaatactcgctgtaaagcatgatcacgctgctaatgaagcaataaatcctcctttgcattggtgcttcagggaggggggtcagaaggtggagaaagctccctttcctctttcattacaagaggcactgcaaaatgctttcatcaagctctgtaatgtcctagaagga

SEQ ID NO: 9934 - DNA, 600 bp, Chicken  19866894205901_1
tgacaagctttaagtgttttctcctcctgtctgtccccgcgtgctgtagtaccagcaggacctggtggtgctgcaggacaagttgcgcatctccaacaagaagctggaggagtatgagacacgcttcaagtgccaggaggagacaacgcagaaactgatgctggagtaccaggccaggctggaggagagcgaggagcggctgcggagacagcaggaggataaggagatccagatgaagggcatcatcagcaggtacagggcagctgggggaggcagcagggctggcattagtgctgaccrcgcwgttcagtcctgctagtttcaccttacccgagctgagccacgtctctgcttttaatcagcattcacaaaggagtcttccttccctggccttaatcacttaagctcttgggcaatgtgctctagggttgtctagacaaaattaacagccagaaaaatgatgtgttgaaccattggtttgtaacagcaggtggtggcaatgcccatgtcccttttctgtttgaacacacagctgcttgttgtgggagcatctcagtgtgcctcagtgttgcacgctcagctgagggctcagacctcatc

SEQ ID NO: 9935 - DNA, 600 bp, Chicken  19866894205901_2
aagctttaagtgttttctcctcctgtctgtccccgcgtgctgtagtaccagcaggacctggtggtgctgcaggacaagttgcgcatctccaacaagaagctggaggagtatgagacacgcttcaagtgccaggaggagacaacgcagaaactgatgctggagtaccaggccaggctggaggagagcgaggagcggctgcggagacagcaggaggataaggagatccagatgaagggcatcatcagcaggtacagggcagctgggggaggcagcagggctggcattagtgctgaccrcgcwgttcagtcctgctagtttcaccttacccgagctgagccacgtctctgcttttaatcagcattcacaaaggagtcttccttccctggccttaatcacttaagctcttgggcaatgtgctctagggttgtctagacaaaattaacagccagaaaaatgatgtgttgaaccattggtttgtaacagcaggtggtggcaatgcccatgtcccttttctgtttgaacacacagctgcttgttgtgggagcatctcagtgtgcctcagtgttgcacgctcagctgagggctcagacctcatctgga

SEQ ID NO: 9936 - DNA, 475 bp, Chicken  19866894205901_3
accttacccgagctgagccacgtctctgcttttaatcagcattcacaaaggagtcttccttccctggccttaatcacttaagctcttgggcaatgtgctctagggttgtctagacaaaattaacagccagaaaaatgatgtgttgaaccattggtttgtaacagcaggtggtggcaatgcccatgtcccttttctgtttgaacacacagctgcttgttgtgggagcatctcagtgtgcctcagtgttgcacgctcagctgagggctcagacctcatctggatggcaggggctgcagaccrggtctctgccatttcacacctcctcctacatgttgcagaggtgcttatcagcctctccttcctcagtgttgaggaagcatccaactaaaaatgttcctgccctttccttgagggcctttagagtactttttgttcttctcataaagcatgcttttcacaaagccagcctgttgca

SEQ ID NO: 9937 - DNA, 600 bp, Chicken  19866894205903_1
tcttcagttgtacagacaggcacgggtggtaaacagagccagggcagctttatttctcccagggggccatgtgaagtgttagtggtgaattgcaagagcaaaccagggctgcctggagatctgatcttgtgtggcttaatgtcctctggctcatgaggctattttatttattttttaatgaacatcttcttgttcctcttgattggaaagcttgttttatgtgactttcctttggaatctttggctctgtaatataggccagaagactgcatggaagaatttacttttctggattgcagrctttggtagcagactctgatccttaaagaaggcaggtcttgctggaatactggggacgaggacaactggtgaaaatcctgtcaggaaagggggataaactgaggaaaaacaaaatgaaaaaatacaacttatgtgaagagatgcagggaatggccacagcagcacagcactgacactgtgatccaggcttaasatcctcagtatctgcaggcactgagctgtgctccatgccatgtgccagcaccgagctgggagatgtgtggcagcgcctgagcttgagctggaaatgctgcttgctcc

SEQ ID NO: 9938 - DNA, 600 bp, Chicken  19866894205903_2
tcctcttgattggaaagcttgttttatgtgactttcctttggaatctttggctctgtaatataggccagaagactgcatggaagaatttacttttctggattgcagrctttggtagcagactctgatccttaaagaaggcaggtcttgctggaatactggggacgaggacaactggtgaaaatcctgtcaggaaagggggataaactgaggaaaaacaaaatgaaaaaatacaacttatgtgaagagatgcagggaatggccacagcagcacagcactgacactgtgatccaggcttaasatcctcagtatctgcaggcactgagctgtgctccatgccatgtgccagcaccgagctgggagatgtgtggcagcgcctgagcttgagctggaaatgctgcttgctcctgccaggctgtggaaagaggagtgagatagcaggggctgcaggctcagcctcatgagtcacttcgcttcgtgtgcggggctgcctgagcactccttttcaaggtgaagtcagacactgatgctggtaagctaacctgtctgactttgccttgaaacaaactatggatatgattacactagcaagttggcttgc

SEQ ID NO: 9939 - DNA, 600 bp, Chicken  19866894205903_3
actgatgctggtaagctaacctgtctgactttgccttgaaacaaactatggatatgattacactagcaagttggcttgcagccagccctgagtatctaacacatcctctggagaccttctcctgtgtccccatgctggttcgggtctcggcagtctcacaacaagagaactgaactctccaaagaaacaaaaccaggagtcctgctccaggagcactccccatcgatgatgtactctcctataaaagatgttgatttcaagactcagctgtaatcaagtgagcagttcccatccacccaygcacaaaaccaattaagagccccacaccagcttggtgagcttraaacactcctggcagttcattctcaagtgagccgtccctcacttcaacaagatgtgagcaagcacttctcagctttctgctgcagctgagaggcccttcacataagatagtttccagcacttgtactgaatatcrtacctgactgtaaccaagtgcctgcgcttggtgtttttaatgtgtgctagtctgtctgcaggttcctgggctgagtgctcagttatgttccaaccagctacagtcacagatgtacagaggag

SEQ ID NO: 9940 - DNA, 600 bp, Chicken  19866894205903_4
aactatggatatgattacactagcaagttggcttgcagccagccctgagtatctaacacatcctctggagaccttctcctgtgtccccatgctggttcgggtctcggcagtctcacaacaagagaactgaactctccaaagaaacaaaaccaggagtcctgctccaggagcactccccatcgatgatgtactctcctataaaagatgttgatttcaagactcagctgtaatcaagtgagcagttcccatccacccaygcacaaaaccaattaagagccccacaccagcttggtgagcttraaacactcctggcagttcattctcaagtgagccgtccctcacttcaacaagatgtgagcaagcacttctcagctttctgctgcagctgagaggcccttcacataagatagtttccagcacttgtactgaatatcrtacctgactgtaaccaagtgcctgcgcttggtgtttttaatgtgtgctagtctgtctgcaggttcctgggctgagtgctcagttatgttccaaccagctacagtcacagatgtacagaggagcgtggagaataggagaaatgcaggagtgagaagacagggtttg

SEQ ID NO: 9941 - DNA, 600 bp, Chicken  19866894205903_5
ccaaagaaacaaaaccaggagtcctgctccaggagcactccccatcgatgatgtactctcctataaaagatgttgatttcaagactcagctgtaatcaagtgagcagttcccatccacccaygcacaaaaccaattaagagccccacaccagcttggtgagcttraaacactcctggcagttcattctcaagtgagccgtccctcacttcaacaagatgtgagcaagcacttctcagctttctgctgcagctgagaggcccttcacataagatagtttccagcacttgtactgaatatcrtacctgactgtaaccaagtgcctgcgcttggtgtttttaatgtgtgctagtctgtctgcaggttcctgggctgagtgctcagttatgttccaaccagctacagtcacagatgtacagaggagcgtggagaataggagaaatgcaggagtgagaagacagggtttgaaaaaaaaaatgtagattgaacaggtgaaatggcagcctgtgagagaagatttgggaggtataatctttagcactgtcaccataggaaaccatgtacctgtgagtatctcctttctcatatcagttactgcatcc

SEQ ID NO: 9942 - DNA, 600 bp, Chicken  19866894205904_1
tattccaaaaagtactaataaaggattttttttcgttgcaaatactttgcaaataataaaaattacttgtatgaatgatgaggtaaaccaaataccatctaaagtactttgcggttttattcaattggatgtttgtaaatacttcttgcaaagggtttctttaccctgtatttgcttagcattaatcctcagaaaaaaaaagaaaaaaaaaaaaaagaattctgtgtggtcagtgaagacatccaatagaaaactgacctgcaaattacttctttcagaatgtgatttcctcatataacrtatttctttaaacttatttttcataaagtcataaaagcccattatgcaatctgttcatacagccataccactttgtctcctttgtttctacgttcttccatgttgtcgtttcatctaattccatttttttctgtccattttgtcctcatgttttttatcatgctactagttgaatycataatatcaactttttatttgtatgctttttctacatcttagctcagcagactatctaatatgtattgaaatatataatttctcagtatttttcagcacagattcttttttagtgctcagagt

SEQ ID NO: 9943 - DNA, 600 bp, Chicken  19866894205904_2
tagcattaatcctcagaaaaaaaaagaaaaaaaaaaaaaagaattctgtgtggtcagtgaagacatccaatagaaaactgacctgcaaattacttctttcagaatgtgatttcctcatataacrtatttctttaaacttatttttcataaagtcataaaagcccattatgcaatctgttcatacagccataccactttgtctcctttgtttctacgttcttccatgttgtcgtttcatctaattccatttttttctgtccattttgtcctcatgttttttatcatgctactagttgaatycataatatcaactttttatttgtatgctttttctacatcttagctcagcagactatctaatatgtattgaaatatataatttctcagtatttttcagcacagattcttttttagtgctcagagtacactaaaagatgtgggcgagcaacagctctgctcggacatttaacgtgctgtctggtaacagctatggcaccctccacaccartcactcacagaacttttagtcttgttcagcagtcgttctttgatgcttctggaatgcaaaggattcatttctagtccatgcaagatatattg

SEQ ID NO: 9944 - DNA, 600 bp, Chicken  19866894205904_3
tttctacgttcttccatgttgtcgtttcatctaattccatttttttctgtccattttgtcctcatgttttttatcatgctactagttgaatycataatatcaactttttatttgtatgctttttctacatcttagctcagcagactatctaatatgtattgaaatatataatttctcagtatttttcagcacagattcttttttagtgctcagagtacactaaaagatgtgggcgagcaacagctctgctcggacatttaacgtgctgtctggtaacagctatggcaccctccacaccartcactcacagaacttttagtcttgttcagcagtcgttctttgatgcttctggaatgcaaaggattcatttctagtccatgcaagatatattgcagagtatatagatgtacggaagttggagcttagctgttttctgggactgccaaagtttcactgtaaacacaacttcaaacagagctgctttcttgagacttgtgcttattctgaaattcacagcttgttttcattgtgaatatacttgtgggaaaagtatgttaaagcagataatttttgccattgcccagaaaaaattgctgtgta

SEQ ID NO: 9945 - DNA, 599 bp, Chicken  19866894205905_1
  misc_feature (1)..(146): n is any nucleotide
nnnnnnnnnnnnnnnnnnnnnnnnnnnnnnnnnnnnnnnnnnnnnnnnnnnnnnnnnnnnnnnnnnnnnnnnnnnnnnnnnnnnnnnnnnnnnnnnnnnnnnnnnnnnnnnnnnnnnnnnnnnnnnnnnnnnnnnnnnnnnnnnnncctaaattcacataattgcctctcccattttcataatgttctgcaagatcactggcaagcacaaaggagttgagggacccactcaaacacatttaacctacgtacaaagagctaagggagctattacagtgctgttatccaaaaaaaataaaarcacatgcaaaatcaattaccagttctgacttcttgagcctctggatccagcggatatagcttacagactcttgtatcacatgcttatacgacagccctgagagtacgtattttagtcatggaaaaaacaaaactgtgatttccatttcagttgttttcaaaacagactgaaactttatctmcttttagtctacatttccttccttgtggtcaccagatcagcaagatctctagaagataaactcttaaaatatcttttctagaggattcccaacctgcaatacaatgagaaactgcact

SEQ ID NO: 9946 - DNA, 600 bp, Chicken  19866894205905_2
atgttctgcaagatcactggcaagcacaaaggagttgagggacccactcaaacacatttaacctacgtacaaagagctaagggagctattacagtgctgttatccaaaaaaaataaaarcacatgcaaaatcaattaccagttctgacttcttgagcctctggatccagcggatatagcttacagactcttgtatcacatgcttatacgacagccctgagagtacgtattttagtcatggaaaaaacaaaactgtgatttccatttcagttgttttcaaaacagactgaaactttatctmcttttagtctacatttccttccttgtggtcaccagatcagcaagatctctagaagataaactcttaaaatatcttttctagaggattcccaacctgcaatacaatgagaaactgcactgcttttcacaagcaagttttctgacrtaggcctgaaaaacatttcctctgtattatcctttaagcacgaggaacacgctcccttggtgtacaactgaagttgccaccaactagtgaataggtctaaactcttaagagaagaaatcctccatgagcctactgaaacataactaaccagtcaca

SEQ ID NO: 9947 - DNA, 600 bp, Chicken  19866894205905_3
tgacttcttgagcctctggatccagcggatatagcttacagactcttgtatcacatgcttatacgacagccctgagagtacgtattttagtcatggaaaaaacaaaactgtgatttccatttcagttgttttcaaaacagactgaaactttatctmcttttagtctacatttccttccttgtggtcaccagatcagcaagatctctagaagataaactcttaaaatatcttttctagaggattcccaacctgcaatacaatgagaaactgcactgcttttcacaagcaagttttctgacrtaggcctgaaaaacatttcctctgtattatcctttaagcacgaggaacacgctcccttggtgtacaactgaagttgccaccaactagtgaataggtctaaactcttaagagaagaaatcctccatgagcctactgaaacataactaaccagtcacacagcagtattttttgcagaatcagggtactaagagagaatgcacacaacttctaaatgttccaccttaatggaaatgccagtaaacaccactatttgccttcctcaatagccaccaaaagacctttagtgatcacaaatttttt

SEQ ID NO: 9948 - DNA, 600 bp, Chicken  19866894205907_1
cccagatgtttctgttatgcaactgtttccatgtttttttattctatcttcacacagtctggcagtaacactttcatccagccactttttttttaatctctatcctctttatggccaacatacattaaacttcacctctcatgtgaaggtgaccttggcaaaatgtctatttgacaaataaatgtcttaaaacatggctgctggtgcattctgatttgctgtaattgtgattccagttgctgtaattgttccacgtttgtcccattggctctggtttgggagcactgtgatgtgtagagrgtaaagatcaacatagaaggagctaagctgctaaagaggcagctagagmatgtcatttccacatcatctgactaaattttatttacggcttggactgaattcttttttagagtacacatgtttaatcaaaccttcattaataccctcctggcatctttaataggaaacatcctggggaatggagacttgcacctgaatttttattgtttattcatggaatacagaccctacaggaatacccacctgtttatgcattgaatccctctctcttttctcagtggaaatttttcagccaaagtc

SEQ ID NO: 9949 - DNA, 600 bp, Chicken  19866894205907_2
tcacacagtctggcagtaacactttcatccagccactttttttttaatctctatcctctttatggccaacatacattaaacttcacctctcatgtgaaggtgaccttggcaaaatgtctatttgacaaataaatgtcttaaaacatggctgctggtgcattctgatttgctgtaattgtgattccagttgctgtaattgttccacgtttgtcccattggctctggtttgggagcactgtgatgtgtagagrgtaaagatcaacatagaaggagctaagctgctaaagaggcagctagagmatgtcatttccacatcatctgactaaattttatttacggcttggactgaattcttttttagagtacacatgtttaatcaaaccttcattaataccctcctggcatctttaataggaaacatcctggggaatggagacttgcacctgaatttttattgtttattcatggaatacagaccctacaggaatacccacctgtttatgcattgaatccctctctcttttctcagtggaaatttttcagccaaagtctgttaacaggcctctgaaggttaaggagatttaatttaggaacactgga

SEQ ID NO: 9950 - DNA, 600 bp, Chicken  19866894205911_1
aataagaggggttgaaagagcaaaggtttaaataaaagaaatcagaaaaagaagtgaagtccccagccttgagattctgcatccctgaaattcctgctaatgttggctgccaggccatagatcagaaggcagaaagggtaaacactgtgtataaataaatatggtggaaagcaaggtaaatttgtttatgctggagtgggattacttagagatcctaaagtgacttgtgcagcctgtcttctgatcattacaatgtttcctctctcatgttgatagttacatgagatacacactatccaktggaggatgctttatttaccctttaacttacccaaaccccaattttattcagtgtattaaagtccaattagtaatgtatacatttgtatttccttaatataacatctcctttgcccccttctctattcgggatcagaaagctggcccaaaaagaagtagttgagtcttatgtgggcactgtccatatttctgcctttttagtggaaatttctcaagtcagctttctgacattcccgtgctctcagcagtatgggacgtttgcagacatttccttttcgtgtgatgagggtggttcattgc

SEQ ID NO: 9951 - DNA, 600 bp, Chicken  19866894205913_1
tgcagaataaataactatttcaacatctgattcctaaaaatcagctcctgtagccttattaactagagagccagacagtcagaaatgtataaccagtccatagaccaagacagtaatttagatgttttcaattgaacctatgctgggacaaaataaaattataaggttgatgaagatattaagcttggagaagaacaaataatgtgctggcacttaagacataggatttgtctcccacttccactgtcgaggaagggaaatgaaaagatgtttttgccttcctatgtctattgtcattgyatttctttgtcttaatagcttagatttagagatggaacctagatttaaagatggaaccatctcctgcagactccccagtaaagaaaaatgcataatattaaaaacaaaaaaaaagtgtatatattcactttaatatttattaggacacatagtttcagactggggtctgagagccaaattaaatgatactcaaaggacagtgaattacacttatgtatcacttggcagtgggtgctggatacatgtaaagtgtgaggaccagagtcatcgtgaaatgttcacattgggaatgggaatagg

SEQ ID NO: 9952 - DNA, 599 bp, Chicken  19866894205914_1
  misc_feature (1)..(227): n is any nucleotide
nnnnnnnnnnnnnnnnnnnnnnnnnnnnnnnnnnnnnnnnnnnnnnnnnnnnnnnnnnnnnnnnnnnnnnnnnnnnnnnnnnnnnnnnnnnnnnnnnnnnnnnnnnnnnnnnnnnnnnnnnnnnnnnnnnnnnnnnnnnnnnnnnnnnnnnnnnnnnnnnnnnnnnnnnnnnnnnnnnnnnnnnnnnnnnnnnnnnnnnnnnnnnnnnnnnnnnnnnnnnnnnnnnngagctgatttttaggaatcagatgttgaaatagttatttattctgcaaagagaatctaaagatattctttagrcttaagtgcgaagtttaactttcatttaaatcacccatttaaagtggcagatttttgattaaaaaaaagctatattcttttatttgctgacagaatttagtaatgaaggagaagcagtawgcaaaggatcacatgagataagtcttgaaagcattgaaagtgcacaactaacatttaaaaacatcaagccaaacagatcctggagtgtatcccagtgaaggtgaaaaaaatcaaacagtaaaaaaatcaaacaatttacttcaaaatagaaggaaacatatgtagttcagaagggctta

SEQ ID NO: 9953 - DNA, 599 bp, Chicken  19866894205914_2
  misc_feature (1)..(107): n is any nucleotide
nnnnnnnnnnnnnnnnnnnnnnnnnnnnnnnnnnnnnnnnnnnnnnnnnnnnnnnnnnnnnnnnnnnnnnnnnnnnnnnnnnnnnnnnnnnnnnnnnnnnnnnnnnngagctgatttttaggaatcagatgttgaaatagttatttattctgcaaagagaatctaaagatattctttagrcttaagtgcgaagtttaactttcatttaaatcacccatttaaagtggcagatttttgattaaaaaaaagctatattcttttatttgctgacagaatttagtaatgaaggagaagcagtawgcaaaggatcacatgagataagtcttgaaagcattgaaagtgcacaactaacatttaaaaacatcaagccaaacagatcctggagtgtatcccagtgaaggtgaaaaaaatcaaacagtaaaaaaatcaaacaatttacttcaaaatagaaggaaacatatgtagttcagaagggcttatctacagtaaagattatttttagggaaataggctataactagagaataaaataaatatgacctatggggacagcggcaacctccagcttctcaattctgcaaaaatcttccctgactctt

SEQ ID NO: 9954 - DNA, 516 bp, Chicken  19866894205914_3
acatttaaaaacatcaagccaaacagatcctggagtgtatcccagtgaaggtgaaaaaaatcaaacagtaaaaaaatcaaacaatttacttcaaaatagaaggaaacatatgtagttcagaagggcttatctacagtaaagattatttttagggaaataggctataactagagaataaaataaatatgacctatggggacagcggcaacctccagcttctcaattctgcaaaaatcttccctgactcttgaaggtgatacaggatcaataaggtctgtacataaaagcaatctctgtacrcatatcgtgattagataacctaccatcagcacatctgccagcatgtcagtcaggtctaggaattaatactgaagtgtagacaaaccttttatgtacagtaagactccagccctttcttcttctttttttttttttttaaacaacaacaaccaacaaagaacacaggcaaaaaaacagcctgcctgattttgataatcatttccatctgtcttaaaa

SEQ ID NO: 9955 - DNA, 594 bp, Chicken  19866894205921_1
ctttcatctgatagctccatatgctgtgaaatgtccttacaggtgaatacactgctggtattcacagtttggtataaaactatgataagcttagagcaagaccagttccaccagtctgaaacctgaggccagaaacaaatctcaaagtgactgataacaaacaacatcatatattctccagttcccctctagtttttcttgttcctaagtcacaccaagcatcctggctgcgaaggctaaattccagatttaatttccaacttgcagacttaaatcacattagtaatgagtataattctygagatgttgtctcacttttaaggcatttctcccaaacagatacaagtatgactctcagatatacagttctcaaatatgcagtctttctaagtaaaattaagtaagattgctctgttggttaaatatcaaagtctagttcttaggaacagtaacagggggcagtcataacttctcatttattggcaaatgctgagcagtgtagctcatagcatattctcatcagtacaggaatccatcaagttacatattttggaatgtgtttctcctagtcaattgcacttctaagcagaagtt

SEQ ID NO: 9956 - DNA, 599 bp, Chicken  19866894205938_1
  misc_feature (1)..(24): n is any nucleotide
nnnnnnnnnnnnnnnnnnnnnnnnttttgcactgtctgctaaattggtgacataattctgataagctgtgactacagcatctcagtggttgttactgatgccacctgagtgcgtagcagtcccacacatggcagacagtgacctcagttcctttctcttgaccaaacagcagcatgaataattcccacattttaagttggtgaagtttcaattcgtttctacaccagacatacaaaggcagtcagaatctatgcattgtgtggtttttattgtgattgtttaccatatgtaagtgtagtktaagtactcatgtttttgtcaggtggctgcatttgtgtgggacaaagttacttaatctgacttgctcttcagccgtggtttgtttcaatttttcttcttctctttttagaaaaaggtggatcagtttgcaagcattgttcttcttccataccgctttacagatgaaacraataaggtcttggttttcacagaggtcagtaagcctgagttacttatttatatatgtcatgaaccctgcatgctcttgtgtcagaactagttgtgttgtatgtacggtacccggcgctgagaagactctt

SEQ ID NO: 9957 - DNA, 600 bp, Chicken  19866894205938_2
cagcatgaataattcccacattttaagttggtgaagtttcaattcgtttctacaccagacatacaaaggcagtcagaatctatgcattgtgtggtttttattgtgattgtttaccatatgtaagtgtagtktaagtactcatgtttttgtcaggtggctgcatttgtgtgggacaaagttacttaatctgacttgctcttcagccgtggtttgtttcaatttttcttcttctctttttagaaaaaggtggatcagtttgcaagcattgttcttcttccataccgctttacagatgaaacraataaggtcttggttttcacagaggtcagtaagcctgagttacttatttatatatgtcatgaaccctgcatgctcttgtgtcagaactagttgtgttgtatgtacggtacccggcgctgagaagactcttcaaatgctttacggaactcacaagcctgwcaaggatacatcttcaacagtgtcttaatatgttaacaagcatcttgaattttcttagtcgtgttatctttacgtatctggtttattctagcaatgcactcagggagaaaacatctgcataggtgtgactaagggaaaggg

SEQ ID NO: 9958 - DNA, 538 bp, Chicken  19866894205938_3
gcatttgtgtgggacaaagttacttaatctgacttgctcttcagccgtggtttgtttcaatttttcttcttctctttttagaaaaaggtggatcagtttgcaagcattgttcttcttccataccgctttacagatgaaacraataaggtcttggttttcacagaggtcagtaagcctgagttacttatttatatatgtcatgaaccctgcatgctcttgtgtcagaactagttgtgttgtatgtacggtacccggcgctgagaagactcttcaaatgctttacggaactcacaagcctgwcaaggatacatcttcaacagtgtcttaatatgttaacaagcatcttgaattttcttagtcgtgttatctttacgtatctggtttattctagcaatgcactcagggagaaaacatctgcataggtgtgactaagggaaagggatgattaaagtcttctatagagttaaaacttcgaccatcctgtaagaaagatggacagtttggtgcagcagtcatttccatccttactgtcttaagc

SEQ ID NO: 9959 - DNA, 600 bp, Chicken  19866894205941_1
agagcctggcatcccaggacaaccatttgggctgcttgttttaggactgttccaaaaccaggtttggtttgttggagtggttgtttttgaagtggattaaggaaatattaatgttctaccttgggcaacagtgtaacttatgccaataatacccagatatacacaagtcttaactgtaaatcacaaagttataaagaatggctgtctattagcaatttatgtgtattctgtgggattatcttcttgacactgaacaaatttgtggatcaaagtggtacttcactattaactttaaaggasctcaggttatgcctgctctgacaagtagcacagtacaatgggggcagacctacrgagtcatgcaattggtgctagagggacaatatttgcattacacacatttgagagatccactttcaggcaaaatccagttagccccacagaccaaagcgtccactggtcactggagtatattagatgcaattctagaccacatctgtagttcaggttcatctaaagggaaccttggttatacactccaagactgtcccatgaggtaaacaaatgtacttaatccaagctgaaatgttgatgtagaaa

SEQ ID NO: 9960 - DNA, 600 bp, Chicken  19866894205941_2
aaaccaggtttggtttgttggagtggttgtttttgaagtggattaaggaaatattaatgttctaccttgggcaacagtgtaacttatgccaataatacccagatatacacaagtcttaactgtaaatcacaaagttataaagaatggctgtctattagcaatttatgtgtattctgtgggattatcttcttgacactgaacaaatttgtggatcaaagtggtacttcactattaactttaaaggasctcaggttatgcctgctctgacaagtagcacagtacaatgggggcagacctacrgagtcatgcaattggtgctagagggacaatatttgcattacacacatttgagagatccactttcaggcaaaatccagttagccccacagaccaaagcgtccactggtcactggagtatattagatgcaattctagaccacatctgtagttcaggttcatctaaagggaaccttggttatacactccaagactgtcccatgaggtaaacaaatgtacttaatccaagctgaaatgttgatgtagaaaccctcggagcaytatttttccctactgcaaactcttcataaaaatgcagcctgc

SEQ ID NO: 9961 - DNA, 600 bp, Chicken  19866894205941_3
ctgctctgacaagtagcacagtacaatgggggcagacctacrgagtcatgcaattggtgctagagggacaatatttgcattacacacatttgagagatccactttcaggcaaaatccagttagccccacagaccaaagcgtccactggtcactggagtatattagatgcaattctagaccacatctgtagttcaggttcatctaaagggaaccttggttatacactccaagactgtcccatgaggtaaacaaatgtacttaatccaagctgaaatgttgatgtagaaaccctcggagcaytatttttccctactgcaaactcttcataaaaatgcagcctgcttggactttggatgccaattcctgtaagaggcaggaaaagcacagagctcagtggatttctgaacctccagctttgactttcagcacgttccttccacrtgacagaagctctaagatcagctagcaggcagtcaaagggaacgtgcaarcagagagacctgaccaggtttgattgtaggaggtgctggtgattcacaaacacagaacaaattygccaacacaaataggatgtagttaatgtttttggatttagatata

SEQ ID NO: 9962 - DNA, 600 bp, Chicken  19866894205941_4
ccactggtcactggagtatattagatgcaattctagaccacatctgtagttcaggttcatctaaagggaaccttggttatacactccaagactgtcccatgaggtaaacaaatgtacttaatccaagctgaaatgttgatgtagaaaccctcggagcaytatttttccctactgcaaactcttcataaaaatgcagcctgcttggactttggatgccaattcctgtaagaggcaggaaaagcacagagctcagtggatttctgaacctccagctttgactttcagcacgttccttccacrtgacagaagctctaagatcagctagcaggcagtcaaagggaacgtgcaarcagagagacctgaccaggtttgattgtaggaggtgctggtgattcacaaacacagaacaaattygccaacacaaataggatgtagttaatgtttttggatttagatatatctttcagcagtacagttacctcggcaatgccttcacaaagcaaaaaggctgttctacrtgatgctgaagaacagaagggcctcaagctatagttaaacttcagtccaataaggaaaactggacacatgcttcctgtaggg

SEQ ID NO: 9963 - DNA, 600 bp, Chicken  19866894205941_5
tcaggttcatctaaagggaaccttggttatacactccaagactgtcccatgaggtaaacaaatgtacttaatccaagctgaaatgttgatgtagaaaccctcggagcaytatttttccctactgcaaactcttcataaaaatgcagcctgcttggactttggatgccaattcctgtaagaggcaggaaaagcacagagctcagtggatttctgaacctccagctttgactttcagcacgttccttccacrtgacagaagctctaagatcagctagcaggcagtcaaagggaacgtgcaarcagagagacctgaccaggtttgattgtaggaggtgctggtgattcacaaacacagaacaaattygccaacacaaataggatgtagttaatgtttttggatttagatatatctttcagcagtacagttacctcggcaatgccttcacaaagcaaaaaggctgttctacrtgatgctgaagaacagaagggcctcaagctatagttaaacttcagtccaataaggaaaactggacacatgcttcctgtagggaactggaccactgtacctcctaagctcgactataatccagaaaaatcttc

SEQ ID NO: 9964 - DNA, 600 bp, Chicken  19866894205941_6
tacttaatccaagctgaaatgttgatgtagaaaccctcggagcaytatttttccctactgcaaactcttcataaaaatgcagcctgcttggactttggatgccaattcctgtaagaggcaggaaaagcacagagctcagtggatttctgaacctccagctttgactttcagcacgttccttccacrtgacagaagctctaagatcagctagcaggcagtcaaagggaacgtgcaarcagagagacctgaccaggtttgattgtaggaggtgctggtgattcacaaacacagaacaaattygccaacacaaataggatgtagttaatgtttttggatttagatatatctttcagcagtacagttacctcggcaatgccttcacaaagcaaaaaggctgttctacrtgatgctgaagaacagaagggcctcaagctatagttaaacttcagtccaataaggaaaactggacacatgcttcctgtagggaactggaccactgtacctcctaagctcgactataatccagaaaaatcttccctgagggaaacttttcctctttactgctctttgctctgaagcatttcccctgagagctgctca

SEQ ID NO: 9965 - DNA, 600 bp, Chicken  19866894205941_7
attcctgtaagaggcaggaaaagcacagagctcagtggatttctgaacctccagctttgactttcagcacgttccttccacrtgacagaagctctaagatcagctagcaggcagtcaaagggaacgtgcaarcagagagacctgaccaggtttgattgtaggaggtgctggtgattcacaaacacagaacaaattygccaacacaaataggatgtagttaatgtttttggatttagatatatctttcagcagtacagttacctcggcaatgccttcacaaagcaaaaaggctgttctacrtgatgctgaagaacagaagggcctcaagctatagttaaacttcagtccaataaggaaaactggacacatgcttcctgtagggaactggaccactgtacctcctaagctcgactataatccagaaaaatcttccctgagggaaacttttcctctttactgctctttgctctgaagcatttcccctgagagctgctcagtgcaaagctttaagtcagctttcaatttaaagggctcccagtgacagaacctggttcaggcagacctcgtgcagggcaaagccactccagttaaaccactggc

SEQ ID NO: 9966 - DNA, 600 bp, Chicken  19866894205947_1
gcctattattggttcaatagctcctgaaaaacttgcatatagcattctttctgtacttgcgtgatcattcatgggatccaccttgtagaaattttgtgatattcctgtgctgtagccaccatttccaaggcattgtaaatggtattcagctctgtacacagttccctggtcacattccattcatccgcatggattatgctcttcattttctggtgtgacaactgtgcatggctgtctggaaagtggtctttcacatcactgtcaccactgctgaaatgcaccacccaccacctcactgtrctcacatccaatgtttggtcttcataaacattcaacaagtgttgatgaatgtcaatgagkgctgttttttcctgcatggaggaattcagtgacatacctttgcttcatatgcactcccatgtcagacaccattttgtcatattgctcctttgctgtcatctgtcacacagcaacaaaatgtaacagaatattgttggaaaggttcaacctttactgccataccaccaacatccacttctcaccacaatggccaacaaaataaaataggaggcattactttcagagcagccttcatgttat

SEQ ID NO: 9967 - DNA, 600 bp, Chicken  19866894205947_2
gtgatcattcatgggatccaccttgtagaaattttgtgatattcctgtgctgtagccaccatttccaaggcattgtaaatggtattcagctctgtacacagttccctggtcacattccattcatccgcatggattatgctcttcattttctggtgtgacaactgtgcatggctgtctggaaagtggtctttcacatcactgtcaccactgctgaaatgcaccacccaccacctcactgtrctcacatccaatgtttggtcttcataaacattcaacaagtgttgatgaatgtcaatgagkgctgttttttcctgcatggaggaattcagtgacatacctttgcttcatatgcactcccatgtcagacaccattttgtcatattgctcctttgctgtcatctgtcacacagcaacaaaatgtaacagaatattgttggaaaggttcaacctttactgccataccaccaacatccacttctcaccacaatggccaacaaaataaaataggaggcattactttcagagcagccttcatgttatatagattcttatagacccactttgtctttatcagtgtatgatggtataaattggtattga

SEQ ID NO: 9968 - DNA, 600 bp, Chicken  19866894205947_3
tttgctgtcatctgtcacacagcaacaaaatgtaacagaatattgttggaaaggttcaacctttactgccataccaccaacatccacttctcaccacaatggccaacaaaataaaataggaggcattactttcagagcagccttcatgttatatagattcttatagacccactttgtctttatcagtgtatgatggtataaattggtattgataaaatacaatctaacacttgatgtacaaatatatttttcacagaatcaacaaacaatttcaatagggtgaaattcagacttaattcyctaatactttgagaactatgggtagctaatacttgcatgtttctacctatgtttgaattttaattaaacatgaatgtgtctgtaaaatggtgtggaacttcatctgacattccaaaacaattctaaactccaaaatatcaggttaaatgtctcaagtagttcaaaggttctctaagtagagaacttcatttctttgtaggaccattttggtaatagggacaccttgtttaaatggcagacagactaaagtgatgaaattctatttcacataacttgtagctgtctcaaattcttggattc

SEQ ID NO: 9969 - DNA, 600 bp, Chicken  19866894205947_4
tgtggaacttcatctgacattccaaaacaattctaaactccaaaatatcaggttaaatgtctcaagtagttcaaaggttctctaagtagagaacttcatttctttgtaggaccattttggtaatagggacaccttgtttaaatggcagacagactaaagtgatgaaattctatttcacataacttgtagctgtctcaaattcttggattccttgttccagttcagccatttcagccctagcaccttagttcaaatgtttatctgaatacagcatgtctgcggaagagtcaattctgaagsaccagtttaagccccccctcacaagcctttatggttctcatcaaaacaactaaaggcccaaaagaagtcacacagttaagtaatctctttggagggccaagaaagagcttgtacctaagaagttgcctaaaaagagatctgtcataacaaaacatggatgagcttcacagagtataaggtcataaggaaccaagcagagagtatgccctgtgtcattctctggaagagaaattacaaaatagcttatgtacatgggaaggagatgctcctcatacttatgccttctggaatatggcagaa

SEQ ID NO: 9970 - DNA, 599 bp, Chicken  19866894205949_1
  misc_feature (1)..(112): n is any nucleotide
nnnnnnnnnnnnnnnnnnnnnnnnnnnnnnnnnnnnnnnnnnnnnnnnnnnnnnnnnnnnnnnnnnnnnnnnnnnnnnnnnnnnnnnnnnnnnnnnnnnnnnnnnnnnnnnnctgcagaggaacaaatgctgatgtgttgggggcccatccgtgcgggtcggggctgtgcacagcagtgatgggcatcatctctgctgccaccactgagtggagggggataccaaccaggtgagcgggacgtgctgcccagccctggggacggagcacactattgccacgagttagccaagaaaaatggyaccggkgatggagrgggcagagctgccctcaaagcagaactgaaacgttttgaaaytgctgggaaaaagctgatgtgagagagagggtgtggggagcgcctgagtcagagggtgctgcagaggagggtggaaatctccactgggggaagaataacggcaccatggctccctccctcctgctgtcggtgtgcagcagtttgcagcgggctgctccccgtgccgggagcacttgtttctgcacagctgagtggggcggaggggagcagataaggtgctgccaggcaggggaagcaaggagc

SEQ ID NO: 9971 - DNA, 599 bp, Chicken  19866894205949_2
  misc_feature (1)..(106): n is any nucleotide
nnnnnnnnnnnnnnnnnnnnnnnnnnnnnnnnnnnnnnnnnnnnnnnnnnnnnnnnnnnnnnnnnnnnnnnnnnnnnnnnnnnnnnnnnnnnnnnnnnnnnnnnnnctgcagaggaacaaatgctgatgtgttgggggcccatccgtgcgggtcggggctgtgcacagcagtgatgggcatcatctctgctgccaccactgagtggagggggataccaaccaggtgagcgggacgtgctgcccagccctggggacggagcacactattgccacgagttagccaagaaaaatggyaccggkgatggagrgggcagagctgccctcaaagcagaactgaaacgttttgaaaytgctgggaaaaagctgatgtgagagagagggtgtggggagcgcctgagtcagagggtgctgcagaggagggtggaaatctccactgggggaagaataacggcaccatggctccctccctcctgctgtcggtgtgcagcagtttgcagcgggctgctccccgtgccgggagcacttgtttctgcacagctgagtggggcggaggggagcagataaggtgctgccaggcaggggaagcaaggagccggctg

SEQ ID NO: 9972 - DNA, 599 bp, Chicken  19866894205949_3
  misc_feature (1)..(98): n is any nucleotide
nnnnnnnnnnnnnnnnnnnnnnnnnnnnnnnnnnnnnnnnnnnnnnnnnnnnnnnnnnnnnnnnnnnnnnnnnnnnnnnnnnnnnnnnnnnnnnnnnnctgcagaggaacaaatgctgatgtgttgggggcccatccgtgcgggtcggggctgtgcacagcagtgatgggcatcatctctgctgccaccactgagtggagggggataccaaccaggtgagcgggacgtgctgcccagccctggggacggagcacactattgccacgagttagccaagaaaaatggyaccggkgatggagrgggcagagctgccctcaaagcagaactgaaacgttttgaaaytgctgggaaaaagctgatgtgagagagagggtgtggggagcgcctgagtcagagggtgctgcagaggagggtggaaatctccactgggggaagaataacggcaccatggctccctccctcctgctgtcggtgtgcagcagtttgcagcgggctgctccccgtgccgggagcacttgtttctgcacagctgagtggggcggaggggagcagataaggtgctgccaggcaggggaagcaaggagccggctgcatgtttc

SEQ ID NO: 9973 - DNA, 599 bp, Chicken  19866894205949_4
  misc_feature (1)..(56): n is any nucleotide
nnnnnnnnnnnnnnnnnnnnnnnnnnnnnnnnnnnnnnnnnnnnnnnnnnnnnnnnctgcagaggaacaaatgctgatgtgttgggggcccatccgtgcgggtcggggctgtgcacagcagtgatgggcatcatctctgctgccaccactgagtggagggggataccaaccaggtgagcgggacgtgctgcccagccctggggacggagcacactattgccacgagttagccaagaaaaatggyaccggkgatggagrgggcagagctgccctcaaagcagaactgaaacgttttgaaaytgctgggaaaaagctgatgtgagagagagggtgtggggagcgcctgagtcagagggtgctgcagaggagggtggaaatctccactgggggaagaataacggcaccatggctccctccctcctgctgtcggtgtgcagcagtttgcagcgggctgctccccgtgccgggagcacttgtttctgcacagctgagtggggcggaggggagcagataaggtgctgccaggcaggggaagcaaggagccggctgcatgtttcttacagcacgtgggccctcagcctcgcagcctgcctgcagga

SEQ ID NO: 9974 - DNA, 599 bp, Chicken  19866894205949_5
  misc_feature (1)..(51): n is any nucleotide
nnnnnnnnnnnnnnnnnnnnnnnnnnnnnnnnnnnnnnnnnnnnnnnnnnnctgcagaggaacaaatgctgatgtgttgggggcccatccgtgcgggtcggggctgtgcacagcagtgatgggcatcatctctgctgccaccactgagtggagggggataccaaccaggtgagcgggacgtgctgcccagccctggggacggagcacactattgccacgagttagccaagaaaaatggyaccggkgatggagrgggcagagctgccctcaaagcagaactgaaacgttttgaaaytgctyggaaaaagctgatgtgagagagagggtgtggggagcgcctgagtcagagggtgctgcagaggagggtggaaatctccactgggggaagaataacggcaccatggctccctccctcctgctgtcggtgtgcagcagtttgcagcgggctgctccccgtgccgggagcacttgtttctgcacagctgagtggggcggaggggagcagataaggtgctgccaggcaggggaagcaaggagccggctgcatgtttcttacagcacgtgggccctcagcctcgcagcctgcctgcaggaaagtc

SEQ ID NO: 9975 - DNA, 599 bp, Chicken  19866894205949_6; identical to SEQ ID NO: 9974
  misc_feature (1)..(51): n is any nucleotide

SEQ ID NO: 9976 - DNA, 599 bp, Chicken  19866894205952_1
  misc_feature (1)..(97): n is any nucleotide
nnnnnnnnnnnnnnnnnnnnnnnnnnnnnnnnnnnnnnnnnnnnnnnnnnnnnnnnnnnnnnnnnnnnnnnnnnnnnnnnnnnnnnnnnnnnnnnnntagtataactcacatacaacaagaaactgaatgtaataaataaataaataaataaataaatttaggaaaaaaaagagaaataaaaggaaaaagtgattgatgcatatatcactagaccttcatgattccaaaactccaaatattagattttgaaaaggtaaaactgacaccacttttcctttcctaatctgcagttatttttyctcaagttagtatttttcacttgagaagatgccagggcatgatttattttctcctggggagaatagaacttctttatgttcactgtcatgatattacaaaacacatacaatgtcaaaagaaaaactttgtgcctttgatctgagaatcagagtagatatactgactataatactaatacatgctgctttttcatttccttttatgttcagagcagacttgcctggatagtgaaaggcagttacagtctcatgagctccctgttttgaccaggagatccaatgaagataaacagctttaa

SEQ ID NO: 9977 - DNA, 599 bp, Chicken  19866894205955_1
  misc_feature (1)..(132): n is any nucleotide
nnnnnnnnnnnnnnnnnnnnnnnnnnnnnnnnnnnnnnnnnnnnnnnnnnnnnnnnnnnnnnnnnnnnnnnnnnnnnnnnnnnnnnnnnnnnnnnnnnnnnnnnnnnnnnnnnnnnnnnnnnnnnnnnnnnncactgacatgtgcagtcaccagttcacacatccattttctactaatccctttctggcaaggagtgcctaactagcaggtaaacacagatcaaattctacaattaccggtcaaggaggtctgcagctggagactcctctctttcaatttgaagtcaatgcaatcttacrttcatagaatcgtagagtcatttgagttggaagggaccttaaaggccatcaattccaattcccctgcagcgaccagggactcctacagctagatcagggtgctcagaggcccacccaccctgaccttgaatgctgaaagctataacccctgcctcttttcctgcaatcctcaggtacaagcatgctgtacctacaacctcctcaaccatcttcaacayagtgaaagaagcattcaaaacataaagcacagactcaaattctgatggcctagaaacaatacaccaaaaggtttgagtaca

SEQ ID NO: 9978 - DNA, 600 bp, Chicken  19866894205955_2
gatcaaattctacaattaccggtcaaggaggtctgcagctggagactcctctctttcaatttgaagtcaatgcaatcttacrttcatagaatcgtagagtcatttgagttggaagggaccttaaaggccatcaattccaattcccctgcagcgaccagggactcctacagctagatcagggtgctcagaggcccacccaccctgaccttgaatgctgaaagctataacccctgcctcttttcctgcaatcctcaggtacaagcatgctgtacctacaacctcctcaaccatcttcaacayagtgaaagaagcattcaaaacataaagcacagactcaaattctgatggcctagaaacaatacaccaaaaggtttgagtacatacttctgcaagtgaacaaatgcagagacttgttcttctgtatagtccatcctaccaggccacaaaaatcaatgtaatttcatggcatatgtggcacacctcacacagagctgctgttccaagtccctttcttcaactttgccagtccttgccagcaaggaagagcccaagatctgtgtgaggactactcatcagtcttcatctagcaccacaacattt

SEQ ID NO: 9979 - DNA, 600 bp, Chicken  19866894205956_1
tgacccccatcgccacttatggggcaggaacagagccctagtgccacttatggggcagaaatggatctcataaccccacttatggggcagagactgacaccaaaagccacttatggggcagagaacgcccccaacgccacttatggggcaggaacagacccctattgccacttatggggcagagaccaacccccagcgacgcttatggggcagaaatagatctcataacccaatttatggggcagaaagcaactcccaacctcacttatggggcagagactgatctccaactgcgcttayggggcagagaacaccccccaaagccacttatggggcaggaatggagctcatgatcctacttatggggcagaaacggacctcataatgcctcttatggggcagagactgacactgaatgccacttatggggcagaaaccgaccctgaactctacttatggggcagaggatgaccccagcgccacttatggggcagaagccaaccccaacaccacttgtggggcagaaacggacctcgtaagcccacttatggggcagagactgacccccatcgccacttatgggggagaaaccacccccca

SEQ ID NO: 9980 - DNA, 599 bp, Chicken  19866894205957_1
  misc_feature (1)..(87): n is any nucleotide
nnnnnnnnnnnnnnnnnnnnnnnnnnnnnnnnnnnnnnnnnnnnnnnnnnnnnnnnnnnnnnnnnnnnnnnnnnnnnnnnnnnnnnngaactgtgaaattcaacctacagcaaaaaacccacagggctcaggtgattgtagattgtctgacacttgctgtcacccttctgcacatttcctgaacgttagtcatcttatctataaagcaggggttaaaaagcagtgccttgaggaccctacatacgaactgctgcatcagagctaggtattacagtgggagttattaaataaaatgtaacwgggtctgccccatttcttaaggaagatttcagctcacctgggaatttagaagaagtaattccagataaatctycaattttctatttctgtaacatgtttttcatcctgtgtttcctctgtgaaagcttgcaagtgaattcccccctcccctcctttttcctgaactataaagtctgatgtctttcagcatgcagaagtcactctgatcccctgggttttttgcacaagaatttggagtgatgaatgattctgcctcacccccagcaatctcagctgtttgtctttggggtttgcaagaa

SEQ ID NO: 9981 - DNA, 599 bp, Chicken  19866894205957_2
  misc_feature (1)..(14): n is any nucleotide
nnnnnnnnnnnnnngaactgtgaaattcaacctacagcaaaaaacccacagggctcaggtgattgtagattgtctgacacttgctgtcacccttctgcacatttcctgaacgttagtcatcttatctataaagcaggggttaaaaagcagtgccttgaggaccctacatacgaactgctgcatcagagctaggtattacagtgggagttattaaataaaatgtaacwgggtctgccccatttcttaaggaagatttcagctcacctgggaatttagaagaagtaattccagataaatctycaattttctatttctgtaacatgtttttcatcctgtgtttcctctgtgaaagcttgcaagtgaattcccccctcccctcctttttcctgaactataaagtctgatgtctttcagcatgcagaagtcactctgatcccctgggttttttgcacaagaatttggagtgatgaatgattctgcctcacccccagcaatctcagctgtttgtctttggggtttgcaagaatgagcaactgaaagagacaatacaaagctggggaaaaaaaatgtatgcttgtataaaataaaaatctaatata

SEQ ID NO: 9982 - DNA, 600 bp, Chicken  19866894205965_1
agggattccaaactttgtcttctgtggtctcccccggctgtgttggcatgtgagcagccagatgctggctttggaggcctttcctcaaacatttcgtgttttatcgtgatgtggtgaagagcaaacctgaagtagtaaggggacatgaaatgcgaacccagggggtaggccagagttctgttttgtggctctgctattgcagatgcaggactcttcattggcccaccttgctctgggtcacctaattgttaccacctaactgttatctgatgactacaggctctgacctcctgcccagaygtaatgacacacagcaagcatagcagcatgttctttctgtttggtgctggctttccagcccatcactcacgtgggagagttctggctgggaagataaaccatcggctgcctggtctcacttgtggtttctctcaatgctaggcagtcaactgggagaacatggccttcatcttcctgaaccgcttcctggacttctcagatgtgcgtatcttctgctgggggagaggttgtggatgccccatccctggaggcacccaaggccaggctggatgtggctctgggcagcctggtctgctggtt

SEQ ID NO: 9983 - DNA, 600 bp, Chicken  19866894205968_1
gaggtaactctgaaacaaaacagaggcaccccttgacaggaaagactcaaaaagcatttcttgaactctccatgcttcaagatgtgttagctttttatttcacttttatattacctaccaggaagtagatgaactttagtagcagaaatggttcttattccatatctggaaccacttttcccttgaacagtaagaactgttgctgctcctctgtgcttacaatctgttttaaacaaaatgagatatccttagctataaaattatatacagcaatcattagagggaaagtgggtaaatccrctatacataaactgtttaacatctcccatccaaaaraacagtgaggtttttagataaggtcttgagaaaaaacttagcctgatgttttatacattttcaaattaaattttatgtcttcatgctcgcccttttcaaattattctttccctcttctggagcatgtaccttgagctaattttggaaggtgtatgagaactattgaatcatggcatgaacctctgattgaccacctgaggcgagcactaagtcagccatgggagcatgggtgaaggcaattcagctgtgtgaccagaaggggtg

SEQ ID NO: 9984 - DNA, 600 bp, Chicken  19866894205968_2
caggaaagactcaaaaagcatttcttgaactctccatgcttcaagatgtgttagctttttatttcacttttatattacctaccaggaagtagatgaactttagtagcagaaatggttcttattccatatctggaaccacttttcccttgaacagtaagaactgttgctgctcctctgtgcttacaatctgttttaaacaaaatgagatatccttagctataaaattatatacagcaatcattagagggaaagtgggtaaatccrctatacataaactgtttaacatctcccatccaaaaraacagtgaggtttttagataaggtcttgagaaaaaacttagcctgatgttttatacattttcaaattaaattttatgtcttcatgctcgcccttttcaaattattctttccctcttctggagcatgtaccttgagctaattttggaaggtgtatgagaactattgaatcatggcatgaacctctgattgaccacctgaggcgagcactaagtcagccatgggagcatgggtgaaggcaattcagctgtgtgaccagaaggggtggagcctgtcttcacatctcctagacctcatttaagg

SEQ ID NO: 9985 - DNA, 600 bp, Chicken  19866894205976_1
aaatacaagcaaaaattcaattttttttttctgcatttgcatggaacttgtatcataaaccactgtttatagttccattttctagaggattctgatggtgtaatattatacaccaaagtctcttcagcctggcctgagctagcctacagtcaaggatgactgtttgtctatcatgggaaaatgttcctactattattcgagaaaagcctagttatgctaacagaaaataacaacagcaacaaacaaacaaacatacccccctcctttccattctccttaattcacctgcaaagaaaaacrgaaaattatgtatagaaaaaatgaaggatgtttttaagaaataatggaattaaggtgtcttgtttcacagtggcatagaataaagtagcaaagatagcatatgcttggcaattgctatctacataactctctgaaacattactaaacaagagtgaagatcacattgctgattttctatttttccttatgtctcattctcatggctaacagctaacaggaaagaactgagagagcagtagcagaattgataaacagttttgaagtgttagcttgtgataatagccatgcagctcactgtaa

SEQ ID NO: 9986 - DNA, 600 bp, Chicken  19866894205977_1
aggtctatgatattctctattacacatgtgcacacagcgcaaaagtcaaattggtacaaatgacaccattgcctttaaggacaatccagcaatgtgatgagggaggtgatgagagcttcagctgcaactgacaagacataggtacatttgatacttctacaacagtatatcagaagcctaaaacacaaaaagggaaggtttttcaaattacaataacaaacaaacaaacaaacaaaagcaaacaaccaacaaatcacaacatcttccaagacagacaaagttgggagataaagggggcaraggggtgtcaaaaaatgaagatagaatagttctggtagaagggaccttcagaaatcaagtccaactgcctgacctcttcaaggctaaccaaaacttgaagtgtattatctaaacgtctcttgaactgaaaggtataggacttcagctacttctctaggaagttcattccagtgttttgccaccctcacagtacagaaatggaactggaagaacaaaatagtcttatcagttgtaaaccacagaacactgcagtccagaaatctatttgtttaccaaaagatctatttgaatagttatacc

SEQ ID NO: 9987 - DNA, 600 bp, Chicken  19866894205978_1
caaaaaaagagcagctgagtacagcaggggaattcatccgctgtttatcagcttggacctcaatgctcacccactcagcactggagtaagtatagagggaggacaatacagccacagaagacagaaacaaaaccaggaaagtaaaatggagggaattcatctctgggggaattgcacagtgaatgctgagttacatcggtttccaatatcttttcagttcataaagactgatcactaccagctttgttctgcggcctctggtgaaaaataaaggatccacttcatccagaaaatactttrgaggtcagaaagtgtttttgtctccccaggggttttcagtgctggcaggaggggcagatttggtttctcaaatataaagaggagagctaacaatgtcctgtctctgagctggtaggcaaagaagagggggaagtcctagtgacccagcagaaacacagaataaaatcaaatggagacatgagcagcttagccaaccttttgcatgcagtggaattaaacatgaaaaggtaatttacatcatctttatgtgagaaaagaatagtgttaccttttttgtgcaaagtgggtagaagggaactg

SEQ ID NO: 9988 - DNA, 600 bp, Chicken  19866894205978_2
tcagcatcttgccagctatcactacgcctttcacagagactgttcgtgccaccagcatattccttaccttgaggggtaaatgacaataacatgcatgtacaatgcatgtggctgttacagggtaagtgtgtgtggcatatcttttcatcatccttaaggaaagatgtgggatttaattttttaagggaaacttccttgagagaaaggagagttgctattaagcttgtttcagcagaccccaccatttgcagagctgttctccttgcctggcagaaatctcatccccaaacatggcccccrccactctcctcttaggaacaggtgtgctccagcatactcagctgtgagcattaagaaacattatagatttggctgaaaactcctctgaaactgtttgttaacagtgagctggattgcagataggttgaattttctgagaaaactctttgctttgtgctttacttcctcccttcacctccttaaattggataactgagacaaacacatcttatttaaaaatattgaatggatatcttatgggaattttatttcccagatggactccctgttccctcatacacaagaaacagctgcctcctc

SEQ ID NO: 9989 - DNA, 599 bp, Chicken  19866894205979_1
  misc_feature (1)..(7): n is any nucleotide
nnnnnnntgtcgggttcctgcatttcctccggagttggaatgctattaatctgaaaagactgaggaaagagacatggaaaacacgcggagcacaggggagatgctgggaacgcagcgggcggatggctggcagctgcctctgccaacctgggcctgatggtgtcagagatgctgcatcacgagctctgccatgcagctccacgccgcagcacctccccagcagctccgctccctgttctgccatgggagcactccctgggctgggtctcatccaagggctccactgcacagcgacactgwggctgagaccaatgccctggctgaacctgcagccccaagtggtttctttaattcagttagccaggaaagtaattgtgcaagggatccaggctctgccctgggcagaggctcccagacagctgccagggggatgccctactgctccataagcactgtgtggctgaagctggcagtgatgggaagaggctgtggagatgctcgaccatcccctctgcaatagggaaggagagcagggatggttacactgcgctggggtccagctggtgcctctccagaccctcatgcaaactcatgataaa

SEQ ID NO: 9990 - DNA, 600 bp, Chicken  19866894205981_1
ttgaaaagaaaaatcacagttgtcctattctaggcagaaatgtggaaagcagttgcagtgttagagtaactgatgttacatggacatccctttgctagatgtacacttccctacatgcctctggctactgtaagaactccagatcttataatccactttatgagatttcagttcacgaaactcacatttctaaagcagactttgaagtgccttgcttttgatgtcatatggaaatgtgttcactcagcctgattgctctagtgctttcctcccagcctgcttcatactttgacccccagsctttaacacacatggcaccaaatgactagtagaacaggggaaagatggctcctcacccagtcaatatttaccacaaactgaaaagaactatttttccctatcgattttgaggttttcaacccaaagcaggaatcaacagcaacttgtgaaacatacagtgtaaacaatgcagttgaaggatggtggtaaactaggtttcttcaaggagaagaagtgaaaacagtgagattttgtaattcagcaaagtgttgtaaagggacggacatgacaggcagtgatgggcaacatagggatagcagg

SEQ ID NO: 9991 - DNA, 599 bp, Chicken  19866894205982_1
  misc_feature (1)..(88): n is any nucleotide
nnnnnnnnnnnnnnnnnnnnnnnnnnnnnnnnnnnnnnnnnnnnnnnnnnnnnnnnnnnnnnnnnnnnnnnnnnnnnnnnnnnnnnnnttttagggtttaatgcatctccagggtaaaccagtgtgctcttttgacccagaagggttgatttttgctgctggagtcaattctgaaatggtgaagctttatgatctccgttcttttgacaaggtgagctacccttaattcatttcttacgctttttagcttgcaagaagtaatgcaaactcagtgctcagaggctgggtttgtttgctccrgcttgctctctggggtgcctctgcttggcacccatggaggttttgcttggtgtgtgtctgatggacagtatgtgctgtcaacagttcctgaaatccaccctcaaacacttgtgggagttgatttccactaacgcttcaacctgttccaatttcatattcagggtttctgttgttttccttgctgcttaatctggaagaacactgggaaaggtggagccaagatcttcagagaggatggaaattccgaagaaaagcataaaattcagatgccagcaacactggctcaggctctctctaac

SEQ ID NO: 9992 - DNA, 600 bp, Chicken  19866894205984_1
gtcaaggacaaatagatttggagaagccttagtgaaaggctgctaacaaaagttggcacatttgaagcagatcgttaaacacaagttcctttgtccctgggcttcttgctattgttcaacaatcagcctgtcacaagcatgcttcataatgcacagaaaggtttctgacctttcttggtgttgccatgtgatcataatgctgcacatggactgcaaggcaattgcataaacatggtgtcttggtggagtctagcccattgaaagcttggtcaaactgaataaagaaacacactggtgcaraagtacgaaacacattgtgtttagcatctccatgttgcatttctttatttcacaaactttccaacgtagtgactcagtatgtaaagattttcatcttctttgcctcttgtctcaagctggatgattatttttatgtctggatttgttgcctttcagacttaactctcacatggtccttagggtctcccagggtgagatcctagtgagaaaacgtcagcctatattttcacagcttcctcagagatttagtaggtaattcccatttgaataaatgggaaagatgtaacctacttgcacgtg

SEQ ID NO: 9993 - DNA, 600 bp, Chicken  19866894205984_2
agtgactcagtatgtaaagattttcatcttctttgcctcttgtctcaagctggatgattatttttatgtctggatttgttgcctttcagacttaactctcacatggtccttagggtctcccagggtgagatcctagtgagaaaacgtcagcctatattttcacagcttcctcagagatttagtaggtaattcccatttgaataaatgggaaagatgtaacctacttgcacgtgcttttatttaataacaaaaatgacctggttctacgcaggttttggtcattgtagagatgttttaatwtttaatagcactagcttcaactcttttcaagcttaaaagttgtcccttcataaaggatgtgaaattttggtccagttgctgtttatcgttttctactatttttctagatcctgtgcaccctttcccctctgcccactctgatatcttcccgtaacacttctgaaaatcctgtttgtactgtggagctttggaaattaggtagggtcagtgccttctattgccttcaaccaaacaccataggtatgctgtggatcagtcagatgtactttattctattgaaatgtattttctgtaatacga

SEQ ID NO: 9994 - DNA, 600 bp, Chicken  19866894205984_3
aagtcctggatcgtatcttggttgcctcacctctctctatgccagtcagtttttctaatgctgtcaccattcttcctatcatatcttccagctgagcaagtctgatgtcaacggtctgcagagaggccttcatgcagtgctcacgctcatttacttcttccagtcgcatggccatattttccacccttaaaaaggggaaaaataaaacaggttaatttctacagagcagtgatattcagccaataggtctttgaaacaagtggaaataaatatgagttaaaattcaaaatccacctacaycacctcatgtgctccaaactctgctaacagaggctcagcaaacaaacggtattgcttgctcaggaagctcgtccagagtgttaactgatcagtctgctgcttactgatattagcatagaggtgtgttttataccagggacaagactggggctattagggaaacattactatgattttctactactgctatagcctttaattaggttgttagaagaacttagagcagatgccacatgatatcactctcagttttgctacaggcagaactattgtagttaactcctaaattaaattaagtca

SEQ ID NO: 9995 - DNA, 599 bp, Chicken  19866894205994_1
  misc_feature (1)..(52): n is any nucleotide
nnnnnnnnnnnnnnnnnnnnnnnnnnnnnnnnnnnnnnnnnnnnnnnnnnnncgtacgaacgagagggaaaaaaaggcccctctgctaattttataggcacatcagaaataaattcctctcccaaggagaacatgggaagggaactccccaggggttatttttacagtgagcccagatatcgggctgcctctggggccgtgcgtgcagcgttggctctttccataagcgctgagtggggaggatggagcagctccctcagcgctgggctcagctgccaggaggggacctgcatgctcagygcttcttctgcagcgcagcacwctgcacggctgatgtggatttgcatcccagyccctgctgcagggctccggctctgcccagccagagatgctgaggtgcraagagccacttgagaggagctttgactgactgcaggtggttgcacagaccccagggcackgtgygttcccaaagctgaacagctctgctgacggcaggctatgaactgccctgatctgatgacacgtgattgcagatgcttgggatcggccctgcagccatcgcaatgggcacgggctttatgccacagaccactggc

SEQ ID NO: 9996 - DNA, 599 bp, Chicken  19866894205994_2
  misc_feature (1)..(30): n is any nucleotide
nnnnnnnnnnnnnnnnnnnnnnnnnnnnnncgtacgaacgagagggaaaaaaaggcccctctgctaattttataggcacatcagaaataaattcctctcccaaggagaacatgggaagggaactccccaggggttatttttacagtgagcccagatatcgggctgcctctggggccgtgcgtgcagcgttggctctttccataagcgctgagtggggaggatggagcagctccctcagcgctgggctcagctgccaggaggggacctgcatgctcagygcttcttctgcagcgcagcacwctgcacggctgatgtggatttgcatcccagyccctgctgcagggctccggctctgcccagccagagatgctgaggtgcraagagccacttgagaggagctttgactgactgcaggtggttgcacagaccccagggcackgtgygttcccaaagctgaacagctctgctgacggcaggctatgaactgccctgatctgatgacacgtgattgcagatgcttgggatcggccctgcagccatcgcaatgggcacgggctttatgccacagaccactggcagcgtgaggccggcaagttcag

SEQ ID NO: 9997 - DNA, 600 bp, Chicken  19866894205994_3
gtacgaacgagagggaaaaaaaggcccctctgctaattttataggcacatcagaaataaattcctctcccaaggagaacatgggaagggaactccccaggggttatttttacagtgagcccagatatcgggctgcctctggggccgtgcgtgcagcgttggctctttccataagcgctgagtggggaggatggagcagctccctcagcgctgggctcagctgccaggaggggacctgcatgctcagygcttcttctgcagcgcagcacwctgcacggctgatgtggatttgcatcccagyccctgctgcagggctccggctctgcccagccagagatgctgaggtgcraagagccacttgagaggagctttgactgactgcaggtggttgcacagaccccagggcackgtgygttcccaaagctgaacagctctgctgacggcaggctatgaactgccctgatctgatgacacgtgattgcagatgcttgggatcggccctgcagccatcgcaatgggcacgggctttatgccacagaccactggcagcgtgaggccggcaagttcaggctcaggagcaaagagatcggcttcacagcac

SEQ ID NO: 9998 - DNA, 600 bp, Chicken  19866894205994_4
atcagaaataaattcctctcccaaggagaacatgggaagggaactccccaggggttatttttacagtgagcccagatatcgggctgcctctggggccgtgcgtgcagcgttggctctttccataagcgctgagtggggaggatggagcagctccctcagcgctgggctcagctgccaggaggggacctgcatgctcagygcttcttctgcagcgcagcacwctgcacggctgatgtggatttgcatcccagyccctgctgcagggctccggctctgcccagccagagatgctgaggtgcraagagccacttgagaggagctttgactgactgcaggtggttgcacagaccccagggcackgtgygttcccaaagctgaacagctctgctgacggcaggctatgaactgccctgatctgatgacacgtgattgcagatgcttgggatcggccctgcagccatcgcaatgggcacgggctttatgccacagaccactggcagcgtgaggccggcaagttcaggctcaggagcaaagagatcggcttcacagcaccaagcagcaattacagctcttatccgaaattccccgatgccaaaagaa

SEQ ID NO: 9999 - DNA, 600 bp, Chicken  19866894205994_5
ttacagtgagcccagatatcgggctgcctctggggccgtgcgtgcagcgttggctctttccataagcgctgagtggggaggatggagcagctccctcagcgctgggctcagctgccaggaggggacctgcatgctcagygcttcttctgcagcgcagcacwctgcacggctgatgtggatttgcatcccagyccctgctgcagggctccggctctgcccagccagagatgctgaggtgcraagagccacttgagaggagctttgactgactgcaggtggttgcacagaccccagggcackgtgygttcccaaagctgaacagctctgctgacggcaggctatgaactgccctgatctgatgacacgtgattgcagatgcttgggatcggccctgcagccatcgcaatgggcacgggctttatgccacagaccactggcagcgtgaggccggcaagttcaggctcaggagcaaagagatcggcttcacagcaccaagcagcaattacagctcttatccgaaattccccgatgccaaaagaaatctttacgttggcttccagcagctctgctcacctygggggcagggacacagcctgcagg

SEQ ID NO: 10000 - DNA, 600 bp, Chicken  19866894205994_6
agtgagcccagatatcgggctgcctctggggccgtgcgtgcagcgttggctctttccataagcgctgagtggggaggatggagcagctccctcagcgctgggctcagctgccaggaggggacctgcatgctcagygcttcttctgcagcgcagcacwctgcacggctgatgtggatttgcatcccagyccctgctgcagggctccggctctgcccagccagagatgctgaggtgcraagagccacttgagaggagctttgactgactgcaggtggttgcacagaccccagggcackgtgygttcccaaagctgaacagctctgctgacggcaggctatgaactgccctgatctgatgacacgtgattgcagatgcttgggatcggccctgcagccatcgcaatgggcacgggctttatgccacagaccactggcagcgtgaggccggcaagttcaggctcaggagcaaagagatcggcttcacagcaccaagcagcaattacagctcttatccgaaattccccgatgccaaaagaaatctttacgttggcttccagcagctctgctcacctygggggcagggacacagcctgcaggcggc

SEQ ID NO: 10001 - DNA, 600 bp, Chicken  19866894205994_7
tggttgcacagaccccagggcackgtgygttcccaaagctgaacagctctgctgacggcaggctatgaactgccctgatctgatgacacgtgattgcagatgcttgggatcggccctgcagccatcgcaatgggcacgggctttatgccacagaccactggcagcgtgaggccggcaagttcaggctcaggagcaaagagatcggcttcacagcaccaagcagcaattacagctcttatccgaaattccccgatgccaaaagaaatctttacgttggcttccagcagctctgctcacctygggggcagggacacagcctgcaggcggcagggcagccccgctctgccgctccccactgcccacaggagcgcatccgcacccgcacacccaccrtgcgtggggcacagcctccatgtgaacacaccccagctctggcagatgtgctcacacactcctatttactctgcagctgaaaaggtgggtcctgtggctgcccggacccttctgggtgggctgtggggtactgtggggtgagggcacggggagctgcgtgcccagcccagtgctgaggggtgagcccagggctgcagccagggccgg

SEQ ID NO: 10002 - DNA, 600 bp, Chicken  19866894205994_8
ttgcagatgcttgggatcggccctgcagccatcgcaatgggcacgggctttatgccacagaccactggcagcgtgaggccggcaagttcaggctcaggagcaaagagatcggcttcacagcaccaagcagcaattacagctcttatccgaaattccccgatgccaaaagaaatctttacgttggcttccagcagctctgctcacctygggggcagggacacagcctgcaggcggcagggcagccccgctctgccgctccccactgcccacaggagcgcatccgcacccgcacacccaccrtgcgtggggcacagcctccatgtgaacacaccccagctctggcagatgtgctcacacactcctatttactctgcagctgaaaaggtgggtcctgtggctgcccggacccttctgggtgggctgtggggtactgtggggtgagggcacggggagctgcgtgcccagcccagtgctgaggggtgagcccagggctgcagccagggccgggggggccgagtcaacgcctcgtcttctggtggcggctcgtgtacagtaacatctaaatatatacttaatggaaagtgtggagggatttatttt

SEQ ID NO: 10003 - DNA, 599 bp, Chicken  19866894206001_1
  misc_feature (1)..(57): n is any nucleotide
nnnnnnnnnnnnnnnnnnnnnnnnnnnnnnnnnnnnnnnnnnnnnnnnnnnnnnnnnaaaacctctgaggaattggggctagctgctgtcctttcagctgattttagccaatcttcaaagcgagaatagtcatccaaaaacctctgccataggcgccaggtttcctcaattctgacagggagatgcagaaacggaagagttttatcacaagcttatcatttttattttctttccaaaattcaatttgtggcaaaagcacttcttccgaatgctgacccaaacttctttaggagctgctgrgcacagacttacttcattcgcctctccattgacatggcacaaatgtttctccaccgtctgtccaaactcctgctagtctgctggatggagtcgcactccgtctcattagcacatgcatctgaatcgtgcagcaggacgtcacaaatattaaagacggactccaccccagctgtgtgctgttctatgtcccgctgcagatcctgtatcaacaaargaagagttttagtggaacgcaacacatgtggcttgacatcagacatccattttcaaaacgctgtagaagatggaggaagagcaat

SEQ ID NO: 10004 - DNA, 600 bp, Chicken  19866894206001_2
atcatttttattttctttccaaaattcaatttgtggcaaaagcacttcttccgaatgctgacccaaacttctttaggagctgctgrgcacagacttacttcattcgcctctccattgacatggcacaaatgtttctccaccgtctgtccaaactcctgctagtctgctggatggagtcgcactccgtctcattagcacatgcatctgaatcgtgcagcaggacgtcacaaatattaaagacggactccaccccagctgtgtgctgttctatgtcccgctgcagatcctgtatcaacaaargaagagttttagtggaacgcaacacatgtggcttgacatcagacatccattttcaaaacgctgtagaagatggaggaagagcaatttgtatgtcagtaagaggttacttggctttaggacgcagacttgcaggaggggctgcgtaggaracagactgacagattaggacagaactgccacggaaaaaaaggaattgtccagatgggtttctcagtgaaagcataatcttttcgtgaacagtatgracaattttaacatgcattcaaaatccaaaccttacacacactgtaaatgcatact

SEQ ID NO: 10005 - DNA, 600 bp, Chicken  19866894206001_3
aaactcctgctagtctgctggatggagtcgcactccgtctcattagcacatgcatctgaatcgtgcagcaggacgtcacaaatattaaagacggactccaccccagctgtgtgctgttctatgtcccgctgcagatcctgtatcaacaaargaagagttttagtggaacgcaacacatgtggcttgacatcagacatccattttcaaaacgctgtagaagatggaggaagagcaatttgtatgtcagtaagaggttacttggctttaggacgcagacttgcaggaggggctgcgtaggaracagactgacagattaggacagaactgccacggaaaaaaaggaattgtccagatgggtttctcagtgaaagcataatcttttcgtgaacagtatgracaattttaacatgcattcaaaatccaaaccttacacacactgtaaatgcatacttattaattctgactgtaccagatgggagtatgtcctgtcagcttatcacagtgtaagccttgatagagaactcattgcactcttcctgtacttcagcgattgcatgatcacagactgatatcacaaactgcagaagcatagaaaaagag

SEQ ID NO: 10006 - DNA, 600 bp, Chicken  19866894206001_4
tccaccccagctgtgtgctgttctatgtcccgctgcagatcctgtatcaacaaargaagagttttagtggaacgcaacacatgtggcttgacatcagacatccattttcaaaacgctgtagaagatggaggaagagcaatttgtatgtcagtaagaggttacttggctttaggacgcagacttgcaggaggggctgcgtaggaracagactgacagattaggacagaactgccacggaaaaaaaggaattgtccagatgggtttctcagtgaaagcataatcttttcgtgaacagtatgracaattttaacatgcattcaaaatccaaaccttacacacactgtaaatgcatacttattaattctgactgtaccagatgggagtatgtcctgtcagcttatcacagtgtaagccttgatagagaactcattgcactcttcctgtacttcagcgattgcatgatcacagactgatatcacaaactgcagaagcatagaaaaagagcagccagcattgcattgcttttcttatttcccttattatcatagaatctatgattctatgatttccccttccagagctcctgttttgacagacgat

SEQ ID NO: 10007 - DNA, 600 bp, Chicken  19866894206005_1
agtcagacctgcagaaatagttcagatgtcaaatatttattctgaaagcccaattcgtaaatctcaaaaataggtgccatttcccccacaggttagctagcaaaatgttactagaagaaatatatggtctgtaggaaaaagagcatggagatctgagaggattctgctaccctattagatttctaagtatttgagtatttaatagactgttgattctatactaccatctctcttctggctctctcttctcagttctcctcattgaaatggcaagaatccccaggtgaattggaaggaaaktccacacrtaaaaataaagttgataaaaaaaccacgtggggtagtatgtatgaaacaatcaaattctgtttgaaatgtaaagttattccaacaaatataaatgacaataaaagaacaatttatctttggataagaagagcagttgtaaaaacattggcttttctcaacagggatttcttccaggtgagctcagtgatccataagtgtatcagtactgaactttttttttttttttttttttggatttaccaagtaattcctgaggctagtatttattatttttagacctacttgattttt

SEQ ID NO: 10008 - DNA, 600 bp, Chicken  19866894206005_2
ctgcagaaatagttcagatgtcaaatatttattctgaaagcccaattcgtaaatctcaaaaataggtgccatttcccccacaggttagctagcaaaatgttactagaagaaatatatggtctgtaggaaaaagagcatggagatctgagaggattctgctaccctattagatttctaagtatttgagtatttaatagactgttgattctatactaccatctctcttctggctctctcttctcagttctcctcattgaaatggcaagaatccccaggtgaattggaaggaaaktccacacrtaaaaataaagttgataaaaaaaccacgtggggtagtatgtatgaaacaatcaaattctgtttgaaatgtaaagttattccaacaaatataaatgacaataaaagaacaatttatctttggataagaagagcagttgtaaaaacattggcttttctcaacagggatttcttccaggtgagctcagtgatccataagtgtatcagtactgaactttttttttttttttttttttggatttaccaagtaattcctgaggctagtatttattatttttagacctacttgatttttagattttt

SEQ ID NO: 10009 - DNA, 600 bp, Chicken  19866894206007_1
ggaaggaggaggagaaggagaaggaagagcaggagaaggaggcggcggtggctgagcagaaatccgcggctgagcagaaacccgtggccgagcggagccccgagagcatcccccggccgccgcccgccgccgaaccccgggagcagcagcagcagcagcagcaggaggacgaggaagaggaggaggaagagagcaaggtaaggggagggaggcatgagggaaggtgaattgcgggtgggggctgtacgtccttttcccgggagctgctccaggtgccgggggtgcgtgcgcaattcttgyctcccctctttttgtgggttgcagcaaaccttccccctgcagtatgagggtgccccaacctctgtccttgcagccccccccagcatcctactggcctcccaccctgagttctgacccctgcttgaactggggggggggggggaggacaggacagcactgcctgctaaatcctcctccagctccggatcttgtttaaaaataaaagggtgacccagcggccgcggaaggagttcgccctgctggcttccatgggctctgtgctaatgctctgtgccatgggcctggggacccccaaggggt

SEQ ID NO: 10010 - DNA, 599 bp, Chicken  19866894206016_1
  misc_feature (1)..(39): n is any nucleotide
nnnnnnnnnnnnnnnnnnnnnnnnnnnnnnnnnnnnnnngctcaccagttctgctgcagctcctccaggttggccgcattccactcggagccctacgacagcggtgatgctgtgggacggccgggaatagcggtaccccacagccctccccatgcccaccaggtagatgtgtgggaagacgcgggagggccggtccatttgcgccagcaccagcagcatctcgttgtcaatgaagtccttgtgctgctccaggctgtgccccatgcgccgctccagctcagtccgcacctggcgcccacrgagcggtgagggatggcgacgagacccccgtgccccccccccccccggacccccgcacgcactcacctccttggaggtgacggtttccaggtcagcagaggtcagcacatcccgcagcagtgcccgcactgcgcgctctgtgggctctgtgggcagcggcgagccaggccgcacggactccaagtcggccatggccaaccattcattgaggcagctctgctccgagtccagtgctgctgcgtattcctgcgcccaggccagcgctgggccccccgggatgtgcccaccctgggctgcca

SEQ ID NO: 10011 - DNA, 600 bp, Chicken  19866894206018_1
tgtatactcacccagaggaaaggctgttgcatttggaaaggatttttgttagggaaaagcattattcaggtagcactatacggtaacaaaagcatccacgtcctccagctcctacaaaaggttctaagcagcttagtaaatgtcaagtcattcatgttaaatgacattaattgattcagaacatccataatggggactaggaagaatcagaagtctatgcttctgttgattaagtttcagatggatgtggtaattagatccccctctgatgttaacaagaggacatactaatgtgtgtcrgagttatataaaaatgtgcagagtaggcttaccaggggaggacccattttgtgataaaaagtagaaaatcaacaaagagtacagcaaataacrtaaatgaatacaatgaacagaaattagatttctaaataaggttttagtctaacaatgaatgggcataagtgaggaactcagagactcgaatgtaagtgaaatttccagcgttagctatactgatatgttagagaaacccaacgagagctttgttttctgtatcagcatggacaacaacccatgcaaaaagctgtttccagctagtct

SEQ ID NO: 10012 - DNA, 535 bp, Chicken  19866894206018_2
atccacgtcctccagctcctacaaaaggttctaagcagcttagtaaatgtcaagtcattcatgttaaatgacattaattgattcagaacatccataatggggactaggaagaatcagaagtctatgcttctgttgattaagtttcagatggatgtggtaattagatccccctctgatgttaacaagaggacatactaatgtgtgtcrgagttatataaaaatgtgcagagtaggcttaccaggggaggacccattttgtgataaaaagtagaaaatcaacaaagagtacagcaaataacrtaaatgaatacaatgaacagaaattagatttctaaataaggttttagtctaacaatgaatgggcataagtgaggaactcagagactcgaatgtaagtgaaatttccagcgttagctatactgatatgttagagaaacccaacgagagctttgttttctgtatcagcatggacaacaacccatgcaaaaagctgtttccagctagtctattaaaagctcaaggactggaatgtgga

SEQ ID NO: 10013 - DNA, 600 bp, Chicken  19866894206024_1
gcatgttgggtcattgcaatattgccctttaaccaaggagagaaaattttgttccctcctttctcctcccatttcctttgttccgtcctcgttgcccacgtttccttcccacccctggtctgcaatgccaccacacttcaacagctcaacacatacacacccataataaccccaaactctacagaagcatggatttttttcagaaattactgaacagtccaagggtacccacacccatcaagttaacttgggcccctcattgccattcataggaaagctttttccgttcattaccactgrcatttgctacggactgactattcctcaggacaaaacccagagctgctggcatcacaaagcaggcagtgggaacgggacgtctttgctgcacacccaacacctgagggctttccaacattgctattaaatctatgcagagcaccaacagagagcgtgcatctcattttttcaagccgtgtgatttctgagtcgcttgttcaaacattttagcaattccaagagaacatgacttgcaccrcacgtgtctcttcagtgggaaccgtaggtgatgtgatcaaagttagcctacacctaatcagc

SEQ ID NO: 10014 - DNA, 391 bp, Chicken  19866894206024_2
caagttaacttgggcccctcattgccattcataggaaagctttttccgttcattaccactgrcatttgctacggactgactattcctcaggacaaaacccagagctgctggcatcacaaagcaggcagtgggaacgggacgtctttgctgcacacccaacacctgagggctttccaacattgctattaaatctatgcagagcaccaacagagagcgtgcatctcattttttcaagccgtgtgatttctgagtcgcttgttcaaacattttagcaattccaagagaacatgacttgcaccrcacgtgtctcttcagtgggaaccgtaggtgatgtgatcaaagttagcctacacctaatcagcatgcgagaaataatcaaggagcctttttt

SEQ ID NO: 10015 - DNA, 600 bp, Chicken  19866894206027_1
ggatatttcgcgataaaaactgcagtaagccaattggttgtgaattgcacgaaatcagttgtataaaattgaaacaactgagcagcaatcttctttgactacaagcagaaaaaatacagctgtgaggtaacctcacagtaagacctcacttctttttctgcaaagatgagcagtcttgttgaaaaattaaagagagttgagaattttgtatgtgaaagaagtgtgtttcaatttgaattatcagctgcatgctgacttctctcttttcttctttaatgtcaccaaataatatataaagcrcttgttcgttcattacttcatttctctttctcttccttgccctcacccagggcagaaatggctgctcctttccatctccagcccccaaatccagagagacggatcctaattgttgccttccctcattcccaaaagaaataaagatttaactgcaaaatgggattgcattgctttgctatgtgtattaagcagtctcattttggtagcaatgctgattttttttaggaagagtttagccttatgtggtaactgctggctcagcggggcctttgttagtcctgttcatgaaactctcagtgc

SEQ ID NO: 10016 - DNA, 600 bp, Chicken  19866894206028_1
gccagaaagctacttgacgaaaggcttgcagcacactttttaattgatagctttccatcaagcaaggatatcagtatttcagtacaaataaaattcatcattacaatgtttcctttcaagttttcaaaatggaataataaatttttgaggatttctgaataggacagctagggtaaatatctaagtctcttttctttgccagggtctcactgatgttcatagcatttatttctgtgcttttatataaggacacaatcttcccattccaactcaggcttaattcagctgagctttcacgcytcatatatgagtgctgtagcaatttttatatcagcatttgttatttaattgctgccggtaattccacgcaagacacatggaactgagacatcagctccattcctctgaatgtgctcttttcacgctgtcctgtgcatagaacattgtttcacatttagaaatgaggattgttggaatcgctacccagtagtcctcaaatataatacagaatttgattccttcctgctccatgctgacttcacacaatatgccaggcaatgactacagtaactttacagtagttgaactatatgtcatatc

SEQ ID NO: 10017 - DNA, 599 bp, Chicken  19866894206030_1
  misc_feature (1)..(20): n is any nucleotide
nnnnnnnnnnnnnnnnnnnntaataggaaaaaaaaaaaagaaaaaaagaaaaaaccaataaaaagaaggaaagtaatagttagagtgagattatactggaacatatctattggtgaaagatatgctaggactggaaaaatgcagaaagcaatacagaaaaatttcatttcattgagttgctagttcatttaactatttctcacatttccgtaacgcatgtcttctaaccatatttcttacagagttcttgattgtcttgactgattcaaacaacctgattgtttatgctccatttatccyaacacagaaagaagcagatgtacacaaatgcatccaagccatgcagatagagttctatcagttatgaaccacttccttagcaccaactcaacgcctacttggagaagggctactgaaagcaacagaactagaacatatatgtctcttctctccctggaaacttgaggattaattccttgttacagttgttagtgatctaaatagtgaatttgtttacatgacttggtgcataaaatcagacaagtccaagtgccctgtggggcatgtaaggagaggaggccaaagaattttggcctact

SEQ ID NO: 10018 - DNA, 600 bp, Chicken  19866894206030_2
ttaattgtttgtttccctcagcagagttttgaaggctagtgaactggccctcccaaacttagaagggattattttcctctcaagctgtgccaaggtcaggctgccaccaccacaggcttgggtgacctatgtaagtcccactgttcttctcaggatttggaccagactgctccagtctagcaaccaaaggaactgatgaaaccataatgtacataaactcacatttaactgctttggcgtgcaggatgttttacatgtgatgaggtttgattatgcaaaggactttaaaatgtatgaaayggatgacatgaataatttgctttcttgtttgctgaaatagaaagagaagtagaatcatgtttcagtccctttaactgttcttttctcaagtgtcaaattaaggatcatctgacctccaagaagctccctgtcaggcaggaagtttgactagttttcaagggtctatgtgtgtgagagctggctcatctactagtcctttatatatattatttacattcatttgaatccagagagggtctagttagagacctcaaaataaattatcttctgctggagttctctaaaaagtggcagtctact

SEQ ID NO: 10019 - DNA, 600 bp, Chicken  19866894206034_1
tttcacatgcacaaagatgaccttacagctgttttaactgcaacatttgactgagaccagcagttttttcccctaaccccaacagattttaccttgcagctttctgctgcatcattcctgtttgcatatttggaagtgagaacaaagcctttgtgctcccactcagagatctttccctgctcaccgactgaactgcaagctggagaaaatgtgaaggaggcattctcagcacgtgtagcacgaactgctgagtactgcaccgagaggctttgagccagatgacgatggacgttggtggamgttcactgctgcaggtctcttacaaagcctacagcgacaaaataaaacccagctaataamtacaacgtgatgcactgtttcaaaagccgaagaacagatgtcagttaattaaaacagctccttctccttccaaawctgctgccacttcctggccaatagcagtggttgagcaacagacaactacagcacttttattgaggctgtcattaaaagcagtacaacgccagatacgttataaaaacygaaagtgaccccttgcatagtttaagctccaacgcagagcacgcagagatgtgtttc

SEQ ID NO: 10020 - DNA, 600 bp, Chicken  19866894206034_2
cagttttttcccctaaccccaacagattttaccttgcagctttctgctgcatcattcctgtttgcatatttggaagtgagaacaaagcctttgtgctcccactcagagatctttccctgctcaccgactgaactgcaagctggagaaaatgtgaaggaggcattctcagcacgtgtagcacgaactgctgagtactgcaccgagaggctttgagccagatgacgatggacgttggtggamgttcactgctgcaggtctcttacaaagcctacagcgacaaaataaaacccagctaataamtacaacgtgatgcactgtttcaaaagccgaagaacagatgtcagttaattaaaacagctccttctccttccaaawctgctgccacttcctggccaatagcagtggttgagcaacagacaactacagcacttttattgaggctgtcattaaaagcagtacaacgccagatacgttataaaaacygaaagtgaccccttgcatagtttaagctccaacgcagagcacgcagagatgtgtttctccctgcctggtccatctgaaaacaaagggagcactgcatcaagtgagaggcagagggat

SEQ ID NO: 10021 - DNA, 600 bp, Chicken  19866894206034_3
gtgagaacaaagcctttgtgctcccactcagagatctttccctgctcaccgactgaactgcaagctggagaaaatgtgaaggaggcattctcagcacgtgtagcacgaactgctgagtactgcaccgagaggctttgagccagatgacgatggacgttggtggamgttcactgctgcaggtctcttacaaagcctacagcgacaaaataaaacccagctaataamtacaacgtgatgcactgtttcaaaagccgaagaacagatgtcagttaattaaaacagctccttctccttccaaawctgctgccacttcctggccaatagcagtggttgagcaacagacaactacagcacttttattgaggctgtcattaaaagcagtacaacgccagatacgttataaaaacygaaagtgaccccttgcatagtttaagctccaacgcagagcacgcagagatgtgtttctccctgcctggtccatctgaaaacaaagggagcactgcatcaagtgagaggcagagggatttcagcrtggcttcaccatgcarccttggcaaagcggctctgccactcctcccttgttcgagagggaaaacagcg

SEQ ID NO: 10022 - DNA, 600 bp, Chicken  19866894206034_4
actgctgagtactgcaccgagaggctttgagccagatgacgatggacgttggtggamgttcactgctgcaggtctcttacaaagcctacagcgacaaaataaaacccagctaataamtacaacgtgatgcactgtttcaaaagccgaagaacagatgtcagttaattaaaacagctccttctccttccaaawctgctgccacttcctggccaatagcagtggttgagcaacagacaactacagcacttttattgaggctgtcattaaaagcagtacaacgccagatacgttataaaaacygaaagtgaccccttgcatagtttaagctccaacgcagagcacgcagagatgtgtttctccctgcctggtccatctgaaaacaaagggagcactgcatcaagtgagaggcagagggatttcagcrtggcttcaccatgcarccttggcaaagcggctctgccactcctcccttgttcgagagggaaaacagcgcagtgcaaactcgctcatcagcctccttgtgactccaccgtgctttcaggagctgcaggcggagcgcagcgcggtgcctccctgccatcactacgagcggtacaaagt

SEQ ID NO: 10023 - DNA, 600 bp, Chicken  19866894206034_5
tgatgcactgtttcaaaagccgaagaacagatgtcagttaattaaaacagctccttctccttccaaawctgctgccacttcctggccaatagcagtggttgagcaacagacaactacagcacttttattgaggctgtcattaaaagcagtacaacgccagatacgttataaaaacygaaagtgaccccttgcatagtttaagctccaacgcagagcacgcagagatgtgtttctccctgcctggtccatctgaaaacaaagggagcactgcatcaagtgagaggcagagggatttcagcrtggcttcaccatgcarccttggcaaagcggctctgccactcctcccttgttcgagagggaaaacagcgcagtgcaaactcgctcatcagcctccttgtgactccaccgtgctttcaggagctgcaggcggagcgcagcgcggtgcctccctgccatcactacgagcggtacaaagttgatcgccgcaaacacgacacggagaaaaggtacaaagagtgacgagcgcggggtccccctttggacatcctcagcctccagaacaacacgtttgtggtcaatggaacacaaacctccgagcct

SEQ ID NO: 10024 - DNA, 600 bp, Chicken  19866894206034_6
aagccgaagaacagatgtcagttaattaaaacagctccttctccttccaaawctgctgccacttcctggccaatagcagtggttgagcaacagacaactacagcacttttattgaggctgtcattaaaagcagtacaacgccagatacgttataaaaacygaaagtgaccccttgcatagtttaagctccaacgcagagcacgcagagatgtgtttctccctgcctggtccatctgaaaacaaagggagcactgcatcaagtgagaggcagagggatttcagcrtggcttcaccatgcarccttggcaaagcggctctgccactcctcccttgttcgagagggaaaacagcgcagtgcaaactcgctcatcagcctccttgtgactccaccgtgctttcaggagctgcaggcggagcgcagcgcggtgcctccctgccatcactacgagcggtacaaagttgatcgccgcaaacacgacacggagaaaaggtacaaagagtgacgagcgcggggtccccctttggacatcctcagcctccagaacaacacgtttgtggtcaatggaacacaaacctccgagcctgccaagcctatcagaa

SEQ ID NO: 10025 - DNA, 600 bp, Chicken  19866894206034_7
tcgagagggaaaacagcgcagtgcaaactcgctcatcagcctccttgtgactccaccgtgctttcaggagctgcaggcggagcgcagcgcggtgcctccctgccatcactacgagcggtacaaagttgatcgccgcaaacacgacacggagaaaaggtacaaagagtgacgagcgcggggtccccctttggacatcctcagcctccagaacaacacgtttgtggtcaatggaacacaaacctccgagcctgccaagcctatcagaacagcagagggacgctcctgctgcaccaggaagcyttgcaggcactctgctcagcccataaccgctcgctcccccacaccccgtgcccgggtgccgctcccatgcccgtgcggctttaagagctcccagcacgtggggagcggtaaaaaaaaagccccgcagacgcagcgcaaagtcacggacgtgggcacagcagcgtttctattttgtgcacccgcatacgcaacagctccaagggaaggagaatgagaagcggggggaggggggggagcgcacgctgagtcctaacagcgcatcatctgacgggatcaggcagcggcgcgcagccggcgggt

SEQ ID NO: 10026 - DNA, 600 bp, Chicken  19866894206036_1
ggagcattaggttgggcagcaaggaaaaacataaacaaggacagaagggaaatgctgagctgcgagggcaacagcacgagaaaccatagaatcattaaagttggaaaaaaatctttaagatcatgcagaccaatcacctggcagccattggcatctgcctgctctgactgtgatcatagccataacacagagcaggggcagccagaggaaagctgtgggttgtgcagggcacaacagcatctgggaatgaggagaaactcagctccagaatgctaacagcacacagcccacatagaatgkggaagactccttggcactgttctattttaaaggtaaggagacgactttggattatatcgcaagtagaaggattaagttttaaaagcaagtctaacgagaggtgtgttgcttctgtaacatcgttgctcaagaggtcacgctgcagaacgctcctaaagacacccacagaagtcagtgaaaatcagcaggggttgttgatgtacactgtgcctctgtgctaaaggagaggtacgtctgagaactgcacaaacagcacttcaaatcagaaaactatgagctcccctccacctgatgttcgac

SEQ ID NO: 10027 - DNA, 600 bp, Chicken  19866894206036_2
ttcccagcaccagcctagtcctgcacaaggctcagccagcttagctcctgccagggacagagaaagcagtcacctcctccacacacagcaagagtttctgcatactgaccctcactgacaaaactgagaggaatcaaagcccaaagggcgttccagtgctgcacacaagctttttctttacagccatgctcattgcctgcagagatgtttcgcagcactcctgagccctgctgtgggggttgcctggatatcattcccaggggactttcaggctgaaaatcaagaaggaatcacagaacrgtgccacaagcagtgaaggtttgcccaaacctccagggaggatgctgttctacrctgctacccaccgaagtaacagtctggcttcttccaagggaaggcctcttttgctgtatcactgcaatgaggtgtgaaggttgcatcttctgggaaagctgtgacacagcaagaagaacccatggcagccttgattttgtagaaatgtcagaggatatggggcactctgccaatgaagtcagcctccagcttgttttctttttgccaagcactatgcttcgctatcagcactgcactgctttgctg

SEQ ID NO: 10028 - DNA, 600 bp, Chicken  19866894206036_3
ggacagagaaagcagtcacctcctccacacacagcaagagtttctgcatactgaccctcactgacaaaactgagaggaatcaaagcccaaagggcgttccagtgctgcacacaagctttttctttacagccatgctcattgcctgcagagatgtttcgcagcactcctgagccctgctgtgggggttgcctggatatcattcccaggggactttcaggctgaaaatcaagaaggaatcacagaacrgtgccacaagcagtgaaggtttgcccaaacctccagggaggatgctgttctacrctgctacccaccgaagtaacagtctggcttcttccaagggaaggcctcttttgctgtatcactgcaatgaggtgtgaaggttgcatcttctgggaaagctgtgacacagcaagaagaacccatggcagccttgattttgtagaaatgtcagaggatatggggcactctgccaatgaagtcagcctccagcttgttttctttttgccaagcactatgcttcgctatcagcactgcactgctttgctgacacccacaggggctccctrgatgccatcaggagcacagagggctccaccactc

SEQ ID NO: 10029 - DNA, 600 bp, Chicken  19866894206036_4
ttgcccaaacctccagggaggatgctgttctacrctgctacccaccgaagtaacagtctggcttcttccaagggaaggcctcttttgctgtatcactgcaatgaggtgtgaaggttgcatcttctgggaaagctgtgacacagcaagaagaacccatggcagccttgattttgtagaaatgtcagaggatatggggcactctgccaatgaagtcagcctccagcttgttttctttttgccaagcactatgcttcgctatcagcactgcactgctttgctgacacccacaggggctccctrgatgccatcaggagcacagagggctccaccactccacagacccagctccacaactgggacttcacaatggtacattcagtacacctaccaatgttcaacccagtcaacaccgcaaacagtttgaggattaagggaatttcagcttactttatggagaattttaagccttgaaatgttacccctaaagctttattaattcatacaaaacttcatataatcctcacagcttgatttagaagtgacaattcaatctgtacttcagggactacttttcatagatagcattaagaacacgcatgg

SEQ ID NO: 10030 - DNA, 600 bp, Chicken  19866894206038_1
ccctcacagctccatgccgttccctcaggccccgtcactgccccagagagcacagctcagcgctgccttccactccctgtgagcagctgcagccgccataggcctcccctcagctcctctgctctgggctgagcaaacccatgggctcagcccctgctcccacaccgggcctcagacccttccccatctttgtagccctctggtcgctgaagctgtggcagaatggcagtgactccctgctgtggtacggctgctagctcggggcagttgtttagcggagagggagatgcaggcataatrcattcacctatgcatacagttacgtattcatgcatcagcttctatttccacgtggagcaaccttcagaagagcctgctgtgctggttagctctgcagtgacacggccaagctgctacccttggtttatatgccccaactgttaggttgtttgttcttaaactcatctctacagtggctgtggtagttaaacacgcrgagacctctggcatttatcagttggcggctgtgctgctctgcactttggagttcgctcttcctttgcacttgttcttgaggaggagaaccgctgttctgctgca

SEQ ID NO: 10031 - DNA, 600 bp, Chicken  19866894206038_2
cctctggtcgctgaagctgtggcagaatggcagtgactccctgctgtggtacggctgctagctcggggcagttgtttagcggagagggagatgcaggcataatrcattcacctatgcatacagttacgtattcatgcatcagcttctatttccacgtggagcaaccttcagaagagcctgctgtgctggttagctctgcagtgacacggccaagctgctacccttggtttatatgccccaactgttaggttgtttgttcttaaactcatctctacagtggctgtggtagttaaacacgcrgagacctctggcatttatcagttggcggctgtgctgctctgcactttggagttcgctcttcctttgcacttgttcttgaggaggagaaccgctgttctgctgcagtatgctcttatatacaggtctgtctctgcatttgacctttgccagcacggaggtaactcagaggcctggtgtgatggctgaaacatttggtggcgttactcgatgttgtttgtgactcgttttctacttgtttatctcaggatgagtttgtaagtcactccctgggtgtgtgttaatagtctcagtgcagccgcc

SEQ ID NO: 10032 - DNA, 600 bp, Chicken  19866894206041_1
tacaatacttgaaaaattgctaaaatgatatggcttcaagccacatctagagttgaacattttttggtgcaaagcgtatgaagtaaagaagcatcaagacaaacttcaaactcacttaagcagtgctttataatagacaagctctaagggataagagaaaaaaaagtacaaccactgtaggatcttaactagcaaatttctcacaagcctaaatgtttgctcactttcttcatctgcaatgtgaaagtgtgcagacaggtgataaagaaaatgctttatcaagaaaacttgaaaacttcwtggcaaaagagatagacwtgagaatctgcacaggtggatctattccatgtgtggactgctggaattaaagcctaaatactcatcaaaagcatgcaaaacaaatgagtaaaagtttcttctacaataccttccatttagagcacttgaaagagtagaattaaatcagttctaaatgtctaataaaaatgcaagcaacattcattactcatagtcacatataattacttttatctaaaagagattcagagtagtagccttaagactactgatttactgaaaagacttcagaattattgtttt

SEQ ID NO: 10033 - DNA, 600 bp, Chicken  19866894206041_2
gctaaaatgatatggcttcaagccacatctagagttgaacattttttggtgcaaagcgtatgaagtaaagaagcatcaagacaaacttcaaactcacttaagcagtgctttataatagacaagctctaagggataagagaaaaaaaagtacaaccactgtaggatcttaactagcaaatttctcacaagcctaaatgtttgctcactttcttcatctgcaatgtgaaagtgtgcagacaggtgataaagaaaatgctttatcaagaaaacttgaaaacttcwtggcaaaagagatagacwtgagaatctgcacaggtggatctattccatgtgtggactgctggaattaaagcctaaatactcatcaaaagcatgcaaaacaaatgagtaaaagtttcttctacaataccttccatttagagcacttgaaagagtagaattaaatcagttctaaatgtctaataaaaatgcaagcaacattcattactcatagtcacatataattacttttatctaaaagagattcagagtagtagccttaagactactgatttactgaaaagacttcagaattattgttttcaaaaatcatgcatttga

SEQ ID NO: 10034 - DNA, 600 bp, Chicken  19866894206042_1
tcgttgcagagagccacttgtaatgaagtctatagcaggaaaaacttccatctgtggataagtagaaccaagggggctctaagaaaggaaactgcgactattcaaaaatggtgtgcagcattctccactgctctatcagtgttttccacattacctctcaggagcatagtataactaagaagagttataacattatttactacttctagcatcaggtccttcaaagaagctttgcatatggaaagggacagctgtacaggagaattcactgtagacagaaagtaggaagcatcctttacrtggccttccttggcacagccacagctctgcacttctttagaaataggaatgtttctttaaaacattctttaagttatccacctggccatagagcccctctcctggggcaagactcacaaactccatcacagctgtgttatagattttctgcaagaacaaattactgccagtattgccaccacctgcacagtccccacttagtttcttctggaacacaaacaataggctgcctccttaaaagcactgacctaagaaagatgcatcaatcaaagctagcacatttactcacaactgagagct

SEQ ID NO: 10035 - DNA, 600 bp, Chicken  19866894206043_1
gctaaactggtgaaattcatcctgggaaaatgtgctaaaccaagcttgcattttaaagaaagaatttgtttccagaatgttacttgttgtttagtgtattgaataattttggtcccagggatggagacagggttttgtttatttatctgaaaatcagaattttgcagagctgtgccaagctgtaaacttttcaattctctgatcctagcactcagcacagtgtccaacaaaaggctgtacaaagccagagaccactcgggcttcgcagttgctggcttcagtcgtctttacaattgtttwtgtgaatgcagacccrggaacagtggcattatgccagacctttcccagaatcgctgagggctgatacagcttctcatattaatccacctctgacagtgccacaactgagaaaacccagagggtagctgtgccctgacagcgtccctcttgccatgccctacaacactgctggggttcttacttgatggaaaaaatgatttggcacagacagcctttggtcatctggggatgccttgctaagtcttctatggaacagagatgtggccctccacgagtttttattgtattttactgataaca

SEQ ID NO: 10036 - DNA, 600 bp, Chicken  19866894206043_2
tcatcctgggaaaatgtgctaaaccaagcttgcattttaaagaaagaatttgtttccagaatgttacttgttgtttagtgtattgaataattttggtcccagggatggagacagggttttgtttatttatctgaaaatcagaattttgcagagctgtgccaagctgtaaacttttcaattctctgatcctagcactcagcacagtgtccaacaaaaggctgtacaaagccagagaccactcgggcttcgcagttgctggcttcagtcgtctttacaattgtttwtgtgaatgcagacccrggaacagtggcattatgccagacctttcccagaatcgctgagggctgatacagcttctcatattaatccacctctgacagtgccacaactgagaaaacccagagggtagctgtgccctgacagcgtccctcttgccatgccctacaacactgctggggttcttacttgatggaaaaaatgatttggcacagacagcctttggtcatctggggatgccttgctaagtcttctatggaacagagatgtggccctccacgagtttttattgtattttactgataacatcaaattcaacaaaga

SEQ ID NO: 10037 - DNA, 600 bp, Chicken  19866894206044_1
gctgacaagtcacagtgtctatctcatggtgtgggggtttggtgactttttgtgcactgtcctaattcagttataaaatgtgattaagcctaaaagtactcatggatcttagagatgcctttgtaatccagttctttcctgagatcaagggccttctgctgatgatgactgaaatggtcatttcatattgtccttgttaatgggaatctcatactgtttgtcctaccagtttattttcaaggacttttttttttttttgaaagaggaaagaaggaaaaaaaaagaaaaaataaagagagratgagaactgtgagaaaccaggaaatcatgccaagtgactgaaaagacataaggaggatgcaggcttcaggtttgtatttttgagacagctgtgatggcaaacaaggatttgaaatccttctggaaaggcatttgtatgtcatacttctggggttaggtgctgggcaaagtgtagatacatgcttctgcaaagtttgcagctggctgacatgtatattgaggtttatctcacacagaaaactttcagaagagaagcttaagagctcttcagcatgcaggaaggaggaggacagtgggcaa

SEQ ID NO: 10038 - DNA, 599 bp, Chicken  19866894206049_1
  misc_feature (1)..(41): n is any nucleotide
nnnnnnnnnnnnnnnnnnnnnnnnnnnnnnnnnnnnnnnnntatttccactctgtattggttctcacattttttatcgagctctctgtatgaacctcctttcactattactgctaattacagcaaggtctgcagaattcatcctgcaaaactcttgggcttcttccatggagacttgttctttgctgatgtagtatagtttatctttgtatataaaccatccatccgcagtggttttatactctggaagacaagtaaggtagccttaaattcttcatttgtaggacataaaaattcattygagagtaacaattttgatttaaaaaatgatgaaaaaatgaataaatgcatgcaaaaacctaccatatgtgtcaattggttcaggttttggcatcactcctgcaaaacaacagaacagaaggtataatgtggcttggtttctgtgagtgactgcaaggaaccaagcaaaaactaaagcagacttctgcactcctttgctgttgactagaaaagaagcagacttagccacaaatttcaactactcattatgaaaaatgcatgatcttmtaattttagatcataagctatgcttcatttcag

SEQ ID NO: 10039 - DNA, 483 bp, Chicken  19866894206049_2
aaattcttcatttgtaggacataaaaattcattygagagtaacaattttgatttaaaaaatgatgaaaaaatgaataaatgcatgcaaaaacctaccatatgtgtcaattggttcaggttttggcatcactcctgcaaaacaacagaacagaaggtataatgtggcttggtttctgtgagtgactgcaaggaaccaagcaaaaactaaagcagacttctgcactcctttgctgttgactagaaaagaagcagacttagccacaaatttcaactactcattatgaaaaatgcatgatcttmtaattttagatcataagctatgcttcatttcagcaaagtcatagatggatttcgtaccttttgagatcagtgtttattaaaacagtctccccgagctgtgaactacagtagatttatctgaaacatactaagctttggttttttattctctttactgatgccccagtagatataccataattt

SEQ ID NO: 10040 - DNA, 600 bp, Chicken  19866894206066_1
gtcatataaattcagacagaggtctgatcactgaatggctcttgttgcaagatgcagtgcttttttcatgtacctttgtacctcaaattggagagcagaatgttggttgcttaattgcagtggtgatttcaaaccctttgctccttccagggagattttcaagagtcctacaatcagtatctcaaagccttctgaagatataaccatttattgcagcgcttggctgggtaatgtttcaggggaaaaaaatgtcatcctgtctgaatacaccatgttagcaagagaggaaatgtacctatygacagatgaatagacaaaaagagcctgcaatgcttgagaaataactgggacttctcaatcatttctatctacctgacagcaaagttcacctgtgaagcaagggcaaagtctaaacagctacagcataatttgaaaaacactgatgggagtgggggttgtggagtaagagcaccagagtgctgatgggtctggtgcgttcctgttatatactgatggcagggattgcacaaacagagcttcctgggctggcctgaaatctcaagaggagcactgtatcacagcaggaataggctgaaattc

SEQ ID NO: 10041 - DNA, 600 bp, Chicken  19866894206067_1
tatctgaatgatagattcagcctacttgcttacaatttcacatatgtagtatatagaaaatacgtgcaaaataatagatcctctatatgaattttggctcgtggtactcttccaagttctgctgtactgctgtttgtcagaacagtactttgaagcaacctcatctgctgaatgttactaattattttttgatggcttcataattctcttggctgaccattctaaaagttctccactaacatccaaatatttgctaaagacacactgtgaatgaaaggagatgagatgtaaatatgacaygtgattcatatgaaattagaaattaaatgcacttacagttttactttcttgagattagtagatttctgtgtttcacatgaggctactttattggatgttgttcttaaaatatacagttaacataaaaccaaaccagttatgagaaataaatttcttaggaaggatgccagcctacagaaactttataatgagctagagcattttttttaattacaagtgacccatacaacatgtaactgccttatttttttttataatatgtattcctaacacactgtcaaatgaaaaagtccaacatcc

SEQ ID NO: 10042 - DNA, 600 bp, Chicken  19866894206068_1
gtcatgcacttatttgaggaggagctgctggcatttcttgttcttgattcaatagaaagtgatgctttgcatacccagcttctgtcttttttccttttgtaggcttttactaaaaggcagaattttgtagtagtgggatgcagaaaaacacaagctgacaggttcatctatcatgttaatatgggctcagtgcacgtgtctaaatatttcacaactgcacattggataatagttcatgttactgggcctgggagctgctttccttctaccctggggtcgcttgagaaactgggggtaatmtgctttatagccctaaaggttccatttgaggacaaaattcagcatttagtatttctaaaacatgcagatatatgtcagcacatacgtagcattgaccacctctgtacgtccatttatttttcaagtcctttcattrcctatgcaacataaaaattggagccatgtgagtaccgtaaaatacttttgtgactattgctaaatggcttttcttggaagatgccctcacttcttctgcctgcacctgctattaccattgatccgtgtgacttttacagaaattaaacatctaggttgaacatt

SEQ ID NO: 10043 - DNA, 600 bp, Chicken  19866894206068_2
gatgcagaaaaacacaagctgacaggttcatctatcatgttaatatgggctcagtgcacgtgtctaaatatttcacaactgcacattggataatagttcatgttactgggcctgggagctgctttccttctaccctggggtcgcttgagaaactgggggtaatmtgctttatagccctaaaggttccatttgaggacaaaattcagcatttagtatttctaaaacatgcagatatatgtcagcacatacgtagcattgaccacctctgtacgtccatttatttttcaagtcctttcattrcctatgcaacataaaaattggagccatgtgagtaccgtaaaatacttttgtgactattgctaaatggcttttcttggaagatgccctcacttcttctgcctgcacctgctattaccattgatccgtgtgacttttacagaaattaaacatctaggttgaacattcaggttctggaaaaagctgaatttgctctttatgttgagaggtattttgcattcacccacacaaaccaaaaatgttccactgcaaccccgcactgcagaacgcatttctcatattcagtagtcagctataggatag

SEQ ID NO: 10044 - DNA, 600 bp, Chicken  19866894206072_1
agctcccaggggtaatctgcaaagtacaagttgttattactcactacagcagaacaatcagcgcgggctctgtaatgcagtaagatggattggggctgcttaagaccagaggaaaatggaatcgctgtcttacaaaaagaagtttagctcccgcaatccaccgctgatgagtgatgagacctgagcaaaagcccagatttgaaaatgcctggatttggggagtgaggcagaactgtgtgcagcaagagccagaatcagccctggatcacagcaagccacagccacacgccagatccatcwtgtaaaggtaactctcttcaagtacagctcttttcttagtagctgtggtactgtgctgcacatggagaccttcaccacctctatagctgtgtgccagactgcagccagcacatccccacgtcaggatttagcagctgagttacacagagctccttctgcaagatctgtgtgggtctgtgctgctcgagttgctttgctcatccttactgctggtttgttacagaagaggaattggaaaaccgacatcagttgtaaaagcagtaaaacagctcattcaggctccaagagccagcagaaatg

SEQ ID NO: 10045 - DNA, 599 bp, Chicken  19866894206079_1
  misc_feature (1)..(5): n is any nucleotide
nnnnnaaggatgagaaggaatggcctcaagttgcaccaggggtggttcaagttggatgtcaagaaaaacttctcccaaaagagcagttaggtgctggaatgggctgcccaggaaggtggtagtcaccattcctggaggtgctgaaaaaacatttaatgttgtactgagggacatggtttactgggaaatactgctaacaggtaaatggttgcactggatgatcttagatgtcttttccaaccttggtgattccatgaggggcacttgggctgcagcctgacttacgggatgttacggggygctgtgatgcagggagtgccacgctgttctggaggtgacagtactgatccagggatccaamagcactgctgctgtgtcaygcagcacagtcactgcagagtaatagcaaggtgatttcctgtccctacctcccaggtacagctgtgctggtcactgtttgcccctccagcagtggcctgctaagaacccagctggcatcctgagtatctcaagaaaacagacatacagctgcagcactaccatgttttcaggaagcatagagtcacagtatcttcattctgcccttggccaaatacaat

SEQ ID NO: 10046 - DNA, 600 bp, Chicken  19866894206079_2
agaaaaacttctcccaaaagagcagttaggtgctggaatgggctgcccaggaaggtggtagtcaccattcctggaggtgctgaaaaaacatttaatgttgtactgagggacatggtttactgggaaatactgctaacaggtaaatggttgcactggatgatcttagatgtcttttccaaccttggtgattccatgaggggcacttgggctgcagcctgacttacgggatgttacggggygctgtgatgcagggagtgccacgctgttctggaggtgacagtactgatccagggatccaamagcactgctgctgtgtcaygcagcacagtcactgcagagtaatagcaaggtgatttcctgtccctacctcccaggtacagctgtgctggtcactgtttgcccctccagcagtggcctgctaagaacccagctggcatcctgagtatctcaagaaaacagacatacagctgcagcactaccatgttttcaggaagcatagagtcacagtatcttcattctgcccttggccaaatacaatcagatctgrcaattatattttatgaataaaatacaataaaagtagctttgattcttttagca

SEQ ID NO: 10047 - DNA, 600 bp, Chicken  19866894206079_3
gagcagttaggtgctggaatgggctgcccaggaaggtggtagtcaccattcctggaggtgctgaaaaaacatttaatgttgtactgagggacatggtttactgggaaatactgctaacaggtaaatggttgcactggatgatcttagatgtcttttccaaccttggtgattccatgaggggcacttgggctgcagcctgacttacgggatgttacggggygctgtgatgcagggagtgccacgctgttctggaggtgacagtactgatccagggatccaamagcactgctgctgtgtcaygcagcacagtcactgcagagtaatagcaaggtgatttcctgtccctacctcccaggtacagctgtgctggtcactgtttgcccctccagcagtggcctgctaagaacccagctggcatcctgagtatctcaagaaaacagacatacagctgcagcactaccatgttttcaggaagcatagagtcacagtatcttcattctgcccttggccaaatacaatcagatctgrcaattatattttatgaataaaatacaataaaagtagctttgattcttttagcatattagattatattatgta

SEQ ID NO: 10048 - DNA, 600 bp, Chicken  19866894206079_4
gcagggagtgccacgctgttctggaggtgacagtactgatccagggatccaamagcactgctgctgtgtcaygcagcacagtcactgcagagtaatagcaaggtgatttcctgtccctacctcccaggtacagctgtgctggtcactgtttgcccctccagcagtggcctgctaagaacccagctggcatcctgagtatctcaagaaaacagacatacagctgcagcactaccatgttttcaggaagcatagagtcacagtatcttcattctgcccttggccaaatacaatcagatctgrcaattatattttatgaataaaatacaataaaagtagctttgattcttttagcatattagattatattatgtaatcaaatgcctggctacactcttgtaatttaagttactgtaagtttacatacatggcaatgtcaatatttctacagaagatatggatgaaattcttccccctctccttccctcaccccactccaagttatttatgtttcagctctgctgatcaagtaactttaaagtagcttcaaaatattttttttcctgtgaatacaaccaaaaaaaaggggggggaggggtagaa

SEQ ID NO: 10049 - DNA, 600 bp, Chicken  19866894206092_1
attagaacaagtgaaccttcccacaaattcagtctttatgcataagtttcaagagctttctgaaactgaagggaacagttattttaaagatttgggatggaaatatctaattctgttcactattttaggtaatgttttctgtgggtagctgtgacagccctttggtctttgcttaatgtgttttcattgctacaggtttttatacttgtggatatggcaaatgtctgtatataaattttatacttctggataattgcagattaattgggtcaaatagattattgatagaactccatccarattaatgkgctctcgttggatggatgtggatatcacactagttatttaatcrctgctctctgagagaccaaaaaatgcatgtattrccttccaggattttatgagttttgtagagagctataaatagcttttccaggcacacacagtgaaggctgataactgaagacaggctggaaaatagaacgctaaaacgggagtgctgaaacaggtaaaagagctggtaacaargaggarcactgaagatacacatagtgttttgatagtaatagtttgatgtctacatttttgtcctctatagga

SEQ ID NO: 10050 - DNA, 600 bp, Chicken  19866894206092_2
aagtgaaccttcccacaaattcagtctttatgcataagtttcaagagctttctgaaactgaagggaacagttattttaaagatttgggatggaaatatctaattctgttcactattttaggtaatgttttctgtgggtagctgtgacagccctttggtctttgcttaatgtgttttcattgctacaggtttttatacttgtggatatggcaaatgtctgtatataaattttatacttctggataattgcagattaattgggtcaaatagattattgatagaactccatccarattaatgkgctctcgttggatggatgtggatatcacactagttatttaatcrctgctctctgagagaccaaaaaatgcatgtattrccttccaggattttatgagttttgtagagagctataaatagcttttccaggcacacacagtgaaggctgataactgaagacaggctggaaaatagaacgctaaaacgggagtgctgaaacaggtaaaagagctggtaacaargaggarcactgaagatacacatagtgttttgatagtaatagtttgatgtctacatttttgtcctctataggagtatccat

SEQ ID NO: 10051 - DNA, 600 bp, Chicken  19866894206092_3
gagctttctgaaactgaagggaacagttattttaaagatttgggatggaaatatctaattctgttcactattttaggtaatgttttctgtgggtagctgtgacagccctttggtctttgcttaatgtgttttcattgctacaggtttttatacttgtggatatggcaaatgtctgtatataaattttatacttctggataattgcagattaattgggtcaaatagattattgatagaactccatccarattaatgkgctctcgttggatggatgtggatatcacactagttatttaatcrctgctctctgagagaccaaaaaatgcatgtattrccttccaggattttatgagttttgtagagagctataaatagcttttccaggcacacacagtgaaggctgataactgaagacaggctggaaaatagaacgctaaaacgggagtgctgaaacaggtaaaagagctggtaacaargaggarcactgaagatacacatagtgttttgatagtaatagtttgatgtctacatttttgtcctctataggagtatccatgagggaaaattagcatattgcagaaatttgagtcaacattgtga

SEQ ID NO: 10052 - DNA, 600 bp, Chicken  19866894206092_4
aagatttgggatggaaatatctaattctgttcactattttaggtaatgttttctgtgggtagctgtgacagccctttggtctttgcttaatgtgttttcattgctacaggtttttatacttgtggatatggcaaatgtctgtatataaattttatacttctggataattgcagattaattgggtcaaatagattattgatagaactccatccarattaatgkgctctcgttggatggatgtggatatcacactagttatttaatcrctgctctctgagagaccaaaaaatgcatgtattrccttccaggattttatgagttttgtagagagctataaatagcttttccaggcacacacagtgaaggctgataactgaagacaggctggaaaatagaacgctaaaacgggagtgctgaaacaggtaaaagagctggtaacaargaggarcactgaagatacacatagtgttttgatagtaatagtttgatgtctacatttttgtcctctataggagtatccatgagggaaaattagcatattgcagaaatttgagtcaacattgtgatggcccaattagttcaggcagtattgcttctggt

SEQ ID NO: 10053 - DNA, 600 bp, Chicken  19866894206092_5
atataaattttatacttctggataattgcagattaattgggtcaaatagattattgatagaactccatccarattaatgkgctctcgttggatggatgtggatatcacactagttatttaatcrctgctctctgagagaccaaaaaatgcatgtattrccttccaggattttatgagttttgtagagagctataaatagcttttccaggcacacacagtgaaggctgataactgaagacaggctggaaaatagaacgctaaaacgggagtgctgaaacaggtaaaagagctggtaacaargaggarcactgaagatacacatagtgttttgatagtaatagtttgatgtctacatttttgtcctctataggagtatccatgagggaaaattagcatattgcagaaatttgagtcaacattgtgatggcccaattagttcaggcagtattgcttctggttctgattcagtcaggaaaggcagcaggatgcaaggaacctaattcttttccttaggaaactaagggaactaatccttctttttcttccattcttcttttcttcagttgtaagaaaaaaagctgtgatgatggtacagaaata

SEQ ID NO: 10054 - DNA, 600 bp, Chicken  19866894206092_6
attttatacttctggataattgcagattaattgggtcaaatagattattgatagaactccatccarattaatgkgctctcgttggatggatgtggatatcacactagttatttaatcrctgctctctgagagaccaaaaaatgcatgtattrccttccaggattttatgagttttgtagagagctataaatagcttttccaggcacacacagtgaaggctgataactgaagacaggctggaaaatagaacgctaaaacgggagtgctgaaacaggtaaaagagctggtaacaargaggarcactgaagatacacatagtgttttgatagtaatagtttgatgtctacatttttgtcctctataggagtatccatgagggaaaattagcatattgcagaaatttgagtcaacattgtgatggcccaattagttcaggcagtattgcttctggttctgattcagtcaggaaaggcagcaggatgcaaggaacctaattcttttccttaggaaactaagggaactaatccttctttttcttccattcttcttttcttcagttgtaagaaaaaaagctgtgatgatggtacagaaataaatctg

SEQ ID NO: 10055 - DNA, 600 bp, Chicken  19866894206093_1
cactgaaaggagttttttccaaagctgtatgaaggtcacatttctaatgtggatttctgtatctctcctaaattttttcagatcaaatccgaaaggatatcgcacagaggggacgcagtcaggtggtttggaagacagctctgaaactggtgagctgcagggcgtgcttcctgagggtgcttcagcaggaccagaagaaggtaacttggatgttgtagagggtgaatgcagtgttacagtgcttccagtctatgagcatttatttctgtaatggaagcagcttgaaggagaaaggaggaraaagaaaaaaacaacagctgtttctgtggctgctgaacttgctgtaacatttagcagctgtagtataaatctaaatgagaggggaatacctctgtgccactgctgtccatgaatagtgatattgtggtacagcatgaatgtaaagacgtagcagatagtgtgacaaggtgccttctatttctctggacttgcttttctacctcttgatgtgccttgggatgttttgctgtgctggttgytatcatgaccttgaaaataacttcttatctagttaaaccagtagtcagtgaccttggcttc

SEQ ID NO: 10056 - DNA, 600 bp, Chicken  19866894206093_2
tgcttccagtctatgagcatttatttctgtaatggaagcagcttgaaggagaaaggaggaraaagaaaaaaacaacagctgtttctgtggctgctgaacttgctgtaacatttagcagctgtagtataaatctaaatgagaggggaatacctctgtgccactgctgtccatgaatagtgatattgtggtacagcatgaatgtaaagacgtagcagatagtgtgacaaggtgccttctatttctctggacttgcttttctacctcttgatgtgccttgggatgttttgctgtgctggttgytatcatgaccttgaaaataacttcttatctagttaaaccagtagtcagtgaccttggcttctgctttcagggacacaccacagtggtaactacctccacatttgcactagaatccctccctcagtattccatttgtactgggtgttgtggcacataagccagtttccttagagacttggaggaaacttttcccccctcccttcctgcatcctttccatgctggaaaaaagtattattggcattctttttgaaagtccacgtagaagagttttttttcttatcttgctaaaactctcctgc

SEQ ID NO: 10057 - DNA, 599 bp, Chicken  19866894206097_1
  misc_feature (1)..(32): n is any nucleotide
nnnnnnnnnnnnnnnnnnnnnnnnnnnnnnnncttgtctctttttctttaaaaaaaacacaaaaaacttagaattattagtgatccctttgctataaaattcttggattaaggtaaataagggtataactcaaaatagtttgcacagcaatctgcagtgaaaaaagaactgtaggtttctagtaacgatgactggatgtaataataatggtggtattttttattcatgtctaaaacgcacaggagttattaactttagtaaacacaagtcacaaacataagcatatagaaaacagaatasagaaactccacactaagagcaattttatattaaaatgaagactgtcatgccttaaccacacaactagaaaaaatccagtttctgcatctcagcgtagccaaaagaaataaacaccaacaaatgcagctcagctttgatctcctctggaccttttagatttctctattttgtgttattttgtaccaatgaatacactgccattatacaacaagtagctctactaattaaagaaaataacctgcaccacctaaaatactgtagtgctgaatattcatctgagggtaaaagctaattcatgc

SEQ ID NO: 10058 - DNA, 599 bp, Chicken  19866894206100_1
  misc_feature (1)..(53): n is any nucleotide
nnnnnnnnnnnnnnnnnnnnnnnnnnnnnnnnnnnnnnnnnnnnnnnnnnnnnacatgttcagatagctgtgtcaaaaacaaagggtatcgcggtgttcttcttggtttggagacggttatctgcttccaaaaagcccatagtcttggccaacacagaatctagcgcttacattcacaaacataaggagcatctttattctaaggggttggttgacatgaccaacgtgcttacccttacccagaacactgaccttaaagctgagaccaaggatattcaccatgccatgcaggatcactgstttaaaggtaaarcctggaccagccttgtgctcacccctaaccatgccaacatctcacaccctgtttggtctgtggtggatgtatagcactgctgtctttgtgggggtcaccaaaacaaaactgatcccacagtgggatctcatcatagcagctctgtggaccacaggtattgactcaataagacaaagagcargcacaacagggtataaaaatgcaaatacattycagcgtgcaaagtaagcaagtttagcataaacgtgaggaaaaataaaacaagcaaacggtagctgccagagtt

SEQ ID NO: 10059 - DNA, 599 bp, Chicken  19866894206100_2
  misc_feature (1)..(40): n is any nucleotide
nnnnnnnnnnnnnnnnnnnnnnnnnnnnnnnnnnnnnnnnacatgttcagatagctgtgtcaaaaacaaagggtatcgcggtgttcttcttggtttggagacggttatctgcttccaaaaagcccatagtcttggccaacacagaatctagcgcttacattcacaaacataaggagcatctttattctaaggggttggttgacatgaccaacgtgcttacccttacccagaacactgaccttaaagctgagaccaaggatattcaccatgccatgcaggatcactgstttaaaggtaaarcctggaccagccttgtgctcacccctaaccatgccaacatctcacaccctgtttggtctgtggtggatgtatagcactgctgtctttgtgggggtcaccaaaacaaaactgatcccacagtgggatctcatcatagcagctctgtggaccacaggtattgactcaataagacaaagagcargcacaacagggtataaaaatgcaaatacattycagcgtgcaaagtaagcaagtttagcataaacgtgaggaaaaataaaacaagcaaacggtagctgccagagttcctggagaaggct

SEQ ID NO: 10060 - DNA, 600 bp, Chicken  19866894206100_3
ttattctaaggggttggttgacatgaccaacgtgcttacccttacccagaacactgaccttaaagctgagaccaaggatattcaccatgccatgcaggatcactgstttaaaggtaaarcctggaccagccttgtgctcacccctaaccatgccaacatctcacaccctgtttggtctgtggtggatgtatagcactgctgtctttgtgggggtcaccaaaacaaaactgatcccacagtgggatctcatcatagcagctctgtggaccacaggtattgactcaataagacaaagagcargcacaacagggtataaaaatgcaaatacattycagcgtgcaaagtaagcaagtttagcataaacgtgaggaaaaataaaacaagcaaacggtagctgccagagttcctggagaaggctggcatttacgccgataagcctgtgtagatcattgctcccagatcctgagcagggcgcttygtgattactcattcccctgctatcaggatcacttgtaatctagccacctgcttgtttgggcaggctcagaaatgctgatgcaatccacctcaatgaagtacagctgttcaacgatgcatttg

SEQ ID NO: 10061 - DNA, 600 bp, Chicken  19866894206100_4
tgcttacccttacccagaacactgaccttaaagctgagaccaaggatattcaccatgccatgcaggatcactgstttaaaggtaaarcctggaccagccttgtgctcacccctaaccatgccaacatctcacaccctgtttggtctgtggtggatgtatagcactgctgtctttgtgggggtcaccaaaacaaaactgatcccacagtgggatctcatcatagcagctctgtggaccacaggtattgactcaataagacaaagagcargcacaacagggtataaaaatgcaaatacattycagcgtgcaaagtaagcaagtttagcataaacgtgaggaaaaataaaacaagcaaacggtagctgccagagttcctggagaaggctggcatttacgccgataagcctgtgtagatcattgctcccagatcctgagcagggcgcttygtgattactcattcccctgctatcaggatcacttgtaatctagccacctgcttgtttgggcaggctcagaaatgctgatgcaatccacctcaatgaagtacagctgttcaacgatgcatttgtagtgcacagttttctgtctagttttctactg

SEQ ID NO: 10062 - DNA, 600 bp, Chicken  19866894206100_5
gtggtggatgtatagcactgctgtctttgtgggggtcaccaaaacaaaactgatcccacagtgggatctcatcatagcagctctgtggaccacaggtattgactcaataagacaaagagcargcacaacagggtataaaaatgcaaatacattycagcgtgcaaagtaagcaagtttagcataaacgtgaggaaaaataaaacaagcaaacggtagctgccagagttcctggagaaggctggcatttacgccgataagcctgtgtagatcattgctcccagatcctgagcagggcgcttygtgattactcattcccctgctatcaggatcacttgtaatctagccacctgcttgtttgggcaggctcagaaatgctgatgcaatccacctcaatgaagtacagctgttcaacgatgcatttgtagtgcacagttttctgtctagttttctactgttcgtctgacttcatttacccataaatctgattctttttatcactgttttcatcactacaaagcacatgccttcttttaccttcttcatgtcactcagcagtcttaagaggctgatgtgatttggagcagcttactcctgccactt

SEQ ID NO: 10063 - DNA, 599 bp, Chicken  19866894206101_1
  misc_feature (1)..(177): n is any nucleotide
nnnnnnnnnnnnnnnnnnnnnnnnnnnnnnnnnnnnnnnnnnnnnnnnnnnnnnnnnnnnnnnnnnnnnnnnnnnnnnnnnnnnnnnnnnnnnnnnnnnnnnnnnnnnnnnnnnnnnnnnnnnnnnnnnnnnnnnnnnnnnnnnnnnnnnnnnnnnnnnnnnnnnnnnnnnnnnnnntgtctttttcctccagagtgaagaaaaatatattggtaattattgcagaattctgctaaatgtaagatagatgcaaactgggggtctggttaaattacacctattctatttacagttgatttmcatttatcagctcagctgtgagttagattgaaaaagatgaaaagtgtgtyctgtgttagaatggctgtgaaagagaaatacaatagcttgatagcaccatttatctttaatttagagatactataaagataagacaaacggaattaaaatgaaagaatctcagggatggttgttgttttttttgttttgtttttttggctttttaaggcaacacttattttttcttttttctttttccccacaaattatcagtaatgtgaagaaaaagattaagatcttcaccatacattccatattca

SEQ ID NO: 10064 - DNA, 599 bp, Chicken  19866894206101_2
  misc_feature (1)..(127): n is any nucleotide
nnnnnnnnnnnnnnnnnnnnnnnnnnnnnnnnnnnnnnnnnnnnnnnnnnnnnnnnnnnnnnnnnnnnnnnnnnnnnnnnnnnnnnnnnnnnnnnnnnnnnnnnnnnnnnnnnnnnnnnnnnnnnnntgtctttttcctccagagtgaagaaaaatatattggtaattattgcagaattctgctaaatgtaagatagatgcaaactgggggtctggttaaattacacctattctatttacagttgatttmcatttatcagctcagctgtgagttagattgaaaaagatgaaaagtgtgtyctgtgttagaatggctgtgaaagagaaatacaatagcttgatagcaccatttatctttaatttagagatactataaagataagacaaacggaattaaaatgaaagaatctcagggatggttgttgttttttttgttttgtttttttggctttttaaggcaacacttattttttcttttttctttttccccacaaattatcagtaatgtgaagaaaaagattaagatcttcaccatacattccatattcatatacacactgatttattgctagagcgacctcttgctacttgtaaatgca

SEQ ID NO: 10065 - DNA, 600 bp, Chicken  19866894206108_1
ctctttggtgaggagctgggcaggaacagccttcttctcgctctccatctgggcaagcttcctgctcatcacttcgatgtcttcttgcaggctctgcctctttttgccttcctcttcgatctgctgcgtcatcttggtcaggctgctctccagctgtgggtctctgtaatattccaccacctccttttcttccactctttcaatgggcctctgagtcttcagcatgagcagcttgttcctgtgctcctccaggtcctcttcaatcctggccacgttcctcctctcctcctccagctgcartttcagcccttcagattccctgctcggcacggctttgtttgcagattgctgggtctgctcatgcacgctttgaatgtcctcatgcacttctttctgcraggagacaacaaacgaaaataaaaaagctgggaaagcaagtcactccgaacctagcacagagcagggcaggagacagaatggtagataacccctgggagcacctaaaggaggccacttgtaagtggcagatgaggacacattagcaccatttcaagcagctacacctcaaagagtttccacctgtcagggaggtgctgcagt

SEQ ID NO: 10066 - DNA, 600 bp, Chicken  19866894206108_2
tctttttgccttcctcttcgatctgctgcgtcatcttggtcaggctgctctccagctgtgggtctctgtaatattccaccacctccttttcttccactctttcaatgggcctctgagtcttcagcatgagcagcttgttcctgtgctcctccaggtcctcttcaatcctggccacgttcctcctctcctcctccagctgcartttcagcccttcagattccctgctcggcacggctttgtttgcagattgctgggtctgctcatgcacgctttgaatgtcctcatgcacttctttctgcraggagacaacaaacgaaaataaaaaagctgggaaagcaagtcactccgaacctagcacagagcagggcaggagacagaatggtagataacccctgggagcacctaaaggaggccacttgtaagtggcagatgaggacacattagcaccatttcaagcagctacacctcaaagagtttccacctgtcagggaggtgctgcagtgcacaaggttgcttggtgctgccttgttacagctgcagaaggactgtttccaaccgcgatccagcgtaccccaaccatccacaagctcttagctggta

SEQ ID NO: 10067 - DNA, 600 bp, Chicken  19866894206108_3
ctacacctcaaagagtttccacctgtcagggaggtgctgcagtgcacaaggttgcttggtgctgccttgttacagctgcagaaggactgtttccaaccgcgatccagcgtaccccaaccatccacaagctcttagctggtaccttctcaacaatcttcttggcaaactccagccggctgagctgctgtctgttttctgctgccagctccatgtagtgcttggatacatcattttcctggaaaaggagcagcagtgagagcctcgtcccactcacccccacacagatctgttggatatcaygctctcccaatccctcctttcacccaacacacgttgggtgctgcgctatcccagggactggtgtcatcacatctgaytttccatggaaaatgagatacagagcatctaagtacttatgcaggagaacgtgtcccctttgatygartgcctgttggatgcctattgccctacgctgagttcaggcttccagattcaccttcagccacacaaggatggcagttggtaaagccaaggtgacatgggagataygggctgtaactgggaagagcacaaaggagctctggctcagtcctgccaaag

SEQ ID NO: 10068 - DNA, 600 bp, Chicken  19866894206108_4
gcagaaggactgtttccaaccgcgatccagcgtaccccaaccatccacaagctcttagctggtaccttctcaacaatcttcttggcaaactccagccggctgagctgctgtctgttttctgctgccagctccatgtagtgcttggatacatcattttcctggaaaaggagcagcagtgagagcctcgtcccactcacccccacacagatctgttggatatcaygctctcccaatccctcctttcacccaacacacgttgggtgctgcgctatcccagggactggtgtcatcacatctgaytttccatggaaaatgagatacagagcatctaagtacttatgcaggagaacgtgtcccctttgatygartgcctgttggatgcctattgccctacgctgagttcaggcttccagattcaccttcagccacacaaggatggcagttggtaaagccaaggtgacatgggagataygggctgtaactgggaagagcacaaaggagctctggctcagtcctgccaaaggctggtgacatttgtccctgggtttagggtcacaacgtggctctaagggtggattaaggcttgcagagcacacagga

SEQ ID NO: 10069 - DNA, 600 bp, Chicken  19866894206108_5
cttctcaacaatcttcttggcaaactccagccggctgagctgctgtctgttttctgctgccagctccatgtagtgcttggatacatcattttcctggaaaaggagcagcagtgagagcctcgtcccactcacccccacacagatctgttggatatcaygctctcccaatccctcctttcacccaacacacgttgggtgctgcgctatcccagggactggtgtcatcacatctgaytttccatggaaaatgagatacagagcatctaagtacttatgcaggagaacgtgtcccctttgatygartgcctgttggatgcctattgccctacgctgagttcaggcttccagattcaccttcagccacacaaggatggcagttggtaaagccaaggtgacatgggagataygggctgtaactgggaagagcacaaaggagctctggctcagtcctgccaaaggctggtgacatttgtccctgggtttagggtcacaacgtggctctaagggtggattaaggcttgcagagcacacaggagaaaggcaactgtttccgtgtgttcaccttaacactgtacctgggcctggatgctttcttgtaga

SEQ ID NO: 10070 - DNA, 600 bp, Chicken  19866894206108_6
ctcaacaatcttcttggcaaactccagccggctgagctgctgtctgttttctgctgccagctccatgtagtgcttggatacatcattttcctggaaaaggagcagcagtgagagcctcgtcccactcacccccacacagatctgttggatatcaygctctcccaatccctcctttcacccaacacacgttgggtgctgcgctatcccagggactggtgtcatcacatctgaytttccatggaaaatgagatacagagcatctaagtacttatgcaggagaacgtgtcccctttgatygartgcctgttggatgcctattgccctacgctgagttcaggcttccagattcaccttcagccacacaaggatggcagttggtaaagccaaggtgacatgggagataygggctgtaactgggaagagcacaaaggagctctggctcagtcctgccaaaggctggtgacatttgtccctgggtttagggtcacaacgtggctctaagggtggattaaggcttgcagagcacacaggagaaaggcaactgtttccgtgtgttcaccttaacactgtacctgggcctggatgctttcttgtagaggg

SEQ ID NO: 10071 - DNA, 600 bp, Chicken  19866894206108_7
gcagtgagagcctcgtcccactcacccccacacagatctgttggatatcaygctctcccaatccctcctttcacccaacacacgttgggtgctgcgctatcccagggactggtgtcatcacatctgaytttccatggaaaatgagatacagagcatctaagtacttatgcaggagaacgtgtcccctttgatygartgcctgttggatgcctattgccctacgctgagttcaggcttccagattcaccttcagccacacaaggatggcagttggtaaagccaaggtgacatgggagataygggctgtaactgggaagagcacaaaggagctctggctcagtcctgccaaaggctggtgacatttgtccctgggtttagggtcacaacgtggctctaagggtggattaaggcttgcagagcacacaggagaaaggcaactgtttccgtgtgttcaccttaacactgtacctgggcctggatgctttcttgtagaggggtcacccgcagcctcttggcagcaaaatccgtcagggcagggtccagagaagagctgtatttgcctgcctgcagctcatagtcctgttcagagccaaaacagaa

SEQ ID NO: 10072 - DNA, 565 bp, Chicken  19866894206117_1
ttagcatgcagccatgactgccgtgcaaaacaaaatgtccttaatgactcattaagtattatttttcactttctgtctcattctcattaatttgtgagttcaagacttttttcattttgtagccttgatctctctgagaatcttattactgcctgcccagcggtggatggtgggactccagataatcttagaggtcttttccaaccttaattattctgattccatctcagcctgtagaaaaagctttgtcagaatgttgtgcagcagggctgtgctgtggggctgtaggagggactgacmagtagccagtgagaactaggtcacaaagtgaaaactatccacctgaaaagtgaaatcttcatcctttccagagtaaagtgggggaaaatacatatggattatatttgggaaagattgaactctgtcattcatgggaataaattcctttccaatatgtgtgacagcaacagggtgacacccatcttgatatgcaatattacaagcttgatttttttttttctatctaactgttttattactatcctatttcaggatcactttatgg

SEQ ID NO: 10073 - DNA, 600 bp, Chicken  19866894206118_1
actgatgttataggaaggacggacggttgcgtttgcaggaaaatgagtgcccagtggattaattacaggaggggctccatagcgaaagtgcctgcaagagaaaccagaatcccaataaaccaagggatggaaacacacgtgtgagataaactggaatatgaactcatgaatagatacccaggttggcctgagatcagagagagtgcaggctcgaaataacccacattttaagtggagcgcagagccatcattttcatttggtgaggaccggctggcattaccttatctcagacttattcwgagattgatttaacttggctgcttattaagataaggatttacatcattccatcaagcctgaaagcaaatttccgtaacacctacttaggttaagccccaatcacaaaactgcttttcttttttttttttttaaaaaaaaaaaacaaccctcagcaaattccctgtatagccacgctaggctaaaccatcaattaagagctttctttttatagctaagatctgcatcttccctatttcctcccctaaggagggcagaccgattaaaacacactcgcagaggaaggcctttgtgactgactc

SEQ ID NO: 10074 - DNA, 600 bp, Chicken  19866894206120_1
aaatttttatgtcaaaccaatattcacatattcagttttggctttcttcccaaaaagcaaaaagaaggtttaataatctgattttgatttggtttgagttctagctgaggtagaacaacattgcttttccttctgaatttctagtctcaggcacctggaatttcttctagcaacagtgaggataagagatggccgccaactctcatgttatgtctctgtgggcttggggtcaatccctctttcccactcagataaaatgctgatcttatgtctccgacaaagaggggtgctgttaatagrtgtcaacattaatggatttgggcacaatctcagggagtcactaagacattcttgaaaaataacatgctgccatcccagaagagaagcagcacatagctaaatgaagtgcttaccagtccattaataacagaaaacatgatgggaacgactcgtggctttttttcacatttagcaatcctgttttatcgttggctcactgagcagctctgagacatttctgattgcctgtttttttcctaagaaaatttcacggtgtcctgaaaaagacttttggtgcctgcctgaggaatttgcttgtct

SEQ ID NO: 10075 - DNA, 599 bp, Chicken  19866894206124_1
  misc_feature (1)..(84): n is any nucleotide
nnnnnnnnnnnnnnnnnnnnnnnnnnnnnnnnnnnnnnnnnnnnnnnnnnnnnnnnnnnnnnnnnnnnnnnnnnnnnnnnnnnnatgtgttataggatatgaattattgtgcaaatcgttccattcatctcagctaaattcatcctgcaactataaaataaatcacatcctgtataaggaaaaagcagcagggtagggaaatggctttctgctggagtcaatttgtgcagcaaattctgtgcagtgggtctaagaccttaggagaacacagatttctatctttataagcatatacacagmcaggataaatgctctgaaatgaggaattgcatgtagactctgtgtgggtaggctaaactagctttcagaaatacctttcttataagggaatatcttgagatattaataaaatttctgttttcccataagctgcatatctgggacatctctgtgtcatgttgctttactgaccattgccagaagaacatcttgaaataagctgcaggactggaagtgctggttctttggtgctatacaatcataattctcacaggatagagggaaggatcctaaaaattttgctcataatgaataacacc

SEQ ID NO: 10076 - DNA, 600 bp, Chicken  19866894206124_2
gcatgtagactctgtgtgggtaggctaaactagctttcagaaatacctttcttataagggaatatcttgagatattaataaaatttctgttttcccataagctgcatatctgggacatctctgtgtcatgttgctttactgaccattgccagaagaacatcttgaaataagctgcaggactggaagtgctggttctttggtgctatacaatcataattctcacaggatagagggaaggatcctaaaaattttgctcataatgaataacaccacacttgaagacaattgctggttggtatrggcaaggctggacagtttggttggggccaccaggacyacatggtgtgatggcataggtcagtcgagaaggctgcccatcctctttaagcagcaaggagagggagtgtgagacttacacagtccagtagcggtcatgtgggatcacaaatgtatatcccacaggatcagtttcctactgctgcatgggcagatgtttctggggtctcattccttccagtcttcatcttcccagcttggagacaagtgccagcaacaccctgtctggatggcaatattttcaaaaatgctgttagagcacaa

SEQ ID NO: 10077 - DNA, 600 bp, Chicken  19866894206124_3
cagaaatacctttcttataagggaatatcttgagatattaataaaatttctgttttcccataagctgcatatctgggacatctctgtgtcatgttgctttactgaccattgccagaagaacatcttgaaataagctgcaggactggaagtgctggttctttggtgctatacaatcataattctcacaggatagagggaaggatcctaaaaattttgctcataatgaataacaccacacttgaagacaattgctggttggtatrggcaaggctggacagtttggttggggccaccaggacyacatggtgtgatggcataggtcagtcgagaaggctgcccatcctctttaagcagcaaggagagggagtgtgagacttacacagtccagtagcggtcatgtgggatcacaaatgtatatcccacaggatcagtttcctactgctgcatgggcagatgtttctggggtctcattccttccagtcttcatcttcccagcttggagacaagtgccagcaacaccctgtctggatggcaatattttcaaaaatgctgttagagcacaatagctcattagtcccagggattcatagacattttgct

SEQ ID NO: 10078 - DNA, 600 bp, Chicken  19866894206127_1
caaagtattctgaatcagtcctgaatgcttgacagcacaggtcaggtgtgtgtgtctcaagctgtgtcccattcctcagcctgcaaaggcagagggagtattttatagttgtgactgattctttgctaaaagaaagcctgaacattgtgatcatttttgttaatgacagagggagtctgggcatgggtagggatcatgcaactcctattttcatatgagatctattagggacatgcctgttcccaccccagctgggcaaacaggactcactgtgcctcttcacttgctgcagtactcacycacaggtctgatcctgcacatgcagtatggctcagatgagtgagtatatgtcagactgaggtttaaggtggccttgggcttcaaaaggatgcagctcagagcctgatctttgctgaatgggctggaatgggctgcccatggaggtggtggagtcactgaccctggagatgttcaaggaacatttaggtgttgtgtttagggatttggtttagtgagagctattggtgattggtggacagttggacaggatgatcttgtaggtcttttccagccttggtgattctgtgattctgtgaatct

SEQ ID NO: 10079 - DNA, 443 bp, Chicken  19866894206129_1
atctgaatctgaattctgaaatggtcatcctcagtttgcacagacagtgacactcagctaagtcagagcagtgtttcttgggaccttctccttgggaactggaagagaactggaggggaattaccccagccagaggtgaagttgctggagcaggggcttcagcatccttctttccagcaggaagttttccagttttgtttttagggatggtaaagctctgcatcttctctgcgtgtttgtagatggtgccccttaatcaagtatgttttgcttctgctttctgttttctggtcttgttasctcagataaaggataaaatactgccgtttccaagcagtttttccctgatgaggaaagacctacaccaagacttttttcatacaaatcaccattttatgcttcctaatgtacttcaccatcagcagcacctggcacattccata

SEQ ID NO: 10080 - DNA, 600 bp, Chicken  19866894206138_1
tttctcatcatttgttttctctatcagctggacttaaaaatgaaagtacagctgtaagaatacatatagccttgtatagcaatttttgctagttttatggcagatcttgattccctggaaacctttcagtgtcaaagatttttatttgtgtgaacatataatttaaaaacccagactgacttcttcaatatattcatgttttactgggttgcaggttttagttcaagaatgctgattgtgcatctgttggacacatatatagaatagtatattactagctactgacccttctggtatttyacaaagacattgctgctctctggcgctccatctccactctctatttggtacattaagttaacctggaagttctgttccctggaatatttacatgtcattatttagttcaaaaagactgtgataaaaggagatagaaatgctttctcactccggtatcttgcacatctataattgactgatctatcacttaatcccttgaaagagttctttcagtagccttctgacccccctccccatgctatctctttaggccacttacctcaagtagctggtgttttcctgtgcttttttcctctggaa

SEQ ID NO: 10081 - DNA, 552 bp, Chicken  19866894206149_1
ggcagaggaagggagatgggatgtgtttctgggaggcccatgaggagcaatagccagagacgctgggtgcctccccagccacctccagcacaaagctaagtaaacagttttctctcattgtctgggagcagtgagataggaacagagaagttgcagcgctgcctgccctgggcagccccttggctgctctttcacctgccccactgccactaccaggcctgtgggcagggcagcccccaccctccatcagcacctcaggccacaggggcccagtgtgcatttggggttgtaggtactgtragcaaataattcattctcctcagatcatttgggagtaacttgtagatattccaaagtgatcaataaggcacttgggcctctttctgctccctcgtgctgtatgcatgccagcatttcagcacgatctctggagcgggtgtatttaacatctgtttcccacaaactgggaacctgcctttgaaaactgcctcccatgaagacttctgtgagtagaagtctatagtttgctgttggcaggaagcgaacaaagag

SEQ ID NO: 10082 - DNA, 600 bp, Chicken  19866894206154_1
gcttgtgtgtgccctgaggtgggaatcatctaagctgaggctctatactgttaacggctttccaaacagctccatttactcccttggtgatgtctcctgcctgttattctatccatccagatcagagtttctgaagcctgcaagggaaaaatcagtagcctacacagagcgttatcatacatagggacagagatgtgatcgacctcattaactggaaagtgccagagaaaaacaattccagtatttgttgagctcagagctggcattgttcctgtagcattgtgtgttttcagcacgacrcccaaggatcccagcctgttccactccatcagttccgtggctgtgagttaaattctgtgcaaatgttttggatgagtggattaacaaattggtagaggttgtcaaattcatccacaaagaaggaatgctccttatctggatctgttgcaatggcttccagttcatcttgggcagcccaagcaactccaatggagtaagctataactcctggaaagaaacccaagagataaggrtgagcatwaargttttaattgcattrcatttggttggttaagacccattctgcagacatagttacaa

SEQ ID NO: 10083 - DNA, 600 bp, Chicken  19866894206154_2
aattccagtatttgttgagctcagagctggcattgttcctgtagcattgtgtgttttcagcacgacrcccaaggatcccagcctgttccactccatcagttccgtggctgtgagttaaattctgtgcaaatgttttggatgagtggattaacaaattggtagaggttgtcaaattcatccacaaagaaggaatgctccttatctggatctgttgcaatggcttccagttcatcttgggcagcccaagcaactccaatggagtaagctataactcctggaaagaaacccaagagataaggrtgagcatwaargttttaattgcattrcatttggttggttaagacccattctgcagacatagttacaaggccatgaaaaaaaacggcagtgaattgcagtgctctctgtaaaaaagagtggcattgtcaaaatggaagaaatgcctggtgtctgctgtggaactgccctttgccaatagcaggaaggctcagacaatagtaaagctctggctgtggctctgaacaacagctccttgtttctgtgtcttacaattgctctgggagatgtgtgaatatcccgattggaaagccaaaggaggct

SEQ ID NO: 10084 - DNA, 600 bp, Chicken  19866894206154_3
tatttgttgagctcagagctggcattgttcctgtagcattgtgtgttttcagcacgacrcccaaggatcccagcctgttccactccatcagttccgtggctgtgagttaaattctgtgcaaatgttttggatgagtggattaacaaattggtagaggttgtcaaattcatccacaaagaaggaatgctccttatctggatctgttgcaatggcttccagttcatcttgggcagcccaagcaactccaatggagtaagctataactcctggaaagaaacccaagagataaggrtgagcatwaargttttaattgcattrcatttggttggttaagacccattctgcagacatagttacaaggccatgaaaaaaaacggcagtgaattgcagtgctctctgtaaaaaagagtggcattgtcaaaatggaagaaatgcctggtgtctgctgtggaactgccctttgccaatagcaggaaggctcagacaatagtaaagctctggctgtggctctgaacaacagctccttgtttctgtgtcttacaattgctctgggagatgtgtgaatatcccgattggaaagccaaaggaggcttcagatgt

SEQ ID NO: 10085 - DNA, 600 bp, Chicken  19866894206154_4
ttgttgagctcagagctggcattgttcctgtagcattgtgtgttttcagcacgacrcccaaggatcccagcctgttccactccatcagttccgtggctgtgagttaaattctgtgcaaatgttttggatgagtggattaacaaattggtagaggttgtcaaattcatccacaaagaaggaatgctccttatctggatctgttgcaatggcttccagttcatcttgggcagcccaagcaactccaatggagtaagctataactcctggaaagaaacccaagagataaggrtgagcatwaargttttaattgcattrcatttggttggttaagacccattctgcagacatagttacaaggccatgaaaaaaaacggcagtgaattgcagtgctctctgtaaaaaagagtggcattgtcaaaatggaagaaatgcctggtgtctgctgtggaactgccctttgccaatagcaggaaggctcagacaatagtaaagctctggctgtggctctgaacaacagctccttgtttctgtgtcttacaattgctctgggagatgtgtgaatatcccgattggaaagccaaaggaggcttcagatgttat

SEQ ID NO: 10086 - DNA, 600 bp, Chicken  19866894206154_5
ctggcattgttcctgtagcattgtgtgttttcagcacgacrcccaaggatcccagcctgttccactccatcagttccgtggctgtgagttaaattctgtgcaaatgttttggatgagtggattaacaaattggtagaggttgtcaaattcatccacaaagaaggaatgctccttatctggatctgttgcaatggcttccagttcatcttgggcagcccaagcaactccaatggagtaagctataactcctggaaagaaacccaagagataaggrtgagcatwaargttttaattgcattrcatttggttggttaagacccattctgcagacatagttacaaggccatgaaaaaaaacggcagtgaattgcagtgctctctgtaaaaaagagtggcattgtcaaaatggaagaaatgcctggtgtctgctgtggaactgccctttgccaatagcaggaaggctcagacaatagtaaagctctggctgtggctctgaacaacagctccttgtttctgtgtcttacaattgctctgggagatgtgtgaatatcccgattggaaagccaaaggaggcttcagatgttattgagacagtagaaat

SEQ ID NO: 10087 - DNA, 577 bp, Chicken  19866894206158_1
gaatccgataatgaccgaaaggtaaacaacgcaatgccctctgtacctcctgggtaaatagaaacactgttgaatgttcactttcttttctgcagagcatgaatatagttgtttcaaactgttaatttaaagggaggggagggatctgtattgtcacacctaatgctcagttaattggatttttctaactgattgccagtcaactaaatgggcaagctgacaagcagctttagacacttagaggcgctgtattgagggctgcgtgtatccaaaagggttcctgagtttttctgacctttytcgtctattttttttaggttatgctacaattagaaaagaagctttttgactattttaatcaagatgtttttagagataataatggcactgcggtaagttcattactgttgaaggaataagttgaaaactcataaaaattgcgtttctatcaacccttaccaagccttacccttattagtcctcctgtgtccagaatgagaagagagaattcacccagtttgggtcactgctccaactttcttgcacagtacagcttcttaactttggtatctatttg

SEQ ID NO: 10088 - DNA, 388 bp, Chicken  19866894206164_1
acccatcacaagtgaatccccttcaccaagtgaacagcagcagaataataagctaatacttgcagactctcctcaaccaaaaggcaagaacaagaaaaacaagaagaaaaagggggacaaagtcaacaattccattggtaagaaaaatgaagttgcttgttcattttcttttttactgttcctacttaagtccagaagtttaaaatctttctttagtcaatctggtaatgtaaaacaaatgcaacaacaaaaacccagagaaattggtgtcaggaaaagctcaagttactatgaattcartttgtttttcagggggctcattggtgatgcacaatctgaagatagcattttccttttagaatatgcatatatacttctagtgaagcga

SEQ ID NO: 10089 - DNA, 600 bp, Chicken  19866894206168_1
gcatttctactagccttgtgcagtaagaggggggttcaagtgaggtatggggcatgctgggtgcttagtgggtgtgcatgtgtgcctgctgtagtggtgctttgttctgcatcctattaattgcattctcttgctgaagattcaccctgctctgttggatccggacagctgagcagcgggcaccgggtctgggagcgaagaatttggtgcattcttggtgctggttgcttccctgctgccttcagaactggggtattgcagctgaaggcaatggttgtggaacagtatgagcagcgtggrcttcatgggtcccctcagcagaaccaggctctgcagccctcagtcctcactgctgaggctgggacgtggcattagggtcagggaagtgcccacaagtggcagtgaggctgtgtgatgtcacagtctcagggaaagctttcctttgtatctaaaaaatagatgtgatgagttctgctctcagtactggggttataggagagaatgcctgcatcttttgctatgttagtgcctgtgggtcattgtctgtagcatgcatttttggggaggacaaggggaagcatttcatctctataatgttat

SEQ ID NO: 10090 - DNA, 600 bp, Chicken  19866894206174_1
tgcactgaagatacaggatgtaatgtccaaaatctcagtaaaaaaaggaaatgtattcccctctgatctaattgagatgtaattgtcacgtgaactaaaggagtctgcagtatctgaggaaacctgtatctcctcagcagttcatctcaagtcattcagcatttgatgtgaacctgcccaaaccagaaggacacgggattttttttaagatggaggtttctacaagtcagtttaatgaaaaatatttatctctgagctagcatgtctagttattgcttactctgcgtaattcacattatrtactgtgatactgctgccactaatgtcatgactgatccactaagggagtaacagagagtgtgacactgtcttcaccatgcagagtaagttgagaaaccaggtttgtattcagcgtgtagtggaaacaatttaaaaaaaaagtgaaaaaaccccacaaaactccaaactctctatggacagtaaaaaatttgaatgcgttccttgtggtttgtaggtgggaaatagcaccatggctgagtacggatctttccaaattacgaaccagtcccccagatctaaaattgtaaaattgtacacgga

SEQ ID NO: 10091 - DNA, 599 bp, Chicken  19866894206180_1
  misc_feature (1)..(94): n is any nucleotide
nnnnnnnnnnnnnnnnnnnnnnnnnnnnnnnnnnnnnnnnnnnnnnnnnnnnnnnnnnnnnnnnnnnnnnnnnnnnnnnnnnnnnnnnnnnnnnggggatgctgccacctcccccatcatcagcagaacaaatcctcgtagctctaaggagataggagtgtgtgccttaagggataggcaactggttcagcttcagttagggaaaatagcagccagcaaagattaaatacttgtatcccactgactttggcacttcttgatttccagaggattcctgcaactactggaataatgcacctwacaagaatgtggcatgataggacagagacaaaagagaataagacaagtttattctgcagaaataaagagcccacacacagcttaatccaacagctcatcaggcaacygtcatyataccctgtgcaggtgcggtgggcttgagagtccaaatggatgagaattgttaccttccagggagatcacttgctcaaaatgtagaggcagaaaaaatgcagggtatggaaatgcggttaccagagtaaataaaaacggtgctttggccgatagttaactgttggttggacacacatgttaaaaaw

SEQ ID NO: 10092 - DNA, 600 bp, Chicken  19866894206180_2
cctcccccatcatcagcagaacaaatcctcgtagctctaaggagataggagtgtgtgccttaagggataggcaactggttcagcttcagttagggaaaatagcagccagcaaagattaaatacttgtatcccactgactttggcacttcttgatttccagaggattcctgcaactactggaataatgcacctwacaagaatgtggcatgataggacagagacaaaagagaataagacaagtttattctgcagaaataaagagcccacacacagcttaatccaacagctcatcaggcaacygtcatyataccctgtgcaggtgcggtgggcttgagagtccaaatggatgagaattgttaccttccagggagatcacttgctcaaaatgtagaggcagaaaaaatgcagggtatggaaatgcggttaccagagtaaataaaaacggtgctttggccgatagttaactgttggttggacacacatgttaaaaawaaataaataaataaatagaaaggagggggraaaaaagcagagcaaataaattgtcttcacgtttcaggaaaaagtgaaaccttctggaggtggtggtggcctatgctg

SEQ ID NO: 10093 - DNA, 600 bp, Chicken  19866894206180_3
ccatcatcagcagaacaaatcctcgtagctctaaggagataggagtgtgtgccttaagggataggcaactggttcagcttcagttagggaaaatagcagccagcaaagattaaatacttgtatcccactgactttggcacttcttgatttccagaggattcctgcaactactggaataatgcacctwacaagaatgtggcatgataggacagagacaaaagagaataagacaagtttattctgcagaaataaagagcccacacacagcttaatccaacagctcatcaggcaacygtcatyataccctgtgcaggtgcggtgggcttgagagtccaaatggatgagaattgttaccttccagggagatcacttgctcaaaatgtagaggcagaaaaaatgcagggtatggaaatgcggttaccagagtaaataaaaacggtgctttggccgatagttaactgttggttggacacacatgttaaaaawaaataaataaataaatagaaaggagggggraaaaaagcagagcaaataaattgtcttcacgtttcaggaaaaagtgaaaccttctggaggtggtggtggcctatgctgagacac

SEQ ID NO: 10094 - DNA, 600 bp, Chicken  19866894206180_4
wacaagaatgtggcatgataggacagagacaaaagagaataagacaagtttattctgcagaaataaagagcccacacacagcttaatccaacagctcatcaggcaacygtcatyataccctgtgcaggtgcggtgggcttgagagtccaaatggatgagaattgttaccttccagggagatcacttgctcaaaatgtagaggcagaaaaaatgcagggtatggaaatgcggttaccagagtaaataaaaacggtgctttggccgatagttaactgttggttggacacacatgttaaaaawaaataaataaataaatagaaaggagggggraaaaaagcagagcaaataaattgtcttcacgtttcaggaaaaagtgaaaccttctggaggtggtggtggcctatgctgagacacattgtcctgtgaccaaacaagttccagctggtctcagactctgtttggtttgctttttattttgaacattgaaaattatgttttaattcctagctgtcagcttactcccgctgggttgttccatagaggggagatgtccttgttagatgacattctcttctttccttgctagagctggtgcaggca

SEQ ID NO: 10095 - DNA, 600 bp, Chicken  19866894206180_5
aaaagagaataagacaagtttattctgcagaaataaagagcccacacacagcttaatccaacagctcatcaggcaacygtcatyataccctgtgcaggtgcggtgggcttgagagtccaaatggatgagaattgttaccttccagggagatcacttgctcaaaatgtagaggcagaaaaaatgcagggtatggaaatgcggttaccagagtaaataaaaacggtgctttggccgatagttaactgttggttggacacacatgttaaaaawaaataaataaataaatagaaaggagggggraaaaaagcagagcaaataaattgtcttcacgtttcaggaaaaagtgaaaccttctggaggtggtggtggcctatgctgagacacattgtcctgtgaccaaacaagttccagctggtctcagactctgtttggtttgctttttattttgaacattgaaaattatgttttaattcctagctgtcagcttactcccgctgggttgttccatagaggggagatgtccttgttagatgacattctcttctttccttgctagagctggtgcaggcacatctcccttcactcgctgatgttcccagc

SEQ ID NO: 10096 - DNA, 599 bp, Chicken  19866894206193_1
  misc_feature (1)..(18): n is any nucleotide
nnnnnnnnnnnnnnnnnnctctgtgagaaaggagtgctacagacaacagtgtgggaagatgagcacaagtgcacacacaggaggtggagaagctaaggagatggaacagctgtgagccctaacacagacctccagtgcaaagaatggaagatgaggacttccttgcctgagacctgtgctcctcattggctgcagtgatttacagggacaggagggaaactacagatgtctgaccttaatactcttgagacaatttgtcctgtctgccttgctgctgcaagcatccacggaccacaggamaatacagatccattttagagagcagtactgctggcatagcatctacactraaggattaaaaacaaaatcaagattcttttgacacatctttctgcctcttcttgtcactgtgcttgaaggtcacagggtcactactacacgcttcagagacaacacatcaggagttgctrggcaagggcagagttgccattayggaaaaggggcacattgctcacctcctggttcacctgagggaaggatcttggaaggaagcacaggcacagtcagaatgtaataatgagcatggaaacaagtggaga

SEQ ID NO: 10097 - DNA, 600 bp, Chicken  19866894206193_2
gtgggaagatgagcacaagtgcacacacaggaggtggagaagctaaggagatggaacagctgtgagccctaacacagacctccagtgcaaagaatggaagatgaggacttccttgcctgagacctgtgctcctcattggctgcagtgatttacagggacaggagggaaactacagatgtctgaccttaatactcttgagacaatttgtcctgtctgccttgctgctgcaagcatccacggaccacaggamaatacagatccattttagagagcagtactgctggcatagcatctacactraaggattaaaaacaaaatcaagattcttttgacacatctttctgcctcttcttgtcactgtgcttgaaggtcacagggtcactactacacgcttcagagacaacacatcaggagttgctrggcaagggcagagttgccattayggaaaaggggcacattgctcacctcctggttcacctgagggaaggatcttggaaggaagcacaggcacagtcagaatgtaataatgagcatggaaacaagtggagactggagtaaaaaatgacttaaagcaagccaaggtgtcaagaaaagtttctg

SEQ ID NO: 10098 - DNA, 600 bp, Chicken  19866894206193_3
gacctgtgctcctcattggctgcagtgatttacagggacaggagggaaactacagatgtctgaccttaatactcttgagacaatttgtcctgtctgccttgctgctgcaagcatccacggaccacaggamaatacagatccattttagagagcagtactgctggcatagcatctacactraaggattaaaaacaaaatcaagattcttttgacacatctttctgcctcttcttgtcactgtgcttgaaggtcacagggtcactactacacgcttcagagacaacacatcaggagttgctrggcaagggcagagttgccattayggaaaaggggcacattgctcacctcctggttcacctgagggaaggatcttggaaggaagcacaggcacagtcagaatgtaataatgagcatggaaacaagtggagactggagtaaaaaatgacttaaagcaagccaaggtgtcaagaaaagtttctgcaagtccatttgtaataagaaaaagacaggcaaatgttggtctacagctcagcagagtagaaaagcttttgacagatgatgccataaaagctgaagtgtttgcagtctcattttggctac

SEQ ID NO: 10099 - DNA, 600 bp, Chicken  19866894206193_4
agtgatttacagggacaggagggaaactacagatgtctgaccttaatactcttgagacaatttgtcctgtctgccttgctgctgcaagcatccacggaccacaggamaatacagatccattttagagagcagtactgctggcatagcatctacactraaggattaaaaacaaaatcaagattcttttgacacatctttctgcctcttcttgtcactgtgcttgaaggtcacagggtcactactacacgcttcagagacaacacatcaggagttgctrggcaagggcagagttgccattayggaaaaggggcacattgctcacctcctggttcacctgagggaaggatcttggaaggaagcacaggcacagtcagaatgtaataatgagcatggaaacaagtggagactggagtaaaaaatgacttaaagcaagccaaggtgtcaagaaaagtttctgcaagtccatttgtaataagaaaaagacaggcaaatgttggtctacagctcagcagagtagaaaagcttttgacagatgatgccataaaagctgaagtgtttgcagtctcattttggctacagtatgactgcctttactttcct

SEQ ID NO: 10100 - DNA, 600 bp, Chicken  19866894206195_1
ataattcaaggaagcaagggaaccttcacttgaatatttggctagtctgagaatccactagataaagccttccatgtggttaagaagatttaggtccctgcactcactgattaccagctaaagcttaacacattcccaagactcttgacagtttctgaattgactctagtaggctgtgccaggttggaatggtacttcaggatctaatgaagcaaggcatggcagtatactacctgtaatgtagtatactgcattacagtagtatactgcattacttcatttaatattaactgtgtggaygagataccaaagttccttagaacatacaaagtgcttccaaaattaaacaaaaatgtgagatggctgaaaaatcactccaaaagycastacactgaagcagaagacaaacaatttttgtaggtatggatggtgcaaggaaaagcagcatcatgtttgaaaaagtcataamaagttcttgtgcatggaaatgaagattaactgaccgttgattttcagagagtacggaaactgcctttgtggttcacagtaacatcttcacttcagaaagaaactacaaataagaaggttctgatacaataa

SEQ ID NO: 10101 - DNA, 600 bp, Chicken  19866894206195_2
aagatttaggtccctgcactcactgattaccagctaaagcttaacacattcccaagactcttgacagtttctgaattgactctagtaggctgtgccaggttggaatggtacttcaggatctaatgaagcaaggcatggcagtatactacctgtaatgtagtatactgcattacagtagtatactgcattacttcatttaatattaactgtgtggaygagataccaaagttccttagaacatacaaagtgcttccaaaattaaacaaaaatgtgagatggctgaaaaatcactccaaaagycastacactgaagcagaagacaaacaatttttgtaggtatggatggtgcaaggaaaagcagcatcatgtttgaaaaagtcataamaagttcttgtgcatggaaatgaagattaactgaccgttgattttcagagagtacggaaactgcctttgtggttcacagtaacatcttcacttcagaaagaaactacaaataagaaggttctgatacaataaaactatgccacctgagagtgttgaaaaatggaatttgatattccacttttggaagcagaagaaaattccaagtcttccaactcg

SEQ ID NO: 10102 - DNA, 600 bp, Chicken  19866894206195_3
atttaggtccctgcactcactgattaccagctaaagcttaacacattcccaagactcttgacagtttctgaattgactctagtaggctgtgccaggttggaatggtacttcaggatctaatgaagcaaggcatggcagtatactacctgtaatgtagtatactgcattacagtagtatactgcattacttcatttaatattaactgtgtggaygagataccaaagttccttagaacatacaaagtgcttccaaaattaaacaaaaatgtgagatggctgaaaaatcactccaaaagycastacactgaagcagaagacaaacaatttttgtaggtatggatggtgcaaggaaaagcagcatcatgtttgaaaaagtcataamaagttcttgtgcatggaaatgaagattaactgaccgttgattttcagagagtacggaaactgcctttgtggttcacagtaacatcttcacttcagaaagaaactacaaataagaaggttctgatacaataaaactatgccacctgagagtgttgaaaaatggaatttgatattccacttttggaagcagaagaaaattccaagtcttccaactcgaac

SEQ ID NO: 10103 - DNA, 535 bp, Chicken  19866894206195_4
taggctgtgccaggttggaatggtacttcaggatctaatgaagcaaggcatggcagtatactacctgtaatgtagtatactgcattacagtagtatactgcattacttcatttaatattaactgtgtggaygagataccaaagttccttagaacatacaaagtgcttccaaaattaaacaaaaatgtgagatggctgaaaaatcactccaaaagycastacactgaagcagaagacaaacaatttttgtaggtatggatggtgcaaggaaaagcagcatcatgtttgaaaaagtcataamaagttcttgtgcatggaaatgaagattaactgaccgttgattttcagagagtacggaaactgcctttgtggttcacagtaacatcttcacttcagaaagaaactacaaataagaaggttctgatacaataaaactatgccacctgagagtgttgaaaaatggaatttgatattccacttttggaagcagaagaaaattccaagtcttccaactcgaacagaagcaagccaaagca

SEQ ID NO: 10104 - DNA, 600 bp, Chicken  19866894206199_1
tttcagaaatcacttctgtccactactctaatactgaaaacatcacaggctctccaatttaatgacaaaccctaatcagtacaggtccttttttgaaatatgcattgagcacttttctccaatctgttggtgtggatggtgaaataccagtaatgaacagacacatatctactgcactcttggtctgggtagaagctgaactagttttccagaaccaaaagcctgaaatccactttccaccaaaggaacacgtggcttttcccagcagtagaatgaaagttgcctaacagacatcagaaytgcttcacactggtcctgtaatctcctgagatataagagtaatccaggctagttgtgctaagtgcacctacacagyacgtatttttcaatttaatctctgtattccaaaaacggcactcacctattttgaagccatagaagagagaggagtgtaagtgattcatcttacactgaaaacaaaagagcatgcgttagcttttgtactaacactgaggatattatggtcacacatttcctttgacaaaggatgaaktacaagtcaaagcaaagcccggagccttgctgtaaagcttcccctta

SEQ ID NO: 10105 - DNA, 600 bp, Chicken  19866894206199_2
cagtacaggtccttttttgaaatatgcattgagcacttttctccaatctgttggtgtggatggtgaaataccagtaatgaacagacacatatctactgcactcttggtctgggtagaagctgaactagttttccagaaccaaaagcctgaaatccactttccaccaaaggaacacgtggcttttcccagcagtagaatgaaagttgcctaacagacatcagaaytgcttcacactggtcctgtaatctcctgagatataagagtaatccaggctagttgtgctaagtgcacctacacagyacgtatttttcaatttaatctctgtattccaaaaacggcactcacctattttgaagccatagaagagagaggagtgtaagtgattcatcttacactgaaaacaaaagagcatgcgttagcttttgtactaacactgaggatattatggtcacacatttcctttgacaaaggatgaaktacaagtcaaagcaaagcccggagccttgctgtaaagcttccccttactcacacgatgccaacttggagacaaacccacagaaataactgctagcccatactgcttaccaggaacgggacaca

SEQ ID NO: 10106 - DNA, 531 bp, Chicken  19866894206199_3
ggcttttcccagcagtagaatgaaagttgcctaacagacatcagaaytgcttcacactggtcctgtaatctcctgagatataagagtaatccaggctagttgtgctaagtgcacctacacagyacgtatttttcaatttaatctctgtattccaaaaacggcactcacctattttgaagccatagaagagagaggagtgtaagtgattcatcttacactgaaaacaaaagagcatgcgttagcttttgtactaacactgaggatattatggtcacacatttcctttgacaaaggatgaaktacaagtcaaagcaaagcccggagccttgctgtaaagcttccccttactcacacgatgccaacttggagacaaacccacagaaataactgctagcccatactgcttaccaggaacgggacacaatcactgagctactccaactgactacagcagccattaggtgcactgcactccccgaggagcacgtggtgcctcagccactccatacgcctgcatgcctgcctccctcc

SEQ ID NO: 10107 - DNA, 600 bp, Chicken  19866894206203_1
atgactacgtgttcaggtgagggcatagggcacggccggggtgcagctgcgggggaacccccatcacctccccgtgcgtccctttgcagggtgaatggggccatcacggagggcttcgagcacgatgttggcagcaggacgtccttctacgtcttctccaccaacactatggtgaacgcgctgcgcagctatgctgccgacggcttccggcacccaccccaaacaccggtgggggacagtgggacacggggacaggagagctgtgggcacggcaccactgtcatctcctgatccttggcrcgtcctctgctgcaggagacgtgctacgtcttcctcccagaccacgaccgtgactacctgctgctgcgggcggccctgagccagcagcctgtggacagcggccaggatgagggggtccagtaagtggtcattatggggggacgcaggcacatccctgtgccccacggctcccagcagctgcccccacctccccacagcccccagcagttcttcggggaggacctgcaggcggggaagtttaggatgctgcacccggatttcatccgctacctcaggaaccggtaagaagcccccgggcgg

SEQ ID NO: 10108 - DNA, 599 bp, Chicken  19866894206213_1
  misc_feature (1)..(118): n is any nucleotide
nnnnnnnnnnnnnnnnnnnnnnnnnnnnnnnnnnnnnnnnnnnnnnnnnnnnnnnnnnnnnnnnnnnnnnnnnnnnnnnnnnnnnnnnnnnnnnnnnnnnnnnnnnnnnnnnnnnnnncagcagacataggcccaagctcaaggcaagcagaggcaaagagatgaggcccaggtgctatgaggcgcgaggccttgaactctagctctttttgcaccatcactatgtcaatagataataaataggatttgttgttgtcaaatataaacgctcagataccaacacatggagcagcaggcttrcacaggttctctgtggctcyamaccagccctatttagctgatctgygctgttttgcccaagaaatcacagcagcatgcatttcyactgcttcgggactgctttgtttctggtcgcaatcagctgtctgctctaattttcatacttaatgcagagcagaacagcctctggtcgtctctatgcaagccgtgggaccactcctgcctccccacctctgaaatgtaaaaagcacgcagcgtaatcttcccttcagtcacgaaaaataaagtataatcttaagtaaatattagtgttccactta

SEQ ID NO: 10109 - DNA, 599 bp, Chicken  19866894206213_2
  misc_feature (1)..(98): n is any nucleotide
nnnnnnnnnnnnnnnnnnnnnnnnnnnnnnnnnnnnnnnnnnnnnnnnnnnnnnnnnnnnnnnnnnnnnnnnnnnnnnnnnnnnnnnnnnnnnnnnnncagcagacataggcccaagctcaaggcaagcagaggcaaagagatgaggcccaggtgctatgaggcgcgaggccttgaactctagctctttttgcaccatcactatgtcaatagataataaataggatttgttgttgtcaaatataaacgctcagataccaacacatggagcagcaggcttrcacaggttctctgtggctcyamaccagccctatttagctgatctgygctgttttgcccaagaaatcacagcagcatgcatttcyactgcttcgggactgctttgtttctggtcgcaatcagctgtctgctctaattttcatacttaatgcagagcagaacagcctctggtcgtctctatgcaagccgtgggaccactcctgcctccccacctctgaaatgtaaaaagcacgcagcgtaatcttcccttcagtcacgaaaaataaagtataatcttaagtaaatattagtgttccacttatgtaaatacaaactgccatc

SEQ ID NO: 10110 - DNA, 599 bp, Chicken  19866894206213_3
  misc_feature (1)..(96): n is any nucleotide
nnnnnnnnnnnnnnnnnnnnnnnnnnnnnnnnnnnnnnnnnnnnnnnnnnnnnnnnnnnnnnnnnnnnnnnnnnnnnnnnnnnnnnnnnnnnnnnncagcagacataggcccaagctcaaggcaagcagaggcaaagagatgaggcccaggtgctatgaggcgcgaggccttgaactctagctctttttgcaccatcactatgtcaatagataataaataggatttgttgttgtcaaatataaacgctcagataccaacacatggagcagcaggcttrcacaggttctctgtggctcyamaccagccctatttagctgatctgygctgttttgcccaagaaatcacagcagcatgcatttcyactgcttcgggactgctttgtttctggtcgcaatcagctgtctgctctaattttcatacttaatgcagagcagaacagcctctggtcgtctctatgcaagccgtgggaccactcctgcctccccacctctgaaatgtaaaaagcacgcagcgtaatcttcccttcagtcacgaaaaataaagtataatcttaagtaaatattagtgttccacttatgtaaatacaaactgccatcga

SEQ ID NO: 10111 - DNA, 599 bp, Chicken  19866894206213_4
  misc_feature (1)..(72): n is any nucleotide
nnnnnnnnnnnnnnnnnnnnnnnnnnnnnnnnnnnnnnnnnnnnnnnnnnnnnnnnnnnnnnnnnnnnnnnncagcagacataggcccaagctcaaggcaagcagaggcaaagagatgaggcccaggtgctatgaggcgcgaggccttgaactctagctctttttgcaccatcactatgtcaatagataataaataggatttgttgttgtcaaatataaacgctcagataccaacacatggagcagcaggcttrcacaggttctctgtggctcyamaccagccctatttagctgatctgygctgttttgcccaagaaatcacagcagcatgcatttcyactgcttcgggactgctttgtttctggtcgcaatcagctgtctgctctaattttcatacttaatgcagagcagaacagcctctggtcgtctctatgcaagccgtgggaccactcctgcctccccacctctgaaatgtaaaaagcacgcagcgtaatcttcccttcagtcacgaaaaataaagtataatcttaagtaaatattagtgttccacttatgtaaatacaaactgccatcgagggctaaagcgctgatcctgtcaa

SEQ ID NO: 10112 - DNA, 599 bp, Chicken  19866894206213_5
  misc_feature (1)..(34): n is any nucleotide
nnnnnnnnnnnnnnnnnnnnnnnnnnnnnnnnnncagcagacataggcccaagctcaaggcaagcagaggcaaagagatgaggcccaggtgctatgaggcgcgaggccttgaactctagctctttttgcaccatcactatgtcaatagataataaataggatttgttgttgtcaaatataaacgctcagataccaacacatggagcagcaggcttrcacaggttctctgtggctcyamaccagccctatttagctgatctgygctgttttgcccaagaaatcacagcagcatgcatttcyactgcttcgggactgctttgtttctggtcgcaatcagctgtctgctctaattttcatacttaatgcagagcagaacagcctctggtcgtctctatgcaagccgtgggaccactcctgcctccccacctctgaaatgtaaaaagcacgcagcgtaatcttcccttcagtcacgaaaaataaagtataatcttaagtaaatattagtgttccacttatgtaaatacaaactgccatcgagggctaaagcgctgatcctgtcaaaacccctggctgagcatatttcttggggaaggacagcg

SEQ ID NO: 10113 - DNA, 600 bp, Chicken  19866894206217_1
attttctcaacaaaatcttacctaatgtccaaatgctttttgaaaagcattaaggaaatgtaaaaatagagtagctgcagggaggaagggtgtgtgtggacacctgacctttcattactatgagcacaatgccctaatccgaagaggaaaataccagtgcagtacagattatgaatagcagctgtaatgatttctgttgctttcagtacatgtggaaatacagctctgaaggtaaaagattatggttaatctgtcacgtaataaaaatacatttgagattttggtgtcatttttttgtgwtctttcctcctccttaatatctaactcatattgatctcttttacatttgtactgatagaggtgtcatttctctacagtttctgatgtcttcaactatcttttatttcattttcttatttccaaattctgtatgcaacctgttttagagcacgcagttttgttgatgaaagcaccagcactttgcctggtgccaggagatgctgtgacaattggagcaagtacactggtctgcaaatccttccatgtagttgccataaatagttacttgtcagactagcttcagttttgtggttaatagta

SEQ ID NO: 10114 - DNA, 600 bp, Chicken  19866894206217_2
catattgatctcttttacatttgtactgatagaggtgtcatttctctacagtttctgatgtcttcaactatcttttatttcattttcttatttccaaattctgtatgcaacctgttttagagcacgcagttttgttgatgaaagcaccagcactttgcctggtgccaggagatgctgtgacaattggagcaagtacactggtctgcaaatccttccatgtagttgccataaatagttacttgtcagactagcttcagttttgtggttaatagtagccgagctgcaccttgctcattcgakcaccagtgccattttaaaatgagtatgacctgtacatgtagtaacagtgttgtacgtgtagtaatggaagcattcagggccaggctggatgtggcyctgggcagcctggtctaatggttggcgaccctgcaaatagcagggaggttgaaactagatgatcatcatggtccttttcaacccaggccattctatgattctatgactctatgatttctgtgaaattagctgttagacgtgccatgaagtttttgttggcttctttgctaattctgtggtttttgctgaagggaaggccaggcg

SEQ ID NO: 10115 - DNA, 600 bp, Chicken  19866894206217_3
aattctgtatgcaacctgttttagagcacgcagttttgttgatgaaagcaccagcactttgcctggtgccaggagatgctgtgacaattggagcaagtacactggtctgcaaatccttccatgtagttgccataaatagttacttgtcagactagcttcagttttgtggttaatagtagccgagctgcaccttgctcattcgakcaccagtgccattttaaaatgagtatgacctgtacatgtagtaacagtgttgtacgtgtagtaatggaagcattcagggccaggctggatgtggcyctgggcagcctggtctaatggttggcgaccctgcaaatagcagggaggttgaaactagatgatcatcatggtccttttcaacccaggccattctatgattctatgactctatgatttctgtgaaattagctgttagacgtgccatgaagtttttgttggcttctttgctaattctgtggtttttgctgaagggaaggccaggcgtaaaatctgctttatttaaaacccgagctgtcagagtttctgaatctgctggaactgatagacagtgctcacacactggtccagagctgtggagta

SEQ ID NO: 10116 - DNA, 450 bp, Chicken  19866894206217_4
aagtagctagctttttgcttttggcacagaaagactggtttagtataatggcaaaccatgaccatagctgttggtcttttgctgatgatttttcatgattctgtgaaactattcagacaattttttaatgactattctttttttcctattgtcaagatgtctgcatcttaagcatgctactctgacacatacaatgaagagaggtaacccagcatcaatgaaataaaaattttgccttcccatgtggcatgagaggtctgccgcagtaaaactagagaaaaataaataaataaagagatkattattattactttgtggtatgttttcacataaaagagaaattaaaaataaaactattagaaaagagaatttatttcctaaccataagtttatattgtgtctccttgaaaaaaaaaaaagtctggaacaaacaggcttcactgtgtgagt

SEQ ID NO: 10117 - DNA, 600 bp, Chicken  19866894206219_1
atcaaacctacagaaaagatatcactttttgatcattaaggtgtttggagaatcgaggacttgttaaagtcactaaccacaatacaaattcagcttttataagcagaatctagaacacccatacacttcccaaaattaatatcatggtgagagataaacaaacagtgcaaatacacaattctcttgaaaagaaaacagtaaaggaataaaatacaagctactcagtaagtatagaacctaagaaaataagttgtttggttctttttcatcttttaattacaaatataaatctacagactrgcatccaaattcaagcccagagtatagaacaaccaaagcacctccgaacatagtaatgagtcagattctgtctcttgtctctttatgcatctcaggacagttgcacaaaggactgtgaaaacacagcaaccacccagcaggcagcaaggctcaagtggcctcaggggaaatgtaatctccttgagatatcaggtttgaggaaatctcttgccttacagcatttgctttgtgtagtccaagttctttgtggatttaatctttcaagcttcccggcaatcactgaacaatttctcaccttaa

SEQ ID NO: 10118 - DNA, 600 bp, Chicken  19866894206223_1
agcaggaagtggtgaatgggatgtttcatgtagtgagagaatccttcctttctggctgctgagcagagccaccaagcagccctcacagagcctgtcctatgcctgagctgtgtgggagtttgtaaagggagatgaatatttaacatatccccagactttgatcttccagttgtagtctggatatgtcaaaagccccataaaatgaaaccagcagaggtagtgctgcctttatattcactaatgcagagactggagcaccttcctcatttcaatctttatccccaggatgctggatgctcrtgctgaaactgcctggatttacaggctttccacagagtatctgaaccacttagtttacaagctgatcttcttctggaactctgataaagrgcctggagcatctcccatatgaggaaargctgagtaacctgggtctgttcagcctggggaaaagaagacagggaggatctgatawatgtctataaatatctaaggggaggcgggagtcaattggatgaggccaggttcttctggttgatgtgacaggacaaggagcaatgacctaaaacttaaacataggaagttccatactaacatgtg

SEQ ID NO: 10119 - DNA, 600 bp, Chicken  19866894206223_2
cctgtcctatgcctgagctgtgtgggagtttgtaaagggagatgaatatttaacatatccccagactttgatcttccagttgtagtctggatatgtcaaaagccccataaaatgaaaccagcagaggtagtgctgcctttatattcactaatgcagagactggagcaccttcctcatttcaatctttatccccaggatgctggatgctcrtgctgaaactgcctggatttacaggctttccacagagtatctgaaccacttagtttacaagctgatcttcttctggaactctgataaagrgcctggagcatctcccatatgaggaaargctgagtaacctgggtctgttcagcctggggaaaagaagacagggaggatctgatawatgtctataaatatctaaggggaggcgggagtcaattggatgaggccaggttcttctggttgatgtgacaggacaaggagcaatgacctaaaacttaaacataggaagttccatactaacatgtggaagaacttttttacagtaagggtgatggagcactggaacaggttggtcagagagcttgtggagtctcctactatggagatattcaagac

SEQ ID NO: 10120 - DNA, 600 bp, Chicken  19866894206223_3
tttgtaaagggagatgaatatttaacatatccccagactttgatcttccagttgtagtctggatatgtcaaaagccccataaaatgaaaccagcagaggtagtgctgcctttatattcactaatgcagagactggagcaccttcctcatttcaatctttatccccaggatgctggatgctcrtgctgaaactgcctggatttacaggctttccacagagtatctgaaccacttagtttacaagctgatcttcttctggaactctgataaagrgcctggagcatctcccatatgaggaaargctgagtaacctgggtctgttcagcctggggaaaagaagacagggaggatctgatawatgtctataaatatctaaggggaggcgggagtcaattggatgaggccaggttcttctggttgatgtgacaggacaaggagcaatgacctaaaacttaaacataggaagttccatactaacatgtggaagaacttttttacagtaagggtgatggagcactggaacaggttggtcagagagcttgtggagtctcctactatggagatattcaagacccatgtggacgcctacctgtgtgaccta

SEQ ID NO: 10121 - DNA, 600 bp, Chicken  19866894206223_4
tctggatatgtcaaaagccccataaaatgaaaccagcagaggtagtgctgcctttatattcactaatgcagagactggagcaccttcctcatttcaatctttatccccaggatgctggatgctcrtgctgaaactgcctggatttacaggctttccacagagtatctgaaccacttagtttacaagctgatcttcttctggaactctgataaagrgcctggagcatctcccatatgaggaaargctgagtaacctgggtctgttcagcctggggaaaagaagacagggaggatctgatawatgtctataaatatctaaggggaggcgggagtcaattggatgaggccaggttcttctggttgatgtgacaggacaaggagcaatgacctaaaacttaaacataggaagttccatactaacatgtggaagaacttttttacagtaagggtgatggagcactggaacaggttggtcagagagcttgtggagtctcctactatggagatattcaagacccatgtggacgcctacctgtgtgacctattctaggatacctgctttaggaggggggttggactcgaactcttgaggtcccttcca

SEQ ID NO: 10122 - DNA, 599 bp, Chicken  19866894206225_1
  misc_feature (1)..(1): n is any nucleotide
natttcaaaacaaccataatataagcttccagtgtgaagaataaactttgtagtatgctttggtattaccgtgaaagtagttcagcaaatattctgttctacagcctctgaggtaacagacagaggcagatagtgtctcttcattggaatccttaaggacaaaaagctgacaaagtcaagtgaaatagtgcaaagaagaagggaataacacttccaagcttcaaacaagaataacttagagtacaacaccttttgttctggacattagaagtgcccataattcatatttcatcaaacacmaccttctctttccccacaagttttctgctgcttttcttctgtcagttcaagcaacaaggtgctgagtcagagcagctcacagattacgcttcgactaacttcattcttcactccttccacacagctctgctagtacaactgtttgccctggctcctgccaaccgacacctgggatgttatctgtgttatagcaaaggaacataaattgccttgggcagcactgctgtcatcccttcctacttctccaagaatcaggaggctttcacttgctttccccttttccccacatctgacactag

SEQ ID NO: 10123 - DNA, 600 bp, Chicken  19866894206225_2
gtcagttcaagcaacaaggtgctgagtcagagcagctcacagattacgcttcgactaacttcattcttcactccttccacacagctctgctagtacaactgtttgccctggctcctgccaaccgacacctgggatgttatctgtgttatagcaaaggaacataaattgccttgggcagcactgctgtcatcccttcctacttctccaagaatcaggaggctttcacttgctttccccttttccccacatctgacactaggcagtttcaagcttaagaagcctttaggactgtagagggcytctaaggcatgattcatctgacctgtttcacagatctagtttaagatgagatgaatcatgtcccacatctacttattgctctccacagactgcaaagagagcttggggacactgactcagatttaaacctctgagttataaacctcaaaaattaggtgatttgaatcccagccttcagattcaattaataatgaacaaataaagagcaaaaaatcagagaactgggcatgcatgcagatgactcagtgttattcgctgtacacaagattaggaaaaatagaatgagaacttgcaggagga

SEQ ID NO: 10124 - DNA, 600 bp, Chicken  19866894206228_1
aagcccagcaggtaattgaagaactcgggcttagatctctcaagtacagcgtggggctgccattgttggaagtgttgcttgtaaaggtgcacggaagcccagcagggatatgtaagtgcagcacaactggcaattgctgttttgcagaggtcactctctcttgtagagacaaagccagaatcggttttgctgttgtcacttggaaattgcactgaggacattcgtgttgacctatttttaacataacagcagattacactgcaatccagtgaataatttatagaggtagtagcatgaccrtggccacaatacaatggcagcttcagatccggcctaatgacggagggcggcagatctctctggcattttccactgaattagcaaaacaagacacacgtggaatgactgagccaatcctttcaaaagcacgtgtgtcatgatgaatgtgtgctcggaaggacggtgtggagcaaagattttatctagagcatcctcaaacctgctcagccttccctttggcaagcagcagccctgaaagcagggaagtgggaacccacacagggctagaggtgacagaagggaattagacttccacgtttg

SEQ ID NO: 10125 - DNA, 600 bp, Chicken  19866894206236_1
tacacgagatgtcaggtcaaccctccaagcctttgtgttgctctgcatgtcaggcagctctgctctgcacggtggagagatgctgcccgctggccaccgtgtgctcactgggtccacatggaaacacagatacaggatctcaaagggtttttagttctgtcgcacagaagacacgaaagctcagaattttactgttctgaaacactgttgtgtcatcctatttaaaggcagaagtattctctctcactagagcaatacctctctgttaagtgcacagggtatatcacaggatttgccttwgggcagaaactgtagtgactacatttcctagctaatgagcatctgagaaaaggctgtacaaggaaggaaaaaaggagcagaaaaatgcttttagttgaatatcagccgtttgatcaatcttattcaagctcaatatgtgcataaaactattaaggttcaggctgtaaatgactgagctgaaagtagcagacatgagctggggtggatgatgcctctcccactgctggtccaggatctatcacttccaaacacgcagcccaaccacctattaaccttctacacatcttatagacagtacat

SEQ ID NO: 10126 - DNA, 600 bp, Chicken  19866894206246_1
aaaactgatacagaagacgaaggacctttaatgagatgacctatagggtacatgaatggtatttaaaaatcgtatttccagtctgcaaagaaacactgaaattccacaattttccatgcaagagaattcaggagaaaaatgttttggctcagttgatgtacaacaattatctgttgtagaagatttatacacatgtgtatatatataattcaatcttcttcaaggttaaacattctaggtgaaaagtcattttcaaaacaaaaaccaagattcatcactctgaaaatgttttaaagattrtatttttwaaaaatatttttatcagactttttttcacttaaagaaaacaytggcaaaatcacagcagttttacaaaatactgccactttgccatttgtacctctaacctcttattcaatcttgttaaaattcttgatcaacagtaatattccacagggaagtgcaggtgtgccaacaagaaacacaaagtcagggttttaaattttcactggagagaaaatataatgtgttygaatacgacacttctcaatgaaagcatcttcactgtatccttaatagaggaaataatcatgcagggcg

SEQ ID NO: 10127 - DNA, 600 bp, Chicken  19866894206246_2
tacagaagacgaaggacctttaatgagatgacctatagggtacatgaatggtatttaaaaatcgtatttccagtctgcaaagaaacactgaaattccacaattttccatgcaagagaattcaggagaaaaatgttttggctcagttgatgtacaacaattatctgttgtagaagatttatacacatgtgtatatatataattcaatcttcttcaaggttaaacattctaggtgaaaagtcattttcaaaacaaaaaccaagattcatcactctgaaaatgttttaaagattrtatttttwaaaaatatttttatcagactttttttcacttaaagaaaacaytggcaaaatcacagcagttttacaaaatactgccactttgccatttgtacctctaacctcttattcaatcttgttaaaattcttgatcaacagtaatattccacagggaagtgcaggtgtgccaacaagaaacacaaagtcagggttttaaattttcactggagagaaaatataatgtgttygaatacgacacttctcaatgaaagcatcttcactgtatccttaatagaggaaataatcatgcagggcgtaaactga

SEQ ID NO: 10128 - DNA, 600 bp, Chicken  19866894206246_3
catgaatggtatttaaaaatcgtatttccagtctgcaaagaaacactgaaattccacaattttccatgcaagagaattcaggagaaaaatgttttggctcagttgatgtacaacaattatctgttgtagaagatttatacacatgtgtatatatataattcaatcttcttcaaggttaaacattctaggtgaaaagtcattttcaaaacaaaaaccaagattcatcactctgaaaatgttttaaagattrtatttttwaaaaatatttttatcagactttttttcacttaaagaaaacaytggcaaaatcacagcagttttacaaaatactgccactttgccatttgtacctctaacctcttattcaatcttgttaaaattcttgatcaacagtaatattccacagggaagtgcaggtgtgccaacaagaaacacaaagtcagggttttaaattttcactggagagaaaatataatgtgttygaatacgacacttctcaatgaaagcatcttcactgtatccttaatagaggaaataatcatgcagggcgtaaactgagattacatgatgtaatacattatacacagttaaaattctagt

SEQ ID NO: 10129 - DNA, 600 bp, Chicken  19866894206246_4
ttctaggtgaaaagtcattttcaaaacaaaaaccaagattcatcactctgaaaatgttttaaagattrtatttttwaaaaatatttttatcagactttttttcacttaaagaaaacaytggcaaaatcacagcagttttacaaaatactgccactttgccatttgtacctctaacctcttattcaatcttgttaaaattcttgatcaacagtaatattccacagggaagtgcaggtgtgccaacaagaaacacaaagtcagggttttaaattttcactggagagaaaatataatgtgttygaatacgacacttctcaatgaaagcatcttcactgtatccttaatagaggaaataatcatgcagggcgtaaactgagattacatgatgtaatacattatacacagttaaaattctagtataatagggagctgggctgtattgtgtaacaatagaacatatgtaactaccccaaccagagctaaagtacaggatgatgctccctgttcagtggatagcaaagtgcagtcaccggtctgtggtcagtggatttggataattggaacagacagaagtcagaaactggattggtctggttgctt

SEQ ID NO: 10130 - DNA, 600 bp, Chicken  19866894206253_1
gcggtacctcagccttcagcacagtgattgcaaaccactaacggggaattttttgaggcaaaacagaattgctccatataaccctattctcacgtgtgaagcaaccggtttagtcagtgcgagctttctggtttgggaaatttgattgtgaaatgtgtgacactttctggtaactgacggctgttttactacaccgttttttgtctgtatacgaaaggatgtgcaggaggaatgcagcaagtatggctccatgctgtcaggggcactcagaggggccgtccccacggggacaggtcaacrtgtgctctctcaggagctgtcacaaggaggctcggtttgatgagatggggacttgtgcaaagcagccactttgagaagaagcaaagtgcaggcattcagggggtgcagtgtcgctgtgtgcagatggatgtcagagctcttcaacctacagcaaaaatcaagagaatttgtttagttcctgagcagcgctgcttttaagtccaaaatgacagcattaggagggattacagcaggaaatagaggagtattgttggctgttaaaaaggaaacaggatactaatgtgggaagctgaaaggaag

SEQ ID NO: 10131 - DNA, 599 bp, Chicken  19866894206261_1
  misc_feature (1)..(55): n is any nucleotide
nnnnnnnnnnnnnnnnnnnnnnnnnnnnnnnnnnnnnnnnnnnnnnnnnnnnnnntttctgagtaatcctaccttcacataggatctaatttttcctgttgttacagattgaagattaaaagtcataatgtgagtaattgaaaaccctcttataaagctcaactcattaataccgaaatgtgagcgcttccatagtgaaatgtggcagctgttaaactgtgagcaccaatactgcacaagagctcaggacagtaaaaaagaacactgtatctaattgaaactgcaggagaattgttggtrgacagaatgcaattatccaaactggaaagtttccaaaatactaacactgacatactgtcacatcctcccatgaaggaagggaggggtgaacagattctcaaattgctctccccccgacccattaaagtattaaagtaaagctgacactcaaggttcaaacacattcatcaattttaatgagaatttctctgctacagttgtcttaaaaatactggcactcttacaattatatctgtctaaatcgtgtggctaaactgtgagtttataagaaatcaagataagtcttgcattacataaca

SEQ ID NO: 10132 - DNA, 599 bp, Chicken  19866894206264_1
  misc_feature (1)..(71): n is any nucleotide
nnnnnnnnnnnnnnnnnnnnnnnnnnnnnnnnnnnnnnnnnnnnnnnnnnnnnnnnnnnnnnnnnnnnnnntaattttttgccctgcagaaccctgtcgatctgtgtgtaatgtaatgttctgttatttttttgtgcagaattggtttcagttgtcagctcaggtagtatggctctcagttttaaaagttgaatgcattgtataggttgaagagttaatttccctgagctaacaggaaggtaataatagatactttggtacattctataggttttcctggtccccattttgtctccataktgcgtggctttgaatttaggttttgactctccccagctactctcttccaagtgttagcagtaagtcttccagtgcagaaggcactctagaatgatgcttaatttcacacacaaaaataagtttcttaaagtcatttagtctccagatatgatatatgctggttgtgttgttaggacctgtgctaaattagaaactaagtttccaacttggaaataaatgaaattaatgaggaattgtagtgcttttaatgcttctctatgtttaaaattttagcctggatggtggtgaattatttgacc

SEQ ID NO: 10133 - DNA, 600 bp, Chicken  19866894206267_1
tgaagtaatcaaacaaagtgagggggtgaaacttcagtctatgcaattaatgtgtcagattatttctttctaaaacagtgcaactacagttagcaaaaacatattgctaggtggcaaacacagcatagagaaacatttagaaagctcaaaggtactgagaatatttttactgttgataacagatacctgggatgaaaggtaccaggtagcttgcacaaatggggtttagctcactaaggaaattttaaggaactacaatgaggtaaacctctacacttatgaagtagatatcatgagtcktcttcttcattgctgttgtctgtttgttgcttataatgtttggcacataaaagccaagaatttatgcctgggataaagcttaaaagaaaaaacaatacaaaacagcaacaatgccaaacaatcttaattaagtggccaacrtattctacatgaatcttcctaccacaacagatagccctgcaaggctgaatctgaacagctcaatgaactgctgagaattccaaggatttcatgtagtgaaacaaaacactgtgagggatttcagtacaacaaaaatattaaactttctggctttttgtc

SEQ ID NO: 10134 - DNA, 575 bp, Chicken  19866894206267_2
aagctcaaaggtactgagaatatttttactgttgataacagatacctgggatgaaaggtaccaggtagcttgcacaaatggggtttagctcactaaggaaattttaaggaactacaatgaggtaaacctctacacttatgaagtagatatcatgagtcktcttcttcattgctgttgtctgtttgttgcttataatgtttggcacataaaagccaagaatttatgcctgggataaagcttaaaagaaaaaacaatacaaaacagcaacaatgccaaacaatcttaattaagtggccaacrtattctacatgaatcttcctaccacaacagatagccctgcaaggctgaatctgaacagctcaatgaactgctgagaattccaaggatttcatgtagtgaaacaaaacactgtgagggatttcagtacaacaaaaatattaaactttctggctttttgtcttgatttgggattttcttgctcaaaatgtggcagtactataacatgcagtcagattttccagtcaactctatgtgcagaacctcacatggacctaattatcatgagcaggtaaagt

SEQ ID NO: 10135 - DNA, 600 bp, Chicken  19866894206268_1
taatgaggcaaaattgtggggcttgctggcgccactcagcaattcaacaccatgaccgtcctcaaagccagcaaagcaggagagctgccagcccctcctgcagcacgtggcactggctcagggtcagcacaaaacatccattggtgttttactaaggagcctgccatcacggtagtatctggtgtagtaaccaagtcagaagtagccccgatgagagcagggacacagggcaggagtagcagctgaaaggcactgcggagagctgctccggaattgccgttcccaagggctgcaaggagkgctaatgggccccatgtgctgcaggaatgcaaagctctgcgtgggccgggagaattatgctcttgacattgggagaacttcctgactgagagctaattgctttggcctgtgagtgtctctgctccagattaacgttactgaatggtaaacctaaaggagcagcaaaaccaaaggcagatagttgtcctgtgtgagatgctgctggtttcacctcacacttctgaggatatggagcatactttaattcagttcgtgtttaattgtcatttagctgttatacagagatgagactggacccat

SEQ ID NO: 10136 - DNA, 600 bp, Chicken  19866894206269_1
gatgacacacttgaggggtggggatgccattcagagagacctagacaggctcaagcagtaagcccagatcagctttatgaggttcaacaaatgcaaatgcaagatcttgcatctggcttgtggcaacctctgctgtcagtacaagcttggggaatgaaagaattgagtactgacctgccaaaaaggaattggcagtactgatggatggtaaactggatgcgagccagcagtgtgtgctcacagcccagaaagccgactgtatcctgagctgcatcgaaagaagcatggccagcaggtcarggtgatcttgcccttctactgtacctcacctggagtactgcgtccagatgtggagtccttagtgcaggagagacatggacctgtaggagtgtgtccaaaggagggccacaagtgatccaagggatggaacatcttccttgtgatgacaggctaagagagctgggactgtttagcatggggaagagaagacttcaggaaggacctgagagcagcctttcaatatttacagggggagctacagggctacaggaaagaaacggacagacactttaccagggtctattgtgataggatgaggga

SEQ ID NO: 10137 - DNA, 600 bp, Chicken  19866894206269_2
taaggtgtaatgtgcagaggtagagagcacagtcagctcctgttgacttcgacaaggttttagaagctcagcgtttgtgaagaatcaaactgtaaggctcgtaggcagtccgtgagaggtctgctagccaacgataaggggaagttttcagaactgtaaatatgggaagtgggagatactgtattgctttttcctgttatgaagtaaattaggtaattgcaagtctcccaagacagatcatgtcttcatgtggacaaacgcatagaagtttttatctaagtagaatgcagtgtacctaayggattgtgttttcccatgggatttaattgccatgacctgaaaaattaattattctgagaagactgaggctctcagtcacattgctttaagtycgaaaaagtgtattttaacttgttaaaggtctacttctggggatcaacataatgtttgcatttaacaactaaatataatatatgtgttttcttgtgagactttcactttttcygattgggccagaaatgtaacaaaaacatcctttgcctctgggactgaaaaagaagggcatgcagaactgcaattacaataaattaaagaagggat

SEQ ID NO: 10138 - DNA, 600 bp, Chicken  19866894206269_3
taaggctcgtaggcagtccgtgagaggtctgctagccaacgataaggggaagttttcagaactgtaaatatgggaagtgggagatactgtattgctttttcctgttatgaagtaaattaggtaattgcaagtctcccaagacagatcatgtcttcatgtggacaaacgcatagaagtttttatctaagtagaatgcagtgtacctaayggattgtgttttcccatgggatttaattgccatgacctgaaaaattaattattctgagaagactgaggctctcagtcacattgctttaagtycgaaaaagtgtattttaacttgttaaaggtctacttctggggatcaacataatgtttgcatttaacaactaaatataatatatgtgttttcttgtgagactttcactttttcygattgggccagaaatgtaacaaaaacatcctttgcctctgggactgaaaaagaagggcatgcagaactgcaattacaataaattaaagaagggatgtacagtaaaatactttaattatcattttccttttttgggtggaaatggtagctttatctgcaatcaggcaaggtaagacattatttcattt

SEQ ID NO: 10139 - DNA, 600 bp, Chicken  19866894206269_4
aaattaggtaattgcaagtctcccaagacagatcatgtcttcatgtggacaaacgcatagaagtttttatctaagtagaatgcagtgtacctaayggattgtgttttcccatgggatttaattgccatgacctgaaaaattaattattctgagaagactgaggctctcagtcacattgctttaagtycgaaaaagtgtattttaacttgttaaaggtctacttctggggatcaacataatgtttgcatttaacaactaaatataatatatgtgttttcttgtgagactttcactttttcygattgggccagaaatgtaacaaaaacatcctttgcctctgggactgaaaaagaagggcatgcagaactgcaattacaataaattaaagaagggatgtacagtaaaatactttaattatcattttccttttttgggtggaaatggtagctttatctgcaatcaggcaaggtaagacattatttcattttggcatcttttgtcacagcaaaaaaaggatatttggttctattttacaatgtgagaggaaattaaaaattatttcttaggaattcttaggtatattttcttctttggagtatt

SEQ ID NO: 10140 - DNA, 599 bp, Chicken  19866894206272_1
  misc_feature (1)..(131): n is any nucleotide
nnnnnnnnnnnnnnnnnnnnnnnnnnnnnnnnnnnnnnnnnnnnnnnnnnnnnnnnnnnnnnnnnnnnnnnnnnnnnnnnnnnnnnnnnnnnnnnnnnnnnnnnnnnnnnnnnnnnnnnnnnnnnnnnnnntagagcaagcattgcagtcttggcatgcctggactacgtcagataactgtatgggcagcccccatgctttagcgatgttctcagacagcgaattctcaatccattgaacttgagccagtgcttccgcttcatcatttcccggtgattgtaaaggttgatgactggacaygtggtagacacatacagtcctgtgtttaactgtattccatatgtctagccacatatctttgcstcagattggtcgggcgtggatagtccattcctgggtggcccactgtgcaatccaaagggtgaggcctcggtacacagcccaactacccatgcagatgttcaggatgccatccccaggttccttggttatgaccatccacatggcttgcagttctgcccattggctgctctgaccatccccctcatcgaaccaaattgtctctgtggagggatggtatgctatcgctctccacttgc

SEQ ID NO: 10141 - DNA, 599 bp, Chicken  19866894206272_2
  misc_feature (1)..(68): n is any nucleotide
nnnnnnnnnnnnnnnnnnnnnnnnnnnnnnnnnnnnnnnnnnnnnnnnnnnnnnnnnnnnnnnnnnnntagagcaagcattgcagtcttggcatgcctggactacgtcagataactgtatgggcagcccccatgctttagcgatgttctcagacagcgaattctcaatccattgaacttgagccagtgcttccgcttcatcatttcccggtgattgtaaaggttgatgactggacaygtggtagacacatacagtcctgtgtttaactgtattccatatgtctagccacatatctttgcstcagattggtcgggcgtggatagtccattcctgggtggcccactgtgcaatccaaagggtgaggcctcggtacacagcccaactacccatgcagatgttcaggatgccatccccaggttccttggttatgaccatccacatggcttgcagttctgcccattggctgctctgaccatccccctcatcgaaccaaattgtctctgtggagggatggtatgctatcgctctccacttgcttgggttgcccttgctggacccatctgtgtaccaggcgttctcaggaataggatattttccct

SEQ ID NO: 10142 - DNA, 600 bp, Chicken  19866894206274_1
tgctctggatttcacacttaagccaaagaaacttcatgggagcaagcagaagtatcagatcccaagccttgagctgagacttggtcttcatttctgtcacactggaatggcaaagccaaaatgggttattcccttttcatttttgaattccttttgcctcaaggtcctaatgctgtggacaagtgcaaagaacttctggatctcttttctttggactttttcagatactgcttgtatccctggaacaggtaatcttcccactctcttaccagtgattttttttttttttttaaccctatkctctgyrgtgtgttccagtgagaggggtggcctgtaagcccgtttctgagatcaccatgccctcagcgagccaggacttgtggaaaggaaatcttttcaggccaggaatgtgttaactgttcagcatcggctctcccatcaggggctgtgtgttgtactggggattttccaccggttctgcctgttccaacttctcagctgggtgcattttcccacaaagatgtggcctcagaaatgccatcttcatcgtaaagtcactcaggtaaagaaagtggtcagagcgtggttctcatactccct

SEQ ID NO: 10143 - DNA, 600 bp, Chicken  19866894206274_2
ggatttcacacttaagccaaagaaacttcatgggagcaagcagaagtatcagatcccaagccttgagctgagacttggtcttcatttctgtcacactggaatggcaaagccaaaatgggttattcccttttcatttttgaattccttttgcctcaaggtcctaatgctgtggacaagtgcaaagaacttctggatctcttttctttggactttttcagatactgcttgtatccctggaacaggtaatcttcccactctcttaccagtgattttttttttttttttaaccctatkctctgyrgtgtgttccagtgagaggggtggcctgtaagcccgtttctgagatcaccatgccctcagcgagccaggacttgtggaaaggaaatcttttcaggccaggaatgtgttaactgttcagcatcggctctcccatcaggggctgtgtgttgtactggggattttccaccggttctgcctgttccaacttctcagctgggtgcattttcccacaaagatgtggcctcagaaatgccatcttcatcgtaaagtcactcaggtaaagaaagtggtcagagcgtggttctcatactccctccttga

SEQ ID NO: 10144 - DNA, 600 bp, Chicken  19866894206274_3
gatttcacacttaagccaaagaaacttcatgggagcaagcagaagtatcagatcccaagccttgagctgagacttggtcttcatttctgtcacactggaatggcaaagccaaaatgggttattcccttttcatttttgaattccttttgcctcaaggtcctaatgctgtggacaagtgcaaagaacttctggatctcttttctttggactttttcagatactgcttgtatccctggaacaggtaatcttcccactctcttaccagtgattttttttttttttttaaccctatkctctgyrgtgtgttccagtgagaggggtggcctgtaagcccgtttctgagatcaccatgccctcagcgagccaggacttgtggaaaggaaatcttttcaggccaggaatgtgttaactgttcagcatcggctctcccatcaggggctgtgtgttgtactggggattttccaccggttctgcctgttccaacttctcagctgggtgcattttcccacaaagatgtggcctcagaaatgccatcttcatcgtaaagtcactcaggtaaagaaagtggtcagagcgtggttctcatactccctccttgag

SEQ ID NO: 10145 - DNA, 600 bp, Chicken  19866894206288_1
gagccaagatcaatggttaagagggaattataaaaaatgctttgttcatgtagttctgattcattcgcccattttttgttgcattttaggctaatagcatagctggttacagatggatttatcttgaaaatgcatctattggaataatagcatacaactacattataagtgtctgagatatactgaatgttcttagccccctgacagttaggtgtgaacgtcaaatgccacattttgcatggcttagctgtgtggaaatattttaagtggtcatcactgtagtacagggcaggtcttcgraacacagaaaagagaagggaatagcacacatcctgaagagcacatagtttcagcatacataccaggtgtattgtttttcagagccttgatggcattgctaggctttactggccctgaccagcctccttccaccttgcccagagcctgggacaccatttgggcccccagacctgtcagccccacaacagcagcaccatagtagggcctgtttgcagccccagggaggtgctcagtgcctggggatggctgtgagacagatctggctgtaaagcccagccttgctctgctgcccctgagaga

SEQ ID NO: 10146 - DNA, 600 bp, Chicken  19866894206289_1
ccaaggtcatctgctctgggaggtttccttgtgcaggagtccatggcttaatttctttttgaaaatacatcaatctaaaagctttggggatggactgcaggtattcctcagagctatgctagtctggataatagttactaggatttatatctttataagaggtactcagcatacagtaatgataaatcttctcctatttcacagtgcaaattcacaaaatgattaaaatcgttattttcattaatgccttcatgttaactttgttctcagttggaccacaattggctctgcgggcggagyggcagcagctccatccatcagagagcaggcagttccactcagttacagccatcactgacagacaactactgagcttcctcagaagaggaccactcatggggatccaggaattatttctcacactgccactccgttgccaaagtgatggggtgctgctgttctgttgagcagatggaactggacagtaacattacaacagggtgttatgctattactttaatactgacatctctatcccacggaaaacgaaagattattcagaactcttatgtagctgcaggaaagtttggaggcagaaag

SEQ ID NO: 10147 - DNA, 599 bp, Chicken  19866894206290_1
  misc_feature (1)..(107): n is any nucleotide
nnnnnnnnnnnnnnnnnnnnnnnnnnnnnnnnnnnnnnnnnnnnnnnnnnnnnnnnnnnnnnnnnnnnnnnnnnnnnnnnnnnnnnnnnnnnnnnnnnnnnnnnnnnctggtcttggcacagtgtgtgcacccatttagtctgtttccccactagacaaatctgagaccagggtagggattgtctatcccacactgatggttgccaagttttccactcagactatgttatattgtgttgctagctcccaggagaggagactgaggtttctgaagaagcaatatgtggctgtctactggtwtatcttgtttactttgtggctgttcgtaatactgaagtacatatggaaatagacatcttggtatgaatgtaccataaatcagattgaataaatacttctattaaaaaattgctggcatctggcaactgtacttctactactccagtgattaatgtctcccctgtaagcctatgatttactggtcttacaaaaatacagaatgtttttgaatcctggagcactactttgtgttgactatccatcatgcttcaaaagaattatccactatagtccagaagatatactttcaacgtgcaaat

SEQ ID NO: 10148 - DNA, 478 bp, Chicken  19866894206291_1
tgagaagtggagggactcattcaagagcaaaagaggggcacagacagcatgggtacacgtcacacttctgcgctctctgccaactacctcccactaccagctctagaggcagccctggggagtagtacgggaagcagggctgggaacacacactcctggcttcaaggataaaacagagatggagtaagatctgtagctgcctcctgggagaagagatgcacaacttcctagagggcctcgaagagtcagtcatgacctgcactaaacaggctccacaaatccttgcccgattcattgtaytgtttgcaattctcaaagattcagaactagcagtagtgtgtctacatacactgcaacatactttaacatgcattacatgaaaatagcgcttccatgaatccagaataaaaatataggaaaatatttcatgttctgtgcagagaattacttacaaactgctactgaggttaccaaaagt

SEQ ID NO: 10149 - DNA, 600 bp, Chicken  19866894206296_1
aggtgtgttgtgagttacaaatgtaaatttcatcttggataagtacatgaatttttcgactgcaattggtcccctgacattctatcctgaaaataaggacatacaaactgaaggaggaacataccctgatatcaaacatttttattttaagtatcacaatcattctagttatttgaattatcagattactaaggcgaggatggaataccactggggatcaggtaatcctctcacaggtgtttcccagcttctccatgaagtggtagaaaaatgtgttgctgaaattcctgtctatagaaraaaagttttgttctmagagctacatttacagtcatcactgattcatatcattgtatgacacgtttcagctgggttcctwctgccataatttcagctaacaagaaaaagagtctcttctctgaattgcatttaatataccacttctgtttttcacatccagcccacatggtgctaagcctgaataaaagcagattggcttccttttttattcagacactcttatgtatataaggattagcaaaagaactacatcaaagttacaacccactgaacatgcacttttttttttctatgaattgg

SEQ ID NO: 10150 - DNA, 600 bp, Chicken  19866894206296_2
tacaaatgtaaatttcatcttggataagtacatgaatttttcgactgcaattggtcccctgacattctatcctgaaaataaggacatacaaactgaaggaggaacataccctgatatcaaacatttttattttaagtatcacaatcattctagttatttgaattatcagattactaaggcgaggatggaataccactggggatcaggtaatcctctcacaggtgtttcccagcttctccatgaagtggtagaaaaatgtgttgctgaaattcctgtctatagaaraaaagttttgttctmagagctacatttacagtcatcactgattcatatcattgtatgacacgtttcagctgggttcctwctgccataatttcagctaacaagaaaaagagtctcttctctgaattgcatttaatataccacttctgtttttcacatccagcccacatggtgctaagcctgaataaaagcagattggcttccttttttattcagacactcttatgtatataaggattagcaaaagaactacatcaaagttacaacccactgaacatgcacttttttttttctatgaattgggtccaacttctgttt

SEQ ID NO: 10151 - DNA, 600 bp, Chicken  19866894206296_3
ttctatcctgaaaataaggacatacaaactgaaggaggaacataccctgatatcaaacatttttattttaagtatcacaatcattctagttatttgaattatcagattactaaggcgaggatggaataccactggggatcaggtaatcctctcacaggtgtttcccagcttctccatgaagtggtagaaaaatgtgttgctgaaattcctgtctatagaaraaaagttttgttctmagagctacatttacagtcatcactgattcatatcattgtatgacacgtttcagctgggttcctwctgccataatttcagctaacaagaaaaagagtctcttctctgaattgcatttaatataccacttctgtttttcacatccagcccacatggtgctaagcctgaataaaagcagattggcttccttttttattcagacactcttatgtatataaggattagcaaaagaactacatcaaagttacaacccactgaacatgcacttttttttttctatgaattgggtccaacttctgtttaaagaaagctggttaagggaccaggtagtttcttcacattatgcacaatgatactccttctcaa

SEQ ID NO: 10152 - DNA, 600 bp, Chicken  19866894206296_4
gaaattcctgtctatagaaraaaagttttgttctmagagctacatttacagtcatcactgattcatatcattgtatgacacgtttcagctgggttcctwctgccataatttcagctaacaagaaaaagagtctcttctctgaattgcatttaatataccacttctgtttttcacatccagcccacatggtgctaagcctgaataaaagcagattggcttccttttttattcagacactcttatgtatataaggattagcaaaagaactacatcaaagttacaacccactgaacatgcacwtttttttttctatgaattgggtccaacttctgtttaaagaaagctggttaagggaccaggtagtttcttcacattatgcacaatgatactccttctcaattcactgaccaagtgacagctgttactgggagctaaggaagccattttgctatcaattcaagtgaaatgttaagtcttgtcccatattataagcttagtgagtatttactgggtactgagtcagtaaagaatcactagagatcttcagcagaatatgagtagattaccttttattggcctcaatgagaggaagctgagaaa

SEQ ID NO: 10153 - DNA, 600 bp, Chicken  19866894206298_1
acaattgattttggtttaatgaatgaatagaggagacatgcgtgaacctcaacaaatgctttttaataaattaacaatctaggcctgtctcattaaatcagaagagaacgtttgcagtgtgacagctaattaattgcttcttccaaccagccaccagctgggataaagccaatattgtaaagctctccttttgtttaaacaagtgactgcctcttcccctctctgtttcccaaaagtggatttaagcggatagccatgtgtgtatctaagcagcaccagctaacagcaaaatgacattcracgtgacccaaaccaacatcctgtttgcataacgtatttgaaaagagattacctttgttagtgatgttaagaattaacattattttctggagcgtacatagctctatataggagcaacagtataagctgcatatgggtaaaacaggatttttccttcctaaatggcttttgctacctgtcacagcacacagccaagctgttggatgtgaggctggcagctctgccccacacctgggagcycaggcccagacctcagctggggctgaagctgcccttcctctcacagaattaatttccgag

SEQ ID NO: 10154 - DNA, 600 bp, Chicken  19866894206298_2
tttaagcggatagccatgtgtgtatctaagcagcaccagctaacagcaaaatgacattcracgtgacccaaaccaacatcctgtttgcataacgtatttgaaaagagattacctttgttagtgatgttaagaattaacattattttctggagcgtacatagctctatataggagcaacagtataagctgcatatgggtaaaacaggatttttccttcctaaatggcttttgctacctgtcacagcacacagccaagctgttggatgtgaggctggcagctctgccccacacctgggagcycaggcccagacctcagctggggctgaagctgcccttcctctcacagaattaatttccgagcttggataaataattttcctcacagggaactacaaaatcaagcatgtgactcattcagaacttttctgaaaccaatggctttggctctgtttcagacggtactttgttctctctagttcatccatcatcccaggtatcattccaccttgtgcaaatctactttccatcttggaaaactcatcatgaaaattcacaagccaggcgctgaatctactaatctgtcattaatgtttggatagc

SEQ ID NO: 10155 - DNA, 599 bp, Chicken  19866894206300_1
  misc_feature (1)..(65): n is any nucleotide
nnnnnnnnnnnnnnnnnnnnnnnnnnnnnnnnnnnnnnnnnnnnnnnnnnnnnnnnnnnnnnnnncttttagcaatgggccattaataagcatgggtagaaatctaactggaaatgaacttgaactccaccatctgcattgagaacctggcagtctttagaggaaactgttctttgcactcctttccagctgcctgacactcacctctccacaggcaaaccaagctgccacataggtcactgtgaaatgatctatgttctacaatatcactgtatacattttctatctgagttaccacayaagtatttggaaatagagattccttcttttaaaacttgtataatcataaaatattctttagagttgggggaaaggaggaaaggcagattaactctgacttcccactgtttcctactgtgtttctctctttcagttgtgcatactgatgtatatgtgtgctgcaagttccaaaactgcaaaaataaacgaggatactttttgtcatctgctttatttgctatgttagygacttatctctccaggcttttcattttcctctttaaaagactctcaaacatatatcartgaatttctttgtg

SEQ ID NO: 10156 - DNA, 600 bp, Chicken  19866894206300_2
ccacataggtcactgtgaaatgatctatgttctacaatatcactgtatacattttctatctgagttaccacayaagtatttggaaatagagattccttcttttaaaacttgtataatcataaaatattctttagagttgggggaaaggaggaaaggcagattaactctgacttcccactgtttcctactgtgtttctctctttcagttgtgcatactgatgtatatgtgtgctgcaagttccaaaactgcaaaaataaacgaggatactttttgtcatctgctttatttgctatgttagygacttatctctccaggcttttcattttcctctttaaaagactctcaaacatatatcartgaatttctttgtgactctaactagcatggttatatatatatatatttattatttttttttccaactatagtaggtgttgaagaatatgaatcraattttgaaggttcctgcctcccaagccagcaggagatgaggtttaattgcttggaaatacattttcacagctgatactggggaacagaaaaagtctgtatgtcaagagcctctaaactaatcatttagccataacatgcacgactgc

SEQ ID NO: 10157 - DNA, 600 bp, Chicken  19866894206300_3
tctgagttaccacayaagtatttggaaatagagattccttcttttaaaacttgtataatcataaaatattctttagagttgggggaaaggaggaaaggcagattaactctgacttcccactgtttcctactgtgtttctctctttcagttgtgcatactgatgtatatgtgtgctgcaagttccaaaactgcaaaaataaacgaggatactttttgtcatctgctttatttgctatgttagygacttatctctccaggcttttcattttcctctttaaaagactctcaaacatatatcartgaatttctttgtgactctaactagcatggttatatatatatatatttattatttttttttccaactatagtaggtgttgaagaatatgaatcraattttgaaggttcctgcctcccaagccagcaggagatgaggtttaattgcttggaaatacattttcacagctgatactggggaacagaaaaagtctgtatgtcaagagcctctaaactaatcatttagccataacatgcacgactgcatacctagggacaatgtaactgttaacagcttgaaactgttgaaaaaatagaccaatg

SEQ ID NO: 10158 - DNA, 600 bp, Chicken  19866894206300_4
aaggcagattaactctgacttcccactgtttcctactgtgtttctctctttcagttgtgcatactgatgtatatgtgtgctgcaagttccaaaactgcaaaaataaacgaggatactttttgtcatctgctttatttgctatgttagygacttatctctccaggcttttcattttcctctttaaaagactctcaaacatatatcartgaatttctttgtgactctaactagcatggttatatatatatatatttattatttttttttccaactatagtaggtgttgaagaatatgaatcraattttgaaggttcctgcctcccaagccagcaggagatgaggtttaattgcttggaaatacattttcacagctgatactggggaacagaaaaagtctgtatgtcaagagcctctaaactaatcatttagccataacatgcacgactgcatacctagggacaatgtaactgttaacagcttgaaactgttgaaaaaatagaccaatgagaaggtttcctctatttttctaatgctgttcttcaccctgaataaactaatagaaatgtcttattttcagttctgtcagtttgaatgaaaaca

SEQ ID NO: 10159 - DNA, 599 bp, Chicken  19866894206302_1
  misc_feature (1)..(105): n is any nucleotide
nnnnnnnnnnnnnnnnnnnnnnnnnnnnnnnnnnnnnnnnnnnnnnnnnnnnnnnnnnnnnnnnnnnnnnnnnnnnnnnnnnnnnnnnnnnnnnnnnnnnnnnnnactgcatacttttatctgtgttgaagtctgccaagcatttgaacagcaaattttcattgtgttgtataacatagaaatgaaaggtgtatctttacaatctgattgcgaaattagaaacagctggtaaataaaataaaccagtgggacaatgttaatgaagtgataagtttctttcctacacatggagtgcagaaytcttactatcactgcatttgataaactatccagcctacttatttaatgttatgtttccactataacacgcrtggccagtatcatgaccagtccatactggtgtattcacgagtgcaggtctgacactggaggagaaaaacttaaaattgatcctatttctcttttcagatataaaagtcaaaacagccactcatctaataaagtgcgttttggtttcatccttccatgcatctgtgttagagttctctttttgtaggcaacttttttattttaaaatgatagccagataagtgtgtgat

SEQ ID NO: 10160 - DNA, 599 bp, Chicken  19866894206302_2
  misc_feature (1)..(34): n is any nucleotide
nnnnnnnnnnnnnnnnnnnnnnnnnnnnnnnnnnactgcatacttttatctgtgttgaagtctgccaagcatttgaacagcaaattttcattgtgttgtataacatagaaatgaaaggtgtatctttacaatctgattgcgaaattagaaacagctggtaaataaaataaaccagtgggacaatgttaatgaagtgataagtttctttcctacacatggagtgcagaaytcttactatcactgcatttgataaactatccagcctacttatttaatgttatgtttccactataacacgcrtggccagtatcatgaccagtccatactggtgtattcacgagtgcaggtctgacactggaggagaaaaacttaaaattgatcctatttctcttttcagatataaaagtcaaaacagccactcatctaataaagtgcgttttggtttcatccttccatgcatctgtgttagagttctctttttgtaggcaacttttttattttaaaatgatagccagataagtgtgtgatttttgagaaaaagattattcacggaatcttcaccccaaatctactggggggggctaaaagatcccttggag

SEQ ID NO: 10161 - DNA, 600 bp, Chicken  19866894206302_3
gatataaaagtcaaaacagccactcatctaataaagtgcgttttggtttcatccttccatgcatctgtgttagagttctctttttgtaggcaacttttttattttaaaatgatagccagataagtgtgtgatttttgagaaaaagattattcacggaatcttcaccccaaatctactggggggggctaaaagatcccttggagactaacctaaaaatgactgttgtagtgttcattgtttgtagaaatcacataggatgtttcaactgattattttaatttcactttatgtaggagaccrcatcaagtagtaatcaaatgtcattgatctatcatgatatcccccactctgtttgcacttcccaaattactaacttatatgggttattccttgttgtgattgtttattccaaacaactcttttggaaaaaggaatttagaaatagctcagctctgaaaatttacacacatctccaaatcctgtacctttgccttcatatacccattgccaacttctatattgaagttcatgtagaaacatacactttaaaagaatatctacatcagggaaaaagagagacagaaagaaatgttttcttaa

SEQ ID NO: 10162 - DNA, 600 bp, Chicken  19866894206308_1
ctagctcacacagacaggtaggatacagtgatcatctatgctgttcagagtgaaacgcatgctagaaaagcgagcaaatccatctctgtataaccaggccttcagtgggctgtactgggagaaaaggaaaagaacaactgagaactaagatggaaaaaaccagttctgatagaaacagcagtttgcacttacagatgtcactagaatataaactcttaagtcaaactttcgacctacaaagaacagaaaaatatgatataatccacctgctgatacagctacctagtcttagaaactgaygttaagtgcatctatctaaatatacacacaaaaggactgaaattcacatttctggtcactttatcaagggctctgtgaacatttatttaagattaaaaacactggagggtccactrttccaagtcaatggcaattcacaagttctggacaaataatgcaagatgtaagcgtgcctccctttgaattagttggacaaatatttggccatacaccctaataaaactgttaacttcagaaaaggagccacatgtggttcagcacacagaactacccatagagccctttctactcggtgagaac

SEQ ID NO: 10163 - DNA, 548 bp, Chicken  19866894206308_2
gggagaaaaggaaaagaacaactgagaactaagatggaaaaaaccagttctgatagaaacagcagtttgcacttacagatgtcactagaatataaactcttaagtcaaactttcgacctacaaagaacagaaaaatatgatataatccacctgctgatacagctacctagtcttagaaactgaygttaagtgcatctatctaaatatacacacaaaaggactgaaattcacatttctggtcactttatcaagggctctgtgaacatttatttaagattaaaaacactggagggtccactrttccaagtcaatggcaattcacaagttctggacaaataatgcaagatgtaagcgtgcctccctttgaattagttggacaaatatttggccatacaccctaataaaactgttaacttcagaaaaggagccacatgtggttcagcacacagaactacccatagagccctttctactcggtgagaacaacacaggttaggacagctttttccctacaccagaaaatcaaaggcttaaatgggcaccttacc

SEQ ID NO: 10164 - DNA, 600 bp, Chicken  19866894206310_1
cactttcctcagctacaaagaaaacataggaagaggcatgatggttcaaagtgagatttccttaaggaaagtattaagcagtcaaagtgcagcttttcctttactgttgtgcagggtatagctgtgctgtaagacaaatatttgagtcttcagagtgcaaatgtaaaagcatgaagtgatgacattccctatgcagtgaaaaagataatttttttaatgaaatacacgctagaaaagtaaaatccttttatactgtagctctggagacactttaacagtgtttgtcaatcaaaagctctrtgtaacgttactctgttgaacttcagacagacctgtatcagctaaatggattgtttttaagtcagtcctaaacatgaacatgaatgagcaacaagtgctgtatttgcagattatgttttgctgggatagtttctatctgggcatacagctctgtaggcaaarttgacaggagcactgacaagaccgactacacgtacgtggctcaattgcagcagtgggtagaattggacctacgtgtggaaagttgtgtggtctcttttggtttgtaataaaactrtgctggtgctgttgcaaaaagct

SEQ ID NO: 10165 - DNA, 600 bp, Chicken  19866894206310_2
gtaaaagcatgaagtgatgacattccctatgcagtgaaaaagataatttttttaatgaaatacacgctagaaaagtaaaatccttttatactgtagctctggagacactttaacagtgtttgtcaatcaaaagctctrtgtaacgttactctgttgaacttcagacagacctgtatcagctaaatggattgtttttaagtcagtcctaaacatgaacatgaatgagcaacaagtgctgtatttgcagattatgttttgctgggatagtttctatctgggcatacagctctgtaggcaaarttgacaggagcactgacaagaccgactacacgtacgtggctcaattgcagcagtgggtagaattggacctacgtgtggaaagttgtgtggtctcttttggtttgtaataaaactrtgctggtgctgttgcaaaaagctcttttctgtgtaggtctgcttagatttggagccccagaaggtgtgaactttctcatacttcattgaggtttggtgtgattggttgaagttggctttgaatttgtgcttttgtcattggtcccaagcaataactataatgcaaagatagacgtctgttcttta

SEQ ID NO: 10166 - DNA, 600 bp, Chicken  19866894206310_3
gtgtttgtcaatcaaaagctctrtgtaacgttactctgttgaacttcagacagacctgtatcagctaaatggattgtttttaagtcagtcctaaacatgaacatgaatgagcaacaagtgctgtatttgcagattatgttttgctgggatagtttctatctgggcatacagctctgtaggcaaarttgacaggagcactgacaagaccgactacacgtacgtggctcaattgcagcagtgggtagaattggacctacgtgtggaaagttgtgtggtctcttttggtttgtaataaaactrtgctggtgctgttgcaaaaagctcttttctgtgtaggtctgcttagatttggagccccagaaggtgtgaactttctcatacttcattgaggtttggtgtgattggttgaagttggctttgaatttgtgcttttgtcattggtcccaagcaataactataatgcaaagatagacgtctgttctttaatcagttctatttattatttggtggcagggagttctttaaaaaacaaaacaaactgagagacggaagaaaaaaaaatcaacgtggctttgccaagaagtgagtagatctgtgtat

SEQ ID NO: 10167 - DNA, 599 bp, Chicken  19866894206314_1
  misc_feature (1)..(5): n is any nucleotide
nnnnnatggctaaggttgtaatttgatgtgcattttaattgagtactgccttgccccctatattaaaaccaattgattaaattgtggtggcgtaaaaaagtgacaataagataaaaaggctgaagtggaagaaactggaaaacaaacaaacctgcagttccctttccagtgctatgaatcccagccctacctcaatacaccgatgtcaagacacaacaactgaagaaaaagtgaatggcagtgcagggagtaattttctcagcagcagtgtatgaatggaatgcacatgcaactacagcycaaatcaatcrctcatattaggattttggccactctgcttaggaagaatatattattccatgaaattataagttattcttaaggcagaacaaattttcccggtaattattagactttgatgtaaagggaaatgttttagaattagatcatttaatatacttaacatactgatttcattttgacagtacttggccaattaacacaagccccrtaaggtcttcagtgacaatccatctcatcratggaggatggtgtcttatgaaacaaatgctaattatgtcttgccattgtgtaagtga

SEQ ID NO: 10168 - DNA, 600 bp, Chicken  19866894206314_2
aaggttgtaatttgatgtgcattttaattgagtactgccttgccccctatattaaaaccaattgattaaattgtggtggcgtaaaaaagtgacaataagataaaaaggctgaagtggaagaaactggaaaacaaacaaacctgcagttccctttccagtgctatgaatcccagccctacctcaatacaccgatgtcaagacacaacaactgaagaaaaagtgaatggcagtgcagggagtaattttctcagcagcagtgtatgaatggaatgcacatgcaactacagcycaaatcaatcrctcatattaggattttggccactctgcttaggaagaatatattattccatgaaattataagttattcttaaggcagaacaaattttcccggtaattattagactttgatgtaaagggaaatgttttagaattagatcatttaatatacttaacatactgatttcattttgacagtacttggccaattaacacaagccccrtaaggtcttcagtgacaatccatctcatcratggaggatggtgtcttatgaaacaaatgctaattatgtcttgccattgtgtaagtgaagcaagtcttac

SEQ ID NO: 10169 - DNA, 600 bp, Chicken  19866894206314_3
cacaacaactgaagaaaaagtgaatggcagtgcagggagtaattttctcagcagcagtgtatgaatggaatgcacatgcaactacagcycaaatcaatcrctcatattaggattttggccactctgcttaggaagaatatattattccatgaaattataagttattcttaaggcagaacaaattttcccggtaattattagactttgatgtaaagggaaatgttttagaattagatcatttaatatacttaacatactgatttcattttgacagtacttggccaattaacacaagccccrtaaggtcttcagtgacaatccatctcatcratggaggatggtgtcttatgaaacaaatgctaattatgtcttgccattgtgtaagtgaagcaagtcttacaccatttttcatcactgattctgaacttgtgtgcatgtgtgacaactggtagttgtacgagaagtgcgatctgtgagaccattacacaaatacaggatggtcgatagcaccattagaaaactgacaaatttttaacagctatatcgaagaaaacatcaaaggcaaaaagatctttgattagagatctgatatctcttaat

SEQ ID NO: 10170 - DNA, 600 bp, Chicken  19866894206314_4
tgcagggagtaattttctcagcagcagtgtatgaatggaatgcacatgcaactacagcycaaatcaatcrctcatattaggattttggccactctgcttaggaagaatatattattccatgaaattataagttattcttaaggcagaacaaattttcccggtaattattagactttgatgtaaagggaaatgttttagaattagatcatttaatatacttaacatactgatttcattttgacagtacttggccaattaacacaagccccrtaaggtcttcagtgacaatccatctcatcratggaggatggtgtcttatgaaacaaatgctaattatgtcttgccattgtgtaagtgaagcaagtcttacaccatttttcatcactgattctgaacttgtgtgcatgtgtgacaactggtagttgtacgagaagtgcgatctgtgagaccattacacaaatacaggatggtcgatagcaccattagaaaactgacaaatttttaacagctatatcgaagaaaacatcaaaggcaaaaagatctttgattagagatctgatatctcttaattcccttagttgcttcctttttctttttcga

SEQ ID NO: 10171 - DNA, 600 bp, Chicken  19866894206314_5
aaagattgtttttttcaaagcgtaaaaacagttattaaagctacctggtagaagtttatggtacagatggaaaactggaacgctaatagtcttgctggaagattctgctcctgaggaagaagtacctactttatctgccatcactcttcctcgtcttgacggtggacgtggaggggtagatgaaacagctctttttgactgagatttcaaacctagtacagagataataataagaatcaagttattatagtatttaataacttcagatagccaagttgcaatgtattcaatcccttcaastgctgcaaaaaaagtcatactgaaaaacacaactaacaaatatccgaacagcattcacatataaaatacatctgaatctaatcccagtatttttcacagttgtgcaccctcctaagtcccaagtataaaacaagctgtaactgtaaactactactttgattctgcttgataacatgacagggacctgtagtaaatcttactgaggttgttttttcaaactgaaatcaagtaaggcaaaaatttctgcattgacaaatatttcagtccatagtccatagacaaacatctgacttaccgggt

SEQ ID NO: 10172 - DNA, 600 bp, Chicken  19866894206336_1
ttccttcctcagactagctctggaagaagaaaaagaggagttggagaccttcaactagcagctttagaaaggagcaacctcactatttcatgctattacttcaaagctggcgctacctgtgctgacagatagtcagctagtcagcacagtccactacgacaacacagacatccccagcctctctacctatcggtaagctcacttcccagcttcctccaatgcttcccactgctagcaaatacttcactccttcaactggcagagcaaaaaaaaaggctgagctctgctctccttggtggyccttacttgatccagaggcaacgctgatgatttctgtggcgtcagatcttctcgagacatggttgctgtaggcatcttcgggaaaggaacttgagcctgatgcatttgcattctgtagtcaggtttaatggagagagtttttagcacatgaacatcacgagtaaaccccatytacctggatgaacgcatrcaagcaccattcacacagaaacatgcatcttgcttctgttctcccttatgcctttcccccagaacacaagctttaatccctctctccaccctgcagtgacttagttgtaa

SEQ ID NO: 10173 - DNA, 600 bp, Chicken  19866894206336_2
cccagcctctctacctatcggtaagctcacttcccagcttcctccaatgcttcccactgctagcaaatacttcactccttcaactggcagagcaaaaaaaaaggctgagctctgctctccttggtggyccttacttgatccagaggcaacgctgatgatttctgtggcgtcagatcttctcgagacatggttgctgtaggcatcttcgggaaaggaacttgagcctgatgcatttgcattctgtagtcaggtttaatggagagagtttttagcacatgaacatcacgagtaaaccccatytacctggatgaacgcatrcaagcaccattcacacagaaacatgcatcttgcttctgttctcccttatgcctttcccccagaacacaagctttaatccctctctccaccctgcagtgacttagttgtaagccaagccctctcaatactaggagaaagaaagttctttagcatgtttttctctcctgcctcacagcattcactgcttcagtcacgctggagctacggcaaaacagtgaaagccaaagcacgtttatgaagtctgaacaggtgatttttggagaagtagaatttttcacttag

SEQ ID NO: 10174 - DNA, 600 bp, Chicken  19866894206336_3
cggtaagctcacttcccagcttcctccaatgcttcccactgctagcaaatacttcactccttcaactggcagagcaaaaaaaaaggctgagctctgctctccttggtggyccttacttgatccagaggcaacgctgatgatttctgtggcgtcagatcttctcgagacatggttgctgtaggcatcttcgggaaaggaacttgagcctgatgcatttgcattctgtagtcaggtttaatggagagagtttttagcacatgaacatcacgagtaaaccccatytacctggatgaacgcatrcaagcaccattcacacagaaacatgcatcttgcttctgttctcccttatgcctttcccccagaacacaagctttaatccctctctccaccctgcagtgacttagttgtaagccaagccctctcaatactaggagaaagaaagttctttagcatgtttttctctcctgcctcacagcattcactgcttcagtcacgctggagctacggcaaaacagtgaaagccaaagcacgtttatgaagtctgaacaggtgatttttggagaagtagaatttttcacttaggaataaaatgtaatatgc

SEQ ID NO: 10175 - DNA, 600 bp, Chicken  19866894206339_1
ttacactaatctaaatgttacttctctaaataatcttactgattttgtacattaatataagtgtgtacttctccttaagcgatgtacctttggacttatcctgaactatagaataaattaccaacagaaattcaaggcatatggctttggagtagacctttatagagctatgtacaacatctaaggagtctaattgctcatggaaacagcatgccaggaatctcaggagtttctgatctgactaggtgttataacctgatgaaaatcaagtaaatctaagtagaaaaaaatctttaaagrtaacataagtagagagatgttaagacgttaaagagaaatagttagaagggtattttatgtgcattcagttgttatgtgatgtcagcttccaaggaccctgagaaatctgggaatgaaaaaraacacatgtgtgactgaatatgtattgaagttatcttaaatgatgcttgaaaaaacatttgagggaactcacgttttaaaaaaaacccgtaaatgtgtatctgaggaaataatctaattcacaggtaaataggttatcctagaagatacgcaaggttatttggttatttgaaagggggt

SEQ ID NO: 10176 - DNA, 600 bp, Chicken  19866894206339_2
caacagaaattcaaggcatatggctttggagtagacctttatagagctatgtacaacatctaaggagtctaattgctcatggaaacagcatgccaggaatctcaggagtttctgatctgactaggtgttataacctgatgaaaatcaagtaaatctaagtagaaaaaaatctttaaagrtaacataagtagagagatgttaagacgttaaagagaaatagttagaagggtattttatgtgcattcagttgttatgtgatgtcagcttccaaggaccctgagaaatctgggaatgaaaaaraacacatgtgtgactgaatatgtattgaagttatcttaaatgatgcttgaaaaaacatttgagggaactcacgttttaaaaaaaacccgtaaatgtgtatctgaggaaataatctaattcacaggtaaataggttatcctagaagatacgcaaggttatttggttatttgaaagggggtgagccacatagtgaatgagatattttataaaaaacatacattgctgaatagccaacagaatggttgggttactacattaaagataatgaatagctcagggagaatcacatccaaactcttt

SEQ ID NO: 10177 - DNA, 600 bp, Chicken  19866894206342_1
caaatatttttacaatgtattcatggcagtatatctatctttgaacattctacagaaatatttgaattcaaaaattgtccttacatatatttgaaactttaaatatatgaatttttactcatatgcatatatattatgctttttttcccagtgctatgtattttactgcaaaaatgttcacaagaattcattaaacttcaacaatcacagtcatataaatgttcatgtagtaaaaataacaataaattaacataattatggctcaaattatatcttacacctaagcaataagtttagatrgyatattttagtatctgttaatgataaatagtcattgaaaacaagtaaaaacaatgttaaaagtaaaaagagaataaccaacaaatcttgaaaataattactggccaaagaatgggttggagttaactgtcacctgcttaaagatatttccaaagagtgaaatccttctataaaagaaaacaaccccccttcccccccccccccccccaaaaaaaaaagaactcatacatttcagcttatccttctgtaatcataagaaataagaactttgaggccttgtaaatacataggttactccag

SEQ ID NO: 10178 - DNA, 600 bp, Chicken  19866894206342_2
aatatttttacaatgtattcatggcagtatatctatctttgaacattctacagaaatatttgaattcaaaaattgtccttacatatatttgaaactttaaatatatgaatttttactcatatgcatatatattatgctttttttcccagtgctatgtattttactgcaaaaatgttcacaagaattcattaaacttcaacaatcacagtcatataaatgttcatgtagtaaaaataacaataaattaacataattatggctcaaattatatcttacacctaagcaataagtttagatrgyatattttagtatctgttaatgataaatagtcattgaaaacaagtaaaaacaatgttaaaagtaaaaagagaataaccaacaaatcttgaaaataattactggccaaagaatgggttggagttaactgtcacctgcttaaagatatttccaaagagtgaaatccttctataaaagaaaacaaccccccttcccccccccccccccccaaaaaaaaaagaactcatacatttcagcttatccttctgtaatcataagaaataagaactttgaggccttgtaaatacataggttactccagaa

SEQ ID NO: 10179 - DNA, 599 bp, Chicken  19866894206343_1
  misc_feature (1)..(101): n is any nucleotide
nnnnnnnnnnnnnnnnnnnnnnnnnnnnnnnnnnnnnnnnnnnnnnnnnnnnnnnnnnnnnnnnnnnnnnnnnnnnnnnnnnnnnnnnnnnnnnnnnnnnnaaaatgatgcaaagcaattgatttcctgatgtgcccccactacttctcagtagttaaatgcttctcatctgtttgtacatttagctcagtgtttttttgttgttgttgttgttgttgttttaatgggaatgacgttttcagaaccctctagaaaatacgtatcagtttaatttatccatgtgcagtgaaacctttcctygtgcctaaactaaatttcttttagtgcagctggaaactgttatgttttgttcttagctggatggatctagtgtagtcctctattctgtagactaacaaatctaaatcattccgattttcastttgggttacagaatatcaaaaattctgattggttggttggtgttttttccccctcctgctttcctggccttccttctattggtgctctttgaaagatacattttcttgaaacagagagcctcaaactgagcacagtattccagccaaggctttactagtgttcagtctgaggagaaa

SEQ ID NO: 10180 - DNA, 600 bp, Chicken  19866894206343_2
atttcctgatgtgcccccactacttctcagtagttaaatgcttctcatctgtttgtacatttagctcagtgtttttttgttgttgttgttgttgttgttttaatgggaatgacgttttcagaaccctctagaaaatacgtatcagtttaatttatccatgtgcagtgaaacctttcctygtgcctaaactaaatttcttttagtgcagctggaaactgttatgttttgttcttagctggatggatctagtgtagtcctctattctgtagactaacaaatctaaatcattccgattttcastttgggttacagaatatcaaaaattctgattggttggttggtgttttttccccctcctgctttcctggccttccttctattggtgctctttgaaagatacattttcttgaaacagagagcctcaaactgagcacagtattccagccaaggctttactagtgttcagtctgaggagaaatkctttgtatgtcctagatatgacagttctgttcacacatctctttgtactgcagctttttttcacagcagtgtgacatcgtggacacatgttctgtttgagatttactgtggtccacagcc

SEQ ID NO: 10181 - DNA, 600 bp, Chicken  19866894206343_3
tgcctaaactaaatttcttttagtgcagctggaaactgttatgttttgttcttagctggatggatctagtgtagtcctctattctgtagactaacaaatctaaatcattccgattttcastttgggttacagaatatcaaaaattctgattggttggttggtgttttttccccctcctgctttcctggccttccttctattggtgctctttgaaagatacattttcttgaaacagagagcctcaaactgagcacagtattccagccaaggctttactagtgttcagtctgaggagaaatkctttgtatgtcctagatatgacagttctgttcacacatctctttgtactgcagctttttttcacagcagtgtgacatcgtggacacatgttctgtttgagatttactgtggtccacagcccctgttctgaagccatggtgtttattcatctgttcctagccttgcaattgtgcaamtgttttcccacttgaatgcagaaattgacagttgcatcctatttctgcartcgagatcatttggaattctatttttgcccagcaacatccttgaagctctgccattttgttactgttggtaaat

SEQ ID NO: 10182 - DNA, 600 bp, Chicken  19866894206343_4
ctgctttcctggccttccttctattggtgctctttgaaagatacattttcttgaaacagagagcctcaaactgagcacagtattccagccaaggctttactagtgttcagtctgaggagaaatkctttgtatgtcctagatatgacagttctgttcacacatctctttgtactgcagctttttttcacagcagtgtgacatcgtggacacatgttctgtttgagatttactgtggtccacagcccctgttctgaagccatggtgtttattcatctgttcctagccttgcaattgtgcaamtgttttcccacttgaatgcagaaattgacagttgcatcctatttctgcartcgagatcatttggaattctatttttgcccagcaacatccttgaagctctgccattttgttactgttggtaaatcatagaatcatgtaatatccttagttggaaggaaccaaactctactccattactcatgtaattagagatccasgacatgtccatgcccarggaactacgtttgctatattctgttgttactcacagagaagcactgctgattactttttgagtagttttgtaccactgcagtcttt

SEQ ID NO: 10183 - DNA, 600 bp, Chicken  19866894206343_5
ttgaaacagagagcctcaaactgagcacagtattccagccaaggctttactagtgttcagtctgaggagaaatkctttgtatgtcctagatatgacagttctgttcacacatctctttgtactgcagctttttttcacagcagtgtgacatcgtggacacatgttctgtttgagatttactgtggtccacagcccctgttctgaagccatggtgtttattcatctgttcctagccttgcaattgtgcaamtgttttcccacttgaatgcagaaattgacagttgcatcctatttctgcartcgagatcatttggaattctatttttgcccagcaacatccttgaagctctgccattttgttactgttggtaaatcatagaatcatgtaatatccttagttggaaggaaccaaactctactccattactcatgtaattagagatccasgacatgtccatgcccarggaactacgtttgctatattctgttgttactcacagagaagcactgctgattactttttgagtagttttgtaccactgcagtcttttcattctgttcatatctctttcacttgctcagttattgagttctgagtca

SEQ ID NO: 10184 - DNA, 569 bp, Chicken  19866894206343_6
acatcgtggacacatgttctgtttgagatttactgtggtccacagcccctgttctgaagccatggtgtttattcatctgttcctagccttgcaattgtgcaamtgttttcccacttgaatgcagaaattgacagttgcatcctatttctgcartcgagatcatttggaattctatttttgcccagcaacatccttgaagctctgccattttgttactgttggtaaatcatagaatcatgtaatatccttagttggaaggaaccaaactctactccattactcatgtaattagagatccasgacatgtccatgcccarggaactacgtttgctatattctgttgttactcacagagaagcactgctgattactttttgagtagttttgtaccactgcagtcttttcattctgttcatatctctttcacttgctcagttattgagttctgagtcagtgtcaaaagctttactgaagtcaagccacaacagacctgctgctattcccacctgagggccattatactggcatcaaatggaacgagcttggtttggtgtgattttcttgacaaa

SEQ ID NO: 10185 - DNA, 552 bp, Chicken  19866894206343_7
tctgtttgagatttactgtggtccacagcccctgttctgaagccatggtgtttattcatctgttcctagccttgcaattgtgcaamtgttttcccacttgaatgcagaaattgacagttgcatcctatttctgcartcgagatcatttggaattctatttttgcccagcaacatccttgaagctctgccattttgttactgttggtaaatcatagaatcatgtaatatccttagttggaaggaaccaaactctactccattactcatgtaattagagatccasgacatgtccatgcccarggaactacgtttgctatattctgttgttactcacagagaagcactgctgattactttttgagtagttttgtaccactgcagtcttttcattctgttcatatctctttcacttgctcagttattgagttctgagtcagtgtcaaaagctttactgaagtcaagccacaacagacctgctgctattcccacctgagggccattatactggcatcaaatggaacgagcttggtttggtgtgattttcttgacaaa

SEQ ID NO: 10186 - DNA, 600 bp, Chicken  19866894206344_1
ttcctgtggttacagagcaaaagcattgttctcatcaaaggaataggagaagtacctgagcagcagacatggttcctttaatttctcattaatttagagtattaggacagctggagctttcaggactagtaaatgtagaaggtaacttttctaggagataaatttattttttaggtatatacgcagatttatacaatggctttacagggcaagcatggagtacactgtggctggctggccatggtcttattacctgttacttattacttactccttactactactcctataacacatgtyttctgtgaaagaaaagctctgagaataaaaaacaaacttaccccctgactctcgtaacagcctggccttagggaagggtttctcctgacagctgctagcgggattcccatcctctctggagcatggtggagagggarcattttctgatcttggcatgacccaaacgaaattcgcttctgcacatctgtgaaaccaggagagggaaatgcaatcagtgtgattcacccacrtggagatgactacttgctgctcttcttactcctcaggcgtctgctgcttcctgaggtgagccttatctct

SEQ ID NO: 10187 - DNA, 600 bp, Chicken  19866894206344_2
gaaggtaacttttctaggagataaatttattttttaggtatatacgcagatttatacaatggctttacagggcaagcatggagtacactgtggctggctggccatggtcttattacctgttacttattacttactccttactactactcctataacacatgtyttctgtgaaagaaaagctctgagaataaaaaacaaacttaccccctgactctcgtaacagcctggccttagggaagggtttctcctgacagctgctagcgggattcccatcctctctggagcatggtggagagggarcattttctgatcttggcatgacccaaacgaaattcgcttctgcacatctgtgaaaccaggagagggaaatgcaatcagtgtgattcacccacrtggagatgactacttgctgctcttcttactcctcaggcgtctgctgcttcctgaggtgagccttatctctcagctgcccctggatatcctggaggggcctgctctttgaatgactatttcttgctgccacaaagacttttttttccccagcctgggcaaggaggtacayagcagcccagtcgcaggaaagactgctggggaagcctg

SEQ ID NO: 10188 - DNA, 600 bp, Chicken  19866894206344_3
ctggctggccatggtcttattacctgttacttattacttactccttactactactcctataacacatgtyttctgtgaaagaaaagctctgagaataaaaaacaaacttaccccctgactctcgtaacagcctggccttagggaagggtttctcctgacagctgctagcgggattcccatcctctctggagcatggtggagagggarcattttctgatcttggcatgacccaaacgaaattcgcttctgcacatctgtgaaaccaggagagggaaatgcaatcagtgtgattcacccacrtggagatgactacttgctgctcttcttactcctcaggcgtctgctgcttcctgaggtgagccttatctctcagctgcccctggatatcctggaggggcctgctctttgaatgactatttcttgctgccacaaagacttttttttccccagcctgggcaaggaggtacayagcagcccagtcgcaggaaagactgctggggaagcctgatgctgttagagacgcatagcgctctatgkgtagccccccttggtgtgcacacctcacagagctcacctctgggctgccactctgcaaacatg

SEQ ID NO: 10189 - DNA, 600 bp, Chicken  19866894206344_4
gggattcccatcctctctggagcatggtggagagggarcattttctgatcttggcatgacccaaacgaaattcgcttctgcacatctgtgaaaccaggagagggaaatgcaatcagtgtgattcacccacrtggagatgactacttgctgctcttcttactcctcaggcgtctgctgcttcctgaggtgagccttatctctcagctgcccctggatatcctggaggggcctgctctttgaatgactatttcttgctgccacaaagacttttttttccccagcctgggcaaggaggtacayagcagcccagtcgcaggaaagactgctggggaagcctgatgctgttagagacgcatagcgctctatgkgtagccccccttggtgtgcacacctcacagagctcacctctgggctgccactctgcaaacatgctgccatattaggctcttgaagtgtgtgtactgcagttgctatagatacggggaagggtgctggaggaaatactggcaatagaagctcctgaagtgtgcaggaaaaggaatggctttgataaaagccccgaggatcacactctgcttactcttactcacaggagttaca

SEQ ID NO: 10190 - DNA, 600 bp, Chicken  19866894206344_5
aattcgcttctgcacatctgtgaaaccaggagagggaaatgcaatcagtgtgattcacccacrtggagatgactacttgctgctcttcttactcctcaggcgtctgctgcttcctgaggtgagccttatctctcagctgcccctggatatcctggaggggcctgctctttgaatgactatttcttgctgccacaaagacttttttttccccagcctgggcaaggaggtacayagcagcccagtcgcaggaaagactgctggggaagcctgatgctgttagagacgcatagcgctctatgkgtagccccccttggtgtgcacacctcacagagctcacctctgggctgccactctgcaaacatgctgccatattaggctcttgaagtgtgtgtactgcagttgctatagatacggggaagggtgctggaggaaatactggcaatagaagctcctgaagtgtgcaggaaaaggaatggctttgataaaagccccgaggatcacactctgcttactcttactcacaggagttacaatttgcacagtgaaatttagtggtggagaggtctctggcaaagcaggctctagattatgctgtcagga

SEQ ID NO: 10191 - DNA, 600 bp, Chicken  19866894206345_1
acataaatggcaaaatatgcataactaccattatcttaaaggtatcttacattcacagtcagttttaaacttttatgcttcaacgacattacaaattcattggtttgaatgtaaactacagtgtcccacaatttgttaaagggcaaatacccacatggtttgagttgcaaatgatacatatatgcttgctactgactattagctagtcagtgaaaatttgctcaactgtcctgtttagtacagggtaattttctgataaaaaggtttcctaaatgtaagcttcatctaaaagagtgagtygacagagtgaaactggaaaagcctgcactgcatgtaatactggaaattgttgttcagctctgacatcatagtccttctgcccgcctgttcataggaagccagatcctcaagtgaataattctgtaaaagtgagcactgaaaaaaaattgtacttaagagtaaatattataaatgaaaaaatgctgtttttccttaaaaatacggttccttccagtaactgatcagaaaaccttcacaaacacataatcattgacatcactgactcagaaacactgagtgattgacatcactgagttatac

SEQ ID NO: 10192 - DNA, 600 bp, Chicken  19866894206345_2
aatactggaaattgttgttcagctctgacatcatagtccttctgcccgcctgttcataggaagccagatcctcaagtgaataattctgtaaaagtgagcactgaaaaaaaattgtacttaagagtaaatattataaatgaaaaaatgctgtttttccttaaaaatacggttccttccagtaactgatcagaaaaccttcacaaacacataatcattgacatcactgactcagaaacactgagtgattgacatcactgagttatactagtatatcttttgttgtctgcaataacactcaarggttttctgtggaaggtgatgctgctgccagttgaaytgcacataacatctccatcatcttctgatgttcagaagtcaagctgaatttacccacgtgaactccacaagcaaacaagctaaacttcaaggaaaggaataagcacacctgatcactaaatgagcaaaatttacacatgtgcctacgtctactaatgagtaatcctgttggtgaatttattcctctgagccaaaatgcagaaatgaacaattgcaaggtcaggatatacaaacaactttccaggatttttttgttttttgttt

SEQ ID NO: 10193 - DNA, 600 bp, Chicken  19866894206345_3
ccttctgcccgcctgttcataggaagccagatcctcaagtgaataattctgtaaaagtgagcactgaaaaaaaattgtacttaagagtaaatattataaatgaaaaaatgctgtttttccttaaaaatacggttccttccagtaactgatcagaaaaccttcacaaacacataatcattgacatcactgactcagaaacactgagtgattgacatcactgagttatactagtatatcttttgttgtctgcaataacactcaarggttttctgtggaaggtgatgctgctgccagttgaaytgcacataacatctccatcatcttctgatgttcagaagtcaagctgaatttacccacgtgaactccacaagcaaacaagctaaacttcaaggaaaggaataagcacacctgatcactaaatgagcaaaatttacacatgtgcctacgtctactaatgagtaatcctgttggtgaatttattcctctgagccaaaatgcagaaatgaacaattgcaaggtcaggatatacaaacaactttccaggatttttttgttttttgttttttttttcaaagtactacccaacttggaatggagtct

SEQ ID NO: 10194 - DNA, 600 bp, Chicken  19866894206351_1
gcccccgttccttgctccttgccaccccgtgcagaggttcagccaaactggtttggcttcattgtcagactgcacccaccaggtttccatttggcccagaggcagttggccttcaagcaacactgactgtgctctaccaggggtgtaggcagcacaataaggaaacctttggcaagagggcagaattcaaggcaggcagcgtaggtcagctgtctgggtttggcttttggaccaaaatatcagcttctaggtaaaacgaggcagctgtactctattaagcaagccaataaaactattaamtacatcaattatattgtggccattcactaatgtcgaagtaatgtcatcaaaacacagtatgatagagtctgggacctgcaaaaaaattacctcaagctagaaagttaaatgcaacattgcaaacacgtatcctaacctcacacatctgacatcccaggaaaaggctcagaaacatttgaagatggatgataacagcatggaacagcaatgtctcatatggaatcataggctgggactcatcgccataataacttgaggtctgagggaggtaacacacagctatctaacgagcaagcagca

SEQ ID NO: 10195 - DNA, 599 bp, Chicken  19866894206352_1
  misc_feature (1)..(26): n is any nucleotide
nnnnnnnnnnnnnnnnnnnnnnnnnnttggatttggagatcctatctctctgatggaaaaaaaaattgctgtgtttccttgttgaaatagtctcctttagtgtaaaaaaataataattcagatatattgcttcctttcgtattaaggctggataatactctgcacaaggctctctactgtctgtgaaattatgaccaaaatgaattagctcaagttgggagtaagaataacagagtcacatttataacctgggttagtttttaacaagaaaaaaatagcttgaggtatggcgtgtaacargagaacctggctgctatcaaacatgctgcaaatgtatagcaacaggtattgtaggcagtaaatttatctctgtatgagaaacctgatgttgctgctgttcccagggggtgagttgcgttgggctgttggcgaggctcagctaacagagcttggcttatagcgtgcatgcagacgggatggttctgcacagaagggcgacctttgctgtattttggtttcagatttcacagggacccatttcaaagattttagcttcaatccacaccctgctggtggtgagctataaaactctctttgaa

SEQ ID NO: 10196 - DNA, 600 bp, Chicken  19866894206352_2
aacatgctgcaaatgtatagcaacaggtattgtaggcagtaaatttatctctgtatgagaaacctgatgttgctgctgttcccagggggtgagttgcgttgggctgttggcgaggctcagctaacagagcttggcttatagcgtgcatgcagacgggatggttctgcacagaagggcgacctttgctgtattttggtttcagatttcacagggacccatttcaaagattttagcttcaatccacaccctgctggtggtgagctataaaactctctttgaaggaagtttcttaaaaagggraaaaaaaaaaaaaaaaaccctgtcctttattaccttaataaagttagataaaggtcatttgtttactccgtgtgtaataacacgctgctgccgctgttatttgtcaatataactgatggttcaaagatgaaatgaaagttgcagaattaccagctataatgtgtaaatgtgtaatgcaagtaattcttttttatgactcttcagtttgttagttaacttgaagaatgcttactggcatatgcttatgctggggaggctgttatgggtgacatggtgtaatgtaaygtccttcctccaagg

SEQ ID NO: 10197 - DNA, 600 bp, Chicken  19866894206352_3
acatgctgcaaatgtatagcaacaggtattgtaggcagtaaatttatctctgtatgagaaacctgatgttgctgctgttcccagggggtgagttgcgttgggctgttggcgaggctcagctaacagagcttggcttatagcgtgcatgcagacgggatggttctgcacagaagggcgacctttgctgtattttggtttcagatttcacagggacccatttcaaagattttagcttcaatccacaccctgctggtggtgagctataaaactctctttgaaggaagtttcttaaaaagggrraaaaaaaaaaaaaaaaccctgtcctttattaccttaataaagttagataaaggtcatttgtttactccgtgtgtaataacacgctgctgccgctgttatttgtcaatataactgatggttcaaagatgaaatgaaagttgcagaattaccagctataatgtgtaaatgtgtaatgcaagtaattcttttttatgactcttcagtttgttagttaacttgaagaatgcttactggcatatgcttatgctggggaggctgttatgggtgacatggtgtaatgtaaygtccttcctccaaggt

SEQ ID NO: 10198 - DNA, 600 bp, Chicken  19866894206352_4
tttcttaaaaagggraaaaaaaaaaaaaaaaaccctgtcctttattaccttaataaagttagataaaggtcatttgtttactccgtgtgtaataacacgctgctgccgctgttatttgtcaatataactgatggttcaaagatgaaatgaaagttgcagaattaccagctataatgtgtaaatgtgtaatgcaagtaattcttttttatgactcttcagtttgttagttaacttgaagaatgcttactggcatatgcttatgctggggaggctgttatgggtgacatggtgtaatgtaaygtccttcctccaaggttatttcacctcctttctaaacttttcttgcttatgctccgtctctccaaaaacaattttaagggaataaataaagctgtgtaaatgttgtctgtaggcagctcagaatgaaagaagccaaggctccaggctttgggatacgaggtggcggctccagtactcccagaatctgtagggaaaaggtcttgttaggagggacgccctttggggttgaaggcaacgttttggagaaactacatagacttcaaaattattttaattaaaacctccttgtccgttgtttgt

SEQ ID NO: 10199 - DNA, 600 bp, Chicken  19866894206355_1
atcaatctgattttttatttaaatgttgttgtaagaaaatgattcaacgctgtaattacctctagccataattgattgtttctgtttacacagtaggttattaaaaaaaaaaaaaaaacattatctggaattggtctctacctttaaacacagcttaggttattgcaacaatacacaaaatataaggtcataaacgtgaagcaggtggctacttaataacaggaacattcagcattcattctaaacagtccatttgggaccaaattatctgccttacacgaataattaatttgactggtwgtgcactgtgcggtatgattgatgcgcattatgctgttttattaagcaataactcacagctatgtggtgacgtcaatctttatcttggcagcattgttttacaaaaggagtgagtggtctttacttcctccagcgttacctaccctatgatgggaggggaggcctcatggcggctgcagcccctcacagggagcggagggcagcactgagctccgctctctgtgacagagacagggcccgagggaagccagaacatgctcattattcagcacaatgtatggtggtgcagcaaaagagcag

SEQ ID NO: 10200 - DNA, 600 bp, Chicken  19866894206367_1
caagaagaaatttttcttgatagaatgacagctatttgctgatggatcttatcacctctcatctcaatggactcttccattatttttgtttcaaaaaaaagcccctgttatatctagataatcaggcagggacacccaacaagcttcccaagcagtggtgtttctgttcatgtagaaattagatgagggagtgcccccagcatcacatcctgagtttggtattcggatctgagttacggctcagtgctttgaccctcatccaacacaggtggaactcatttcctgtcctccacgagcccytttcaggggaaatacagttgatttctcagggcttcttaagggaatctcacattaaaagtgagctttaactttgaaacaactcaggaactgagagttcctctgctgttagatctcaggttctgtaataaaggtttcctgtgttgaatcagcagtcatatgttctcatttaaaatcagagaaacgctgccttgttcaatgtcagggcaagaaagcagaggatgattggcagcagatggctgagttccagcctattctgaaatgaaaagaatcaatgtgatggagtggatccaagtccctgct

SEQ ID NO: 10201 - DNA, 600 bp, Chicken  19866894206388_1
atcatttgttccagtaggaatgctatctccaacacaactatgacactttaggtctgatttcacagaaaatgtttttcctaaataaagtatcaatcaaagcataggagaggctaacaataccctgtgcttgtcagcattctaatgctgagatccacttctcattaaccagctgtgtcacagacaggaatgtcatacctctgcactcactttgtgcactcacaaagagcactgctattaaacttgaagactcccgataccaggagaaacccttcagacctacagtgacttgggtacaacatraatctcagttacttcccttgtgcttggcagataggatgctgaagctgaaaaaagtaacaaaaaatcttgagcttatgctctagagtggtagtctgacagtctcaaaaataggtagtgcagcccaaaataaactttcttcctcagtttgtctacttctggtagacaaggtgtttcaagactaagatgcagacgttctggaataaacagcctctgaacagtctggttctgaaaacatattattggaaaagttatgattgttacaagtctaagctttccataagtcagcattatgagagaggg

SEQ ID NO: 10202 - DNA, 600 bp, Chicken  19866894206390_1
tttctgtgctagttagagcagcacagccttattccgggtgattcattcattgagtcaggcagccatgcatgcagtcattcataagtaatgccatgcttcccttcagcatgcaacaatgatttacctccccgctgcctttcagtgtttgttcagcaaacacgctaagctaaagagttcctatttcaagctctaccattattattaaagaaacagcgttatcttgatgcgtgcatatggggtacagtgcaaagagccaaacagctatgtcagtgggaactgactgcaacacttggtttgacycacacctcccaagctctgcattcttcatcaattcaaaagaggaaggttgtgcttacaagcacaacttctgctcctttgacactcttgccacaaaagcagtgccattttcacatccactggcactcttagaagaggtttgtcaactcatcccatcctcaaaacctggtgcaccaggattcaattttctgttattggagttgtacttttttgttggtttttgtttgttttttgttttgttttatgtttttgtttgtttgtttgtttttgtttttgttttgttttgttgctaatttcagcaac

SEQ ID NO: 10203 - DNA, 600 bp, Chicken  19866894206395_1
tgtctcggtacctctcttctcttcgcagtctctccttctgaactcacgatggcagcaacgtgctgtgatagagtgcaagaaaacacgaggtgtggcttcccacttcgacaaattctgcctcttcctgaaagatcctaacccttccttggggcacacggcgtggcactgcctgggaggcagctgagaaaggcactgggtgcctttctttgtagagaaatgtcactttttggtgcaccacaactacgggaggagacaccagagactccactacagttgcacctttgttttggcaaagcaaaraaatggtttcttgtttgaggcaggagagggcagcaacgccctatctgtctgttgttaattcagtacttgctcagttgaacacgggtctctgaaggtttgcattttctgtagagtctggatwgcagctctctttctggaagcagctttgggttagaccccagagtttcttctatctctgtcctactgttggcttgccattgtctatctcagtctgaagagcagaaagtcctgaactctcccttatttcaggacctgatgtacacatctgtccagatgggagctggtgtcaatccgccttag

SEQ ID NO: 10204 - DNA, 582 bp, Chicken  19866894206395_2
ttcctgaaagatcctaacccttccttggggcacacggcgtggcactgcctgggaggcagctgagaaaggcactgggtgcctttctttgtagagaaatgtcactttttggtgcaccacaactacgggaggagacaccagagactccactacagttgcacctttgttttggcaaagcaaaraaatggtttcttgtttgaggcaggagagggcagcaacgccctatctgtctgttgttaattcagtacttgctcagttgaacacgggtctctgaaggtttgcattttctgtagagtctggatwgcagctctctttctggaagcagctttgggttagaccccagagtttcttctatctctgtcctactgttggcttgccattgtctatctcagtctgaagagcagaaagtcctgaactctcccttatttcaggacctgatgtacacatctgtccagatgggagctggtgtcaatccgccttaggaggaggaagaggactctggagacctggtttctgatcctgcctttgccattaacttcgtacttgaccatgaacatactataaaacttcttcagcgttatctcc

SEQ ID NO: 10205 - DNA, 600 bp, Chicken  19866894206398_1
tgggagggggaagaagcctcttggcagcagccctttggtgtgggctgtgagtgctgggtattctggggatgggattgagcgttctgggcactggctcagctctcccatccagcaacgtcaggcggttcagttggagtgggaagataaaaataaaaatgcgactgtgattgaaattttgcactgcagtaactttttgccacacagcatcttatagatgcatattttctcttccgcgctgcctttcttttaatggttgccatgtgtgactgctacttcacactgccttttcttttttttttyttggtaacataaaaaaggggggagaaaagaagggaaaataacctgcgttctgccttcccttcatctttttttcttcctgtcttatgtggttttcaatctgcggagggcaggtctgcaaaagaacacggggyggtggggagggaaagcagcccccaagcgcagtgctggtggcttcctgctcgagtgccctttgtcgctatcagtgattaatttttaactgatgtgtgcaccacgttctggacctttctttaattaactgctttcttttttttttttttctttccccctctctcttatgsc

SEQ ID NO: 10206 - DNA, 600 bp, Chicken  19866894206398_2
tggagtgggaagataaaaataaaaatgcgactgtgattgaaattttgcactgcagtaactttttgccacacagcatcttatagatgcatattttctcttccgcgctgcctttcttttaatggttgccatgtgtgactgctacttcacactgccttttcttttttttttyttggtaacataaaaaaggggggagaaaagaagggaaaataacctgcgttctgccttcccttcatctttttttcttcctgtcttatgtggttttcaatctgcggagggcaggtctgcaaaagaacacggggyggtggggagggaaagcagcccccaagcgcagtgctggtggcttcctgctcgagtgccctttgtcgctatcagtgattaatttttaactgatgtgtgcaccacgttctggacctttctttaattaactgctttcttttttttttttttctttccccctctctcttatgscagcatttcatgcctacggaaaagcaggaaaaatgttggtggaaacaaggtaatctactgctttaaagctggaatagtttgtctttaatgaagagtaccgcactgtggcattgctgcgctcatttattactc

SEQ ID NO: 10207 - DNA, 600 bp, Chicken  19866894206398_3
yttggtaacataaaaaaggggggagaaaagaagggaaaataacctgcgttctgccttcccttcatctttttttcttcctgtcttatgtggttttcaatctgcggagggcaggtctgcaaaagaacacggggyggtggggagggaaagcagcccccaagcgcagtgctggtggcttcctgctcgagtgccctttgtcgctatcagtgattaatttttaactgatgtgtgcaccacgttctggacctttctttaattaactgctttcttttttttttttttctttccccctctctcttatgscagcatttcatgcctacggaaaagcaggaaaaatgttggtggaaacaaggtaatctactgctttaaagctggaatagtttgtctttaatgaagagtaccgcactgtggcattgctgcgctcatttattactcccctgccctccctggtcccaaaagttttccttgtcacctagaacttgaacaagaaggggaacgagatgcccacgtgcttcaccttctgtgcaggcaggagctctgggtcgtggggtgccggaagctggagagcgaactcatctcctgctctgtctgtgaactcatggg

SEQ ID NO: 10208 - DNA, 600 bp, Chicken  19866894206409_1
ctaatgcacggacacttttccagtcttctcccccttttcccttcatactactcttaaactgcagtgcttgtagatttgtaaaatactcttatctgttggaagcaatccttcaaacagcggcttttagaaagccagcaagttcttttgccttagtttctgtaaacatcttctggtactgaaatgttttttgtttctaaaattcattgctgttatatttaccttttccatgaggaaaagcaattgaatgtgggactgttgtgccagcttagtctcctccagtagagtgcccagctgaactgygtgctgcagccttccaaaccactacctgagtcctgcttttgactacagactgcaaacatgggaagtggtcccataggctgtgtggaacatgcttagtttcatttgttggtgtgtaactctgtcttggtgatggtggcctcgcctggtctcagtcaatacaataattaatctgcttgacctgttggtttgatgtggaatctgtcttctctttgttgattactaatagttaataagtgagtagaagagagagattaatattctctgtcccctattttaaaaggaacggagagggaaggtcga

SEQ ID NO: 10209 - DNA, 599 bp, Chicken  19866894206414_1
  misc_feature (1)..(282): n is any nucleotide
nnnnnnnnnnnnnnnnnnnnnnnnnnnnnnnnnnnnnnnnnnnnnnnnnnnnnnnnnnnnnnnnnnnnnnnnnnnnnnnnnnnnnnnnnnnnnnnnnnnnnnnnnnnnnnnnnnnnnnnnnnnnnnnnnnnnnnnnnnnnnnnnnnnnnnnnnnnnnnnnnnnnnnnnnnnnnnnnnnnnnnnnnnnnnnnnnnnnnnnnnnnnnnnnnnnnnnnnnnnnnnnnnnnnnnnnnnnnnnnnnnnnnnnnnnnnnnnnnnnnnnnnnnnnnnnnnnnnnnnnnntttctgctttgctgaggraccttgccagactcccctgtgccctcacttccaacaggtatgagaacacttgaataccagatgtctacctggtatgcaatgaaaaatataacccaaggaggagcatttaataaatgccccaaaccactctccaggactaaaatgcaattaggcagttacacatcagctgaattacagtttttgtttactgagcataccttgccatacattgtcttgaaagctgccttgattttttgcctttggtcattggagcggttagatacaacatcaatgatagccttctcatcagtcccttggaa

SEQ ID NO: 10210 - DNA, 600 bp, Chicken  19866894206414_2
aacccaaggaggagcatttaataaatgccccaaaccactctccaggactaaaatgcaattaggcagttacacatcagctgaattacagtttttgtttactgagcataccttgccatacattgtcttgaaagctgccttgattttttgcctttggtcattggagcggttagatacaacatcaatgatagccttctcatcagtcccttggaaacagaagggcaacgtgagaactcgtaagaatccatctaaggcgatgcattttataatctcccagtttggcatggttatataataaatgcrtgaatatcatttgagtctgtttaccaaattttctttgtaacttagagtctactaaatttcccaagtctctcttggtgtgacttttgaaaagcttacggttagatacaaactgaagcaccaaatggcattaacacattagaattgtaagtgcctgttgcttacttaccaatccccttcatagctttgcgcagaatttctgcatcccttccagcatcaaagtttggagcagcttgaattgtgccctgagtatactgaaccattgctgcaggctgaaaacaaaagccatgtataactagctat

SEQ ID NO: 10211 - DNA, 600 bp, Chicken  19866894206417_1
ttgttattttggaagaaacttctggagatcagcccttgctcaaagcgtggtcaggtagagcaggttgatcagggccttgtctgatcatgttctgaatctgaagtttcacagtctctttaggccagtgtttaactgtcctctgttcttcagctcccagatcctctgtttgcatgcatttcccatttggaggtgctctaggtttggacgtacctgtgccgttccctacagtgcttgaacacatgctggtgagaaagtacctcaaggcttgtccacagccaggcacagattatccttgcttcytgtgccctgtgctggctgcctgcaggctggagggtgagagatgggcaacctggacagggaccacaatgtagtgtcagaccaggtttggactgctcctccccaaggcctcccccactgacgtttatatttttgtctgattttctttaaagctgattactttgtttaagacactttgtaattccctgctgtttgatgtgaatgatagtcattttgctcttcgtcatgatcagtcttgggcaaatacactgtcagacaattgcatatatttgattcacagaagttcttttcttcacagttgct

SEQ ID NO: 10212 - DNA, 600 bp, Chicken  19866894206417_2
ctgcaggctggagggtgagagatgggcaacctggacagggaccacaatgtagtgtcagaccaggtttggactgctcctccccaaggcctcccccactgacgtttatatttttgtctgattttctttaaagctgattactttgtttaagacactttgtaattccctgctgtttgatgtgaatgatagtcattttgctcttcgtcatgatcagtcttgggcaaatacactgtcagacaattgcatatatttgattcacagaagttcttttcttcacagttgctattatctaacccctaacayaygtcctctgccttactgagcagtggccatactattttcttagtctgtcttttgcrgtcactgtccttatagttgcctttctcattgttgtccttagcaacctttgctagttttgactctaggtgagtttttggcttttctaactcatctttgtattcaggaraaacatctctatgtgccttcttggtagtttgttcatgcttccttttctggggttgagctcagtcaggagttctgtgctcatcttygatgagcaaatctggcagatggctgtaaggaatgctgtgctccctttacagc

SEQ ID NO: 10213 - DNA, 600 bp, Chicken  19866894206417_3
gcaggctggagggtgagagatgggcaacctggacagggaccacaatgtagtgtcagaccaggtttggactgctcctccccaaggcctcccccactgacgtttatatttttgtctgattttctttaaagctgattactttgtttaagacactttgtaattccctgctgtttgatgtgaatgatagtcattttgctcttcgtcatgatcagtcttgggcaaatacactgtcagacaattgcatatatttgattcacagaagttcttttcttcacagttgctattatctaacccctaacayaygtcctctgccttactgagcagtggccatactattttcttagtctgtcttttgcrgtcactgtccttatagttgcctttctcattgttgtccttagcaacctttgctagttttgactctaggtgagtttttggcttttctaactcatctttgtattcaggaraaacatctctatgtgccttcttggtagtttgttcatgcttccttttctggggttgagctcagtcaggagttctgtgctcatcttygatgagcaaatctggcagatggctgtaaggaatgctgtgctccctttacagcac

SEQ ID NO: 10214 - DNA, 600 bp, Chicken  19866894206417_4
agaccaggtttggactgctcctccccaaggcctcccccactgacgtttatatttttgtctgattttctttaaagctgattactttgtttaagacactttgtaattccctgctgtttgatgtgaatgatagtcattttgctcttcgtcatgatcagtcttgggcaaatacactgtcagacaattgcatatatttgattcacagaagttcttttcttcacagttgctattatctaacccctaacayaygtcctctgccttactgagcagtggccatactattttcttagtctgtcttttgcrgtcactgtccttatagttgcctttctcattgttgtccttagcaacctttgctagttttgactctaggtgagtttttggcttttctaactcatctttgtattcaggaraaacatctctatgtgccttcttggtagtttgttcatgcttccttttctggggttgagctcagtcaggagttctgtgctcatcttygatgagcaaatctggcagatggctgtaaggaatgctgtgctccctttacagcacagtgactcctgcacctttatgctctagctcaactgtgaagttctttttgtgcat

SEQ ID NO: 10215 - DNA, 600 bp, Chicken  19866894206417_5
ctgctgtttgatgtgaatgatagtcattttgctcttcgtcatgatcagtcttgggcaaatacactgtcagacaattgcatatatttgattcacagaagttcttttcttcacagttgctattatctaacccctaacayaygtcctctgccttactgagcagtggccatactattttcttagtctgtcttttgcrgtcactgtccttatagttgcctttctcattgttgtccttagcaacctttgctagttttgactctaggtgagtttttggcttttctaactcatctttgtattcaggaraaacatctctatgtgccttcttggtagtttgttcatgcttccttttctggggttgagctcagtcaggagttctgtgctcatcttygatgagcaaatctggcagatggctgtaaggaatgctgtgctccctttacagcacagtgactcctgcacctttatgctctagctcaactgtgaagttctttttgtgcattcactgctctttaattatacattaagtacttaactgtcagtctgaacacagccatactaaaaatagctatacaacctgttatatttcattccctaaattattctgat

SEQ ID NO: 10216 - DNA, 600 bp, Chicken  19866894206417_6
tgattcacagaagttcttttcttcacagttgctattatctaacccctaacayaygtcctctgccttactgagcagtggccatactattttcttagtctgtcttttgcrgtcactgtccttatagttgcctttctcattgttgtccttagcaacctttgctagttttgactctaggtgagtttttggcttttctaactcatctttgtattcaggaraaacatctctatgtgccttcttggtagtttgttcatgcttccttttctggggttgagctcagtcaggagttctgtgctcatcttygatgagcaaatctggcagatggctgtaaggaatgctgtgctccctttacagcacagtgactcctgcacctttatgctctagctcaactgtgaagttctttttgtgcattcactgctctttaattatacattaagtacttaactgtcagtctgaacacagccatactaaaaatagctatacaacctgttatatttcattccctaaattattctgatcccatgaggatctcagtgaattcacaaacttgagttagttgactgctagaagtgatatatcatttaaatgatatccacaaatgta

SEQ ID NO: 10217 - DNA, 600 bp, Chicken  19866894206417_7
ggctgtaaggaatgctgtgctccctttacagcacagtgactcctgcacctttatgctctagctcaactgtgaagttctttttgtgcattcactgctctttaattatacattaagtacttaactgtcagtctgaacacagccatactaaaaatagctatacaacctgttatatttcattccctaaattattctgatcccatgaggatctcagtgaattcacaaacttgagttagttgactgctagaagtgatatatcatttaaatgatatccacaaatgtagttcaggtctattgtgtgcrctggtattcagcagtttttacttgcatgctaaatgtcaatgctagtgttgtagatgctaaaagagaaatacaactctgagtatgcaaatggtaagaatttcatttcctgcctactggcctttttagcagatagctttgagttctgttggttaaatgatttggattatcataatagcacatagcataatttcttgttttatttagactaatatataaccttttgagtacttattgtggtagtagactatcactttacatgttgatgctgcttctgtcttgtgatctatctgcttttttact

SEQ ID NO: 10218 - DNA, 600 bp, Chicken  19866894206418_1
tagttcctttctgccctctggcagatcaacgctccctcccagcttggtgtcatctgcaaatgtactgggggtgtactcaaccctcaaacccttgtcaagatcattaataaagatgttaaatataagtggccccagtactgagccctgggagataccactcattactggctgccaactggatttaactcccttcaccacaactctttgggcccggccatccagccagtgcttcacccagcggagagtacacccatccagaccatgggcagccagcttctccacgagaatgttatgggggamagtgtcaaaggcgttactgaagtccaggtagaccacaccaacagccttaccttcatccactaagcgggtcaccttgtcatagaatgaaaccaagtttgttaaacaagatctaccattcataaactcatgatgactggtcatttgaccaaagagctgaaactatttgctaaacgctgactagttatctgagttcctctttgctttttacagtttgttttttgttgttgttattcctatactactataaactccacagaagttctatctttttattctatttcatttacacttgtagcacag

SEQ ID NO: 10219 - DNA, 600 bp, Chicken  19866894206420_1
gaccaaaatgcaggaccctacacttggccctactgaaactcatgcagttacccctgacccatcactccagtctatccaggtccctctgtagttcctttctgccctctggcagatcaacactccctcccagcttggtgtcatctgcaaatgtactgggggtgtactcaaccctcaaacccttgtcaagatcattaataaagatgttaaatataagtggccccagtactgagccctgggagataccactcattactggccgccaactggatttaactcccttcaccacaactctttgggccyggccatccagccagtgcttcacccagcggagagtacacccatccagaccatgggcagccagcttctccaygagaatgttatgggggaaagtgtcaaaggcgttactgaagtccaggtagaccacaccaacagccttaccttcatccactaagcgggtcaccttgtcatagaatgaaaccaagtttgtcaaacagggtctactgttcataaacccatgatgactgggcctgatcccctggttgacctttaattggtccatgatggctctccagattacctgttccataaccttctctggta

SEQ ID NO: 10220 - DNA, 600 bp, Chicken  19866894206420_2
tctatccaggtccctctgtagttcctttctgccctctggcagatcaacactccctcccagcttggtgtcatctgcaaatgtactgggggtgtactcaaccctcaaacccttgtcaagatcattaataaagatgttaaatataagtggccccagtactgagccctgggagataccactcattactggccgccaactggatttaactcccttcaccacaactctttgggccyggccatccagccagtgcttcacccagcggagagtacacccatccagaccatgggcagccagcttctccaygagaatgttatgggggaaagtgtcaaaggcgttactgaagtccaggtagaccacaccaacagccttaccttcatccactaagcgggtcaccttgtcatagaatgaaaccaagtttgtcaaacagggtctactgttcataaacccatgatgactgggcctgatcccctggttgacctttaattggtccatgatggctctccagattacctgttccataaccttctctggtaccaaggtgaaactgatatgtctgtagctagcaggatcattttttcggccctttttgaagatgtccatcac

SEQ ID NO: 10221 - DNA, 599 bp, Chicken  19866894206429_1
  misc_feature (1)..(104): n is any nucleotide
nnnnnnnnnnnnnnnnnnnnnnnnnnnnnnnnnnnnnnnnnnnnnnnnnnnnnnnnnnnnnnnnnnnnnnnnnnnnnnnnnnnnnnnnnnnnnnnnnnnnnnnncctcttctaccttctcccctccaagcagagcagaggaacatggaatggggactgtggtcagtcgataatgctttgtctctgatgctcctccatggtcgttctctgccctgctgcaccatgggaatttcttctctgtgcctggaacacctcctgacctccttctgctctgacctgggtgactgcagagcagcttctytctcatttctccttcccagaagtttcacagcattttttacctggctccctcctctcctagggtggctgtcaaggggctggttttkgatcacccatgtggctggagagatacgtcacttagatgcacctctccaaccaagttctagagatgaatacatgccatagcaaccccagattaattttgggaaaattcccrggggcaaatgggacagcacagggaaggagggagcaattcccaagggtcatttcyatgcaaataacagcagtatacttctgtcatttctcctacaggagcaggaa

SEQ ID NO: 10222 - DNA, 599 bp, Chicken  19866894206429_2
  misc_feature (1)..(19): n is any nucleotide
nnnnnnnnnnnnnnnnnnncctcttctaccttctcccctccaagcagagcagaggaacatggaatggggactgtggtcagtcgataatgctttgtctctgatgctcctccatggtcgttctctgccctgctgcaccatgggaatttcttctctgtgcctggaacacctcctgacctccttctgctctgacctgggtgactgcagagcagcttctytctcatttctccttcccagaagtttcacagcattttttacctggctccctcctctcctagggtggctgtcaaggggctggttttkgatcacccatgtggctggagagatacgtcacttagatgcacctctccaaccaagttctagagatgaatacatgccatagcaaccccagattaattttgggaaaattcccrggggcaaatgggacagcacagggaaggagggagcaattcccaagggtcatttcyatgcaaataacagcagtatacttctgtcatttctcctacaggagcaggaaaaagaggcaaggaacagagctgcctacatttccaccttgccaaaatccccgctgtggtggagagactttgagagggacaaggacg

SEQ ID NO: 10223 - DNA, 600 bp, Chicken  19866894206429_3
atggtcgttctctgccctgctgcaccatgggaatttcttctctgtgcctggaacacctcctgacctccttctgctctgacctgggtgactgcagagcagcttctytctcatttctccttcccagaagtttcacagcattttttacctggctccctcctctcctagggtggctgtcaaggggctggttttkgatcacccatgtggctggagagatacgtcacttagatgcacctctccaaccaagttctagagatgaatacatgccatagcaaccccagattaattttgggaaaattcccrggggcaaatgggacagcacagggaaggagggagcaattcccaagggtcatttcyatgcaaataacagcagtatacttctgtcatttctcctacaggagcaggaaaaagaggcaaggaacagagctgcctacatttccaccttgccaaaatccccgctgtggtggagagactttgagagggacaaggacgatgacagctcatcaggaggatgcagtcctgcggggggtggaggtggatctggctctttccatggactcgtcttctagcaattggtgtctagcagacagcatgtgtccatgg

SEQ ID NO: 10224 - DNA, 600 bp, Chicken  19866894206429_4
acctcctgacctccttctgctctgacctgggtgactgcagagcagcttctytctcatttctccttcccagaagtttcacagcattttttacctggctccctcctctcctagggtggctgtcaaggggctggttttkgatcacccatgtggctggagagatacgtcacttagatgcacctctccaaccaagttctagagatgaatacatgccatagcaaccccagattaattttgggaaaattcccrggggcaaatgggacagcacagggaaggagggagcaattcccaagggtcatttcyatgcaaataacagcagtatacttctgtcatttctcctacaggagcaggaaaaagaggcaaggaacagagctgcctacatttccaccttgccaaaatccccgctgtggtggagagactttgagagggacaaggacgatgacagctcatcaggaggatgcagtcctgcggggggtggaggtggatctggctctttccatggactcgtcttctagcaattggtgtctagcagacagcatgtgtccatggggctgacccgaagctggaggctcctctttctcacctcggtgacagcgagcaact

SEQ ID NO: 10225 - DNA, 497 bp, Chicken  19866894206429_5
accttgaagatcctactgcttcctatgcacttaatgccttaaattaacccttgcagctgagcgcctacggagacaagcgtctgccaacagcttggagaagtgcccttctgcttcagcgtagcactgtcatgcctgctgccaccagcctggggaggggtgaggatggacccagcaatgcctgggggatggagacctcccacacgcatcccctctgcagtccttcctgtggcactgagttctgggggacctttcctgagttgttttattttaatgagcttttgccagcccaccttgaggcgyatctaatggtgggaaaaggccgaataaggcccagcagtcaacactgcagtgccagtacgccaaggtggtaaccttgcaagcatggtggcactgagcagcagcaggtcaacctggacgatgctgaaggtcacaaactgcccccagctatgagagactgagcagctctggttggttctttagggctccattgggccctt

SEQ ID NO: 10226 - DNA, 600 bp, Chicken  19866894206439_1
cctgctgctttttgctctgctttcaacaagctgttttggctttccaagccagtgcaaagcagtcgcctgtggctgctgtcagcttgcagctcgggcaggaagcacgccaaccacagtactctgcgtgaaccaacactcccctgctctacccatgaacaaacaggattcagtgtcaactaaagggtcttgcagaggagctaaagctcctaaagctgcccaaaagacttgtgctccatcttgctgatgctctaaaaatcaacattgggagtgctaataaaaccagtctggttttgtatggtraaggagtaacattctggatttattacttaaaatagcatgcratttcaattgagctttttttcaatacttacaaggaaaacgtttaaaaatattatattctcaaagtaaaaaggagaaattgcaaggaataatcgtgtacacagatgttctggtatactaaacagaaccaggagtacttcagaatcactcacatctgctgcataaagggtctgggtgtgtgtctgagcaggaaaagaagtttcccagtaacagctggtttgggatttatgcaagagaagttttaattgggaagcttttgat

SEQ ID NO: 10227 - DNA, 600 bp, Chicken  19866894206439_2
ttccaagccagtgcaaagcagtcgcctgtggctgctgtcagcttgcagctcgggcaggaagcacgccaaccacagtactctgcgtgaaccaacactcccctgctctacccatgaacaaacaggattcagtgtcaactaaagggtcttgcagaggagctaaagctcctaaagctgcccaaaagacttgtgctccatcttgctgatgctctaaaaatcaacattgggagtgctaataaaaccagtctggttttgtatggtraaggagtaacattctggatttattacttaaaatagcatgcratttcaattgagctttttttcaatacttacaaggaaaacgtttaaaaatattatattctcaaagtaaaaaggagaaattgcaaggaataatcgtgtacacagatgttctggtatactaaacagaaccaggagtacttcagaatcactcacatctgctgcataaagggtctgggtgtgtgtctgagcaggaaaagaagtttcccagtaacagctggtttgggatttatgcaagagaagttttaattgggaagcttttgataaaatctcatctttcaatctgtcaatgtaaggatgggccaa

SEQ ID NO: 10228 - DNA, 600 bp, Chicken  19866894206442_1
cagaggcagtggatggcagccctgcctgtggcaagggagctggaacttggtgatccttgaggtcccttccagcccaagccattctatgattctgtggccctgtctctagctctggttgtgttcttcctggcaaatgtatcccctaacctaggaaggaaacatggaatctggtgtgccactttggaagggttgctagcatctactctatggcagccccatgactaggacatacatcctagttatgaaaacaacgtcatgtttctttgtaaatactctttaataaccatttcttttttcttytaatggcaggacaaatacccaggctttctaaggtcaatctttttactttgttcagtctctggatggagctctttccttctaccgaacaacggaagaaatcacaggtaaaatggcagagcttactgttmactggtctttctgaacgggtgctaacagctttgtaacctaactactctgtacagaatagatagtccagagggaaaaaagaaaaagctgacaggttttytttgagcttacttaaaggtagaagaaaatgcggtgagagaaaaacagcagaacagtttaacagcctgctgtttg

SEQ ID NO: 10229 - DNA, 600 bp, Chicken  19866894206442_2
ggcaaatgtatcccctaacctaggaaggaaacatggaatctggtgtgccactttggaagggttgctagcatctactctatggcagccccatgactaggacatacatcctagttatgaaaacaacgtcatgtttctttgtaaatactctttaataaccatttcttttttcttytaatggcaggacaaatacccaggctttctaaggtcaatctttttactttgttcagtctctggatggagctctttccttctaccgaacaacggaagaaatcacaggtaaaatggcagagcttactgttmactggtctttctgaacgggtgctaacagctttgtaacctaactactctgtacagaatagatagtccagagggaaaaaagaaaaagctgacaggttttytttgagcttacttaaaggtagaagaaaatgcggtgagagaaaaacagcagaacagtttaacagcctgctgtttgtgaagcaacttgaagggcaaagtataaccccaacagatgaagcaaacagtaaaaaatgctggtgggtattttgaaaagcataacaatggagacgtggtacatactgtgcatttcttagtatccactgg

SEQ ID NO: 10230 - DNA, 600 bp, Chicken  19866894206442_3
acatacatcctagttatgaaaacaacgtcatgtttctttgtaaatactctttaataaccatttcttttttcttytaatggcaggacaaatacccaggctttctaaggtcaatctttttactttgttcagtctctggatggagctctttccttctaccgaacaacggaagaaatcacaggtaaaatggcagagcttactgttmactggtctttctgaacgggtgctaacagctttgtaacctaactactctgtacagaatagatagtccagagggaaaaaagaaaaagctgacaggttttytttgagcttacttaaaggtagaagaaaatgcggtgagagaaaaacagcagaacagtttaacagcctgctgtttgtgaagcaacttgaagggcaaagtataaccccaacagatgaagcaaacagtaaaaaatgctggtgggtattttgaaaagcataacaatggagacgtggtacatactgtgcatttcttagtatccactggttatatcattaagatcagcatgactgatgacgtagagagggttcttaaaatgtcagtgttaatgcttgtagagaagttttcttatgcagtgaatgtgc

SEQ ID NO: 10231 - DNA, 600 bp, Chicken  19866894206448_1
aaggctgttaaattatgatagctgcccagagatgttgcagagtttacttcctttgagatatgcaaaagtccttcctagacaccactggtggaagcagtatcagactttaaggcctcccttgacaggtgtgtactcgggtaccagagagtcatgttggctgtggtaactgtgtcttgctttcgtgcccaaataagcaggttaaggatctctcatggccctgctgcaggttatatgatgaaagtggagaatctacaaacaaaacatgatgaaggaatcagcctagctctcctcccagtacgrtactaactccaattactctttttcttacagggcagttccaaagtaaagatattgtttgtttctgtcatgctaaattacacagtaacttgtgtttagaactatgtcagaaataatctcaaaggaaagaaatgcaggtgccaccagcttggctgtggggcccagtcatgccctgagctggggccatctggaaccagctgtgtgmagcacagggcagcctcagccccacctcacagagggccctgccagaatcttgttgcaaacccagtagaaagctcagtgaaaaactttttaagtgtaagg

SEQ ID NO: 10232 - DNA, 450 bp, Chicken  19866894206448_2
ggatctctcatggccctgctgcaggttatatgatgaaagtggagaatctacaaacaaaacatgatgaaggaatcagcctagctctcctcccagtacgrtactaactccaattactctttttcttacagggcagttccaaagtaaagatattgtttgtttctgtcatgctaaattacacagtaacttgtgtttagaactatgtcagaaataatctcaaaggaaagaaatgcaggtgccaccagcttggctgtggggcccagtcatgccctgagctggggccatctggaaccagctgtgtgmagcacagggcagcctcagccccacctcacagagggccctgccagaatcttgttgcaaacccagtagaaagctcagtgaaaaactttttaagtgtaaggagcctaagaaataatacttaccatgtttacatttactgtttttaaggagatt

SEQ ID NO: 10233 - DNA, 599 bp, Chicken  19866894206453_1
  misc_feature (1)..(11): n is any nucleotide
nnnnnnnnnnncagaacgtaggcttctgtatcctgaaatattctgtcatatcccattaaacaagtggagaagtgagccttggttctgagctgcagattgcaaacataagtgggatgagagcaagcagtcccttcagtgcttaccttgctgtgtttgctgaggttcacatcatgaattatctttgtctgcattatcttgttcatctggagcttctcagcaatacccttaggaaaaaaatatgtgtattttgtgttggctttcatgtatttagttatttattctactagatgtgagtttctycatgtctttcttaactaagctgatcatagaatcacagaatcatagaattgggctggaaggggcctcaggggtcatcgagctccaactccccgtcgcatgcagggccaccaacctccacatttaataccagcccaggctgctcagggtcccatccrgcctggccttgamcacctacagggatggatggggcatccacagcctctctgkgcagctgttccagcacctcaccactctcttggtaaagaacttccccctgatatccaacccaaatcttccctcctccaacttaaaaccattcc

SEQ ID NO: 10234 - DNA, 600 bp, Chicken  19866894206453_2
gctgaggttcacatcatgaattatctttgtctgcattatcttgttcatctggagcttctcagcaatacccttaggaaaaaaatatgtgtattttgtgttggctttcatgtatttagttatttattctactagatgtgagtttctycatgtctttcttaactaagctgatcatagaatcacagaatcatagaattgggctggaaggggcctcaggggtcatcgagctccaactccccgtcgcatgcagggccaccaacctccacatttaataccagcccaggctgctcagggtcccatccrgcctggccttgamcacctacagggatggatggggcatccacagcctctctgkgcagctgttccagcacctcaccactctcttggtaaagaacttccccctgatatccaacccaaatcttccctcctccaacttaaaaccattcccccttgtcctgctgttatctaccctttcaaagagttgggtctcctcctgtttgtaggctccctttaggtactgaaaggctgcaatgaggtcascccacagccttctcttctccaggctgaacaagcccagctccctcagcctgtcttcatagggga

SEQ ID NO: 10235 - DNA, 600 bp, Chicken  19866894206453_3
tcatgaattatctttgtctgcattatcttgttcatctggagcttctcagcaatacccttaggaaaaaaatatgtgtattttgtgttggctttcatgtatttagttatttattctactagatgtgagtttctycatgtctttcttaactaagctgatcatagaatcacagaatcatagaattgggctggaaggggcctcaggggtcatcgagctccaactccccgtcgcatgcagggccaccaacctccacatttaataccagcccaggctgctcagggtcccatccrgcctggccttgamcacctacagggatggatggggcatccacagcctctctgkgcagctgttccagcacctcaccactctcttggtaaagaacttccccctgatatccaacccaaatcttccctcctccaacttaaaaccattcccccttgtcctgctgttatctaccctttcaaagagttgggtctcctcctgtttgtaggctccctttaggtactgaaaggctgcaatgaggtcascccacagccttctcttctccaggctgaacaagcccagctccctcagcctgtcttcataggggaggtgctgcagccc

SEQ ID NO: 10236 - DNA, 600 bp, Chicken  19866894206453_4
agcttctcagcaatacccttaggaaaaaaatatgtgtattttgtgttggctttcatgtatttagttatttattctactagatgtgagtttctycatgtctttcttaactaagctgatcatagaatcacagaatcatagaattgggctggaaggggcctcaggggtcatcgagctccaactccccgtcgcatgcagggccaccaacctccacatttaataccagcccaggctgctcagggtcccatccrgcctggccttgamcacctacagggatggatggggcatccacagcctctctgkgcagctgttccagcacctcaccactctcttggtaaagaacttccccctgatatccaacccaaatcttccctcctccaacttaaaaccattcccccttgtcctgctgttatctaccctttcaaagagttgggtctcctcctgtttgtaggctccctttaggtactgaaaggctgcaatgaggtcascccacagccttctcttctccaggctgaacaagcccagctccctcagcctgtcttcataggggaggtgctgcagccctctcatcatctttgtggccctactccagaccctctccaa

SEQ ID NO: 10237 - DNA, 600 bp, Chicken  19866894206453_5
tcgcatgcagggccaccaacctccacatttaataccagcccaggctgctcagggtcccatccrgcctggccttgamcacctacagggatggatggggcatccacagcctctctgkgcagctgttccagcacctcaccactctcttggtaaagaacttccccctgatatccaacccaaatcttccctcctccaacttaaaaccattcccccttgtcctgctgttatctaccctttcaaagagttgggtctcctcctgtttgtaggctccctttaggtactgaaaggctgcaatgaggtcascccacagccttctcttctccaggctgaacaagcccagctccctcagcctgtcttcataggggaggtgctgcagccctctcatcatctttgtggccctactccagaccctctccaacagctcctgatatgcacaggttgtataaaaacgcataagatctctatgaaaaagcaattattctctaacctgtgcctggtgtccctgggcccggtgtcaaagcaagctgtgtgatgtttggtctcacatttgtgctatgtacgtaggttctcattttagcacagtgaccctgatggctgtgggct

SEQ ID NO: 10238 - DNA, 600 bp, Chicken  19866894206453_6
cagctccctcagcctgtcttcataggggaggtgctgcagccctctcatcatctttgtggccctactccagaccctctccaacagctcctgatatgcacaggttgtataaaaacgcataagatctctatgaaaaagcaattattctctaacctgtgcctggtgtccctgggcccggtgtcaaagcaagctgtgtgatgtttggtctcacatttgtgctatgtacgtaggttctcattttagcacagtgaccctgatggctgtgggctcatggttctgggggttttccatctggaagttcakatggaagcaggcatacctgatcctgcattcrtcacactgagcaataagccagggcccatggtcctctatcactggtaactgacagtaataatagtctctcagctgtcataagagggtgtgaacagtccttatttgggcaatggagaattcagtcccatctgatggctgtcagctgagatgatctcagagggaagagattctgcccacaaatcccatttccccccccccacccagcagcattcctgcccttgtcccttcctgcattcctcctcccccatgctcacctcacacagcagcctg

SEQ ID NO: 10239 - DNA, 600 bp, Chicken  19866894206453_7
tgctgcagccctctcatcatctttgtggccctactccagaccctctccaacagctcctgatatgcacaggttgtataaaaacgcataagatctctatgaaaaagcaattattctctaacctgtgcctggtgtccctgggcccggtgtcaaagcaagctgtgtgatgtttggtctcacatttgtgctatgtacgtaggttctcattttagcacagtgaccctgatggctgtgggctcatggttctgggggttttccatctggaagttcakatggaagcaggcatacctgatcctgcattcrtcacactgagcaataagccagggcccatggtcctctatcactggtaactgacagtaataatagtctctcagctgtcataagagggtgtgaacagtccttatttgggcaatggagaattcagtcccatctgatggctgtcagctgagatgatctcagagggaagagattctgcccacaaatcccatttccccccccccacccagcagcattcctgcccttgtcccttcctgcattcctcctcccccatgctcacctcacacagcagcctgcattgggtgactttgcccacaacgcagtggt

SEQ ID NO: 10240 - DNA, 600 bp, Chicken  19866894206459_1
gcctgttgaaagtcagaaaaacaaaacaaacaaacaatacaaatgtttagcaggaaaatgtgcaaaaacaagatacattttcttgcccttactaagaaaccctttcttgcttgcagatgggtttgatagcatcttatgcactatgggctgcatctcggtcttttggcgtttttcttctctccaggatggtaggtggaataagcaaagggaatgtcagcctctgcacagctataattgctgacttgcactctccaaaagcacggagcaagggcatggtgagtaacacatgtgagatatatrgttggctttattggttcacttttagttgatttcaggtgctcaggatgtcttcctcagatgtgmgttcattgatcaagtgaaaacatgactttaatastacattgcttttgaaaacatgccaggtcactttgctggtgagctctcagctgttacttgtcaatgacttttacctacaagagaaatgcaggtgtcttagatgtgaaaacaactataggcctgagtattawaactactactcctgttgataactctaatcccratcataacagctgagaaaatgaaggatctttcatctcagaa

SEQ ID NO: 10241 - DNA, 600 bp, Chicken  19866894206459_2
aaaaacaagatacattttcttgcccttactaagaaaccctttcttgcttgcagatgggtttgatagcatcttatgcactatgggctgcatctcggtcttttggcgtttttcttctctccaggatggtaggtggaataagcaaagggaatgtcagcctctgcacagctataattgctgacttgcactctccaaaagcacggagcaagggcatggtgagtaacacatgtgagatatatrgttggctttattggttcacttttagttgatttcaggtgctcaggatgtcttcctcagatgtgmgttcattgatcaagtgaaaacatgactttaatastacattgcttttgaaaacatgccaggtcactttgctggtgagctctcagctgttacttgtcaatgacttttacctacaagagaaatgcaggtgtcttagatgtgaaaacaactataggcctgagtattawaactactactcctgttgataactctaatcccratcataacagctgagaaaatgaaggatctttcatctcagaatggaccaattttggtgactggagcccagttataggacaacccatttttctagcctttctaaac

SEQ ID NO: 10242 - DNA, 600 bp, Chicken  19866894206459_3
aaccctttcttgcttgcagatgggtttgatagcatcttatgcactatgggctgcatctcggtcttttggcgtttttcttctctccaggatggtaggtggaataagcaaagggaatgtcagcctctgcacagctataattgctgacttgcactctccaaaagcacggagcaagggcatggtgagtaacacatgtgagatatatrgttggctttattggttcacttttagttgatttcaggtgctcaggatgtcttcctcagatgtgmgttcattgatcaagtgaaaacatgactttaatastacattgcttttgaaaacatgccaggtcactttgctggtgagctctcagctgttacttgtcaatgacttttacctacaagagaaatgcaggtgtcttagatgtgaaaacaactataggcctgagtattawaactactactcctgttgataactctaatcccratcataacagctgagaaaatgaaggatctttcatctcagaatggaccaattttggtgactggagcccagttataggacaacccatttttctagcctttctaaactgtggaagtgcagcagtgctgcccaatatgcctc

SEQ ID NO: 10243 - DNA, 600 bp, Chicken  19866894206459_4
gctataattgctgacttgcactctccaaaagcacggagcaagggcatggtgagtaacacatgtgagatatatrgttggctttattggttcacttttagttgatttcaggtgctcaggatgtcttcctcagatgtgmgttcattgatcaagtgaaaacatgactttaatastacattgcttttgaaaacatgccaggtcactttgctggtgagctctcagctgttacttgtcaatgacttttacctacaagagaaatgcaggtgtcttagatgtgaaaacaactataggcctgagtattawaactactactcctgttgataactctaatcccratcataacagctgagaaaatgaaggatctttcatctcagaatggaccaattttggtgactggagcccagttataggacaacccatttttctagcctttctaaactgtggaagtgcagcagtgctgcccaatatgcctcctgccttcattggatgatgcactgacttcagggtctgggctcagcgggtgacggatgtggtgtttggctgactgagcagcaagtgttacaaacatctgccctttcctcttctaaaaggcagcagaccaga

SEQ ID NO: 10244 - DNA, 600 bp, Chicken  19866894206459_5
acggagcaagggcatggtgagtaacacatgtgagatatatrgttggctttattggttcacttttagttgatttcaggtgctcaggatgtcttcctcagatgtgmgttcattgatcaagtgaaaacatgactttaatastacattgcttttgaaaacatgccaggtcactttgctggtgagctctcagctgttacttgtcaatgacttttacctacaagagaaatgcaggtgtcttagatgtgaaaacaactataggcctgagtattawaactactactcctgttgataactctaatcccratcataacagctgagaaaatgaaggatctttcatctcagaatggaccaattttggtgactggagcccagttataggacaacccatttttctagcctttctaaactgtggaagtgcagcagtgctgcccaatatgcctcctgccttcattggatgatgcactgacttcagggtctgggctcagcgggtgacggatgtggtgtttggctgactgagcagcaagtgttacaaacatctgccctttcctcttctaaaaggcagcagaccagatggaaacaccctacaggctgaactttggctgt

SEQ ID NO: 10245 - DNA, 600 bp, Chicken  19866894206459_6
aaaatgaaggatctttcatctcagaatggaccaattttggtgactggagcccagttataggacaacccatttttctagcctttctaaactgtggaagtgcagcagtgctgcccaatatgcctcctgccttcattggatgatgcactgacttcagggtctgggctcagcgggtgacggatgtggtgtttggctgactgagcagcaagtgttacaaacatctgccctttcctcttctaaaaggcagcagaccagatggaaacaccctacaggctgaactttggctgtggattgccagttagrtcttttattttatgaaagcctcagggccccaaacctctattaacagtgttataaatcactatgtgggacagctgcttcttgggaaagcatttcacagtgatagctaacgaattttccaaactatttattataatcctggtgaaccaaaataaattcatggggaaggacagccatacagcactggtaaataaaatgggtcgcatcttatttttagggcttgagagcaagtagtttagtacagcatggctgacatccatatggctaaactgtttcttctcttctttttcaaagcagtgtagg

SEQ ID NO: 10246 - DNA, 599 bp, Chicken  19866894206464_1
  misc_feature (1)..(49): n is any nucleotide
nnnnnnnnnnnnnnnnnnnnnnnnnnnnnnnnnnnnnnnnnnnnnnnnnaagactgcttctgaagtaatttctcttctagattttgtacttggtggctttctctatcttcattgctttgcatcactgttaaaagctcaacactgaaagagagatgggaattttcctggttaattaccatcttcatcagacatgcaagcaaaaaaagaacaagaacataataaaatttgtgctttgaatgatgacatatcctgcacaaactcagtgggtttaactgctacagtggatttggcatttgtaamagaagtggtagagtttgtgaacgcagctttaaaaagccatcctgggcagakaaagttacttgtgtttgtaaacagtacrtatagggtatcatagtatggatatatctgtcttacaagccatataatatgttttcagtggcctcattttaggcaggcagaagtgtcctgtgacaaatactagctgggtgtaaaaaatgtcatttggattttatgttattttctgtctctttgtcccccaacaagtactaacaagtaagaattgaaactcacagcttcaaagatgcaggcggaaactacct

SEQ ID NO: 10247 - DNA, 600 bp, Chicken  19866894206464_2
gactgcttctgaagtaatttctcttctagattttgtacttggtggctttctctatcttcattgctttgcatcactgttaaaagctcaacactgaaagagagatgggaattttcctggttaattaccatcttcatcagacatgcaagcaaaaaaagaacaagaacataataaaatttgtgctttgaatgatgacatatcctgcacaaactcagtgggtttaactgctacagtggatttggcatttgtaamagaagtggtagagtttgtgaacgcagctttaaaaagccatcctgggcagakaaagttacttgtgtttgtaaacagtacrtatagggtatcatagtatggatatatctgtcttacaagccatataatatgttttcagtggcctcattttaggcaggcagaagtgtcctgtgacaaatactagctgggtgtaaaaaatgtcatttggattttatgttattttctgtctctttgtcccccaacaagtactaacaagtaagaattgaaactcacagcttcaaagatgcaggcggaaactacctaaagacgtggaaatttgtgatgcgttattaaagaatgcatattccttcccac

SEQ ID NO: 10248 - DNA, 600 bp, Chicken  19866894206464_3
gattttgtacttggtggctttctctatcttcattgctttgcatcactgttaaaagctcaacactgaaagagagatgggaattttcctggttaattaccatcttcatcagacatgcaagcaaaaaaagaacaagaacataataaaatttgtgctttgaatgatgacatatcctgcacaaactcagtgggtttaactgctacagtggatttggcatttgtaamagaagtggtagagtttgtgaacgcagctttaaaaagccatcctgggcagakaaagttacttgtgtttgtaaacagtacrtatagggtatcatagtatggatatatctgtcttacaagccatataatatgttttcagtggcctcattttaggcaggcagaagtgtcctgtgacaaatactagctgggtgtaaaaaatgtcatttggattttatgttattttctgtctctttgtcccccaacaagtactaacaagtaagaattgaaactcacagcttcaaagatgcaggcggaaactacctaaagacgtggaaatttgtgatgcgttattaaagaatgcatattccttcccacagtagcaaatgggaaaagtgataggtgt

SEQ ID NO: 10249 - DNA, 600 bp, Chicken  19866894206466_1
ggtctaccaacaaacatataaatggctgtagaacctccttctgtgccaggagtacatggctatgctgtgaaactgggaacccctagtggtttgccctctggatcccacacattctttgccacgatgtgtgctgtgaaatctgcatctttgcccccttgaagcgatggaggattaggactgcgagtctttgcatgggactttgattcagagtttcacccccgccttggaagatgatatccagagagctctgtgggtctggggaccccttctgcaaactttgtctagaggtgccaggcaggwgggagtcagtggaaattctagctcatgtgtgaggatttcacctgtttttcttatgatcctggcaatcggtgactgttgctatctggttcttcagcagccccaagccatcttacaccacaaacrttgaaaagcatccttttactgagggctctagcatctcattgggtaccaaaaagggctcattggctgccaggcaagtaatgctgtctgtgtctctcctgttcacattttctctggaagtttggtgaagctatrgaagcgatataacatggaagaacatcagctctgcttcttttcatc

SEQ ID NO: 10250 - DNA, 588 bp, Chicken  19866894206466_2
atgtgtgctgtgaaatctgcatctttgcccccttgaagcgatggaggattaggactgcgagtctttgcatgggactttgattcagagtttcacccccgccttggaagatgatatccagagagctctgtgggtctggggaccccttctgcaaactttgtctagaggtgccaggcaggwgggagtcagtggaaattctagctcatgtgtgaggatttcacctgtttttcttatgatcctggcaatcggtgactgttgctatctggttcttcagcagccccaagccatcttacaccacaaacrttgaaaagcatccttttactgagggctctagcatctcattgggtaccaaaaagggctcattggctgccaggcaagtaatgctgtctgtgtctctcctgttcacattttctctggaagtttggtgaagctatrgaagcgatataacatggaagaacatcagctctgcttcttttcatctacaaaacgcaataggtgaaagccagatctgactttaacaggtcagaaatgaacttctggttggaaatcagattttttttgtctctcttttttaaatcaccatcaaccaga

SEQ ID NO: 10251 - DNA, 456 bp, Chicken  19866894206466_3
ctggggaccccttctgcaaactttgtctagaggtgccaggcaggwgggagtcagtggaaattctagctcatgtgtgaggatttcacctgtttttcttatgatcctggcaatcggtgactgttgctatctggttcttcagcagccccaagccatcttacaccacaaacrttgaaaagcatccttttactgagggctctagcatctcattgggtaccaaaaagggctcattggctgccaggcaagtaatgctgtctgtgtctctcctgttcacattttctctggaagtttggtgaagctatrgaagcgatataacatggaagaacatcagctctgcttcttttcatctacaaaacgcaataggtgaaagccagatctgactttaacaggtcagaaatgaacttctggttggaaatcagattttttttgtctctcttttttaaatcaccatcaaccaga

SEQ ID NO: 10252 - DNA, 600 bp, Chicken  19866894206467_1
gtagtaaaagagactgctttcattgtttaaatgccaccgaatacaagaatggcagactgatgcttgttttccttttattttatgatgatctaattgccagatatatataattcctcattacggcagggaagttattactacagcatttggtacttctctgattatctacaaatggtatctgaaaattaataggagatccagctttcctgtaaaagtgctagtgggagctgttgcctgcacaaagcctgaggagacttcagagtgcacggactgcctttgtcagggagcatataatttttwtttttttacatcttaggaaattacaggctttagttacggcttcaagaaatgtgttctacaaatgttggagcatctgcatgttgctgtttttactgcagtcgttgtgcaggtcattaatctgatctcacgtcgtaaaaatttctccaccctctttatgagtttctttgttatcataacactttccaataccttggcgcctagctccgctatactccattataattacccagggtagaacaatgcttttttatacttgtcatgtcccgctccttcagtggagctgctgagcgccatgttcgc

SEQ ID NO: 10253 - DNA, 600 bp, Chicken  19866894206467_2
acggcttcaagaaatgtgttctacaaatgttggagcatctgcatgttgctgtttttactgcagtcgttgtgcaggtcattaatctgatctcacgtcgtaaaaatttctccaccctctttatgagtttctttgttatcataacactttccaataccttggcgcctagctccgctatactccattataattacccagggtagaacaatgcttttttatacttgtcatgtcccgctccttcagtggagctgctgagcgccatgttcgccacattgctgctgtgggctgagcatccaggagcakggctgagctctgcagagctgctcccagactctgggagacatttggccagcagatcctccatgctctgggccrtgtgtggaagcttggcagtgcaaactgccacctcatcctcttccyacttgcagatggaaaggggttgggtgacagccgtgatattgtggtggtggtggtggaagtgggagcagaccaaggagggaccaagctgtactacagagcacacagacaagcaaggacaagggcccttccatgtgcacgttaggagagcccacttgcatggatgtcagataccccccagctccc

SEQ ID NO: 10254 - DNA, 600 bp, Chicken  19866894206467_3
aggtcattaatctgatctcacgtcgtaaaaatttctccaccctctttatgagtttctttgttatcataacactttccaataccttggcgcctagctccgctatactccattataattacccagggtagaacaatgcttttttatacttgtcatgtcccgctccttcagtggagctgctgagcgccatgttcgccacattgctgctgtgggctgagcatccaggagcakggctgagctctgcagagctgctcccagactctgggagacatttggccagcagatcctccatgctctgggccrtgtgtggaagcttggcagtgcaaactgccacctcatcctcttccyacttgcagatggaaaggggttgggtgacagccgtgatattgtggtggtggtggtggaagtgggagcagaccaaggagggaccaagctgtactacagagcacacagacaagcaaggacaagggcccttccatgtgcacgttaggagagcccacttgcatggatgtcagataccccccagctcccctgcagcccccaaagctcacagcttatttctgatgtctgtgtgtacagtgaacagaggtgagaccagtttcc

SEQ ID NO: 10255 - DNA, 600 bp, Chicken  19866894206467_4
ttatgagtttctttgttatcataacactttccaataccttggcgcctagctccgctatactccattataattacccagggtagaacaatgcttttttatacttgtcatgtcccgctccttcagtggagctgctgagcgccatgttcgccacattgctgctgtgggctgagcatccaggagcakggctgagctctgcagagctgctcccagactctgggagacatttggccagcagatcctccatgctctgggccrtgtgtggaagcttggcagtgcaaactgccacctcatcctcttccyacttgcagatggaaaggggttgggtgacagccgtgatattgtggtggtggtggtggaagtgggagcagaccaaggagggaccaagctgtactacagagcacacagacaagcaaggacaagggcccttccatgtgcacgttaggagagcccacttgcatggatgtcagataccccccagctcccctgcagcccccaaagctcacagcttatttctgatgtctgtgtgtacagtgaacagaggtgagaccagtttccatagaaacgcaggggaaagatgaggcacgcacatcagaggtgaac

SEQ ID NO: 10256 - DNA, 599 bp, Chicken  19866894206473_1
  misc_feature (1)..(147): n is any nucleotide
nnnnnnnnnnnnnnnnnnnnnnnnnnnnnnnnnnnnnnnnnnnnnnnnnnnnnnnnnnnnnnnnnnnnnnnnnnnnnnnnnnnnnnnnnnnnnnnnnnnnnnnnnnnnnnnnnnnnnnnnnnnnnnnnnnnnnnnnnnnnnnnnnnncttttacactgaaacaggaaacaaggtttctaactatgttgtcttttgcccctcctaaaaatcctaacaagtttcatgccagaagacaaaatgattcgccaggcttgtgcgattttgttattaagtgttgaccaagtctacagatttctcatmcactcataaaagctattgtggatgggaagtccaaacacattttgagaggtgtaaatgccaaaycataaaatagacttcaacagaatactttagatacagaaaacaacagtccacttggaaaacaaatctacagagttgagtctaactctcagactactctggggctagcccaatgttaaaacacagcgttaagagcaaatgcctgctaaacacaggcacaagtcatcaaccatctctctaggaacccagtccctgtgctaattgccctcttggtaaagacttccctgaagtccagcttg

SEQ ID NO: 10257 - DNA, 599 bp, Chicken  19866894206473_2
  misc_feature (1)..(84): n is any nucleotide
nnnnnnnnnnnnnnnnnnnnnnnnnnnnnnnnnnnnnnnnnnnnnnnnnnnnnnnnnnnnnnnnnnnnnnnnnnnnnnnnnnnncttttacactgaaacaggaaacaaggtttctaactatgttgtcttttgcccctcctaaaaatcctaacaagtttcatgccagaagacaaaatgattcgccaggcttgtgcgattttgttattaagtgttgaccaagtctacagatttctcatmcactcataaaagctattgtggatgggaagtccaaacacattttgagaggtgtaaatgccaaaycataaaatagacttcaacagaatactttagatacagaaaacaacagtccacttggaaaacaaatctacagagttgagtctaactctcagactactctggggctagcccaatgttaaaacacagcgttaagagcaaatgcctgctaaacacaggcacaagtcatcaaccatctctctaggaacccagtccctgtgctaattgccctcttggtaaagacttccctgaagtccagcttgatccttcccgtagagcagctttaagctattaccctccccccaaaaaatccagtgtcatagcat

SEQ ID NO: 10258 - DNA, 600 bp, Chicken  19866894206478_1
cttatgacgccaattagcactataactgtactaacagagaagcagtggagttgttctagcatggcactccacttcaattaatatcttccacttctttgcaaggttaattagtgccagttgtgatggagatacttgaaaaataagtgtcaggttgaaattgctgacttgtttcatgttttaaactgaacatgtgaatgaccacagccctgggttttaggatattctttgtttttacagtatgtgaagccctatcccaaaggtagatagacttttgtttttattacttacttattctctttrcattcttgaattagacgcaaaatgcgagaatgctttctgtagctataactttctatagatatttatgccaaaatgttgacaaaaactgtcaaattaagaagtcaactatatatttcttatatatatcttcaattttattttcatttgtttgacagtgtaccttcaatatcagtagagctattaagattttttttgaattttgaaatgtccgagatacagagggagattttattacgcagatattcagggttcttctatcaagcatatgcacagatgtagaggtaactgcttcttccaaat

SEQ ID NO: 10259 - DNA, 600 bp, Chicken  19866894206478_2
catgtgaatgaccacagccctgggttttaggatattctttgtttttacagtatgtgaagccctatcccaaaggtagatagacttttgtttttattacttacttattctctttrcattcttgaattagacgcaaaatgcgagaatgctttctgtagctataactttctatagatatttatgccaaaatgttgacaaaaactgtcaaattaagaagtcaactatatatttcttatatatatcttcaattttattttcatttgtttgacagtgtaccttcaatatcagtagagctattaagartttttttgaattttgaaatgtccgagatacagagggagattttattacgcagatattcagggttcttctatcaagcatatgcacagatgtagaggtaactgcttcttccaaataatgtttacctcttaaaatctgcattcctgacactctttgtcttactttatgtgagagacttgtttgttacagataacttttatactctatgaatattgccttttcagaaagttgaatggagcatcttatgtaatttatcttctcccttacccttcatttttcagttccttgaatgatttgataaga

SEQ ID NO: 10260 - DNA, 600 bp, Chicken  19866894206485_1
gtgtgtgtgtgtgcgttaacagtaagagaaaaaaaaatgcctaaaactaagacttttgaaaatattgatagttacaatcaaaagaatgaacaatttttctttttgaggcatggtttaacttttcagtgtttcaaatccaaggcacctttccttgtagtgaaagaaaatagttgaaaagtgtcagacaagttggtgacagcacatgcattcccagttgttatttcccactctctctccaaagatatcatagataccatgtgttcctttctctctaagatcaacatcatcaatgacaccaawacggaaacaaaatcagaaatccaagttctyatcacacaataaatacacaactttttcataaattgaccagaaatgaattggcagaaaatactgaaaaaccttgataaacactgaaagtatgggagctgtgttaagtattaattaattacatgtcctttttgaatagtggaacacaaaaatctgtctcagctgaaggtgtaaaattaaaagaaaaatgtatttcagaaagtctggaaaattcagggactttcgatgccactgtccaagcaatttgttaatcagtaatagcaatcgtatcca

SEQ ID NO: 10261 - DNA, 600 bp, Chicken  19866894206485_2
aaaaaaatgcctaaaactaagacttttgaaaatattgatagttacaatcaaaagaatgaacaatttttctttttgaggcatggtttaacttttcagtgtttcaaatccaaggcacctttccttgtagtgaaagaaaatagttgaaaagtgtcagacaagttggtgacagcacatgcattcccagttgttatttcccactctctctccaaagatatcatagataccatgtgttcctttctctctaagatcaacatcatcaatgacaccaawacggaaacaaaatcagaaatccaagttctyatcacacaataaatacacaactttttcataaattgaccagaaatgaattggcagaaaatactgaaaaaccttgataaacactgaaagtatgggagctgtgttaagtattaattaattacatgtcctttttgaatagtggaacacaaaaatctgtctcagctgaaggtgtaaaattaaaagaaaaatgtatttcagaaagtctggaaaattcagggactttcgatgccactgtccaagcaatttgttaatcagtaatagcaatcgtatccatttctgaacttataaattgtgatttgtccc

SEQ ID NO: 10262 - DNA, 600 bp, Chicken  19866894206486_1
ttataccctttcaactgtctgtatctattggctgcctttagtctaaatctgttagcactttagtgtaggatctatctgttagttctttatgtttattggcagtatggcaggaagaatccctgttcatggctgaggtattggcaggaattcacaaaagatgaatcaactgaatccagaaacacaaaaagttgaaatggcttatgagagcaatagcatataaatggcccatgagttcatttagtctgggaaagaatagaatttataatctgagcagagagattctggaacagcttccagccyaagtaatgaggaaaaaaagaggaagctgtatattttttaaatgatgtttttgatgcttgcaataaaagagtgagaacttagcagtttctaccagacatacattcctactccttgaattctacatgtcttaaagatctaagaaaatcacatctcttagctttcattctcttgcttgcagattgttgctaattctaaattcagccctgaactcctgtgctggatctacagatactaaaaaggctctgatgtcaaagtagtgtattgggaactgcgtgtgaggtaacaagtcttgttgagagg

SEQ ID NO: 10263 - DNA, 599 bp, Chicken  19866894206487_1
  misc_feature (1)..(25): n is any nucleotide
nnnnnnnnnnnnnnnnnnnnnnnnntgtttagaaacttttgtgttctttgaggaacttataatgctggttccttttatagggaagtatacaaaggcagaagtgacaatttcatacttctgtcagtaaaatgccaagaaaaacagtaccatgagagactttctgagagaggcttcagaaagtttctggcaaagtgtcgaagtcagtggctctgacagatagttttcatagacttctgaaagattaatgcacactcttctaactccagccttcagaatgggttagatgaaccaagtctgtayggtagctcttgcctcaactcatcttctgttgcttgtctcatccagctgctgttacactcacagaggacatgtccagataggatcagtagatttcatctattcacaacacgattctcccttgccccattggatatatgcacttgcacacacaaaaaaamctggagctgtcctgaattctccttcatgggaacatccttagaccaaactccatgccctttgccttctawactttgacaaacaatctgtsccattttttggtttctgccytctcacttcccaattgaatatatacatatatt

SEQ ID NO: 10264 - DNA, 600 bp, Chicken  19866894206487_2
agagactttctgagagaggcttcagaaagtttctggcaaagtgtcgaagtcagtggctctgacagatagttttcatagacttctgaaagattaatgcacactcttctaactccagccttcagaatgggttagatgaaccaagtctgtayggtagctcttgcctcaactcatcttctgttgcttgtctcatccagctgctgttacactcacagaggacatgtccagataggatcagtagatttcatctattcacaacacgattctcccttgccccattggatatatgcacttgcacacacyaaaaaamctggagctgtcctgaattctccttcatgggaacatccttagaccaaactccatgccctttgccttctawactttgacaaacaatctgtsccattttttggtttctgccytctcacttcccaattgaatatatacatatattccactatccctcttctcgtatgaagaaatacaccyaaacatgcacatatgacctttcctccccccagcttttgcataggatcagaatctcccatgttgtcttttggagaaaggcaggcagaactgctrgcatatttgaaatgtgagtgcatg

SEQ ID NO: 10265 - DNA, 600 bp, Chicken  19866894206487_3
ttctgagagaggcttcagaaagtttctggcaaagtgtcgaagtcagtggctctgacagatagttttcatagacttctgaaagattaatgcacactcttctaactccagccttcagaatgggttagatgaaccaagtctgtayggtagctcttgcctcaactcatcttctgttgcttgtctcatccagctgctgttacactcacagaggacatgtccagataggatcagtagatttcatctattcacaacacgattctcccttgccccattggatatatgcacttgcacacacaaaaaaamctggagctgtcctgaattctccttcatgggaacatccttagaccaaactccatgccctttgccttctawactttgacaaacaatctgtsccattttttggtttctgccytctcacttcccaattgaatatatacatatattccactatccctcttctcgtatgaagaaatacaccyaaacatgcacatatgacctttcctccccccagcttttgcataggatcagaatctcccatgttgtcttttggagaaaggcaggcagaactgctrgcatatttgaaatgtgagtgcatgtgcatga

SEQ ID NO: 10266 - DNA, 600 bp, Chicken  19866894206487_4
agacttctgaaagattaatgcacactcttctaactccagccttcagaatgggttagatgaaccaagtctgtayggtagctcttgcctcaactcatcttctgttgcttgtctcatccagctgctgttacactcacagaggacatgtccagataggatcagtagatttcatctattcacaacacgattctcccttgccccattggatatatgcacttgcacacacaaaaaaamctggagctgtcctgaattctccttcatgggaacatccttagaccaaactccatgccctttgccttctawactttgacaaacaatctgtsccattttttggtttctgccytctcacttcccaattgaatatatacatatattccactatccctcttctcgtatgaagaaatacaccyaaacatgcacatatgacctttcctccccccagcttttgcataggatcagaatctcccatgttgtcttttggagaaaggcaggcagaactgctrgcatatttgaaatgtgagtgcatgtgcatgaatgtaatcagagcagtcacatgcattcatgtataggtacacccctgtctcaaggagtgaatggtttagt

SEQ ID NO: 10267 - DNA, 600 bp, Chicken  19866894206487_5
cacactcttctaactccagccttcagaatgggttagatgaaccaagtctgtayggtagctcttgcctcaactcatcttctgttgcttgtctcatccagctgctgttacactcacagaggacatgtccagataggatcagtagatttcatctattcacaacacgattctcccttgccccattggatatatgcacttgcacacacaaaaaaamctggagctgtcctgaattctccttcatgggaacatccttagaccaaactccatgccctttgccttctawactttgacaaacaatctgtsccattttttggtttctgccytctcacttcccaattgaatatatacatatattccactatccctcttctcgtatgaagaaatacaccyaaacatgcacatatgacctttcctccccccagcttttgcataggatcagaatctcccatgttgtcttttggagaaaggcaggcagaactgctrgcatatttgaaatgtgagtgcatgtgcatgaatgtaatcagagcagtcacatgcattcatgtataggtacacccctgtctcaaggagtgaatggtttagtcaaggagagtgaacctggag

SEQ ID NO: 10268 - DNA, 600 bp, Chicken  19866894206487_6
cttcagaatgggttagatgaaccaagtctgtayggtagctcttgcctcaactcatcttctgttgcttgtctcatccagctgctgttacactcacagaggacatgtccagataggatcagtagatttcatctattcacaacacgattctcccttgccccattggatatatgcacttgcacacacaaaaaaamctggagctgtcctgaattctccttcatgggaacatccttagaccaaactccatgccctttgccttctawactttgacaaacaatctgtsccattttttggtttctgccytctcacttcccaattgaatatatacatatattccactatccctcttctcgtatgaagaaatacaccyaaacatgcacatatgacctttcctccccccagcttttgcataggatcagaatctcccatgttgtcttttggagaaaggcaggcagaactgctrgcatatttgaaatgtgagtgcatgtgcatgaatgtaatcagagcagtcacatgcattcatgtataggtacacccctgtctcaaggagtgaatggtttagtcaaggagagtgaacctggagtggtgagaaccgagttgtaa

SEQ ID NO: 10269 - DNA, 600 bp, Chicken  19866894206487_7
gtctcatccagctgctgttacactcacagaggacatgtccagataggatcagtagatttcatctattcacaacacgattctcccttgccccattggatatatgcacttgcacacacaaaaaaamctggagctgtcctgaattctccttcatgggaacatccttagaccaaactccatgccctttgccttctawactttgacaaacaatctgtsccattttttggtttctgccytctcacttcccaattgaatatatacatatattccactatccctcttctcgtatgaagaaatacaccyaaacatgcacatatgacctttcctccccccagcttttgcataggatcagaatctcccatgttgtcttttggagaaaggcaggcagaactgctrgcatatttgaaatgtgagtgcatgtgcatgaatgtaatcagagcagtcacatgcattcatgtataggtacacccctgtctcaaggagtgaatggtttagtcaaggagagtgaacctggagtggtgagaaccgagttgtaactcatggagcacggtttgtgtggaagatcttagagaaggcctgggaatggaatataggtctagaatg

SEQ ID NO: 10270 - DNA, 585 bp, Chicken  19866894206487_8
tggatatatgcacttgcacacacaaaaaaamctggagctgtcctgaattctccttcatgggaacatccttagaccaaactccatgccctttgccttctawactttgacaaacaatctgtsccattttttggtttctgccytctcacttcccaattgaatatatacatatattccactatccctcttctcgtatgaagaaatacaccyaaacatgcacatatgacctttcctccccccagcttttgcataggatcagaatctcccatgttgtcttttggagaaaggcaggcagaactgctrgcatatttgaaatgtgagtgcatgtgcatgaatgtaatcagagcagtcacatgcattcatgtataggtacacccctgtctcaaggagtgaatggtttagtcaaggagagtgaacctggagtggtgagaaccgagttgtaactcatggagcacggtttgtgtggaagatcttagagaaggcctgggaatggaatataggtctagaatgcaaaggggactgaggacaagagagatttgtttctgtaattctgtatgaagaccaacattttataccagcatctgcctt

SEQ ID NO: 10271 - DNA, 600 bp, Chicken  19866894206492_1
aatggatattgaaatgtgtctgttaatataatcgcttgacatctaccgttttgtatattccgtgttccagtgaaaccttctctgtatggctaatgaaataattttttttatgttcccaataatcattattctctttaatgaaaacgtagggcagatctttcagcccttacatgtgggaataatttctaccctcacattactttcttgagtaacttaagccgagttgagcgaattaaagttttgcagggatggattgttcataacttaagtgctaattgacatctatttcagaacatgacwttccagagtaaaccttactttaaaacattaatgcaattacggtttttataacaattggtatcattatattttgggtaataagtmattgtagtggaatgtaacgtaatgtttcctgactgctgccttcaaaaattccctgtcctgagtcacataaagcatctcccacaawcactgtaaaataaaggagcaggaggcatcatgctcctgccttttaattttgaggcaagactagttgtcgtgcttggaaattctagagtccttgtatcacgcatgaaaaaaagtcgtctcatttcaatgact

SEQ ID NO: 10272 - DNA, 600 bp, Chicken  19866894206492_2
tatggctaatgaaataattttttttatgttcccaataatcattattctctttaatgaaaacgtagggcagatctttcagcccttacatgtgggaataatttctaccctcacattactttcttgagtaacttaagccgagttgagcgaattaaagttttgcagggatggattgttcataacttaagtgctaattgacatctatttcagaacatgacwttccagagtaaaccttactttaaaacattaatgcaattacggtttttataacaattggtatcattatattttgggtaataagtmattgtagtggaatgtaacgtaatgtttcctgactgctgccttcaaaaattccctgtcctgagtcacataaagcatctcccacaawcactgtaaaataaaggagcaggaggcatcatgctcctgccttttaattttgaggcaagactagttgtcgtgcttggaaattctagagtccttgtatcacgcatgaaaaaaagtcgtctcatttcaatgactttgcatcaaaaaaagtgtcaggtccagatacagaagtcagactaataagtgattaatagctaaagtgagcctctggtgctttat

SEQ ID NO: 10273 - DNA, 600 bp, Chicken  19866894206492_3
catgtgggaataatttctaccctcacattactttcttgagtaacttaagccgagttgagcgaattaaagttttgcagggatggattgttcataacttaagtgctaattgacatctatttcagaacatgacwttccagagtaaaccttactttaaaacattaatgcaattacggtttttataacaattggtatcattatattttgggtaataagtmattgtagtggaatgtaacgtaatgtttcctgactgctgccttcaaaaattccctgtcctgagtcacataaagcatctcccacaawcactgtaaaataaaggagcaggaggcatcatgctcctgccttttaattttgaggcaagactagttgtcgtgcttggaaattctagagtccttgtatcacgcatgaaaaaaagtcgtctcatttcaatgactttgcatcaaaaaaagtgtcaggtccagatacagaagtcagactaataagtgattaatagctaaagtgagcctctggtgctttatttcccatcccctgctctttctcctctttaacactcaggtaactgtcagaaatggacctggctgttataaatgacaaggggtaaat

SEQ ID NO: 10274 - DNA, 599 bp, Chicken  19866894206493_1
  misc_feature (1)..(160): n is any nucleotide
nnnnnnnnnnnnnnnnnnnnnnnnnnnnnnnnnnnnnnnnnnnnnnnnnnnnnnnnnnnnnnnnnnnnnnnnnnnnnnnnnnnnnnnnnnnnnnnnnnnnnnnnnnnnnnnnnnnnnnnnnnnnnnnnnnnnnnnnnnnnnnnnnnnnnnnnnnnnnnnnatgggagaaaggaagcaaacaagggaggggagcatttaaatcctgggcagtacttcgtggctgtaaatgggaagctgttgtggccacagcacatatatagtctgttgatttgcttacttaacatttcaagcagcctgagytgcctggcagggtacatcgtgaatcagacactcagggacagctctggggtaaatttctctctgtgctggccataagcatcyctgaccttgtccccctgggatgaggatggatggccttttccaaaagggagttccacaaatacccctcacatttaatacaactgctgccttgctgcagaaattgctctggtctcagcagggactcaatggacagaaaggaacatgstgcaagattgtacttactcttaaaagaaccaaagcagtaatacagcattaaaatgttttctttgtatgtctat

SEQ ID NO: 10275 - DNA, 599 bp, Chicken  19866894206493_2
  misc_feature (1)..(79): n is any nucleotide
nnnnnnnnnnnnnnnnnnnnnnnnnnnnnnnnnnnnnnnnnnnnnnnnnnnnnnnnnnnnnnnnnnnnnnnnnnnnnnnatgggagaaaggaagcaaacaagggaggggagcatttaaatcctgggcagtacttcgtggctgtaaatgggaagctgttgtggccacagcacatatatagtctgttgatttgcttacttaacatttcaagcagcctgagytgcctggcagggtacatcgtgaatcagacactcagggacagctctggggtaaatttctctctgtgctggccataagcatcyctgaccttgtccccctgggatgaggatggatggccttttccaaaagggagttccacaaatacccctcacatttaatacaactgctgccttgctgcagaaattgctctggtctcagcagggactcaatggacagaaaggaacatgstgcaagattgtacttactcttaaaagaaccaaagcagtaatacagcattaaaatgttttctttgtatgtctatcttttctgtggtttgtgcctgtgttggtcaacatgtctatgaagggagaaacacaaaacttgtatcttaaaggaacatgga

SEQ ID NO: 10276 - DNA, 600 bp, Chicken  19866894206493_3
atgggaagctgttgtggccacagcacatatatagtctgttgatttgcttacttaacatttcaagcagcctgagytgcctggcagggtacatcgtgaatcagacactcagggacagctctggggtaaatttctctctgtgctggccataagcatcyctgaccttgtccccctgggatgaggatggatggccttttccaaaagggagttccacaaatacccctcacatttaatacaactgctgccttgctgcagaaattgctctggtctcagcagggactcaatggacagaaaggaacatgstgcaagattgtacttactcttaaaagaaccaaagcagtaatacagcattaaaatgttttctttgtatgtctatcttttctgtggtttgtgcctgtgttggtcaacatgtctatgaagggagaaacacaaaacttgtatcttaaaggaacatggaaacttaatttgagaatccttcctcctcagatttaaccwtctgttctatttataagaggttgattattgataactttgcttgaatgtagagctgacaacgttatctgctggagtgaagagtaaaggtgataacaggaaggaaagaag

SEQ ID NO: 10277 - DNA, 600 bp, Chicken  19866894206493_4
ttccaaaagggagttccacaaatacccctcacatttaatacaactgctgccttgctgcagaaattgctctggtctcagcagggactcaatggacagaaaggaacatgstgcaagattgtacttactcttaaaagaaccaaagcagtaatacagcattaaaatgttttctttgtatgtctatcttttctgtggtttgtgcctgtgttggtcaacatgtctatgaagggagaaacacaaaacttgtatcttaaaggaacatggaaacttaatttgagaatccttcctcctcagatttaaccwtctgttctatttataagaggttgattattgataactttgcttgaatgtagagctgacaacgttatctgctggagtgaagagtaaaggtgataacaggaaggaaagaagttaattctggttgtgaaactgattgcacctctgatttcattttttatcttgtcttctttctttcaatttaacttttaaggtagtcctcagactgttcatcaagttcacccaaatccaggaaatcctgaaggtagtgtttaccagagtattcagcagatgagaaatgcagtggcaaaagagataaagagtgag

SEQ ID NO: 10278 - DNA, 600 bp, Chicken  19866894206501_1
gatcggttatttgagcacatgatgctttgttatttgcatattacacaatggagaagaaaagaaaatattgtcatagactgtcaaagaaaaaaaaaagatacctttcctggcaacttctaaagcaaaatgaatttccactagcattaagaaaggaattttaattatgcttttttctcctatgtaaaacaacgtatcagttttcacactgtgcaaggccattttctaatgaaaggttcataaacaaggtgaaagtcttcccacaaactgctttgttatcatttggaatatcatcagctttgraaggaataggcatactgtaacaaaacgtagcttacgtaggtttcaccggtggcattcctggagcatgcagccaagagttccagtcaactttattaagaatatctacctacgaacaacacaaattcttagtgaattttaatagtcatttttagagagaagcataccctatgagttccaatttttaagtaccttcaactaccatgcaaaaagttccaaaaatagaatacttccagaaagcaaaccaacccacacatcatagcaaacccatctttgtaagattgcaggctgtataatattaag

SEQ ID NO: 10279 - DNA, 600 bp, Chicken  19866894206501_2
atgcagccaagagttccagtcaactttattaagaatatctacctacgaacaacacaaattcttagtgaattttaatagtcatttttagagagaagcataccctatgagttccaatttttaagtaccttcaactaccatgcaaaaagttccaaaaatagaatacttccagaaagcaaaccaacccacacatcatagcaaacccatctttgtaagattgcaggctgtataatattaagatcatgagataaaaaggtgaaagaaaaggaactggtccttaaagaatttaattcctgagttgcrtcatagcttcayataatcaaaaggttttaaatactacccaaccttatccttgaagtaggagtacaagaatgtcttccattcatcagtcactatgctcttataagcaaactgctgaacataagccttcaagaagccaatgaagacatctaatagttaaaaagaaacagccatttcagtgtttgaaattaacatggaaaagaattatatacaaagtctaactaacacttacctggtcctccaagaagttgttcaaggtaaaaaagcaaagcaaagcctttctcatatggaacagacgaatag

SEQ ID NO: 10280 - DNA, 600 bp, Chicken  19866894206501_3
gttccagtcaactttattaagaatatctacctacgaacaacacaaattcttagtgaattttaatagtcatttttagagagaagcataccctatgagttccaatttttaagtaccttcaactaccatgcaaaaagttccaaaaatagaatacttccagaaagcaaaccaacccacacatcatagcaaacccatctttgtaagattgcaggctgtataatattaagatcatgagataaaaaggtgaaagaaaaggaactggtccttaaagaatttaattcctgagttgcrtcatagcttcayataatcaaaaggttttaaatactacccaaccttatccttgaagtaggagtacaagaatgtcttccattcatcagtcactatgctcttataagcaaactgctgaacataagccttcaagaagccaatgaagacatctaatagttaaaaagaaacagccatttcagtgtttgaaattaacatggaaaagaattatatacaaagtctaactaacacttacctggtcctccaagaagttgttcaaggtaaaaaagcaaagcaaagcctttctcatatggaacagacgaataggcaacatcagga

SEQ ID NO: 10281 - DNA, 600 bp, Chicken  19866894206503_1
ttaacatagaaacaaatgttcagttcagcctcagatctcctcagacaacagaaaatgctcaaagatccaaacacctctgactctcagcccttgccaatcagcctcattcaacccatgtccctctgacactttcatcaccacaccttactgagacacaaaacaccacaagacaggagtctgaaaacaaaactgccagcagttcattgaacacctccccatcactggctcccaacaacaggggaaaacctaccacgaggaacaaacttgaaagttgcctcagccaaagaactgcaaactacygatgatgagaaacaccaaggcaattggtttcaagaaagacttcttcgaggatctcaaacaagttttactctttccttgctggacaaggattgtccagcagtttcctctcctttcctattatccttaagcaagtcagaagtctacgctagtgctgcattccagcaccttttaacctcatgattcactgctccagcctagcacctcatgttggcagtgggctgtttaacctagattaatggtgtaaaactaagggaaatttacctctgagggcaaatggactagccagccacatgtaaggaa

SEQ ID NO: 10282 - DNA, 600 bp, Chicken  19866894206503_2
aacatagaaacaaatgttcagttcagcctcagatctcctcagacaacagaaaatgctcaaagatccaaacacctctgactctcagcccttgccaatcagcctcattcaacccatgtccctctgacactttcatcaccacaccttactgagacacaaaacaccacaagacaggagtctgaaaacaaaactgccagcagttcattgaacacctccccatcactggctcccaacaacaggggaaaacctaccacgaggaacaaacttgaaagttgcctcagccaaagaactgcaaactacagytgatgagaaacaccaaggcaattggtttcaagaaagacttcttcgaggatctcaaacaagttttactctttccttgctggacaaggattgtccagcagtttcctctcctttcctattatccttaagcaagtcagaagtctacgctagtgctgcattccagcaccttttaacctcatgattcactgctccagcctagcacctcatgttggcagtgggctgtttaacctagattaatggtgtaaaactaagggaaatttacctctgagggcaaatggactagccagccacatgtaaggaaac

SEQ ID NO: 10283 - DNA, 600 bp, Chicken  19866894206504_1
tcggtattaatattgtgcattacgtggtgagaggatgcatgagcacagtgtgaatggaagagttgagcttgagttcacacatgctttaatttttttatgagtcccacatccctgttcctcggtggtgacaaccctgctagtcccactgaaagctgcaggtgctaccaaatgcatgtgttaattagaagtaatgtatgtaaattctgagtgctgcatgtgtatgtgtgagagataaggagtgctcctgttcccatagagaggggcacccgtaaccttcccctgacccgagcacagccgcgsgtttgcagacctgctctgttgatacagatacgtacacggtttattttaaccttagtgcagctgcaagtatttccttcttggctgtatacaactgtttggagacactcgtagaacataaatatttgctgtgtgtatatacaccaagacgtatgttatctgtcagtattaatactggttgctcgttctgaacaatgagaaggtaacaagggtgactagttctcccgttgatacattccagatcctacaattaacacgttttattgtttgagctacttagtctatttttaaacatgaactgtt

SEQ ID NO: 10284 - DNA, 600 bp, Chicken  19866894206512_1
caaaacattggtttaggttattctgatcctgatcttcatatcccagacttctgtctctctgtgcttaaagactggagttacttttagaaaagtctttttgtcaaaatcactgtcaggaaatatattgactttgtgttgattttgtaacatttcattttattgtttccctcatttatacaaaatccagtgtttcctgggtaggaagtgagctgtgagtggaacatggattgatgttgactggtatgtagaagacatttatgaactgtattgctcttaaaatagagaaggaaacaggaaaaractgacagcaatataatttactgcattgtttaaggaaaaagtgaagacatttgttttctaaattatttgaaataccgtctcagagattgacaaggtcttggcaaacccatttattcattatttttaaaagaaactgcagaagaagatccagacatgtaagaaaggtcacaacgtgtaattwccagaattacctcctctcttgccccctactgctgtaagtaacagctagtagaagtgctactttggaggaggaagccgtaagcccacttcacgacctcgtcgtggtgccacatacaggtt

SEQ ID NO: 10285 - DNA, 600 bp, Chicken  19866894206512_2
atccagtgtttcctgggtaggaagtgagctgtgagtggaacatggattgatgttgactggtatgtagaagacatttatgaactgtattgctcttaaaatagagaaggaaacaggaaaaractgacagcaatataatttactgcattgtttaaggaaaaagtgaagacatttgttttctaaattatttgaaataccgtctcagagattgacaaggtcttggcaaacccatttattcattatttttaaaagaaactgcagaagaagatccagacatgtaagaaaggtcacaacgtgtaattwccagaattacctcctctcttgccccctactgctgtaagtaacagctagtagaagtgctactttggaggaggaagccgtaagcccacttcacgacctcgtcgtggtgccacatacaggttgatgctgctcctggatgtctaatgtggctttggaccatgttgtctgtcctgcaggatgaaactgggatttcagtgatggaaaattctgtccgggtcctgattctgtcctcagattaacttgtgattcatcatgatggcagaaacccattagctgagtccatagctgagggcctctgacttt

SEQ ID NO: 10286 - DNA, 600 bp, Chicken  19866894206517_1
tacattgagaaggcagtagaataaatccagatattaacaggtattcagctattctattattcagtttgtgtgagtttgactaagtccttttgtctttgatgccattctcagttggccttcctgctccatcacctaccatttgacattttgaagcttcctccctcctttgaactgtcattagtttttactgtaatttcattctggccatcccttatgggaaataactgaattcagcaatatgtcttctgagtaaatatgtcaggttttcaaggcatatgtcactactttcagcagcatccragtacaagatctttagtcaccttggacttctatttttgttctccgacttttctaatcatcattgtcaggagtggtctcagcaaaacaacttgtaactaacttttgggtgtcccaggctgccatagcctcgagagggtcattaacttgctgtggtcttatccttgctgatcagcctgtgcccctcctcccagatgctaactgctcaccttcagatctaggagttcaccagagctatgtgcaagattctgtcccgggggcttttgaaggcaaacttcctgaggttaggactgctagcctaaa

SEQ ID NO: 10287 - DNA, 466 bp, Chicken  19866894206517_2
ctcctcccagatgctaactgctcaccttcagatctaggagttcaccagagctatgtgcaagattctgtcccgggggcttttgaaggcaaacttcctgaggttaggactgctagcctaaactatgagaactgtatgaatccatcttttaaaaaatcaagcttggaggctgtgaggtgagactgagacttggagacacaattggtgctcgtctagtcacacaggcttgcttactacttaaccagtcctacatatttgcccaggtgtgttcatcctatgggcatagaacacctaggtgatttyggtattctaaaagattacttaaaactggaaatttctgaatcttctacacccttatcagatttgttttgtatcagtctytcagagacaaattgaaatctattgcttttgtcaggacatagccagagaaaactttgtcatcttcacatcatctacttaagagcccaaa

SEQ ID NO: 10288 - DNA, 388 bp, Chicken  19866894206517_3
tttgaaggcaaacttcctgaggttaggactgctagcctaaactatgagaactgtatgaatccatcttttaaaaaatcaagcttggaggctgtgaggtgagactgagacttggagacacaattggtgctcgtctagtcacacaggcttgcttactacttaaccagtcctacatatttgcccaggtgtgttcatcctatgggcatagaacacctaggtgatttyggtattctaaaagattacttaaaactggaaatttctgaatcttctacacccttatcagatttgttttgtatcagtctytcagagacaaattgaaatctattgcttttgtcaggacatagccagagaaaactttgtcatcttcacatcatctacttaagagcccaaa

SEQ ID NO: 10289 - DNA, 599 bp, Chicken  19866894206518_1
  misc_feature (1)..(22): n is any nucleotide
nnnnnnnnnnnnnnnnnnnnnntccttttctacatgagaaaattgtcacagtagtggtgtcaggcctgctgccaggctctcccgtgtatcagatttcacaagtttaatcagctttaattctatattggaaacttgaagtttcatctgtttgggccacagttaacaaatttgcatggtgtctactgacttattcaaatcgagagttgaagctatgcctttaggcatatttttcaaaagaattctgcaccccattgctgctatagcgtagctaccatgggtgtcatgctggaagagactccygagagagaagcttgtgccaacagcaatttttctgctagttcttaagacaaagaaactcttctgtgtcttttctggcattgtgacatcaagtgaatatgtcacaactagctaagcttgcagaaccttactgtgtcaacttcaccttgggatgctctagaaatgagaaactattctcctttatatagcagataagcttcctaaagaaaacagatcttaccaagtaattatttcagagaaacctccatacygtgtgacttttggaagagagaattgcatcaggagagcatgcccttctctgc

SEQ ID NO: 10290 - DNA, 513 bp, Chicken  19866894206518_2
ccattgctgctatagcgtagctaccatgggtgtcatgctggaagagactccygagagagaagcttgtgccaacagcaatttttctgctagttcttaagacaaagaaactcttctgtgtcttttctggcattgtgacatcaagtgaatatgtcacaactagctaagcttgcagaaccttactgtgtcaacttcaccttgggatgctctagaaatgagaaactattctcctttatatagcagataagcttcctaaagaaaacagatcttaccaagtaattatttcagagaaacctccatacygtgtgacttttggaagagagaattgcatcaggagagcatgcccttctctgctgaactcagcttcagagatacttccacacagatattaacacaatcaatgcaatttttactaataatgtctttaattgggaaaactcagaaatgacaggctaaaagaacacccagtgaaatctccccaggtgtcaacatccattgattttgcacacaatgatg

SEQ ID NO: 10291 - DNA, 600 bp, Chicken  19866894206520_1
agtgtggcatgaagcccaatatatcatgttatatacaaggtttagtaaagaaataaaaaaaatcaggagaccagtgctattgtagtatgaaacccttgatgtagataaaagaaatcagtgagaggcaggagtaaaagaatagggtacaaaagagggctgggaggttgcctggctgtagcttgggaacacctgggttttgcaaactggaggtctctggctttgccacgcatttcccatgtgctgttgagcaaatcactatttaatctttccctgcctcggtttcccaagtacaaaatgggytgtaacagagcatcttgccttcatttgcttgccttatttgcacttcagggctttgcttctatttttgttgtgtctactgcttgacggtgtcgtgttccctgggaccctgaggcattttccataccacagataataagttgaatgggtcctctcccttttattccttcagactctgcacttatcacatctccttcctggaagccaaatgcagggcaatatctcacaacatctccacatgttccctgcccatcaccagacctgcagttctcagggcgatgttgcgtggaaggagaggagcca

SEQ ID NO: 10292 - DNA, 600 bp, Chicken  19866894206523_1
tgagctcctgggttagccatgccttctcacctggtgctcagacattggttcaagttgtgtcttggcaattccactgcagagggcaacctaggtggagcagtggaaactgccagcaaggagccaggacataggagccagcgtaggctgcacacaatggagctaagccagctggcagcccttccctgatgcttcttccatccagctccacaggcctccaaaagcctttgagaaagtgcaggcctgtctgcaagcctctttcagccccagcagcaagctgcatggctcctgttcgacagctcragtcagaagttcatgggcctccccagccaattctcttctggggaaggttgtcaagaaaacaatcactctccagatgtggcatgccatgtccttctcaaagcagcaagggagctctggtttctttctcttagttacagaaatatgcatagtttcttcctccactgcctcccagccccatccctttcttcatcctgcaccataggaagactttgccacccatcacaccttcatcctgctgccacaggatcaggaggacaagggacactggcatgaatggtaggagaggccaataggcgtgta

SEQ ID NO: 10293 - DNA, 600 bp, Chicken  19866894206524_1
agtgaggaatgcatgttctctcagagctacaaggagaagttatgagatttgcagtctgtctcttatcacctttaatcagattaccttcagcaaaaaagaaaagagacatcataggcaatctgtggaatttaagtatattcagtacgtacagtttttatggtgtatatttttttccacactgacctttaaagaaatttccattttataatgtctaattattgaaatacatttggctaatcttgtgtctcatctctctctaacattttcaaatacttctccacaccgcaaaagaggtaattrcctaacagttrctctctgctgaaatgactgttcccaccacaattatttacaagaatacatgaatatgttattggatgctgctgcgcaatgacactaatactgaaaataaaagtaggaatggactctatgctccacttctggaactgttcatcctccagcctaaatgaacaaaactctgtttggatctatttagctatgactcagtgtccaaatccagtctaaatgattatgcataaagatcactgtaaggtgccaattrcatctaactgcgccagtgatgataaagatagaagtccaaat

SEQ ID NO: 10294 - DNA, 600 bp, Chicken  19866894206524_2
catgttctctcagagctacaaggagaagttatgagatttgcagtctgtctcttatcacctttaatcagattaccttcagcaaaaaagaaaagagacatcataggcaatctgtggaatttaagtatattcagtacgtacagtttttatggtgtatatttttttccacactgacctttaaagaaatttccattttataatgtctaattattgaaatacatttggctaatcttgtgtctcatctctctctaacattttcaaatacttctccacaccgcaaaagaggtaattrcctaacagttrctctctgctgaaatgactgttcccaccacaattatttacaagaatacatgaatatgttattggatgctgctgcgcaatgacactaatactgaaaataaaagtaggaatggactctatgctccacttctggaactgttcatcctccagcctaaatgaacaaaactctgtttggatctatttagctatgactcagtgtccaaatccagtctaaatgattatgcataaagatcactgtaaggtgccaattrcatctaactgcgccagtgatgataaagatagaagtccaaatgtgaacagttc

SEQ ID NO: 10295 - DNA, 457 bp, Chicken  19866894206524_3
acattttcaaatacttctccacaccgcaaaagaggtaattrcctaacagttrctctctgctgaaatgactgttcccaccacaattatttacaagaatacatgaatatgttattggatgctgctgcgcaatgacactaatactgaaaataaaagtaggaatggactctatgctccacttctggaactgttcatcctccagcctaaatgaacaaaactctgtttggatctatttagctatgactcagtgtccaaatccagtctaaatgattatgcataaagatcactgtaaggtgccaattrcatctaactgcgccagtgatgataaagatagaagtccaaatgtgaacagttctaaataattgaggggggaaaaactgacgtataaaaagattagagattcttttagttacatattgatatttgttactatttacagcagtactttagtctataccat

SEQ ID NO: 10296 - DNA, 600 bp, Chicken  19866894206528_1
ggtacttgctgcatccctattaagaactgcagtatgcggaggtgtgggagggtcaattacctccctccgcatgatgcccccgaaggaatctgcgcttcttatctcaattagctcacgcagaaatggctttgccaggcaagtgatagaaactgcttcctattcctcctaagtgtgactgaactagaaagaaaacttccgttgatgtctttgggtgcagtgctgaactcttgaatggaaacgtgcccaaagcataaatgatggagcaggttgggggaaggggtgcattctgcagggcagcarggctgtagctgtgggtgcctgttggagccggtactcatcctgcctgcctttcacatcttggaggcgtttcatggtttttgtttagcccatgcatgaccacggttcagctcagcagctgcgtaacaccgctgtctaaaccatggatgttatggacaggtgttctgacgaactggagtttgttcttcattcctctgttgcaatacgtcccagcgaggtcaaagcctgagcggtctgcgtgctgagccaacctctcacaatttgctttttgtttttggccaagagattataaggtgcatgaag

SEQ ID NO: 10297 - DNA, 600 bp, Chicken  19866894206528_2
gttcagctcagcagctgcgtaacaccgctgtctaaaccatggatgttatggacaggtgttctgacgaactggagtttgttcttcattcctctgttgcaatacgtcccagcgaggtcaaagcctgagcggtctgcgtgctgagccaacctctcacaatttgctttttgtttttggccaagagattataaggtgcatgaaggtgaggtgtgctcaccaaatcattgctgatttgcgttgggtgtaaggctgcaagcatcgccagccttttatgtaggtcacgtctttgtttttgtgtcatcrcatgcttggggcactacaagacagaaaaacaggtaccacrgttttatctttttcctctaccctcttctgccctaggtacgtgacctagattagtttgcgagcaaaaattatggagctcacaaatgggaaagctgcaggtactctatgcttactgcctttatggacgcacagacctaaagctctctaaaggggctcacaaatccacatggggttcctaaatgctgcatcctgcatttgggtcattggttagctgagagcagttctgaagtcacatacaggctaacagcttccttttggcta

SEQ ID NO: 10298 - DNA, 600 bp, Chicken  19866894206528_3
ggatgttatggacaggtgttctgacgaactggagtttgttcttcattcctctgttgcaatacgtcccagcgaggtcaaagcctgagcggtctgcgtgctgagccaacctctcacaatttgctttttgtttttggccaagagattataaggtgcatgaaggtgaggtgtgctcaccaaatcattgctgatttgcgttgggtgtaaggctgcaagcatcgccagccttttatgtaggtcacgtctttgtttttgtgtcatcrcatgcttggggcactacaagacagaaaaacaggtaccacrgttttatctttttcctctaccctcttctgccctaggtacgtgacctagattagtttgcgagcaaaaattatggagctcacaaatgggaaagctgcaggtactctatgcttactgcctttatggacgcacagacctaaagctctctaaaggggctcacaaatccacatggggttcctaaatgctgcatcctgcatttgggtcattggttagctgagagcagttctgaagtcacatacaggctaacagcttccttttggctaggtaggagagaaacatcattgatgtgtttattccaagctt

SEQ ID NO: 10299 - DNA, 600 bp, Chicken  19866894206536_1
gggacctttgcacgtggcacagaccacggacctcttctaccacagctcccagtgtctccagacacccttctgaggccacatcaccacttcagcagggatgaactgctgcggggtggggcagagggagcacaatggcggggtgcctgggcctgccgccgcctgacggtgtcaggctgcccctcctgactcactgcccacagcagtgctgcagggtgaggtcaccatggacgtggccggggcctgctgccagctgccgccacgtgtgcaggaagtccctggcaccgccggcctgcaggcccrggcccggctgtgcygccatttccctgcgtggcggctcagcagggacgggctgggcccagagggacacggactctctcatctggaggctgtgctggctgagcatgctgctctgtgcccgctgggacccagtttgctttcacacagacatctcacactgctgtgggtcactttcaaaggggggtgaggggacaacgagccccgcgacacttccccagtgcacagctcggccctgtgcagagcacaacttcctcctgcctttccttctccaggcgcaggggtgccttatctcatcctcaccag

SEQ ID NO: 10300 - DNA, 600 bp, Chicken  19866894206536_2
tggcacagaccacggacctcttctaccacagctcccagtgtctccagacacccttctgaggccacatcaccacttcagcagggatgaactgctgcggggtggggcagagggagcacaatggcggggtgcctgggcctgccgccgcctgacggtgtcaggctgcccctcctgactcactgcccacagcagtgctgcagggtgaggtcaccatggacgtggccggggcctgctgccagctgccgccacgtgtgcaggaagtccctggcaccgccggcctgcaggcccrggcccggctgtgcygccatttccctgcgtggcggctcagcagggacgggctgggcccagagggacacggactctctcatctggaggctgtgctggctgagcatgctgctctgtgcccgctgggacccagtttgctttcacacagacatctcacactgctgtgggtcactttcaaaggggggtgaggggacaacgagccccgcgacacttccccagtgcacagctcggccctgtgcagagcacaacttcctcctgcctttccttctccaggcgcaggggtgccttatctcatcctcaccagagagcgggtgagtt

SEQ ID NO: 10301 - DNA, 599 bp, Chicken  19866894206537_1
  misc_feature (1)..(195): n is any nucleotide
nnnnnnnnnnnnnnnnnnnnnnnnnnnnnnnnnnnnnnnnnnnnnnnnnnnnnnnnnnnnnnnnnnnnnnnnnnnnnnnnnnnnnnnnnnnnnnnnnnnnnnnnnnnnnnnnnnnnnnnnnnnnnnnnnnnnnnnnnnnnnnnnnnnnnnnnnnnnnnnnnnnnnnnnnnnnnnnnnnnnnnnnnnnnnnnnnnntcctcaagttgattattgaaaagaaaatgaatcagctcatactttcatgagtacacaaattactggtaacaattcatcctccttgtgcattgttcctcactaagkctcrgtcttggcccagggcaccttgctctgaaagtccctgcctgagcaaaagattggaccaaatggacccactggtcccttccaacaccattctatgatccttctagaaactggaggcagaagccttgactaaacctcaggccgctggatacttcctcactaatgtatatattagtttcctggctcatgttcagcctcccattggttcataagtcacttctcttagctgagaggaagggaaagacctttgcactgtttgatggacaaagacttgtgcagacttttccatatctctggcc

SEQ ID NO: 10302 - DNA, 599 bp, Chicken  19866894206537_2
  misc_feature (1)..(191): n is any nucleotide
nnnnnnnnnnnnnnnnnnnnnnnnnnnnnnnnnnnnnnnnnnnnnnnnnnnnnnnnnnnnnnnnnnnnnnnnnnnnnnnnnnnnnnnnnnnnnnnnnnnnnnnnnnnnnnnnnnnnnnnnnnnnnnnnnnnnnnnnnnnnnnnnnnnnnnnnnnnnnnnnnnnnnnnnnnnnnnnnnnnnnnnnnnnnnnntcctcaagttgattattgaaaagaaaatgaatcagctcatactttcatgagtacacaaattactggtaacaattcatcctccttgtgcattgttcctcactaagkctcrgtcttggcccagggcaccttgctctgaaagtccctgcctgagcaaaagattggaccaaatggacccactggtcccttccaacaccattctatgatccttctagaaactggaggcagaagccttgactaaacctcaggccgctggatacttcctcactaatgtatatattagtttcctggctcatgttcagcctcccattggttcataagtcacttctcttagctgagaggaagggaaagacctttgcactgtttgatggacaaagacttgtgcagacttttccatatctctggccctca

SEQ ID NO: 10303 - DNA, 600 bp, Chicken  19866894206538_1
ttgccctagatggaaaggggcctgggggctgagcaccagctcagcgaggcggcacgcagccagccaggagcagggagggaaacagccctgcctcagtgtgagggaggggggcagctccccgcaggcagacccccagcagagggatggagaaacgctggggaggtgctgagctgggggcccagggctggggcaggctggaggctctccagcagcacatcaccatccggacatgcacctgggcaggatgggatggctgctggtgtcagctcccatttggctccacgaggtgttgtcacaatrtgaactctggacaggaaaaggctccgwccatccgctgcaaggtccagtcctgcccagggctgggcaggctcccgtgcagtgacactgcagggctgcgttatctctacctgcacrctgttcaaactctgctcacacccctgacaccagcagggaaaagggagtaggtctaaatgcctcttcccatgaactgtggctgctgcgatcacacccagaaatgaatcartcagttcctgggatacctgcacaccacatcgcctctgtctgtaagctgaagggataccgttattccctgacatgtaa

SEQ ID NO: 10304 - DNA, 600 bp, Chicken  19866894206538_2
gctgagcaccagctcagcgaggcggcacgcagccagccaggagcagggagggaaacagccctgcctcagtgtgagggaggggggcagctccccgcaggcagacccccagcagagggatggagaaacgctggggaggtgctgagctgggggcccagggctggggcaggctggaggctctccagcagcacatcaccatccggacatgcacctgggcaggatgggatggctgctggtgtcagctcccatttggctccacgaggtgttgtcacaatrtgaactctggacaggaaaaggctccgwccatccgctgcaaggtccagtcctgcccagggctgggcaggctcccgtgcagtgacactgcagggctgcgttatctctacctgcacrctgttcaaactctgctcacacccctgacaccagcagggaaaagggagtaggtctaaatgcctcttcccatgaactgtggctgctgcgatcacacccagaaatgaatcartcagttcctgggatacctgcacaccacatcgcctctgtctgtaagctgaagggataccgttattccctgacatgtaataatggggcagaccgattcagttgact

SEQ ID NO: 10305 - DNA, 600 bp, Chicken  19866894206538_3
ctccccgcaggcagacccccagcagagggatggagaaacgctggggaggtgctgagctgggggcccagggctggggcaggctggaggctctccagcagcacatcaccatccggacatgcacctgggcaggatgggatggctgctggtgtcagctcccatttggctccacgaggtgttgtcacaatrtgaactctggacaggaaaaggctccgwccatccgctgcaaggtccagtcctgcccagggctgggcaggctcccgtgcagtgacactgcagggctgcgttatctctacctgcacrctgttcaaactctgctcacacccctgacaccagcagggaaaagggagtaggtctaaatgcctcttcccatgaactgtggctgctgcgatcacacccagaaatgaatcartcagttcctgggatacctgcacaccacatcgcctctgtctgtaagctgaagggataccgttattccctgacatgtaataatggggcagaccgattcagttgacttatatattaaaacaagggaataaacagccagagctgagctgagcttctgcatacctcctgaaaatgcttcaagggttggaacacctc

SEQ ID NO: 10306 - DNA, 509 bp, Chicken  19866894206538_4
ccggacatgcacctgggcaggatgggatggctgctggtgtcagctcccatttggctccacgaggtgttgtcacaatrtgaactctggacaggaaaaggctccgwccatccgctgcaaggtccagtcctgcccagggctgggcaggctcccgtgcagtgacactgcagggctgcgttatctctacctgcacrctgttcaaactctgctcacacccctgacaccagcagggaaaagggagtaggtctaaatgcctcttcccatgaactgtggctgctgcgatcacacccagaaatgaatcartcagttcctgggatacctgcacaccacatcgcctctgtctgtaagctgaagggataccgttattccctgacatgtaataatggggcagaccgattcagttgacttatatattaaaacaagggaataaacagccagagctgagctgagcttctgcatacctcctgaaaatgcttcaagggttggaacacctcccctacaaggactggctg

SEQ ID NO: 10307 - DNA, 600 bp, Chicken  19866894206542_1
catgtgaaaaaaaaaaaattgagttcctcaccactgtaagttgcaattcatgatgtaaatccttagtgtgcaatgcatcagtaactggcatttgaaatcctcagctttggcctggggccgagggcgatgccccacagctagcaatcagatctctagtgacccaatttctattgtcatgtttctagtaaatctcaggaatacagctgtgagaatgtgacatgttgaccaggactgcaaatagcatctcccaaagcatcagtgatctgctgtaggataaagacccacattcccattagacakgctttcgtaggtcaggcatcgttggrtttatttttttaaacatgcagcggttcactgaacttcaggaggaaaagttccttcagaaggcaccactgaacctaccagctcagtgtgccactgttagggcgtgctcttatccaacaggagctcagtgacagcacgactacccagcaggaccttgagtttctagcttttctactacaccttatgcccttcctaaataaagcacgttactaaccttataaacgtccggaaacccgtcggccccaattttgttgtccctttgacaccaagaaatcg

SEQ ID NO: 10308 - DNA, 600 bp, Chicken  19866894206542_2
ctcaccactgtaagttgcaattcatgatgtaaatccttagtgtgcaatgcatcagtaactggcatttgaaatcctcagctttggcctggggccgagggcgatgccccacagctagcaatcagatctctagtgacccaatttctattgtcatgtttctagtaaatctcaggaatacagctgtgagaatgtgacatgttgaccaggactgcaaatagcatctcccaaagcatcagtgatctgctgtaggataaagacccacattcccattagacakgctttcgtaggtcaggcatcgttggrtttatttttttaaacatgcagcggttcactgaacttcaggaggaaaagttccttcagaaggcaccactgaacctaccagctcagtgtgccactgttagggcgtgctcttatccaacaggagctcagtgacagcacgactacccagcaggaccttgagtttctagcttttctactacaccttatgcccttcctaaataaagcacgttactaaccttataaacgtccggaaacccgtcggccccaattttgttgtccctttgacaccaagaaatcggatgaacaatgcagccactctgtcca

SEQ ID NO: 10309 - DNA, 600 bp, Chicken  19866894206542_3
acagttattatccgcccacagcgttatcgagccaaagctacagtaaagctgtacttcccactttgatacttggaggcaaacttcctcagcccactcacacccaccctgcaggcaggacgctgatccactgacacagcatgtcttctgccagtccaggatacttcaaaataaagaccgcttacagaaaaaactaattagtaactgcaaaaaaagtttgaattgtgatatctgatttctaaaagccacttttagagccaagttttggaccctcttagaatccaggttttgaacttactcctrctacagagagcagctcaccaacacccaaccccaggtgtgctcagcacagcaccggtatggggaacgtctcatcggatggcagcactgagtatctgtaactgtgaccgttgtttggcaagacaagaaattctaaacctttaaaaaataaacaaacagtttaggtaaggtagatggttcttcagtaacacttctctgctgcaaacagcaggaaatagcaaagtagaaaggtaatgttacattaacatttgcttaacaaaggacaaaaattatacattcttggtttcgttccttctcatgagt

SEQ ID NO: 10310 - DNA, 550 bp, Chicken  19866894206544_1
gaatgccagacaaaagtaaaatgtgcaaatgttgtgtgcactagctgcctagatacacagctttctatttctggtggtgttatcatctttatatccaaatatatctacagtttgtcagcaggtgtaatctcagtgtagtctaaagaaatattaatgtctgcaggtttactgttattcagattattaaatgaagtcctaattcctggttaacttctggatttctttattgtcacttatgccattttagtggtggtgttattctgttctagaggatttttggtaccaacgtatctttgtgtmcttccgtgatatctcattaactactgaaattcataggatttggaggatgttggatcataaggtgaatgtgagwattctgtggcctttttcagcacatgtttaaaactatgctcagttttgaaggcatttattatgttcccaacctgagtagagtaattcagaggtgcttgaaatgtaagggtttcagaatacaaagtttccctttatactattgtaagctgcataaggaagcccatctccactctagatt

SEQ ID NO: 10311 - DNA, 477 bp, Chicken  19866894206544_2
gtggtgttatcatctttatatccaaatatatctacagtttgtcagcaggtgtaatctcagtgtagtctaaagaaatattaatgtctgcaggtttactgttattcagattattaaatgaagtcctaattcctggttaacttctggatttctttattgtcacttatgccattttagtggtggtgttattctgttctagaggatttttggtaccaacgtatctttgtgtmcttccgtgatatctcattaactactgaaattcataggatttggaggatgttggatcataaggtgaatgtgagwattctgtggcctttttcagcacatgtttaaaactatgctcagttttgaaggcatttattatgttcccaacctgagtagagtaattcagaggtgcttgaaatgtaagggtttcagaatacaaagtttccctttatactattgtaagctgcataaggaagcccatctccactctagatt

SEQ ID NO: 10312 - DNA, 599 bp, Chicken  19866894206545_1
  misc_feature (1)..(107): n is any nucleotide
nnnnnnnnnnnnnnnnnnnnnnnnnnnnnnnnnnnnnnnnnnnnnnnnnnnnnnnnnnnnnnnnnnnnnnnnnnnnnnnnnnnnnnnnnnnnnnnnnnnnnnnnnnnctctcaccaattatacgtgccatggtgtattgcgtgttgagtcactcccaagagttgtcgagtaccataaatttacattaatacaaaacatactactatgcgccttcatgatgctgagggtcacgaacatcactctcattttatgtcctgtgatggcaatttcttagtccactaaaagcaaaaagagctgcayatgttatcaccagaacacactatcttgctttacaggagatgcttgccaataaaattattccagctatccacacattccagtctttggcaacggagcaaaccttggcattaccacrttgatatgagtctgcaaactcagcagtaacatgagttcttgcaagttcctccctaaaaatctaatcagcatcattaaggaaaccttttgagaacagacagagatgcttgatgactctaaggttcatggtccaagctctggttctcttgggtttccctgacatgcccagcatttctccaggaagg

SEQ ID NO: 10313 - DNA, 600 bp, Chicken  19866894206545_2
aattatacgtgccatggtgtattgcgtgttgagtcactcccaagagttgtcgagtaccataaatttacattaatacaaaacatactactatgcgccttcatgatgctgagggtcacgaacatcactctcattttatgtcctgtgatggcaatttcttagtccactaaaagcaaaaagagctgcayatgttatcaccagaacacactatcttgctttacaggagatgcttgccaataaaattattccagctatccacacattccagtctttggcaacggagcaaaccttggcattaccacrttgatatgagtctgcaaactcagcagtaacatgagttcttgcaagttcctccctaaaaatctaatcagcatcattaaggaaaccttttgagaacagacagagatgcttgatgactctaaggttcatggtccaagctctggttctcttgggtttccctgacatgcccagcatttctccaggaaggaatttggcttcactgccctttgtgatgttcaaatctttgtcacatttccttcatgccaggagcccaatggtccggagttctagcagcacttttcaaagagtattactgaggcttag

SEQ ID NO: 10314 - DNA, 599 bp, Chicken  19866894206549_1
  misc_feature (1)..(69): n is any nucleotide
nnnnnnnnnnnnnnnnnnnnnnnnnnnnnnnnnnnnnnnnnnnnnnnnnnnnnnnnnnnnnnnnnnnnnctcttctgatgagggtgtagtgataggacgtggagcagtggccaaaaactggaacacaggatgtctcacacaaatatgcagaagtaacttctttactgcgaggatgacaaagcactggagaaggttgcctagagaggctgtggagtgtcctctggagaaatccaagacctgttgggaagctcatctgtcctgaactgagtactttcattccacattctcatcacagtcacrccagaaatcaacctggcctttcctgacctgcatgtcccagaaacaccattcccttgcagcagtcactggccaggtggctggggagcaacatgtcaggaaatgggcagtgcacagcrrtggtaaagtcatcttctagtgcaacatgtgaggaagcagcatatacacatcgtaggtgttctggtccaagcagaggtcacagggatttattgggagggtgatgaatacgatggttcccataatcactgtaaggggagcagtggagagctcccccaacagattcccacagcagatccaggcag

SEQ ID NO: 10315 - DNA, 600 bp, Chicken  19866894206549_2
actggaacacaggatgtctcacacaaatatgcagaagtaacttctttactgcgaggatgacaaagcactggagaaggttgcctagagaggctgtggagtgtcctctggagaaatccaagacctgttgggaagctcatctgtcctgaactgagtactttcattccacattctcatcacagtcacrccagaaatcaacctggcctttcctgacctgcatgtcccagaaacaccattcccttgcagcagtcactggccaggtggctggggagcaacatgtcaggaaatgggcagtgcacagcrrtggtaaagtcatcttctagtgcaacatgtgaggaagcagcatatacacatcgtaggtgttctggtccaagcagaggtcacagggatttattgggagggtgatgaatacgatggttcccataatcactgtaaggggagcagtggagagctcccccaacagattcccacagcagatccaggcagcaaagacaggggatgacacagtgtttcactgtggccacactggcttgggagttgtgcgtggggaagggaggctgtatggggacacggatgctgcgggagcggccatgtctgagccgc

SEQ ID NO: 10316 - DNA, 600 bp, Chicken  19866894206549_3
ctggaacacaggatgtctcacacaaatatgcagaagtaacttctttactgcgaggatgacaaagcactggagaaggttgcctagagaggctgtggagtgtcctctggagaaatccaagacctgttgggaagctcatctgtcctgaactgagtactttcattccacattctcatcacagtcacrccagaaatcaacctggcctttcctgacctgcatgtcccagaaacaccattcccttgcagcagtcactggccaggtggctggggagcaacatgtcaggaaatgggcagtgcacagcrrtggtaaagtcatcttctagtgcaacatgtgaggaagcagcatatacacatcgtaggtgttctggtccaagcagaggtcacagggatttattgggagggtgatgaatacgatggttcccataatcactgtaaggggagcagtggagagctcccccaacagattcccacagcagatccaggcagcaaagacaggggatgacacagtgtttcactgtggccacactggcttgggagttgtgcgtggggaagggaggctgtatggggacacggatgctgcgggagcggccatgtctgagccgcg

SEQ ID NO: 10317 - DNA, 600 bp, Chicken  19866894206555_1
agcccttcttttcctccatctcttagaacaaaatttcctattaatttatcaagactacttgggaagactgctgtttttttacctttctcaagtgaaccttagaatcttattctcctcttgcaatgtactatttaatattcctttctgtctctgcctgtagaaacctgaattaaagaatacaatagccattaacaaaaattgtacataagagtgataatgctaatgggagttagttagtataacttcatttttaggtagtggagatgggatgaaattttccctgatgttttacatggcctstcatcagtatactcacttcagaatcttaaaaacctgcacaacatcaaagccattgggaagtttgaccacagcccatgttactgctttgagtcacagtgaggccagctgtgctgtgcaaaaaatgaggccagcaaagctgtgagagtctgtaacagcctctggctgcccaggaaagatgaaggagatacagcaagatggaaggagaaaggatagcaagtgtcttggactggcatcttataacaaggaaaactagactgggagagaaatgtaagtatctgaaggaaaggtctatattatgta

SEQ ID NO: 10318 - DNA, 600 bp, Chicken  19866894206555_2
aaaaacctgcacaacatcaaagccattgggaagtttgaccacagcccatgttactgctttgagtcacagtgaggccagctgtgctgtgcaaaaaatgaggccagcaaagctgtgagagtctgtaacagcctctggctgcccaggaaagatgaaggagatacagcaagatggaaggagaaaggatagcaagtgtcttggactggcatcttataacaaggaaaactagactgggagagaaatgtaagtatctgaaggaaaggtctatattatgtaaaacattttggagaacactactaacaraaaagtctgcaataactgagccagggtctacagacaaaagttggggtctcagaatgaacactccttgctgtacaaagcagtagaagtgaatgtttatgcttttcttcagaaaagaattttagaggattaggtcagaaagttacttaatccattagcagcatatgatagggtaggtaaacagaaatggatgtgacagtgaaattttggcactgctttgtgtaataaaataataatgctcttacctaacaagttaatatataaaatatatgctgggatttcttagcccgcagccacttccag

SEQ ID NO: 10319 - DNA, 600 bp, Chicken  19866894206556_1
tataaataaatgattataacatgtaagggtgatgcatgcgtaaatatgacaacgtgataataacatatatgtttcctgctacgtgctgcacatatcacatgtaatatatagatattaaaagccttatatataatttttatataacacatcgaataacaaatataatattaatattatagtaatgataataattaagccccacagcttcccagccccaggcagcactggtggctgcacagagcccagggctcctctcactgctggggcagaggacagcgaggtgagcagtgctgcagagcyccatgcactgtgtgtgtgtgctgccctgggtcccaactcccacagtgctattgctcgtggtgtttgcagcagcacagctctcctttcctacaggtcatcctggtagcaaatgtttctggtgagccaaaccgagagcaggagcaatttccagcatgctatgcaaactgaagtgttacctatataattagggcaaatctatggggaaaacacctctgtaaccagcataactgtctacaaaatccctagagtaaatttggctttatcagcaaaaaccctcttcctcactccctgcctgtgtga

SEQ ID NO: 10320 - DNA, 599 bp, Chicken  19866894206557_1
  misc_feature (1)..(6): n is any nucleotide
nnnnnncaaatttcttcagacagctatttttaaagaacgtcagggttgagaattcgagcactgagaatttagacatgaggatcatctgtttaattcagatggccttgatttctgtgaaagaagagtgctacctggaaggtgcacttagattgtgtcagggaatgtccagaaaaaagctggactttctattttggaacgtactcaatatctttaatgcttgccttttgaaatttggctgtagtttttatagcttttgcgtgtaattcaagtaataaagctcagaagtctttgatttacacrgaaagcaagttttggggagaagcactacaagtargtttatgaaatcctatgcagattatcatcagggttgaaccaacagcagtgatttacctgttgaacaaagagtagctaatagcagtagtagattcttatccttaattcacaagcttcaaggtgcgaaggggttgttagatgccttttctgattcttctgtgtattgcaaagcagtatctttcatctagaccaaggtggtagctccgattctgttaatgtgtggcttcctraatgacatctactcaaggtggaggcatcaagaggag

SEQ ID NO: 10321 - DNA, 600 bp, Chicken  19866894206557_2
gaacgtcagggttgagaattcgagcactgagaatttagacatgaggatcatctgtttaattcagatggccttgatttctgtgaaagaagagtgctacctggaaggtgcacttagattgtgtcagggaatgtccagaaaaaagctggactttctattttggaacgtactcaatatctttaatgcttgccttttgaaatttggctgtagtttttatagcttttgcgtgtaattcaagtaataaagctcagaagtctttgatttacacrgaaagcaagttttggggagaagcactacaagtargtttatgaaatcctatgcagattatcatcagggttgaaccaacagcagtgatttacctgttgaacaaagagtagctaatagcagtagtagattcttatccttaattcacaagcttcaaggtgcgaaggggttgttagatgccttttctgattcttctgtgtattgcaaagcagtatctttcatctagaccaaggtggtagctccgattctgttaatgtgtggcttcctraatgacatctactcaaggtggaggcatcaagaggaggaaaatcttgttctattagttactccactactaag

SEQ ID NO: 10322 - DNA, 600 bp, Chicken  19866894206557_3
ttcaagtaataaagctcagaagtctttgatttacacrgaaagcaagttttggggagaagcactacaagtargtttatgaaatcctatgcagattatcatcagggttgaaccaacagcagtgatttacctgttgaacaaagagtagctaatagcagtagtagattcttatccttaattcacaagcttcaaggtgcgaaggggttgttagatgccttttctgattcttctgtgtattgcaaagcagtatctttcatctagaccaaggtggtagctccgattctgttaatgtgtggcttcctraatgacatctactcaaggtggaggcatcaagaggaggaaaatcttgttctattagttactccactactaagagcattagaaaggcaaaccctgtttggccattttcagtctagctggcttcagcttccagcagtcacttctgcttagctttcgaagctgaaaaagctcaktgcagcccactggtgcccatctcctccctggcacagtgcagtcgagtcgcctttgataaaccacaagtgctgcccttcctgctgcttcacaatttacgtctgcgttttaaggtctctctgtgagtttcta

SEQ ID NO: 10323 - DNA, 600 bp, Chicken  19866894206557_4
cttaattcacaagcttcaaggtgcgaaggggttgttagatgccttttctgattcttctgtgtattgcaaagcagtatctttcatctagaccaaggtggtagctccgattctgttaatgtgtggcttcctraatgacatctactcaaggtggaggcatcaagaggaggaaaatcttgttctattagttactccactactaagagcattagaaaggcaaaccctgtttggccattttcagtctagctggcttcagcttccagcagtcacttctgcttagctttcgaagctgaaaaagctcaktgcagcccactggtgcccatctcctccctggcacagtgcagtcgagtcgcctttgataaaccacaagtgctgcccttcctgctgcttcacaatttacgtctgcgttttaaggtctctctgtgagtttctagtccaaatagcacatgttctcctggtatttttgtaatgttaatgttttaatcagcacatcaagcgatagtaaatcatgttccactttcaccagtgggattctcagctgtttgccaagcagctggggaacagtgagattcatcaatcagggattattatttattttttggg

SEQ ID NO: 10324 - DNA, 599 bp, Chicken  19866894206565_1
  misc_feature (1)..(91): n is any nucleotide
nnnnnnnnnnnnnnnnnnnnnnnnnnnnnnnnnnnnnnnnnnnnnnnnnnnnnnnnnnnnnnnnnnnnnnnnnnnnnnnnnnnnnnnnnnncaacaaaaaccccaacatcagcagccatttctgtgccacataagaagtggtgatttcagtgagttacagtcaataaatgtacaattttttaagttatgtgctatgaatgaaaactttccattagcaggtgttaaatgccataagctgcaaaaatgaaaattaacctcaactcacatctataacagctacacacatagctgtacattcaygtccccataaataaagggctaagaaatgaaaaaagaaaaagaagactggcttcacattcacaaaaaacctcaccaaaaaacaagagcaccccctgacaaacatcaattacctgttaacacatttttcaactgagtaacaacctcttagcaacaagattctgtttagagtaaaaattaaacttctacataagttttcagttgctgactacccaaagaaaatatcttttcagtgctgaaattatacatgcatattcaaacacatattagaagctgcttgtccactcctatcaaattacttt

SEQ ID NO: 10325 - DNA, 565 bp, Chicken  19866894206565_2
cagtgtctacattcgtagagagtatgaaattaccctataattttattaagtgagcagcctccataattagcagttacaaacatctggctgcatttcaaattttaaaaaaagcttgggttgcccaccacttcaccagaattgaatgcctatgtattctgctagtaaatagaaatacacgccacttaggccaaaattatatgccagagacacacttacagcagacaaacttttgcacagtacaaacaggagaagaggtaatcacagcctggcacgttttgccagatttctttcaaagcctcwtttaaatgtatgttgcttcgttataataaagagtgtaataaaggtaacttacaggaggtccagtctccccctttaaacctctgctacttcctatttcaaacattttgccttgatcttcatagttgtagttatcaacatcaatataagtgttttctgtgcgataagtcttattagcatcaaatggaccttcttccttcagaccaagctgattatccagggagaggtcagcagtcaaactgtacagagttgtgttgaagatgtgctg

SEQ ID NO: 10326 - DNA, 599 bp, Chicken  19866894206570_1
  misc_feature (1)..(130): n is any nucleotide
nnnnnnnnnnnnnnnnnnnnnnnnnnnnnnnnnnnnnnnnnnnnnnnnnnnnnnnnnnnnnnnnnnnnnnnnnnnnnnnnnnnnnnnnnnnnnnnnnnnnnnnnnnnnnnnnnnnnnnnnnnnnnnnnnnttccactgtcttaatctcttcccggtgagctacccccttatcttaactgaagcctcagcttgtcttcctgctttgacagcttcaaggtctcatagcctgggttgtgcacatagcacccaagctcacagcccattataacaagctagtacttttcccatttgtatctcctrccaattgttaggcctgttctgcttgtacaactgttcaagagacccatgaccccctcggctgtggagccatccctcaacagaatttattatcacagtgtttgcatttttaaaatcatcattttctgtaagaatcatcagttttctttctttttttcttttcttgttttatttctttttggttctaggatgacwtataataaaatcttatttcttttaattcaaaagatcaaattccaactccatgttgagaaacatatttggaggaaattccactgctgacagcttttctttagtttgta

SEQ ID NO: 10327 - DNA, 600 bp, Chicken  19866894206570_2
tcttcctgctttgacagcttcaaggtctcatagcctgggttgtgcacatagcacccaagctcacagcccattataacaagctagtacttttcccatttgtatctcctrccaattgttaggcctgttctgcttgtacaactgttcaagagacccatgaccccctcggctgtggagccatccctcaacagaatttattatcacagtgtttgcatttttaaaatcatcattttctgtaagaatcatcagttttctttctttttttcttttcttgttttatttctttttggttctaggatgacwtataataaaatcttatttcttttaattcaaaagatcaaattccaactccatgttgagaaacatatttggaggaaattccactgctgacagcttttctttagtttgtagacctgcccctaacaaggtttgctgattttctaatggtaatatccagcccttgtagacatacatactaaaattaatgtagcattaaatctcccaacagttccttgtatcaaagggaatactaaccaaacacatatctttatctgaagaactgtatcatcaaagagcaaagttgaaaaacaggaaacaaatacg

SEQ ID NO: 10328 - DNA, 600 bp, Chicken  19866894206570_3
atatccagcccttgtagacatacatactaaaattaatgtagcattaaatctcccaacagttccttgtatcaaagggaatactaaccaaacacatatctttatctgaagaactgtatcatcaaagagcaaagttgaaaaacaggaaacaaatacgaagacaaacaaccctttagttataaatgtacaaagaggtaatgagatatgtaatctgttaaatccttctgtgaagaaagaaaagaggaaagaaggtaaacctcctatactgggcaactctgttagcatccatctgtaatcccaacrtataaaagaatacagagcagctaatagaaaacatgggtagcatcttgagatttcaaaagtcctatattaaaaagctttttgaggctcatgcatcttctctgagctttattaaatttaacttcaccatctgaacttaaaaatcatattatttgaagtatgaactgtctattataacatctgacatggaaaagaatcattctttggtaaatgcccatgatagcttggaggataactgtttctcaggaagggcttgggagtgatttataaccttcattttagaaatgaactggaataaatgct

SEQ ID NO: 10329 - DNA, 600 bp, Chicken  19866894206578_1
cattttggctgtagacattcctttcccattgctccccatgcctggcaggcagctgtgtgtgctgtgctctgcagagtgctcagaatagtgatgttttgggtatttctaggccacatacttcatctgtggtgtaaagcctctgtataactacctcagactccttgttcagctcacaatatgacgtttcttggtcttgcatcttattgactcatagttctgtttctgagatgtccgctgcatgctgagctgctcttcacgagaagtgtatgctctattcatttgattatttctccctgtaayaacaaggtttttgtttcaaaagtgtgcgagcttctctgagtataaaaatgctgcaggtggacacacaccacagtgggatgaaggacaaaattccyacattttgcttctaaaagcactgcaggtgatacctgtaccatgtctacgtgagaatgaacacttstgttatgtttcagtgcagtttttatgtgacttccagggctggaatggtttgatgtcaccaaagatgcagacagcgctcccatactgtgttctggaagctcagctcatagggagagccgagtgcctgcccctaaagtagca

SEQ ID NO: 10330 - DNA, 600 bp, Chicken  19866894206578_10
gtgtatttgagggcacagggcagttccacagaagaaggagctattgaaggttcctaaatgcatggaacccacctctgtcccaagaagttcctgagctgcacatcactgcaaccagggagagtgttcagggaggcaaagtgctgctgtgtgcttacttcattcttacggcttcaggccatcactggagctggaagggctgcaatctggtttgtcggaactgggaagggggagagaaatgaaaataaaacctgtaaaaacagaaaccagcacagctcgtggctcgagttcctgctgcgctgygggtgatgcgctgccttgctgaaggcactgcctgggagatcttaaagcctgcagactattgacctggggctggagagtatatactgggaarctrcagctcgggagggtggtgtgaaggtgcccattctaagcaggaaagctgacattttcccttcccctttggtgtgtgctgttccttgctgctctgagatgctgtgtgttttactaagttacagagactgactgccaatagcctgaatcttcttggtgtgatttcccctctttaaatagtgtttcttgcttgatagtgcactgtaactt

SEQ ID NO: 10331 - DNA, 600 bp, Chicken  19866894206578_11
tgagctgcacatcactgcaaccagggagagtgttcagggaggcaaagtgctgctgtgtgcttacttcattcttacggcttcaggccatcactggagctggaagggctgcaatctggtttgtcggaactgggaagggggagagaaatgaaaataaaacctgtaaaaacagaaaccagcacagctcgtggctcgagttcctgctgcgctgygggtgatgcgctgccttgctgaaggcactgcctgggagatcttaaagcctgcagactattgacctggggctggagagtatatactgggaarctrcagctcgggagggtggtgtgaaggtgcccattctaagcaggaaagctgacattttcccttcccctttggtgtgtgctgttccttgctgctctgagatgctgtgtgttttactaagttacagagactgactgccaatagcctgaatcttcttggtgtgatttcccctctttaaatagtgtttcttgcttgatagtgcactgtaacttaatctgaactaaaatgagtgatatgcagatctgtcaacaatacagtctgtgttccaaatgttttcaaactaaaaatgccatggcctatgtg

SEQ ID NO: 10332 - DNA, 600 bp, Chicken  19866894206578_12
gctgcacatcactgcaaccagggagagtgttcagggaggcaaagtgctgctgtgtgcttacttcattcttacggcttcaggccatcactggagctggaagggctgcaatctggtttgtcggaactgggaagggggagagaaatgaaaataaaacctgtaaaaacagaaaccagcacagctcgtggctcgagttcctgctgcgctgygggtgatgcgctgccttgctgaaggcactgcctgggagatcttaaagcctgcagactattgacctggggctggagagtatatactgggaarctrcagctcgggagggtggtgtgaaggtgcccattctaagcaggaaagctgacattttcccttcccctttggtgtgtgctgttccttgctgctctgagatgctgtgtgttttactaagttacagagactgactgccaatagcctgaatcttcttggtgtgatttcccctctttaaatagtgtttcttgcttgatagtgcactgtaacttaatctgaactaaaatgagtgatatgcagatctgtcaacaatacagtctgtgttccaaatgttttcaaactaaaaatgccatggcctatgtgagg

SEQ ID NO: 10333 - DNA, 600 bp, Chicken  19866894206578_2
ttgggtatttctaggccacatacttcatctgtggtgtaaagcctctgtataactacctcagactccttgttcagctcacaatatgacgtttcttggtcttgcatcttattgactcatagttctgtttctgagatgtccgctgcatgctgagctgctcttcacgagaagtgtatgctctattcatttgattatttctccctgtaayaacaaggtttttgtttcaaaagtgtgcgagcttctctgagtataaaaatgctgcaggtggacacacaccacagtgggatgaaggacaaaattccyacattttgcttctaaaagcactgcaggtgatacctgtaccatgtctacgtgagaatgaacacttstgttatgtttcagtgcagtttttatgtgacttccagggctggaatggtttgatgtcaccaaagatgcagacagcgctcccatactgtgttctggaagctcagctcatagggagagccgagtgcctgcccctaaagtagcagaagagatgagartggttgggctctgctttgttagargaacayttgagtcctttgtgctgtttggtagccaccaccctgacaggagggttctccc

SEQ ID NO: 10334 - DNA, 600 bp, Chicken  19866894206578_3
cttgttcagctcacaatatgacgtttcttggtcttgcatcttattgactcatagttctgtttctgagatgtccgctgcatgctgagctgctcttcacgagaagtgtatgctctattcatttgattatttctccctgtaayaacaaggtttttgtttcaaaagtgtgcgagcttctctgagtataaaaatgctgcaggtggacacacaccacagtgggatgaaggacaaaattccyacattttgcttctaaaagcactgcaggtgatacctgtaccatgtctacgtgagaatgaacacttstgttatgtttcagtgcagtttttatgtgacttccagggctggaatggtttgatgtcaccaaagatgcagacagcgctcccatactgtgttctggaagctcagctcatagggagagccgagtgcctgcccctaaagtagcagaagagatgagartggttgggctctgctttgttagargaacayttgagtcctttgtgctgtttggtagccaccaccctgacaggagggttctcccctttggttggaaccagttgtgggttctttggggagtgagctggtcctccttggtagcctgaaatt

SEQ ID NO: 10335 - DNA, 600 bp, Chicken  19866894206578_4
tttcaaaagtgtgcgagcttctctgagtataaaaatgctgcaggtggacacacaccacagtgggatgaaggacaaaattccyacattttgcttctaaaagcactgcaggtgatacctgtaccatgtctacgtgagaatgaacacttstgttatgtttcagtgcagtttttatgtgacttccagggctggaatggtttgatgtcaccaaagatgcagacagcgctcccatactgtgttctggaagctcagctcatagggagagccgagtgcctgcccctaaagtagcagaagagatgagartggttgggctctgctttgttagargaacayttgagtcctttgtgctgtttggtagccaccaccctgacaggagggttctcccctttggttggaaccagttgtgggttctttggggagtgagctggtcctccttggtagcctgaaattgtgaggtaggcttatatttaaaaaaaacaacaaaacacaaacgttgtcagcactaagcattgtaatgttaaataattcattggctgccttttgaattgtttggttttaatgacctcgcctctttttctctaattctagagacacttctacatt

SEQ ID NO: 10336 - DNA, 600 bp, Chicken  19866894206578_5
gagtataaaaatgctgcaggtggacacacaccacagtgggatgaaggacaaaattccyacattttgcttctaaaagcactgcaggtgatacctgtaccatgtctacgtgagaatgaacacttstgttatgtttcagtgcagtttttatgtgacttccagggctggaatggtttgatgtcaccaaagatgcagacagcgctcccatactgtgttctggaagctcagctcatagggagagccgagtgcctgcccctaaagtagcagaagagatgagartggttgggctctgctttgttagargaacayttgagtcctttgtgctgtttggtagccaccaccctgacaggagggttctcccctttggttggaaccagttgtgggttctttggggagtgagctggtcctccttggtagcctgaaattgtgaggtaggcttatatttaaaaaaaacaacaaaacacaaacgttgtcagcactaagcattgtaatgttaaataattcattggctgccttttgaattgtttggttttaatgacctcgcctctttttctctaattctagagacacttctacattcctgtaacctaaaaaggcttgttt

SEQ ID NO: 10337 - DNA, 600 bp, Chicken  19866894206578_6
aaaaatgctgcaggtggacacacaccacagtgggatgaaggacaaaattccyacattttgcttctaaaagcactgcaggtgatacctgtaccatgtctacgtgagaatgaacacttstgttatgtttcagtgcagtttttatgtgacttccagggctggaatggtttgatgtcaccaaagatgcagacagcgctcccatactgtgttctggaagctcagctcatagggagagccgagtgcctgcccctaaagtagcagaagagatgagartggttgggctctgctttgttagargaacayttgagtcctttgtgctgtttggtagccaccaccctgacaggagggttctcccctttggttggaaccagttgtgggttctttggggagtgagctggtcctccttggtagcctgaaattgtgaggtaggcttatatttaaaaaaaacaacaaaacacaaacgttgtcagcactaagcattgtaatgttaaataattcattggctgccttttgaattgtttggttttaatgacctcgcctctttttctctaattctagagacacttctacattcctgtaacctaaaaaggcttgtttgactcc

SEQ ID NO: 10338 - DNA, 600 bp, Chicken  19866894206578_7
acttccagggctggaatggtttgatgtcaccaaagatgcagacagcgctcccatactgtgttctggaagctcagctcatagggagagccgagtgcctgcccctaaagtagcagaagagatgagartggttgggctctgctttgttagargaacayttgagtcctttgtgctgtttggtagccaccaccctgacaggagggttctcccctttggttggaaccagttgtgggttctttggggagtgagctggtcctccttggtagcctgaaattgtgaggtaggcttatatttaaaaaaaayaacaaaacacaaacgttgtcagcactaagcattgtaatgttaaataattcattggctgccttttgaattgtttggttttaatgacctcgcctctttttctctaattctagagacacttctacattcctgtaacctaaaaaggcttgtttgactcctaatagtgaaactggcgaagggcagaaaagccagatatttcagcctgacaggaaaggttaggttgcctggcaggagacacgtatatgcagactgaattcttatatctgataatcaagaatgtaggaagcaattaggatggattgc

SEQ ID NO: 10339 - DNA, 600 bp, Chicken  19866894206578_8
caaacccagatatgttagtatgactgcaaaagaacaaggtccggtaaggatactgttattttatgtagcatcaggacatcactgaatactgtgcctgtagttgagggaaaaaataatggattgaaatattcataaagaatatgtggtagaataaagagggcaaacagtctctatcacaaggaatagccttcgttagggtgggtgagatgaagtataaggaggtcatttgtactttcgaagtactgatgcagagagaattcttgaaaaatgcccactgttctgaaggaagatcatagaatygtaggatggccggggttggraagcaccacagtgatcatggagttccaaccccctgctatgtgcagggtcgccaaccaccagaccgggctgcccagagccacatccagcctggccttgaatgccagaagatgcagttgaatgctgtgttagaggagcagcagctattttttgcctcttccttgagtgtgggagaagcataagtgtgaataggcattgaacggagctaggtgtagtaggcttaaaaacaaataaaggactcagtccttgatgtgtgcgggtagcctgggaagctccttgcca

SEQ ID NO: 10340 - DNA, 600 bp, Chicken  19866894206578_9
tgactgcaaaagaacaaggtccggtaaggatactgttattttatgtagcatcaggacatcactgaatactgtgcctgtagttgagggaaaaaataatggattgaaatattcataaagaatatgtggtagaataaagagggcaaacagtctctatcacaaggaatagccttcgttagggtgggtgagatgaagtataaggaggtcatttgtactttcgaagtactgatgcagagagaattcttgaaaaatgcccactgttctgaaggaagatcatagaatygtaggatggccggggttggraagcaccacagtgatcatggagttccaaccccctgctatgtgcagggtcgccaaccaccagaccgggctgcccagagccacatccagcctggccttgaatgccagaagatgcagttgaatgctgtgttagaggagcagcagctattttttgcctcttccttgagtgtgggagaagcataagtgtgaataggcattgaacggagctaggtgtagtaggcttaaaaacaaataaaggactcagtccttgatgtgtgcgggtagcctgggaagctccttgccacaggatgttgtgaatgccaa

SEQ ID NO: 10341 - DNA, 600 bp, Chicken  19866894206584_1
ggttccttttcttgaaaatgactggaagggagattatttatttttaatcttgatgtgataattaagcaaagataattaactacaagatcttaacaactttatgacagtaagggaccagtaggaataactactacaacaacagtcaacatttctatgctgtgtttacaagattaatatacaaccacaaaaatttgttgcagacagaaaccttggcattaaaagaggaagtccaggatattttttttcttaaacttgaatttaacctatttggtcattttaaagtaggaaaaagactttgcwgttgttttaagatagacattcctgacataattctggtttcagagtatttatggaattatggaggccacaggactctgccccttaccttgccyccattctgcctctcttcagcaaacttttttttttgcacttcatcacagcccatgacagggacaaataaaagcataattgtctttattcttcctcattttctcttttgttcgattaggcattcgcaaaacctggtaactgatgcccgttgactttgatagcagagggtttctttgagaacttctggaaaatttcaytttagttatgtat

SEQ ID NO: 10342 - DNA, 600 bp, Chicken  19866894206584_2
acaactttatgacagtaagggaccagtaggaataactactacaacaacagtcaacatttctatgctgtgtttacaagattaatatacaaccacaaaaatttgttgcagacagaaaccttggcattaaaagaggaagtccaggatattttttttcttaaacttgaatttaacctatttggtcattttaaagtaggaaaaagactttgcwgttgttttaagatagacattcctgacataattctggtttcagagtatttatggaattatggaggccacaggactctgccccttaccttgccyccattctgcctctcttcagcaaacttttttttttgcacttcatcacagcccatgacagggacaaataaaagcataattgtctttattcttcctcattttctcttttgttcgattaggcattcgcaaaacctggtaactgatgcccgttgactttgatagcagagggtttctttgagaacttctggaaaatttcaytttagttatgtattctgtacacagcgagtactttctatgcctacacgtaatgtatattaggcaccctatgacatcctgaaagccatcctttttccctcagtcatt

SEQ ID NO: 10343 - DNA, 600 bp, Chicken  19866894206584_3
aaaagactttgcwgttgttttaagatagacattcctgacataattctggtttcagagtatttatggaattatggaggccacaggactctgccccttaccttgccyccattctgcctctcttcagcaaacttttttttttgcacttcatcacagcccatgacagggacaaataaaagcataattgtctttattcttcctcattttctcttttgttcgattaggcattcgcaaaacctggtaactgatgcccgttgactttgatagcagagggtttctttgagaacttctggaaaatttcaytttagttatgtattctgtacacagcgagtactttctatgcctacacgtaatgtatattaggcaccctatgacatcctgaaagccatcctttttccctcagtcattttaactcttccagccgatagattttcagctattcctggaataagcggcctgttgtgaagagaatagcagcagaaattgttctagtcatatttctactggtctgggaaataaatctttagcttctgcctggccaatacctcatgacttaaacaattttaacatgataagggaactcagagaaagagagagtatttg

SEQ ID NO: 10344 - DNA, 600 bp, Chicken  19866894206586_1
ttgaatgaaaattcacagtgctgaagtcatggctgtgctgcctacactgtaggaaacaacctctgcgttaggtgagtcagccctaagtcatacagcaggagctgatctgcgctgcttggggctggactgcttcattgctgacggcagtttgaggcctggtgcctattttctggctgtttagtttcaataaatgttccattagggaggagaccttccaaacacagactgatattctacctgaaagattgaaaatcacagatttctgtgttcaaaatgaatgtggatccagaatattgattrtaacsaagtggtaccagcgggtacctgcttatcctaccgttactttccctgttcttttttccttgtaagtataagacagatacattagactgactttacaatagcatagacaatatttttatgtccatgttgacttttttttccaagagtttgattattgcttgaattgtgtattattaataagagttgtcatatacaccttgaaccaaagacccattcagttgtgttggtgctgaaaggaaccactacattcaggccgattaaaarctctcatagaacagaaaaaaaaaatcaataaag

SEQ ID NO: 10345 - DNA, 600 bp, Chicken  19866894206586_2
tgaaaattcacagtgctgaagtcatggctgtgctgcctacactgtaggaaacaacctctgcgttaggtgagtcagccctaagtcatacagcaggagctgatctgcgctgcttggggctggactgcttcattgctgacggcagtttgaggcctggtgcctattttctggctgtttagtttcaataaatgttccattagggaggagaccttccaaacacagactgatattctacctgaaagattgaaaatcacagatttctgtgttcaaaatgaatgtggatccagaatattgattrtaacsaagtggtaccagcgggtacctgcttatcctaccgttactttccctgttcttttttccttgtaagtataagacagatacattagactgactttacaatagcatagacaatatttttatgtccatgttgacttttttttccaagagtttgattattgcttgaattgtgtattattaataagagttgtcatatacaccttgaaccaaagacccattcagttgtgttggtgctgaaaggaaccactacattcaggccgattaaaarctctcatagaacagaaaaaaaaaatcaataaagcctaa

SEQ ID NO: 10346 - DNA, 538 bp, Chicken  19866894206586_3
ttcaaaatgaatgtggatccagaatattgattrtaacsaagtggtaccagcgggtacctgcttatcctaccgttactttccctgttcttttttccttgtaagtataagacagatacattagactgactttacaatagcatagacaatatttttatgtccatgttgacttttttttccaagagtttgattattgcttgaattgtgtattattaataagagttgtcatatacaccttgaaccaaagacccattcagttgtgttggtgctgaaaggaaccactacattcaggccgattaaaarctctcatagaacagaaaaaaaaaatcaataaagcctaaaatcctctataatattgttacaccagcatgtgtagaaagcagtagtatgtagaggctgtgtgcaactatgcatttggggtgtgtgcatgcatttatacagttagataaaatatgcatgtggatacaagtatgcatatgtatgcatatgtatacatatgcacatgtgtataatttatgctatatacacatacacgtatgtg

SEQ ID NO: 10347 - DNA, 600 bp, Chicken  19866894206587_1
tctgggtaaccttttcctaattccagtgatctgttaccaccttcctgcatcacaatgctttcaggtagaagagaaagctaactcagggcagtctcccttggggtcagctgcatgaagcagtacttcagggctcagttaagaggggatgcacttagcacagatggtttaggtgcatagccaaacaggagccacagtgtgttagtaggacatttcagtgagactgataaagctgaggacacttcaactgatcttttaatatattcagatatgactcagaattgggataaaataaggtcagtrccagtctgctagtggctacaaacgcagactgtttatgtgagtttaattttaaaggttatttgtaatctcttatttcttagctctttattcttgctgccctgcaacagcacaagttccacttaacagaatatttgagcaaatatcatattagtacaaatcctgtggctacttaacacacatctgctgtttggaattgtaattaactcatttaaagtgttttaaagaaataaaaatggagatgtgattgaacaaaaaaggactcaagtctgcagggaagtttgacgtgaggatagagtgtca

SEQ ID NO: 10348 - DNA, 600 bp, Chicken  19866894206597_1
tttcaagtcatgctggacacaaaactgggcactaatattcatgaattcagagacctttatttggcccactgtctagaaaataagaagtgatgcagcactaaaaacataaacaaatacaaattctgaaaacagctgtcttgttatgaagaggttacaactcaaaagagtaactggcttcctgggaggtttgtgtgaaacatggcaagatcttgaacatcatagtagagactaccagttgtttcagtcaattaatttgagaacatcctgattctcccaagtctctctcctacattctgctckttaatgcttagtaccttatacatcatttcattagaaactccagagccttaagctctggctcagagctttccttagtcatcaccagaaagtagcatgttacgcactccaggctgtctacagctactcactggtactcctgtgctctgccaggagctatgctcacacagatgctttccagcatgtctcaaacagaacgaaccagatttgcaaaattctcagctcaatctcctgaatgccactgatataccatggggagtacccaccactgccagaggtggagacggtaacaggggagcaggt

SEQ ID NO: 10349 - DNA, 599 bp, Chicken  19866894206601_1
  misc_feature (1)..(204): n is any nucleotide
nnnnnnnnnnnnnnnnnnnnnnnnnnnnnnnnnnnnnnnnnnnnnnnnnnnnnnnnnnnnnnnnnnnnnnnnnnnnnnnnnnnnnnnnnnnnnnnnnnnnnnnnnnnnnnnnnnnnnnnnnnnnnnnnnnnnnnnnnnnnnnnnnnnnnnnnnnnnnnnnnnnnnnnnnnnnnnnnnnnnnnnnnnnnnnnnnnnnnnnnnnnnttaccaaacactggaactgcatctgccagaacaatagctaattaccaactgagattaattgttttcatccttttttgtttagcccaggttatttargactgcctgttcagatccaaaggcacacaggtctgtgttttgtttgctgtgtatgtacatgccagctgaccaacagatttaatcaaaaacatacacatctgcaaaactgagattagaaatctgttctggagcagtgaggttttttttcctctcctgaaagttaattgtaagatactgagaccactggaaacatcagtatgatgtggtgttaatgtacagtaaatttattattcaggcataataattsgttctttaaacagaaaatttgaagttatgtcacagtaggtaattttttcata

SEQ ID NO: 10350 - DNA, 600 bp, Chicken  19866894206601_2
accaactgagattaattgttttcatccttttttgtttagcccaggttatttargactgcctgttcagatccaaaggcacacaggtctgtgttttgtttgctgtgtatgtacatgccagctgaccaacagatttaatcaaaaacatacacatctgcaaaactgagattagaaatctgttctggagcagtgaggttttttttcctctcctgaaagttaattgtaagatactgagaccactggaaacatcagtatgatgtggtgttaatgtacagtaaatttattattcaggcataataattsgttctttaaacagaaaatttgaagttatgtcacagtaggtaattttttcataagtcagaatagctcctagtattaatatgaagtttttttgtaatgcttatttcattgaaaaggaaggagaggagggaagagttgctttttttctttaattactcctacaattaattttgcttattggggctgcttctgttagttccatgtatgcctccactacattcagaataatcaaatgacttgtatggtattgggcacatgctgcaaataaaatcaaaatgtggataatatgaggattttggagaa

SEQ ID NO: 10351 - DNA, 600 bp, Chicken  19866894206606_1
ggcgctcgtaggtggttgtgttgctgcgcgccgtctgcggctgctgcgggaacatggcgacgctgaaggccgtgtgcgtgatgaagggggacggccccgtggagggggtcatccacttccagcagcaggcaaggccaggcggcgggcggggctctgtccgctctctgtccggcagcggtgctgagtcatcgcgcggggtgggcgggcggctgcgggcgtcggagagagcggggccgggctgctgccgtgcgccagcgggtcggtgctggccgggggcggggcggttcctcgggtgcccgyggggagggggtgggagagcccggggttggggcagctgggggttggggacagggtccgcaccagagggtggtgggcatggaacgggctgcccaggggctgtgggcacggccctgagtaccggagttaaggagagtttggataactcagccgtgcattctgatattcgggtagagtgcttggcgctcgcttccagctcacgttattctgcattggtagctgagttttgattgacctggaagcttctctcgtaatgaggctctttgatgctgtagtcgtgtcagtagtaatcagctctttgca

SEQ ID NO: 10352 - DNA, 600 bp, Chicken  19866894206613_1
ctctggaaaggccatgttctgaaatgtcagaatatttgttctttctcttggggataacaggtcagtgactccatcaggtgttcaactccaactgtttcacttaaaggttggtccttctcagtgtcatgttggtgtactcattaattcctatttcatgcagatatgatttgaaatgttcgtgatgatcttagacaaagctacgacaccatccccttactttgcatgttatttcagacagtcctcagagaaaaggtgattgatggcagctttacttcagggtccagctggctgatctgatcrtgagaagtgtgggtgagcaagtgcagaagaggcagaggtgatgatgtgcctctttagaggatgtgtcactggtgggacctgctgttccatcaaagccaattcagtgtgtgctttgaagtatcacacgttacccatctccaccaacacagaatgaaatcaaagacctctggtctcttcctattattctgtaggtttcttctcttgggttatacttgtaaactacccaactaattcataagttaaaatgatgattttgtgcatcttgtatttcacgtttccttcgctgaattgtttgttcct

SEQ ID NO: 10353 - DNA, 600 bp, Chicken  19866894206631_1
cactgtgttttgttataatctaaaatttattaacaatcagtctactagaatctctggtgacaaatggatcattttctttgtagaaggtgcatactatgaatatattctattacaacaattctttcttgtatcttaaattcacccaggcagaatttttaggccatgtcatcttgtgttgtggagaatgaccttgctgtgggggaagcttctgcaagcactgattagcatttagcacccagcagtttcaggaaggctggtactgactgcctttgaaaacctacccatcagttctgcctaacrgcrcaagtccaagctctcaccaggcctctgtgcctgcatggaaatcctcccacttatatagcagcaactctggatgatggctgtggcatcccttacaatgctgtattcatatacaggagatagtgttctacagagctgtatttttgcattggctgaacaaaaccatgacctctattgagcagaggagtcattacaaattatcatgctctaaaaaagcagaatcaagctgatcaagtagccgagtccagctatatggatcaaattcactcttctctgaagtagtaaaccatcagatcatta

SEQ ID NO: 10354 - DNA, 600 bp, Chicken  19866894206631_2
tgtgttttgttataatctaaaatttattaacaatcagtctactagaatctctggtgacaaatggatcattttctttgtagaaggtgcatactatgaatatattctattacaacaattctttcttgtatcttaaattcacccaggcagaatttttaggccatgtcatcttgtgttgtggagaatgaccttgctgtgggggaagcttctgcaagcactgattagcatttagcacccagcagtttcaggaaggctggtactgactgcctttgaaaacctacccatcagttctgcctaacrgcrcaagtccaagctctcaccaggcctctgtgcctgcatggaaatcctcccacttatatagcagcaactctggatgatggctgtggcatcccttacaatgctgtattcatatacaggagatagtgttctacagagctgtatttttgcattggctgaacaaaaccatgacctctattgagcagaggagtcattacaaattatcatgctctaaaaaagcagaatcaagctgatcaagtagccgagtccagctatatggatcaaattcactcttctctgaagtagtaaaccatcagatcattaatt

SEQ ID NO: 10355 - DNA, 600 bp, Chicken  19866894206634_1
aggcctgatgtcacagccacggctagaagtacttgcttattaaaagagcagcactttttctgctggcagcttatgttttacttgctaactatgtctgtattgaaatagatgacaaatgtgttctagatgacctcattgaccagcatgtttctgcttctgctgtctccagttattaataaattggacaatatggtgaataattgcagcctttagaactaaaatgtttgcaacagtggcaaaaatacctcactgcaatatattgtatgcagtcccttgcatgcagtagcttcaacattgccraggaatcctaacaaacagcttgtgaaatcctttggttatgaatgcatactctcaagtgagttcagtctgaaatgagtttggattggtttattcaaaataaatctttcctgcaatcagaagtatcttactgatgctaggtttcacgtggatacagattgaactgtaattaataaaatccctgacttgtttgataatagtggcacagctgtgttctcttctctcccttgccacatattgctaacatacgtttatcatcttactccaatttaccattaatatttcacagtgttgaagggagga

SEQ ID NO: 10356 - DNA, 600 bp, Chicken  19866894206635_1
ggctgcttgcatttgggtttgttctcatttgctgtagctatagactttgccaccctgctattatcatcccgtttagcattgcagataataaaaagaacagctttggctttttccatacttctctatacttacttctatataaattttatttctataatactattactttttctacagtatttttgctggtatgttgcagttaagtaacatccactggatcctgctggcacagcagggactctcggagatttaatgatacccttattcatcagaaggaaagctttgctgccttttttcagrttttttttttttttaatccagatttttcattttccattagacgtcctactgaaacgctattattctactagtgctgaattaaaatattttcttagcaaagataaactctatctgcatgtgtgtgtgtatgtagatgttcaataatgtcaaagactggaatctaagtctgtaagtgcacttctagtatgagttcatagatattaatagccccttacggaagtagtgtgtaccgaataccaataactcaacctgaatcactgagaactttccagatatcagaaggtagcatgcaaaaacaac

SEQ ID NO: 10357 - DNA, 600 bp, Chicken  19866894206638_1
agtgcagattcttacagtaacaaaataatggtgtgggtaacagcaaaaggaattttcatttcaccagtgctttcagtgagcaactaggaagcctttgagaaaggattgtaaataccacaccttcttccctctagagaaaatacttggataacaaagtagcagggaaccaacacctctcatcacaaatctctgaggtgaagctacatttctcagacttattttcttgaaatagtcaaaacagaaacataatgacatttttctttgttccttcaattctctttgctcttttcattgtttccraagcatttagatttataatcttctccttccaaggttaagtaagtcaggaaatgcaaaattacagtcttgcagaaaagctccttataagccctcctctcagcagagggttactgtctttcaaaaagctcgcttggtttccttgtacaggctaaattcctgcagttactattactccagagcagcccaagtcctctacatcagcctgctctattcaagctagcaacaccgtctctctcgaaarcacagaactgtaaagacggttcctgctgaaggcagctgagtggagtactggggagaagg

SEQ ID NO: 10358 - DNA, 600 bp, Chicken  19866894206638_2
aaacataatgacatttttctttgttccttcaattctctttgctcttttcattgtttccraagcatttagatttataatcttctccttccaaggttaagtaagtcaggaaatgcaaaattacagtcttgcagaaaagctccttataagccctcctctcagcagagggttactgtctttcaaaaagctcgcttggtttccttgtacaggctaaattcctgcagttactattactccagagcagcccaagtcctctacatcagcctgctctattcaagctagcaacaccgtctctctcgaaarcacagaactgtaaagacggttcctgctgaaggcagctgagtggagtactggggagaaggactgtgtctcctccttataactatgagttctccaggcaagagtttgaaacaccactttggctcacaactgaactgaatgaaacaggcgactgcagctacacactgccacccctccttgaatctaggctgattttctagagataactgtgacaacaggatattctttaaatatcctccctggaggaacatgtattcatattattttagcatacagacagaactaacggagaattacatttgg

SEQ ID NO: 10359 - DNA, 527 bp, Chicken  19866894206640_1
actgctttctccctgcactgatttcagtgatgtgctaaaaaccagtaaaagcatttgcttggtatctctagccaggtagcgggaagtggcccacatttctgaaattgggagcaaagaaactttgttggcatgcatttattttcagctaggcacagtcatcttagacccgagactcagtgatacggggtagattcatactgtgaccacagctaagctgaggagtttctgtgtgccagcagctgagccggtcctgctaaggcagaagggtctccagcaatgactggggtccgcacagcttcrgtggcagtatgagtttgagctgtgcttgtgaaattctccagaaactcttaattactggcaggtagtcttcctttttgtgcatatggacgaaacactgagcttttgtttaggtgagacgaaggttttcagaaagtatcttggtgggtttttcgtgggttttttttggggggggagggtgttgcaggaagagtaaaaaatcacatagcttcaccatgcatgcttctgaa

SEQ ID NO: 10360 - DNA, 600 bp, Chicken  19866894206641_1
gcactcacttctgtgccagatcagagcttgatatggaaagactcatgtcctaaatgttctgctccattagagatgtgatagattactcctcctaaatatcttagcataattctagcccgggcaagacatcccctggcagaataacctaagaatcttttcagaaaatacatagtagttaataaaatctatttctccctgctattagtgcatacctggtcacagggccgtatttagaatagttttcctttttctaaaggccaaattttggaaagagctcggagtaaagtgtctaactctcaygttcctcatggctttggacaccttttggacaccagccatctttctgtcctgtattatcctgttgagcactgattcacatctatatttcaggcactatcatgcagtaaatagtaatgattattagcaaatgtacatatcaccccgaggcactgaaactagtcaggagagatacaaaagtgagttcaaataaattctgaaacatctctcaactacttttttgaatgctatgactacaatagcttgtaatgatgaaatcagcacccgtttgggatggttttgaactccagttagggagaagtc

SEQ ID NO: 10361 - DNA, 600 bp, Chicken  19866894206643_1
tctcctctgccaaacaagaaagtactcacacatacaataaactaacttttcttttacaaacagagttctacagtactgctcatttaagtacaagaactcacacatacaatggatattattttactaaccccataaaaatcactaaaaacaagaataatgcactgaaagtactccaatccattactttacctgtctctgacatagttcatttttctcttggtaatactaaatacaggtctaccagcaataatagttctcttcagccagtaattcagcaaaactgtactcttaccttggcayacagcacttaaaaatttgatttttagtttctgagaaaaagattcctccaaaccttcccaagatctttgcttgcaaattccaacaccttcatgtggaattttttyatattttattagcatctgaaagaagcaatgtctgagtcatttgcatgtcttctgctggattctgttccaaccaagagcctaattacagacagccacatgagtaatttctgaaatgagtaagtgctgttggagctaaagaggctattgatctgactaaaattatttacagaaacataaaggcagtgaagaacactta

SEQ ID NO: 10362 - DNA, 600 bp, Chicken  19866894206643_2
tacaatggatattattttactaaccccataaaaatcactaaaaacaagaataatgcactgaaagtactccaatccattactttacctgtctctgacatagttcatttttctcttggtaatactaaatacaggtctaccagcaataatagttctcttcagccagtaattcagcaaaactgtactcttaccttggcayacagcacttaaaaatttgatttttagtttctgagaaaaagattcctccaaaccttcccaagatctttgcttgcaaattccaacaccttcatgtggaattttttyatattttattagcatctgaaagaagcaatgtctgagtcatttgcatgtcttctgctggattctgttccaaccaagagcctaattacagacagccacatgagtaatttctgaaatgagtaagtgctgttggagctaaagaggctattgatctgactaaaattatttacagaaacataaaggcagtgaagaacacttactgcagatttttgcaagaaagatttcagtgggtttctactgacaagtgaaggtgtccttcctttccagcaaaagcagggattattctcagaagcagaccatgtc

SEQ ID NO: 10363 - DNA, 600 bp, Chicken  19866894206646_1
acagcacacgtagggaggaaacatgttttgttacaactaaaaattatcagaagagtgctgcagggttgttaaatttaacactgtcatggctttattcaaaacacagttgcacaaaatcagttactccaaagtttaaggaaagagtctgataaggaaccaaaacgcactatatacatactgccatacaaagagcattgaaataggacaaaacctctacaaaatataaaacccacccctacgtattcgcatgaaaagaccacccaccaagcaaaaaagtttcaaaagttatctggaggctcygtattatttattttttaaaaaaatgctatgctgtttaattgcatgccaagctgacaaatatgaaatgatacttagatggtaatgctgaggaaaagacaaaattacttaggaactaagtttcatgtgaggctcagattttttagatgtagcagctgatgcactatactgcaagttgatttaggaagtgttaagtctgcatatcttagggaaagtctgcttaccccttctaagctcattttgctttgttacattagctcattcaatgttaaaattggacctgtttactgaaacatgactggt

SEQ ID NO: 10364 - DNA, 600 bp, Chicken  19866894206646_2
aaaacaactgcctcgaacacagagcctccatgacaagataggatgtgcacttacctaagatttctattcattcagtattcatacacaaacacaggaacttagattgtggttgcaaatgtagtttcaccactacttttctagtgtctttacagatattcattaaaaactgcacaacttttagtcagtttatttccaagtatattgccatctgcctgactcatttcattcagacacctttaatggctggctatgcttcacagctacacgagaaactgtaatttaaggctctatttggggggyaaaaaaaaacacacacacaagaaattgggctttgcagaacaacttcaaccctgcagtgtctaaacttaagagctggaagtcacatttaaaaagtctgctagtgtgtgaaataccttattaaatattcacaagtaaccagtctatgggtgactgacttttacttaggtccaggaaatctccctcctccccacccttggtgtctcccccagcttaatgacagctatcgtcagccaagacagatataaaaataagtctcttgaataaagctgtgtgtgatatttggttcagtacctacgtgaa

SEQ ID NO: 10365 - DNA, 600 bp, Chicken  19866894206649_1
ctcaccatcaacatgctcatagggcagccagtggtgcttcgtgttctggtactcaaagtacggatcccactgcctgcactgctcctctctgaaatcctcaaagtccttggggcaatcctgagtgttgcagagctggaactcatagctcggccctacgcacgtgcggcctccgttggctggactgaagaggacagaaagcaatggttagtttggtcattaacacgagctgaacgtctaccaaaccctttgagacacagtctagcccccatccatgtcaataggaacttgatgaagccagcratgtatttccagtactcccttctagcattttatcagcacttcatctagtttaatgatcgctctggtgtttgctttctgttgggaggtgcctctggaaaggtttctctcaatatacgtcattacagctgggataaaagaagcaatcatttaaaaacccgctgtcaccatttctctttcacagagcagtttctgcaagttgagcctccaagcacttgaagtagaaaacaaaagtcattttcttggtgtggttcaggaaaggaaagcgcaagcaggtgaagcgactcactcacattgcttcct

SEQ ID NO: 10366 - DNA, 599 bp, Chicken  19866894206654_1
  misc_feature (1)..(96): n is any nucleotide
nnnnnnnnnnnnnnnnnnnnnnnnnnnnnnnnnnnnnnnnnnnnnnnnnnnnnnnnnnnnnnnnnnnnnnnnnnnnnnnnnnnnnnnnnnnnnnnntgaggttttgttattgagttcttttaactctgcaggtatggcttttttttctgcgtgcgtgctgttctcttacgctgagggctgtctgtaacatgaggcaatggagagcatatcgttctcttctcgatcgctccgctccgctggtagatgtgcggctggggggtgtgaggcggtgcggggctgtcccggcggtgcacagcgccyatggaacctttgtctgtgcgggactgggatgggagtgctccgaaaggcttccagggtgcttcggatcgaaggccgctttaagaggaacgactgaaacagagcagaatatctctgagttgctctattttgtttctagtaccacaaaatgatgacttggcatttaaggcttttcgaggcaatttgtggtgcgttgttttctttttttyccccactctttccgacgtctgccaaagttctcttaacttgcttgcggtgtcatgtgatacctgcttagtccttgggttagatagaataaatct

SEQ ID NO: 10367 - DNA, 600 bp, Chicken  19866894206654_2
tatcgttctcttctcgatcgctccgctccgctggtagatgtgcggctggggggtgtgaggcggtgcggggctgtcccggcggtgcacagcgccyatggaacctttgtctgtgcgggactgggatgggagtgctccgaaaggcttccagggtgcttcggatcgaaggccgctttaagaggaacgactgaaacagagcagaatatctctgagttgctctattttgtttctagtaccacaaaatgatgacttggcatttaaggcttttcgaggcaatttgtggtgcgttgttttctttttttyccccactctttccgacgtctgccaaagttctcttaacttgcttgcggtgtcatgtgatacctgcttagtccttgggttagatagaataaatctatctgcaatgctttctgtgttgacgtcccgagtggtccgagtgtgcttggccctgacagtgggagtagtttccagagcgctgctttagaatgagcagagggaaaagggcaaaggtgcaccgtgttttactccaggtccatttcctttgctgattggttcctcctcttttttttccttcctttgtaaataagtgctatacctagccaa

SEQ ID NO: 10368 - DNA, 599 bp, Chicken  19866894206655_1
  misc_feature (1)..(64): n is any nucleotide
nnnnnnnnnnnnnnnnnnnnnnnnnnnnnnnnnnnnnnnnnnnnnnnnnnnnnnnnnnnnnnnncctggctgtgttggtgtgagctgtgtgtggtgttctgagttcccctgtctgagttcccttttgctgtttgccctctgggccaccgtgtgcctccttagcagtccgtgtccctcagtgtgtgaggggctgctaaggtgcagataaagatttgtggttgtggaatgggaagtgggaggctgtcagttctcatcgcaaacatctctgtgtgctccctgtagcgaagaagacctttattrgacagaacaaatcattctttggtcctctggagctggtggaaaagctgtgtcctgaagcatcagatatagcaactagtgtcaaaaatctaccagagctgaagtaagttccttgttgggaatcgtgtgtttcacttactctgctgggaaatacaatcctttgggtggtttcttagcttcattaatgagatctcattccaaagagaaaaacagagtatgtaggaggcattgagtgctcccagagataaggagactgtctcataatattccgctcttctgtttcacatagtgcagtcacattc

SEQ ID NO: 10369 - DNA, 600 bp, Chicken  19866894206658_1
ttgcactgaaatgtacattgctgcacaaatcatcccatagctgtggcaatctgtcggggatggtcctggcaagtttaagattttatctgtactgaatcctgatacatcttcaaaacagtcgcgttagaaaagccatgtatttgtatggctgcttcttgcagcttagtggaaaaattcttcagacctttgtccagtaagaaaaaatagtgatgtcctctgtacctgtcgtcagtgtattttcagttactttatttctaggtttcaaatgttttacttaatctgtgtatttcagacagattrctgatgtttattagttttcagcttcttaaatgaagaatcaaaagctgtaagcgttgaagtraaatcttgaagtaagagggagatgggtgtgaagggtggactacaacacctacaggyggttctcccttttcaggaaggaggcaaaaatagtcagcatggagcacagaacaaggaatggaagactggaattctagaysaaactcctacaatttttttggcacagtgatatgaaacattctgttcctaggtttattctttgataaactgaaggtaacactaatatctacctcacaggggtac

SEQ ID NO: 10370 - DNA, 600 bp, Chicken  19866894206658_2
ggtcctggcaagtttaagattttatctgtactgaatcctgatacatcttcaaaacagtcgcgttagaaaagccatgtatttgtatggctgcttcttgcagcttagtggaaaaattcttcagacctttgtccagtaagaaaaaatagtgatgtcctctgtacctgtcgtcagtgtattttcagttactttatttctaggtttcaaatgttttacttaatctgtgtatttcagacagattrctgatgtttattagttttcagcttcttaaatgaagaatcaaaagctgtaagcgttgaagtraaatcttgaagtaagagggagatgggtgtgaagggtggactacaacacctacaggyggttctcccttttcaggaaggaggcaaaaatagtcagcatggagcacagaacaaggaatggaagactggaattctagaysaaactcctacaatttttttggcacagtgatatgaaacattctgttcctaggtttattctttgataaactgaaggtaacactaatatctacctcacaggggtactgtgagggctaattcagcactgttttaaatctgagactcctatatggaagatgctaaagga

SEQ ID NO: 10371 - DNA, 600 bp, Chicken  19866894206658_3
gtcgcgttagaaaagccatgtatttgtatggctgcttcttgcagcttagtggaaaaattcttcagacctttgtccagtaagaaaaaatagtgatgtcctctgtacctgtcgtcagtgtattttcagttactttatttctaggtttcaaatgttttacttaatctgtgtatttcagacagattrctgatgtttattagttttcagcttcttaaatgaagaatcaaaagctgtaagcgttgaagtraaatcttgaagtaagagggagatgggtgtgaagggtggactacaacacctacaggyggttctcccttttcaggaaggaggcaaaaatagtcagcatggagcacagaacaaggaatggaagactggaattctagaysaaactcctacaatttttttggcacagtgatatgaaacattctgttcctaggtttattctttgataaactgaaggtaacactaatatctacctcacaggggtactgtgagggctaattcagcactgttttaaatctgagactcctatatggaagatgctaaaggaaatttaaaaaaatcattataaaatgcaatgtttttagctgttatgaatgtcacttg

SEQ ID NO: 10372 - DNA, 600 bp, Chicken  19866894206658_4
agaaaaaatagtgatgtcctctgtacctgtcgtcagtgtattttcagttactttatttctaggtttcaaatgttttacttaatctgtgtatttcagacagattrctgatgtttattagttttcagcttcttaaatgaagaatcaaaagctgtaagcgttgaagtraaatcttgaagtaagagggagatgggtgtgaagggtggactacaacacctacaggyggttctcccttttcaggaaggaggcaaaaatagtcagcatggagcacagaacaaggaatggaagactggaattctagaysaaactcctacaatttttttggcacagtgatatgaaacattctgttcctaggtttattctttgataaactgaaggtaacactaatatctacctcacaggggtactgtgagggctaattcagcactgttttaaatctgagactcctatatggaagatgctaaaggaaatttaaaaaaatcattataaaatgcaatgtttttagctgttatgaatgtcacttggctagttttgaaaactgctattgcaaaaaatctatttatgtatcttaatttctttaccaagttaaataaattatattta

SEQ ID NO: 10373 - DNA, 600 bp, Chicken  19866894206658_5
gaaaaaatagtgatgtcctctgtacctgtcgtcagtgtattttcagttactttatttctaggtttcaaatgttttacttaatctgtgtatttcagacagattrctgatgtttattagttttcagcttcttaaatgaagaatcaaaagctgtaagcgttgaagtraaatcttgaagtaagagggagatgggtgtgaagggtggactacaacacctacaggyggttctcccttttcaggaaggaggcaaaaatagtcagcatggagcacagaacaaggaatggaagactggaattctagaysaaactcctacaatttttttggcacagtgatatgaaacattctgttcctaggtttattctttgataaactgaaggtaacactaatatctacctcacaggggtactgtgagggctaattcagcactgttttaaatctgagactcctatatggaagatgctaaaggaaatttaaaaaaatcattataaaatgcaatgtttttagctgttatgaatgtcacttggctagttttgaaaactgctattgcaaaaaatctatttatgtatcttaatttctttaccaagttaaataaattatatttaa

SEQ ID NO: 10374 - DNA, 600 bp, Chicken  19866894206659_1
aagtattagaaaagcagtcagcatagcataaactccgtttatgatataatacattacagatgtcaaatagtgcttcatttcaaatacattatctggtgatgcatgtaaggccaacagaggaagaaacacttttttgatgctgatgttatactttgatattttaatgtagcattttcagctaaaagaagaaaaggaaggcacctgtaaggaccccacagcttttcagtttggaaacatgaatttatgtgatgttaattggatgaaactgtaatagctaaaagtggcagtctccacatagartggtatctattcctcctgcataaagcctaagcaattaggttttgttaccaataaaatatgaagacgcaaggtgaatgttttgcctccatcaccatcccgagaccctataacaccagcaatccacagccaagttatttctttagagtgcctctgttgaaagatcaactgctgaaaattcagccatgggagtatgcttcaaatgacttccaaatgacaggctgagagagctggggctgttcatcctagagaagaggaggcttcaagatgacttgatagtggcttttcagtatctacaggggg

SEQ ID NO: 10375 - DNA, 600 bp, Chicken  19866894206660_1
ttgaatcaaattaattgacaaatctttgccagcagagatcagaattagcattgctttgagatgtcgttcaaaaggagattggatgggatttatgagactggaagctgtctgctgcactaaagctgtcccattaagctgaggccaggctcaggggtgcagctgtctctttgtgagcacgctgtccctgccctgtcctttatactttagtgttcttgttatccagcagtcagctgatcagttctttccatctcttcaaaggcaaggtcgcaggaggaatcaacctacgtggccacaaacaargcagccttcagaaaacagagctagcaactgacgttttaaggtactagtgtaaattttcagccaartaaaagtgacaacagctctgatgtaatctctcacatgcatggtgctatccccaggcagtcacagctcactgcacctgggctcactcagacaggaggtgtttatggcaagtaayattgctgctttgtggtacaaagagacatgatcagaactcgatggcacacagcagacacagtgccatcacacaacaagggctacccaaagtcaagtagcagctgtccagcacatcttgggaca

SEQ ID NO: 10376 - DNA, 600 bp, Chicken  19866894206660_2
gttcaaaaggagattggatgggatttatgagactggaagctgtctgctgcactaaagctgtcccattaagctgaggccaggctcaggggtgcagctgtctctttgtgagcacgctgtccctgccctgtcctttatactttagtgttcttgttatccagcagtcagctgatcagttctttccatctcttcaaaggcaaggtcgcaggaggaatcaacctacgtggccacaaacaargcagccttcagaaaacagagctagcaactgacgttttaaggtactagtgtaaattttcagccaartaaaagtgacaacagctctgatgtaatctctcacatgcatggtgctatccccaggcagtcacagctcactgcacctgggctcactcagacaggaggtgtttatggcaagtaayattgctgctttgtggtacaaagagacatgatcagaactcgatggcacacagcagacacagtgccatcacacaacaagggctacccaaagtcaagtagcagctgtccagcacatcttgggacagcctgaatgttgaagctgaaataaagatgcttcagctagacagcaatatatatgaaagcaaagca

SEQ ID NO: 10377 - DNA, 495 bp, Chicken  19866894206660_3
ctgtccctgccctgtcctttatactttagtgttcttgttatccagcagtcagctgatcagttctttccatctcttcaaaggcaaggtcgcaggaggaatcaacctacgtggccacaaacaargcagccttcagaaaacagagctagcaactgacgttttaaggtactagtgtaaattttcagccaartaaaagtgacaacagctctgatgtaatctctcacatgcatggtgctatccccaggcagtcacagctcactgcacctgggctcactcagacaggaggtgtttatggcaagtaayattgctgctttgtggtacaaagagacatgatcagaactcgatggcacacagcagacacagtgccatcacacaacaagggctacccaaagtcaagtagcagctgtccagcacatcttgggacagcctgaatgttgaagctgaaataaagatgcttcagctagacagcaatatatatgaaagcaaagcaagtggaaa

SEQ ID NO: 10378 - DNA, 600 bp, Chicken  19866894206663_1
aacagcagacctgcaactgctttttagtttaagtatgttacaaatgattttcctaacaacaaaaaatcgcattgttccttctgacaaaaagtcacgtattactttgcagaacaaaaaattgagagagaggcagcaggggagaagtgtttcatcattgaacacatgaaacacagcctccacaaactcagttacagttacaaaaattaagaagtaaattgtattcaaatagaaaatggaaaatattgccgccctttcacactgtaaactttgcttttaaaagctctccctctcatacaaccyattttaaatgagccaaacatttcctttacaaaaattctcttacttggcctctacatccgacctcaggtacacagtgaaagtctcagtgtcatcatgggggcttcgtcgtttaattttccgcagttgatctaaatcactaaggaaaatggacaaacagattagtgaaggttgcattattctaaycctaaattttgatctgagtgtattttccacagtcagaagtccaaattacgtactcaaactatgaaaatatgaaatactatacattggagacaaagtaataaaacatttccagtgagt

SEQ ID NO: 10379 - DNA, 568 bp, Chicken  19866894206663_2
ctcagttacagttacaaaaattaagaagtaaattgtattcaaatagaaaatggaaaatattgccgccctttcacactgtaaactttgcttttaaaagctctccctctcatacaaccyattttaaatgagccaaacatttcctttacaaaaattctcttacttggcctctacatccgacctcaggtacacagtgaaagtctcagtgtcatcatgggggcttcgtcgtttaattttccgcagttgatctaaatcactaaggaaaatggacaaacagattagtgaaggttgcattattctaaycctaaattttgatctgagtgtattttccacagtcagaagtccaaattacgtactcaaactatgaaaatatgaaatactatacattggagacaaagtaataaaacatttccagtgagttatctgcatgtaattgactgtatacaagtgctgtataagagggktcacagcttagtcactaacatttagaaatgttatgctgaaaaaatagtactttgtagccaagaatttcctctatcaaataatgttattctgttcttggttgtagttt

SEQ ID NO: 10380 - DNA, 407 bp, Chicken  19866894206663_3
tggcctctacatccgacctcaggtacacagtgaaagtctcagtgtcatcatgggggcttcgtcgtttaattttccgcagttgatctaaatcactaaggaaaatggacaaacagattagtgaaggttgcattattctaaycctaaattttgatctgagtgtattttccacagtcagaagtccaaattacgtactcaaactatgaaaatatgaaatactatacattggagacaaagtaataaaacatttccagtgagttatctgcatgtaattgactgtatacaagtgctgtataagagggktcacagcttagtcactaacatttagaaatgttatgctgaaaaaatagtactttgtagccaagaatttcctctatcaaataatgttattctgttcttggttgtagttt

SEQ ID NO: 10381 - DNA, 600 bp, Chicken  19866894206671_1
acagcaaagccatatgtattctacatatatttcttgcctttatgtttgtgctatcaattaagacatctgagtttgatttcagcttgacttttaagtttgcaggacaaaccaaacaaatatgtatctaataatatcagtcaaattactatttggttcccaaagcacaaatcaagataaagcaagagcttagcacatgttgctgtgctttttaaagcagttcgctctttagttgtactcctgctttgtgactttaagcagcattagcattcagaaataatttttgcatctctgaaggcaaaygaggtattaaaacaatgatagcaatgatagcatcactagtaaggaaatatcatctggcatcaagtatttataatcatagttgataaaggaatggcatgtttaatttacactctgtgaatggtaaatatctacataagtattcctacctgtctttacatatccagcaagtaaaataactgagacgtaagagggatagagaggaagagcaagtcattatttcatctgttccatttacaaattcagaagtcacaaatgtgcagctgggaaatgtgtttgtctcaaagcttcaaatctgtgaca

SEQ ID NO: 10382 - DNA, 600 bp, Chicken  19866894206672_1
atgtcaaaagaaagtttctttctagtacaaaaccctaaagcagcgaatacaccatttttcagattttgctagaaatgggtgtagtctcaacaacgaatttcattgtaatgacagatgataacatactttttctatttagagtgacagaagtgtaatttgtgaaatacctcattaaaagaaactttggaaaagatttttttttttaatagttcagacatgtctctaatgacaatcactgctaaaattctctgacaactttgaagatacacaaagtagctattggtattaaaggaaattagyttattatttagcatttttaattttcagagaactaagtcttatttcatggacaagaggtctatttgcattttaaaatgtatgaagcagaaagtatttttgaaattaccaataatgaggaaagactagatagctttaaattgttcataatattcagttcactcagtattttctccagtgcatctaactacaacattaattattgcaataaacagtatgttcacacactaatgagaaatcctacagattaatttttaacgtatctttcttttaatgactctcctatcaatttgatctcttgta

SEQ ID NO: 10383 - DNA, 599 bp, Chicken  19866894206673_1
  misc_feature (1)..(173): n is any nucleotide
nnnnnnnnnnnnnnnnnnnnnnnnnnnnnnnnnnnnnnnnnnnnnnnnnnnnnnnnnnnnnnnnnnnnnnnnnnnnnnnnnnnnnnnnnnnnnnnnnnnnnnnnnnnnnnnnnnnnnnnnnnnnnnnnnnnnnnnnnnnnnnnnnnnnnnnnnnnnnnnnnnnnnnnnnnnnnaactccctgcaatgaacagggacacctaccagctaccatcaggttgctcagagccccatccagcctgagcatgagtgtcttcagggatggtagtcaaggattgacatcattcataaactaacgcctyggggaatcaattggtgttattttcaaacataggcaggcacctatactcaaatatatgtttaacctgggtataagtacctcctgtataggaatggtgccagttagactgattcattcagatgcaccagttagagttttatcccaggggagaatttttgtcttttgtataatgtctttagattccaagcttatgtaatgtaagtccacaagaaatagtacagattttcagtgtcaaaccttgactgtgtcattgatttttaagtaggcttctgcattataatcaattttttacaaggtara

SEQ ID NO: 10384 - DNA, 600 bp, Chicken  19866894206673_2
tyggggaatcaattggtgttattttcaaacataggcaggcacctatactcaaatatatgtttaacctgggtataagtacctcctgtataggaatggtgccagttagactgattcattcagatgcaccagttagagttttatcccaggggagaatttttgtcttttgtataatgtctttagattccaagcttatgtaatgtaagtccacaagaaatagtacagattttcagtgtcaaaccttgactgtgtcattgatttttaagtaggcttctgcattataatcaattttttacaaggtararatgaaaatattaataaaaacatcccatttcactttctgctataattatagcagaatctctcagtgaaatataaaatattcttctatgtactgtggcatacacaagcctgaccagaagtgatcagagtctttgggcataagagatcctctgcagctcctgtaaaaattaacagaatgagttaattgaaacatcaatacagtaagaaatacttgcatacacccagactatgaaagacttccctcatgatcaaaacaaagtataaacaggattcacaaagcattcatggatagcccaggag

SEQ ID NO: 10385 - DNA, 600 bp, Chicken  19866894206673_3
ggggaatcaattggtgttattttcaaacataggcaggcacctatactcaaatatatgtttaacctgggtataagtacctcctgtataggaatggtgccagttagactgattcattcagatgcaccagttagagttttatcccaggggagaatttttgtcttttgtataatgtctttagattccaagcttatgtaatgtaagtccacaagaaatagtacagattttcagtgtcaaaccttgactgtgtcattgatttttaagtaggcttctgcattataatcaattttttacaaggtararatgaaaatattaataaaaacatcccatttcactttctgctataattatagcagaatctctcagtgaaatataaaatattcttctatgtactgtggcatacacaagcctgaccagaagtgatcagagtctttgggcataagagatcctctgcagctcctgtaaaaattaacagaatgagttaattgaaacatcaatacagtaagaaatacttgcatacacccagactatgaaagacttccctcatgatcaaaacaaagtataaacaggattcacaaagcattcatggatagcccaggagcc

SEQ ID NO: 10386 - DNA, 599 bp, Chicken  19866894206689_1
  misc_feature (1)..(101): n is any nucleotide
nnnnnnnnnnnnnnnnnnnnnnnnnnnnnnnnnnnnnnnnnnnnnnnnnnnnnnnnnnnnnnnnnnnnnnnnnnnnnnnnnnnnnnnnnnnnnnnnnnnnnttctccgagaaaaatcactccaatccacaaaatgtgttttctgcccccgcagatgactctacagcttgtggtacttaaaaaccactctggtcaagaaagactcagccccatgggggggtcggtttctggcagcgctcctcagtcccttctgcctctccaaggtccctcctgtccctgtgtggtgtccccgtgtggctcrgtggygctggggacggaggaccctcatggggacaaggatggggatggggcggttatggcagcccagcgcaagggcagctcagtaggggcacggtgctcagcagtggggctgagccgaaaagcagagctcaccccactgtgccaggaattggcttcgtgctgagccgcttctgtcggtgacaaatttggaacaggcggcacaaagtccccactgaaagggagctgagcagaaaggggagcggcagagctcaggatgagtttgtgcttctgggcttctttctttcctctctctccttcctc

SEQ ID NO: 10387 - DNA, 599 bp, Chicken  19866894206689_2
  misc_feature (1)..(96): n is any nucleotide
nnnnnnnnnnnnnnnnnnnnnnnnnnnnnnnnnnnnnnnnnnnnnnnnnnnnnnnnnnnnnnnnnnnnnnnnnnnnnnnnnnnnnnnnnnnnnnnnttctccgagaaaaatcactccaatccacaaaatgtgttttctgcccccgcagatgactctacagcttgtggtacttaaaaaccactctggtcaagaaagactcagccccatgggggggtcggtttctggcagcgctcctcagtcccttctgcctctccaaggtccctcctgtccctgtgtggtgtccccgtgtggctcrgtggygctggggacggaggaccctcatggggacaaggatggggatggggcggttatggcagcccagcgcaagggcagctcagtaggggcacggtgctcagcagtggggctgagccgaaaagcagagctcaccccactgtgccaggaattggcttcgtgctgagccgcttctgtcggtgacaaatttggaacaggcggcacaaagtccccactgaaagggagctgagcagaaaggggagcggcagagctcaggatgagtttgtgcttctgggcttctttctttcctctctctccttcctcccctt

SEQ ID NO: 10388 - DNA, 600 bp, Chicken  19866894206693_1
cccacacacaattcttctcttaataggatctggaggaagccataactggaaggagctggaagggacagcattgccttgattcttacacaatagtctttgtgatcaatcactctttaaaatgaaatatggggaaagcaaccatcagacgcttccgtgaggacagtatacttgcagttacatttctcccttcttggcagatgacaaaggcattgaacatcgataattagaacatatggactaaatttttttactccatccactcccagatacacactttttcttgtggcaaagtatggcttyagcatttgatctcttctagtcacccctcccatccctttgatgaaattagttgcgtgtgtaggtttgtttgtatgtttcctaatctcagataggatctgaaactgtatttcaaacaagaggaacatgagtgggcacagttaattactttttattaatgttttttttttctgcaaacttttcacagagcagagcactggtctccatgggtcttttttgtgtgtgtgttttgactcttcatgtatatcacttagcttttttgtatgttgatttctggtagctcagcctcttctgtagaaaaca

SEQ ID NO: 10389 - DNA, 600 bp, Chicken  19866894206695_1
tcttgtccccagctacggttccacatttttctacagagaacttcttctctaggagcaggcaggctgtgtcaatgcataggagagaaaacaagactcctttaattccccacttgcttcctgcatcaacttttctgaatattcctcctcaaagaccacgtatttttttttaatctggccttcatgaggcaaagtaatgatatcatccccagttaaacaaacaggaaaaaaattccagtgacaaaatttgcattctggtctcttacatactactcttagacatcaatattttatcatatttawttttttttaaagccattaaaactccagtcccaacattaaacaacatactttcctcctttctggaaaaacacactcatctaaggaccccaatcccaacagataacgtatcgtatcatagagtcatagaatggcctgagttgaaaargaccataatggtcattgagtttagctctgtccataacctcgtattaacgtttccattctacgatgcagcctacaaaaatatctttcagaacaattgcattagcaggcttcataagtgcaatgacagtgctgctaaattaagtatactttgagcta

SEQ ID NO: 10390 - DNA, 600 bp, Chicken  19866894206695_2
tcaaagaccacgtatttttttttaatctggccttcatgaggcaaagtaatgatatcatccccagttaaacaaacaggaaaaaaattccagtgacaaaatttgcattctggtctcttacatactactcttagacatcaatattttatcatatttawttttttttaaagccattaaaactccagtcccaacattaaacaacatactttcctcctttctggaaaaacacactcatctaaggaccccaatcccaacagataacgtatcgtatcatagagtcatagaatggcctgagttgaaaargaccataatggtcattgagtttagctctgtccataacctcgtattaacgtttccattctacgatgcagcctacaaaaatatctttcagaacaattgcattagcaggcttcataagtgcaatgacagtgctgctaaattaagtatactttgagctaattttatgtttttatcasaatactggaggaatattaggaaggcattattttgtcagctttctcatttagcaaagcagcttcaatttattaacagtgtggagggtgaatgaatcaatatgtttcattgggcaatgtgtcatttgtt

SEQ ID NO: 10391 - DNA, 600 bp, Chicken  19866894206695_3
aaactccagtcccaacattaaacaacatactttcctcctttctggaaaaacacactcatctaaggaccccaatcccaacagataacgtatcgtatcatagagtcatagaatggcctgagttgaaaargaccataatggtcattgagtttagctctgtccataacctcgtattaacgtttccattctacgatgcagcctacaaaaatatctttcagaacaattgcattagcaggcttcataagtgcaatgacagtgctgctaaattaagtatactttgagctaattttatgtttttatcasaatactggaggaatattaggaaggcattattttgtcagctttctcatttagcaaagcagcttcaatttattaacagtgtggagggtgaatgaatcaatatgtttcattgggcaatgtgtcatttgttaatcggatattgatgagattattgacgcacagctaattawtctcaaaccctgcgctagccttcatatgtttccttaattatgttcttcatcttagtcttccaactttggcatgcaggcgctggctcgtaggcagtgagtgaagtaagctgtcagagggtctttccacacattt

SEQ ID NO: 10392 - DNA, 600 bp, Chicken  19866894206695_4
gtattaacgtttccattctacgatgcagcctacaaaaatatctttcagaacaattgcattagcaggcttcataagtgcaatgacagtgctgctaaattaagtatactttgagctaattttatgtttttatcasaatactggaggaatattaggaaggcattattttgtcagctttctcatttagcaaagcagcttcaatttattaacagtgtggagggtgaatgaatcaatatgtttcattgggcaatgtgtcatttgttaatcggatattgatgagattattgacgcacagctaattawtctcaaaccctgcgctagccttcatatgtttccttaattatgttcttcatcttagtcttccaactttggcatgcaggcgctggctcgtaggcagtgagtgaagtaagctgtcagagggtctttccacacatttacaatcccttggcagcaaaattattttcctacttgtaaataggtatcaaacaaatatttaataatatttgccagaagactgatattgatttggcagggagtcgctccaaattagcttagcaagagatcttgcatcagaagcggcatacttaaaaagataaatctaac

SEQ ID NO: 10393 - DNA, 600 bp, Chicken  19866894212066_1
agttaggaaagggtaaaaaattgaaccgtgtcataagaaggatttgtattttctttttgtgcagtcagtggaaaagttcctgcatctattctttatccgaaagacaaactagtaaactacaatagctggaatgcaatgtaagagccagaggcatgtgaaactcagctattttcaacagcaaaatcttgtgcaaacacagctttcattttccttcctcctaaaattccctggtagttatcagcttctaatttcccagtaaaatttaaagaacgaaagcactagttggttgtgtgatggaamaaggctttctgcatcttttaagtgtgaaacttcactgctgatttctgctgaagggtcaggaaacctttgtaacaggtcgagtgaggtcagccatgtaaacctgagagtgcctcaaagcactctctccccaacgtttctgctgcagttgaatcatagtactccagtaggcaatttgagtgcagcctcttccattttagagagtaagaggatttgggtatggatcatgccaagctgcctaagagacaggcaaagggctctagccctgcttcaccttccagtgtttgagtaccgggaatctga

SEQ ID NO: 10394 - DNA, 600 bp, Chicken  19866894212066_2
tgatttctgctgaagggtcaggaaacctttgtaacaggtcgagtgaggtcagccatgtaaacctgagagtgcctcaaagcactctctccccaacgtttctgctgcagttgaatcatagtactccagtaggcaatttgagtgcagcctcttccattttagagagtaagaggatttgggtatggatcatgccaagctgcctaagagacaggcaaagggctctagccctgcttcaccttccagtgtttgagtaccgggaatctgaggacacatccatactgacacagtgaggactgagcagarctgagcatgaaaacattattacttcagctacattatttcctggacttggacargatgttcaacacactgtggtattccctctacccatatcatgtgagctcatttgggatctctaatggcattctgccattgctttgatacctttggaaatctggctggctccaaatgagtgtttcaggtctctctctcacccctactactagcagtattgcttgttaatcacatttgaggacaaatgagcatctttttttgcagctctcagttaatgacaccatgtcatggagtgtctgcatcagagct

SEQ ID NO: 10395 - DNA, 600 bp, Chicken  19866894212066_3
catgtaaacctgagagtgcctcaaagcactctctccccaacgtttctgctgcagttgaatcatagtactccagtaggcaatttgagtgcagcctcttccattttagagagtaagaggatttgggtatggatcatgccaagctgcctaagagacaggcaaagggctctagccctgcttcaccttccagtgtttgagtaccgggaatctgaggacacatccatactgacacagtgaggactgagcagarctgagcatgaaaacattattacttcagctacattatttcctggacttggacargatgttcaacacactgtggtattccctctacccatatcatgtgagctcatttgggatctctaatggcattctgccattgctttgatacctttggaaatctggctggctccaaatgagtgtttcaggtctctctctcacccctactactagcagtattgcttgttaatcacatttgaggacaaatgagcatctttttttgcagctctcagttaatgacaccatgtcatggagtgtctgcatcagagcttgctgcaggacaagtcaagaagtgtgaaccaggcaacagggataggacaagcc

SEQ ID NO: 10396 - DNA, 599 bp, Chicken  19866894212067_1
  misc_feature (1)..(146): n is any nucleotide
nnnnnnnnnnnnnnnnnnnnnnnnnnnnnnnnnnnnnnnnnnnnnnnnnnnnnnnnnnnnnnnnnnnnnnnnnnnnnnnnnnnnnnnnnnnnnnnnnnnnnnnnnnnnnnnnnnnnnnnnnnnnnnnnnnnnnnnnnnnnnnnnnntatttggagattatgtgacatttgatttgagttattgttctgacgtctacagtgttttttttctgagaatctctaaacgttttacgggcattagttaattaatcctcacaacatcccaaagagtttaggtaagcattagagacctagtctcttyctttctttttttytttycccccctgtgtttttcttctattttttttttccctagagaattttggatacctgtagcacatgttgctgaacttggagtcatggtgctcaacagttctgaaattcagaccttacatccatgagttggtggctatgcagtgaggagtgaaacccaacctttgactcttactaatagaacaggatagtgggatcaaaacgagataaaagtgcatcagtgacaaagatgggaacaaatcaatgaatctaaccacaaaatatggtgcttttctgatactgcatatt

SEQ ID NO: 10397 - DNA, 599 bp, Chicken  19866894212067_2
  misc_feature (1)..(133): n is any nucleotide
nnnnnnnnnnnnnnnnnnnnnnnnnnnnnnnnnnnnnnnnnnnnnnnnnnnnnnnnnnnnnnnnnnnnnnnnnnnnnnnnnnnnnnnnnnnnnnnnnnnnnnnnnnnnnnnnnnnnnnnnnnnnnnnnnnnnntatttggagattatgtgacatttgatttgagttattgttctgacgtctacagtgttttttttctgagaatctctaaacgttttacgggcattagttaattaatcctcacaacatcccaaagagtttaggtaagcattagagacctagtctcttyctttctttttttytttycccccctgtgtttttcttctattttttttttccctagagaattttggatacctgtagcacatgttgctgaacttggagtcatggtgctcaacagttctgaaattcagaccttacatccatgagttggtggctatgcagtgaggagtgaaacccaacctttgactcttactaatagaacaggatagtgggatcaaaacgagataaaagtgcatcagtgacaaagatgggaacaaatcaatgaatctaaccacaaaatatggtgcttttctgatactgcatattgaatacgaatctt

SEQ ID NO: 10398 - DNA, 599 bp, Chicken  19866894212067_3
  misc_feature (1)..(129): n is any nucleotide
nnnnnnnnnnnnnnnnnnnnnnnnnnnnnnnnnnnnnnnnnnnnnnnnnnnnnnnnnnnnnnnnnnnnnnnnnnnnnnnnnnnnnnnnnnnnnnnnnnnnnnnnnnnnnnnnnnnnnnnnnnnnnnnnntatttggagattatgtgacatttgatttgagttattgttctgacgtctacagtgttttttttctgagaatctctaaacgttttacgggcattagttaattaatcctcacaacatcccaaagagtttaggtaagcattagagacctagtctcttyctttctttttttytttycccccctgtgtttttcttctattttttttttccctagagaattttggatacctgtagcacatgttgctgaacttggagtcatggtgctcaacagttctgaaattcagaccttacatccatgagttggtggctatgcagtgaggagtgaaacccaacctttgactcttactaatagaacaggatagtgggatcaaaacgagataaaagtgcatcagtgacaaagatgggaacaaatcaatgaatctaaccacaaaatatggtgcttttctgatactgcatattgaatacgaatcttttct

SEQ ID NO: 10399 - DNA, 600 bp, Chicken  19866894212071_1
caaaaacatctgggaactgatcttccacatctatcctttcagtggatagcatctctaaacagtcccaccgctcaatgccttttgatttcagaacaggaatttcttctagaacaacaacaaaaaaatattgttgtattccctcttcacccagttcagattactctctgtagtggcaggcatatctaacacacagagatgaactcacatattttgttcgccagtcatttatcttcaggcaggtatcacgttaagcttctgcatcagcattcacccaaactagaatagttctgctcagagacsctcctgactgctgcagcagcagctgtccttcttggttaagcagtgctgaagtgtcctcacatatggttgcttctcttaaaatatttttggtaattttaatagggtttttgcaaacctactgtagcttcagtaaagtaaaataacttcagtggaaagtgatgcccaacagaaaaagcaaaagaacttctgctcatactacaaaacctgacatcaactggaacccctcctaaaacttcaaaggtacccaatacagcaagcctgctatgcaaaactgagagcatcaagtaagcctgttttgct

SEQ ID NO: 10400 - DNA, 600 bp, Chicken  19866894212071_2
tcagttggttctacagcctctttgagcaactgttacccatacagcacagaactgtgggaacttcttgtttttccagtttgtccccactgtcccatcctgtcactgggcatcttatttgtgttctcttttcaagtattttatacccattgatgagaaccccattagacttccttgcagtaaaggcatgctgcttgctcatgttcatcttggtgcctaccagcactcccagctcctcttttgcagagctgttttcgagctggatggccaccagcacgttctggtgcggtctgttgttactcyctaggtgcaggactgtgcatctctctgttttgatcttttttttcccccacgtgcagtgtgcaaggacagtcttttggagatcagtaataaagaagatactacatgaagtactttatattagctctattaccttcttgggggaaaaaaaaagtgaatgttgatttacaaaaatgacaaatctacatgaagaattcgattcagcagaccttgctgacaaaacctctttcataaacaacacttcgagcttcgtgccctttgctcagaagttctgcaaactcagcattttcaaagagttccact

SEQ ID NO: 10401 - DNA, 600 bp, Chicken  19866894212071_3
gcagaccttgctgacaaaacctctttcataaacaacacttcgagcttcgtgccctttgctcagaagttctgcaaactcagcattttcaaagagttccacttcaagtcagcctggctagtttttagagacctcagctgctgagagaacaaggcatgaaaagggtcatagctcctgaccctttaaaatcaggcatagaattttactagctgaagaaagtacatggaatcatgcttgtaacttctctctagaattaaaacttcacactaaattcaactcatgaataactaaaacaaaacaccygatggttacaatttacagaccttaagtttattttagatccattaggtattataggaagaaactaatgaagttatgctgtcacatcttttacagcctctggttcaaagtatgtggtatcagtggtaagtaaagctaatatagcaagcatattcatatatacgttgaagtgggaaaaagggacctgctttcaaaaggctttacaactaacatcacagagaaaccttggaagaaaaataagaaagaaaagaaagtagtagcttagaagccaactactggttatctgcactgctatctgcactc

SEQ ID NO: 10402 - DNA, 600 bp, Chicken  19866894212071_4
ttttcagtggacactgtcaacgttcttagtcttaaattacagcaagcagctgtttcagtgtacagctgagcgtgacataagcctgtgtaaatactctcctctgtcacattcttctaagtggatgagggttgttttttccctccattcatgttcagcaatcctcctccccaaaacatccacgtaactcttaaatcgcacttcaattctgccactttctgaaagcaaaagaaagagcggagggataatacaatttgtcagatggacatgtgtaccatgtatcaaaatgtctggttttaaggsgagcaaccctgcattccacaaacacattatccctactccctcaagcctgttttccaatggcaacacatctagtagattctaagtcagttttgaaaatagcagtgatatgagatctctgcttctggattctgctactttactacgtaaaataataacaaaaaaaaacgtaaaataataacaaagtgttggtacctacaaaaataatggaaaaatggtacctacaaaaataatggaaaaaaaacaattttgattcataaaattccacgttgccttcacatttttaagtggaccaaaccacta

SEQ ID NO: 10403 - DNA, 599 bp, Chicken  19866894212072_1
  misc_feature (1)..(280): n is any nucleotide
nnnnnnnnnnnnnnnnnnnnnnnnnnnnnnnnnnnnnnnnnnnnnnnnnnnnnnnnnnnnnnnnnnnnnnnnnnnnnnnnnnnnnnnnnnnnnnnnnnnnnnnnnnnnnnnnnnnnnnnnnnnnnnnnnnnnnnnnnnnnnnnnnnnnnnnnnnnnnnnnnnnnnnnnnnnnnnnnnnnnnnnnnnnnnnnnnnnnnnnnnnnnnnnnnnnnnnnnnnnnnnnnnnnnnnnnnnnnnnnnnnnnnnnnnnnnnnnnnnnnnnnnnnnnnnnnnnnnnnnnattttaaggtcttttttttkwagaagaagaagaagacagttcaaagagacatcgtttgtacgtgcgcacaggcagtagaatccaactgcaaagccaaaaccattaaggaatgaatgcaagatgaacttgcatcacagagggagggaaggagttggatgaggaagggcagcagcagtgagatccttggcatccgcctccagctattaagttgcaggggatgttgtatttgyatggcagtggaagtcttccagggccccttattgaaggcaagtgagtgagcctgggctgtggcaggactgsagtgtcctttttcccagag

SEQ ID NO: 10404 - DNA, 599 bp, Chicken  19866894212072_2
  misc_feature (1)..(279): n is any nucleotide
nnnnnnnnnnnnnnnnnnnnnnnnnnnnnnnnnnnnnnnnnnnnnnnnnnnnnnnnnnnnnnnnnnnnnnnnnnnnnnnnnnnnnnnnnnnnnnnnnnnnnnnnnnnnnnnnnnnnnnnnnnnnnnnnnnnnnnnnnnnnnnnnnnnnnnnnnnnnnnnnnnnnnnnnnnnnnnnnnnnnnnnnnnnnnnnnnnnnnnnnnnnnnnnnnnnnnnnnnnnnnnnnnnnnnnnnnnnnnnnnnnnnnnnnnnnnnnnnnnnnnnnnnnnnnnnnnnnnnnnattttaaggtcttttttttkwagaagaagaagaagacagttcaaagagacatcgtttgtacgtgcgcacaggcagtagaatccaactgcaaagccaaaaccattaaggaatgaatgcaagatgaacttgcatcacagagggagggaaggagttggatgaggaagggcagcagcagtgagatccttggcatccgcctccagctattaagttgcaggggatgttgtatttgyatggcagtggaagtcttccagggccccttattgaaggcaagtgagtgagcctgggctgtggcaggactgsagtgtcctttttcccagagc

SEQ ID NO: 10405 - DNA, 599 bp, Chicken  19866894212072_3
  misc_feature (1)..(70): n is any nucleotide
nnnnnnnnnnnnnnnnnnnnnnnnnnnnnnnnnnnnnnnnnnnnnnnnnnnnnnnnnnnnnnnnnnnnnnattttaaggtcttttttttkwagaagaagaagaagacagttcaaagagacatcgtttgtacgtgcgcacaggcagtagaatccaactgcaaagccaaaaccattaaggaatgaatgcaagatgaacttgcatcacagagggagggaaggagttggatgaggaagggcagcagcagtgagatccttggcatccgcctccagctattaagttgcaggggatgttgtatttgyatggcagtggaagtcttccagggccccttattgaaggcaagtgagtgagcctgggctgtggcaggactgsagtgtcctttttcccagagctgcctgccccagagcttacacaacttacagagctggtggttttgcactgtgggtacctcaggaatttgaaaacaaagcactgttagttttttgtttataaagttgatattcccagctccaaaatctctgctgcttggtagcaagcataagccaaaggcaccacctraaatatcactctgctttttgtgraagataaatagccatatttg

SEQ ID NO: 10406 - DNA, 600 bp, Chicken  19866894212072_4
attttaaggtcttttttttkwagaagaagaagaagacagttcaaagagacatcgtttgtacgtgcgcacaggcagtagaatccaactgcaaagccaaaaccattaaggaatgaatgcaagatgaacttgcatcacagagggagggaaggagttggatgaggaagggcagcagcagtgagatccttggcatccgcctccagctattaagttgcaggggatgttgtatttgyatggcagtggaagtcttccagggccccttattgaaggcaagtgagtgagcctgggctgtggcaggactgsagtgtcctttttcccagagctgcctgccccagagcttacacaacttacagagctggtggttttgcactgtgggtacctcaggaatttgaaaacaaagcactgttagttttttgtttataaagttgatattcccagctccaaaatctctgctgcttggtagcaagcataagccaaaggcaccacctraaatatcactctgctttttgtgraagataaatagccatatttgcttgaaatggtttaattttacagcccatccgagagtaactctgttctatgaaagcttttcaccttttcctg

SEQ ID NO: 10407 - DNA, 600 bp, Chicken  19866894212072_5
gcatccgcctccagctattaagttgcaggggatgttgtatttgyatggcagtggaagtcttccagggccccttattgaaggcaagtgagtgagcctgggctgtggcaggactgsagtgtcctttttcccagagctgcctgccccagagcttacacaacttacagagctggtggttttgcactgtgggtacctcaggaatttgaaaacaaagcactgttagttttttgtttataaagttgatattcccagctccaaaatctctgctgcttggtagcaagcataagccaaaggcaccacctraaatatcactctgctttttgtgraagataaatagccatatttgcttgaaatggtttaattttacagcccatccgagagtaactctgttctatgaaagcttttcaccttttcctggttttaatacattgtgaggtcagtagtcagtactttcaagtgcttctagaaggactacagagaaaaatacaagaggaatcaagatgatgaattcaggtatgtgtgtgtggatgtaaataaacatgtatgaatagtttgaggtcaacttaaatggaaatctgagttgccttcacaggagttctcaaa

SEQ ID NO: 10408 - DNA, 600 bp, Chicken  19866894212072_6
tgcaggggatgttgtatttgyatggcagtggaagtcttccagggccccttattgaaggcaagtgagtgagcctgggctgtggcaggactgsagtgtcctttttcccagagctgcctgccccagagcttacacaacttacagagctggtggttttgcactgtgggtacctcaggaatttgaaaacaaagcactgttagttttttgtttataaagttgatattcccagctccaaaatctctgctgcttggtagcaagcataagccaaaggcaccacctraaatatcactctgctttttgtgraagataaatagccatatttgcttgaaatggtttaattttacagcccatccgagagtaactctgttctatgaaagcttttcaccttttcctggttttaatacattgtgaggtcagtagtcagtactttcaagtgcttctagaaggactacagagaaaaatacaagaggaatcaagatgatgaattcaggtatgtgtgtgtggatgtaaataaacatgtatgaatagtttgaggtcaacttaaatggaaatctgagttgccttcacaggagttctcaaaaagaagcctttatttcagccata

SEQ ID NO: 10409 - DNA, 600 bp, Chicken  19866894212081_1
tggacaaaagcagaaggtgtcaaacagcccatccctactgccctccctaccatcaccttccactgcctccacccataccatagccctcttctaccttactggctcaaccataaaccaagtgtgacctgttcacttcttttggaaaacaacagagtcaatacacaacaaagtgcaatccttacacgtttgtttggtttttaatcagcactaccatttgacaacaatatagtgggttgcagtaccatacaccacttgctacgctcgtcactgtttttactcactgctagaatgtgttacttraaatcaaaattttccaagtatcttaggaaacggttaatttgagactgcaaacactaccctggctataagttgatctccccaaaggacagatgaacaacctctacttcaatcagtataatactattaccaaraatacccaaacagatgatctcctattagagatctgtttcaaagaagaatacaactgaagaaaaaaaaaaaaaaaaggcatttgtacagttacatttcagagcaacctgtaacgagaagttacagcaccttcagcccctctgaacgtccccggcctctcctgcgtgtgct

SEQ ID NO: 10410 - DNA, 600 bp, Chicken  19866894212081_2
acttcttttggaaaacaacagagtcaatacacaacaaagtgcaatccttacacgtttgtttggtttttaatcagcactaccatttgacaacaatatagtgggttgcagtaccatacaccacttgctacgctcgtcactgtttttactcactgctagaatgtgttacttraaatcaaaattttccaagtatcttaggaaacggttaatttgagactgcaaacactaccctggctataagttgatctccccaaaggacagatgaacaacctctacttcaatcagtataatactattaccaaraatacccaaacagatgatctcctattagagatctgtttcaaagaagaatacaactgaagaaaaaaaaaaaaaaaaggcatttgtacagttacatttcagagcaacctgtaacgagaagttacagcaccttcagcccctctgaacgtccccggcctctcctgcgtgtgctgccctggcctgcagttgccacagttcctcctcccgtgcctgtactaccatttggctttctgcccatttgcacgacccaggaagtcatctagcagtttctaaacttgtttccatgttgctggtgtctgggtg

SEQ ID NO: 10411 - DNA, 600 bp, Chicken  19866894212082_1
tggtcctgaatgattgactgagtaaattttcagtacgattcaattcatatgctcagttggtactttctattttttcctcataagcaggtggtgggcagcacagagagcagcaagttctttttcatgactgatgattttgactcttcaattaaaagtgtgttagcaggtttcagcatatctctgtgatgaggaagatggaagagttgtgtgtaagaagaaaatcttattttctgtgtgcattaacacctccactcctgttttaatcctgtcattatttgacatgggattaggcaccacggygtgctgggggcaagtactaagccatccttgctcctctgcttttgaacactttctagtaagcactgaaagcagggtccctggactgctgggttgataaagcaagcctgaaccctgacagtggttttgaagaaggcatttcacctttttttgytgaatgacgtgcartgaatagtcagatatagaattacagaatcaataaggctggagaagaccactaagattatctagtccaaccaccaacacatccccaccatgcccactaaccgtgtccctctgtgccacatgtcacttgtcacatgt

SEQ ID NO: 10412 - DNA, 600 bp, Chicken  19866894212082_2
aaagtgtgttagcaggtttcagcatatctctgtgatgaggaagatggaagagttgtgtgtaagaagaaaatcttattttctgtgtgcattaacacctccactcctgttttaatcctgtcattatttgacatgggattaggcaccacggygtgctgggggcaagtactaagccatccttgctcctctgcttttgaacactttctagtaagcactgaaagcagggtccctggactgctgggttgataaagcaagcctgaaccctgacagtggttttgaagaaggcatttcacctttttttgytgaatgacgtgcartgaatagtcagatatagaattacagaatcaataaggctggagaagaccactaagattatctagtccaaccaccaacacatccccaccatgcccactaaccgtgtccctctgtgccacatgtcacttgtcacatgtcactcattgccacatatcctgcaattcttaagttaactgaacttgtttatcctataaatggcagatgataacacaaccttatctcatgtttataatgagatttggtatwgttgatgcttagatatttctattgccctctaaggaatgaaac

SEQ ID NO: 10413 - DNA, 600 bp, Chicken  19866894212082_3
ggtttcagcatatctctgtgatgaggaagatggaagagttgtgtgtaagaagaaaatcttattttctgtgtgcattaacacctccactcctgttttaatcctgtcattatttgacatgggattaggcaccacggygtgctgggggcaagtactaagccatccttgctcctctgcttttgaacactttctagtaagcactgaaagcagggtccctggactgctgggttgataaagcaagcctgaaccctgacagtggttttgaagaaggcatttcacctttttttgytgaatgacgtgcartgaatagtcagatatagaattacagaatcaataaggctggagaagaccactaagattatctagtccaaccaccaacacatccccaccatgcccactaaccgtgtccctctgtgccacatgtcacttgtcacatgtcactcattgccacatatcctgcaattcttaagttaactgaacttgtttatcctataaatggcagatgataacacaaccttatctcatgtttataatgagatttggtatwgttgatgcttagatatttctattgccctctaaggaatgaaacttatattgattcat

SEQ ID NO: 10414 - DNA, 600 bp, Chicken  19866894212082_4
ccctgacagtggttttgaagaaggcatttcacctttttttgytgaatgacgtgcartgaatagtcagatatagaattacagaatcaataaggctggagaagaccactaagattatctagtccaaccaccaacacatccccaccatgcccactaaccgtgtccctctgtgccacatgtcacttgtcacatgtcactcattgccacatatcctgcaattcttaagttaactgaacttgtttatcctataaatggcagatgataacacaaccttatctcatgtttataatgagatttggtatwgttgatgcttagatatttctattgccctctaaggaatgaaacttatattgattcattttataaatggccattatattacagtcatgattgctgagtgattgtaagcaagtttttttcttttgggtttctctactttattttaaattactctaaggagcatctcattgaatagcttatatttttcactgcctgaacagtcctgggatgaaaaatgcttgttgtctgctggctgtgagaaagcagacttttataaccacgttggtatcagctgtactctgagatgggaattcactggcagtt

SEQ ID NO: 10415 - DNA, 600 bp, Chicken  19866894212090_1
tggacacgttgtccaagcggagctcctgcatggccccaggtgaccattctggaagcagtgcctgggcagctgggaggggaagcagcagggaaggcggttcccgacaggatgggatcggccccccggtgatgcatcctctggaaagcaccgaccgcagcaccggtttaaaaacctgacggtgggtaacagctccccaaaggttttccctacgctgtgtgatgctgtgtgtgcacagttttgtgaccaaagaaacggtagcaaaatcccgaactttctgtctctgcgctgcagggaaccgamgctgcgccatgtcagcccccaaccaacccaatgccacctcttcgccttttctcctgatgggaatccctggcttggaagatgcccacacgtggatttccatcccgttctgctttatgtacatcatggccttgctgggaaatagcacggtcctgcttgctgtgaggctggacaaagccctccacgagcccatgtactacttcatttccatgctggctgccattgacctcatcttcacaactgctgttgttcccaaaatgctgagtgtattctggctgggctccagagagatcgcttttcccg

SEQ ID NO: 10416 - DNA, 600 bp, Chicken  19866894212094_1
aagggagtttataaacaggagggaacaacttcgtataaaagatagcaacaggatgggggaatggttttagactaaaggaagggagatttagatgagatgccagggcagttttttactgagagaatggaaaaggctgcccagagaggttgtggatgtctcatccctggaggtattcaaggccaggttggttggggctctgggcagtctgatccagtacttgatctagtggttggcagccctgcctgcagcaggggggttggaactcaatgatccttgaggtccgttccaacccatgtcatyctatgattcatactcttctagactgtgtgactccatggacttttgaaggatcagagaggatgtgggtgggacggggtcagagaggaactcttttaacctgcttgtagaatcctgccttggtaactggttttgtattctgctggcataagggtatggggttagaggggacctttactacttagtgcagctgtgtgttgtcttgtgtccgtaatgatctcattttgtgcttgtttagttctttaattcttcccgttgctttgctttgctcatcttacgttgtttaggcatctgaatggttct

SEQ ID NO: 10417 - DNA, 599 bp, Chicken  19866894212097_1
  misc_feature (1)..(50): n is any nucleotide
nnnnnnnnnnnnnnnnnnnnnnnnnnnnnnnnnnnnnnnnnnnnnnnnnncatgctgttggattaccctcttcacctcacaaagcctgcagaaggggagcatctcgcctctccagcagcaccatgtgagcctggaagcccaataaaaccacatgacttccagggcacagcgctgctcctcagtggcctaaacaaacaggggctgaagcatgctatgagggcccactcgggataaaggtgggaaaattgaggggagaaatgcacaaaagcactgtctccctttgccatgtaaaaatacgcrattgagttgcaggtgataaaacaacaaaataacaaaatccagtcttcttcactgcaactsaacaaattctgcacataatcccctccccagcacactggacgtgtgttttaaactgtgttgcayatgatggttcttctaatgcttttaattaaaacactaccagaatttataaggaaaagggattacttctttcaaatgcactaaaacctcaagctcttgttattttgcattctggtaaaaggaaatgaacaacgaagccacattttgggatttaagataatcgtaagattttaagttga

SEQ ID NO: 10418 - DNA, 600 bp, Chicken  19866894212097_2
gattaccctcttcacctcacaaagcctgcagaaggggagcatctcgcctctccagcagcaccatgtgagcctggaagcccaataaaaccacatgacttccagggcacagcgctgctcctcagtggcctaaacaaacaggggctgaagcatgctatgagggcccactcgggataaaggtgggaaaattgaggggagaaatgcacaaaagcactgtctccctttgccatgtaaaaatacgcrattgagttgcaggtgataaaacaacaaaataacaaaatccagtcttcttcactgcaactsaacaaattctgcacataatcccctccccagcacactggacgtgtgttttaaactgtgttgcayatgatggttcttctaatgcttttaattaaaacactaccagaatttataaggaaaagggattacttctttcaaatgcactaaaacctcaagctcttgttattttgcattctggtaaaaggaaatgaacaacgaagccacattttgggatttaagataatcgtaagattttaagttgaagggcaggaaaggggcttcagttttaaatttgcttttagcagatacaagccttatgttcct

SEQ ID NO: 10419 - DNA, 600 bp, Chicken  19866894212097_3
tgtgagcctggaagcccaataaaaccacatgacttccagggcacagcgctgctcctcagtggcctaaacaaacaggggctgaagcatgctatgagggcccactcgggataaaggtgggaaaattgaggggagaaatgcacaaaagcactgtctccctttgccatgtaaaaatacgcrattgagttgcaggtgataaaacaacaaaataacaaaatccagtcttcttcactgcaactsaacaaattctgcacataatcccctccccagcacactggacgtgtgttttaaactgtgttgcayatgatggttcttctaatgcttttaattaaaacactaccagaatttataaggaaaagggattacttctttcaaatgcactaaaacctcaagctcttgttattttgcattctggtaaaaggaaatgaacaacgaagccacattttgggatttaagataatcgtaagattttaagttgaagggcaggaaaggggcttcagttttaaatttgcttttagcagatacaagccttatgttcctttatcattataatgactgtcatgtaaaatgttatccatttaaaccctcccaacatttgttcgc

SEQ ID NO: 10420 - DNA, 600 bp, Chicken  19866894212099_1
aactaataaaatactttttagaaggaagaaataatactttcagaattgtctggaggtattttgaaatatttgatacacatttttacattggcgtagagtttcttttcttaaaaaaaaaattaagaaaaaaaaaagaggtccattctaaaggaaggagaatggtatcttgtactaagatgaacttctcaagtgtctctgagcagcctggcttacaaggctgccactcagggtcagataaatcccaacatcatgtcagtttcagagaagtgtcagtaggagaaaaccgaacatccagcagcraaaaagattggtaacagctgtactaacaaactaccataactatgtgctttaaacactctccttttaggtctcctacataacctgacaaagctgcaccataatgaagctctaacgtgtatatactgtttaaaaaaaacattgtatgaagttatcttaawtcttcttcagaccctaagaatcgagctgtaaactgataaattcctgaatacatttcttatactgcatctcagtatggttattagtagagtattgacctggctgtccatagagcccttctgattcacgcatttcttcattcat

SEQ ID NO: 10421 - DNA, 600 bp, Chicken  19866894212099_2
atggtatcttgtactaagatgaacttctcaagtgtctctgagcagcctggcttacaaggctgccactcagggtcagataaatcccaacatcatgtcagtttcagagaagtgtcagtaggagaaaaccgaacatccagcagcraaaaagattggtaacagctgtactaacaaactaccataactatgtgctttaaacactctccttttaggtctcctacataacctgacaaagctgcaccataatgaagctctaacgtgtatatactgtttaaaaaaaacattgtatgaagttatcttaawtcttcttcagaccctaagaatcgagctgtaaactgataaattcctgaatacatttcttatactgcatctcagtatggttattagtagagtattgacctggctgtccatagagcccttctgattcacgcatttcttcattcatccttgctagacgcaacctgtgattggggaaacagaaaaagaacagtgtcacttttaaagcagtgaaaaaagactgcagtttgaagacctacagtgtggcatgctcttgaacctcacagcgaggtcatctgtgtccagtgcagattttatgtccagacc

SEQ ID NO: 10422 - DNA, 599 bp, Chicken  19866894212103_1
  misc_feature (1)..(54): n is any nucleotide
nnnnnnnnnnnnnnnnnnnnnnnnnnnnnnnnnnnnnnnnnnnnnnnnnnnnnnacagtgccatatacagctggtgatgttaacaacctcctcaactcacagaaaaactggggagaaatgggtcatgttgtaaactttaatgttaattctcaccagagactgtgggaatatgtaggtcacgttgtaaggtgtttatacaaaataccctgaagcagtaataatacctgctcttgggcacaatgcctgcttcttgcaaggagtgatgacagacttccctcctaccatctcccagaaattcastgatacagaacaataaatgccaccttgaaatgtttacaaaaagcccatatgcatacttttcttaagcccctacaaaaagaaataaaaaatcagaactttttagagaagtttacacaagcatagccaygattgcagacattgccatggcactttaagtggtatatagaagccttaccaagatgcattrctaagcaatgattgactaattccaaagtcagtacttttcagtttacagatgtataaatctcccaaacagtgttctgttccaaaagctcaggctttttggctgtatgtacaaa

SEQ ID NO: 10423 - DNA, 600 bp, Chicken  19866894212103_2
ttgtaaactttaatgttaattctcaccagagactgtgggaatatgtaggtcacgttgtaaggtgtttatacaaaataccctgaagcagtaataatacctgctcttgggcacaatgcctgcttcttgcaaggagtgatgacagacttccctcctaccatctcccagaaattcastgatacagaacaataaatgccaccttgaaatgtttacaaaaagcccatatgcatacttttcttaagcccctacaaaaagaaataaaaaatcagaactttttagagaagtttacacaagcatagccaygattgcagacattgccatggcactttaagtggtatatagaagccttaccaagatgcattrctaagcaatgattgactaattccaaagtcagtacttttcagtttacagatgtataaatctcccaaacagtgttctgttccaaaagctcaggctttttggctgtatgtacaaatattttggacaggcaatttgtttcttcatgaaatatctatcatgtttagaaatgcactcctgagggttctttcccctgaggctttctcagccttactctgtggtcttcttcctctcccccatcacttt

SEQ ID NO: 10424 - DNA, 600 bp, Chicken  19866894212103_3
ggtgtttatacaaaataccctgaagcagtaataatacctgctcttgggcacaatgcctgcttcttgcaaggagtgatgacagacttccctcctaccatctcccagaaattcastgatacagaacaataaatgccaccttgaaatgtttacaaaaagcccatatgcatacttttcttaagcccctacaaaaagaaataaaaaatcagaactttttagagaagtttacacaagcatagccaygattgcagacattgccatggcactttaagtggtatatagaagccttaccaagatgcattrctaagcaatgattgactaattccaaagtcagtacttttcagtttacagatgtataaatctcccaaacagtgttctgttccaaaagctcaggctttttggctgtatgtacaaatattttggacaggcaatttgtttcttcatgaaatatctatcatgtttagaaatgcactcctgagggttctttcccctgaggctttctcagccttactctgtggtcttcttcctctcccccatcacttttcctgccctccttgctgtcccgagctgacacattatgtatttcataagccacaggctgac

SEQ ID NO: 10425 - DNA, 599 bp, Chicken  19866894212116_1
  misc_feature (1)..(10): n is any nucleotide
nnnnnnnnnnttgtgtcgatgttgtttaatagtgttcacccatgactaatgagaatcatgttactttctgcctgcaattacagcagttcccacagtcaaagcatttgctgcagagtatctatttcctctctgaagaaagtttgattgtctttgaaaaggaaaactgtgttggatctttaccagacataaatattgattttgattttaaattttactccaaagttgagaggagaaataggcaagaaatacttgaaagatttttgcagtactaaatttttgcataaattctaccacacacasrttgtgcactgaaagtgtttagattcttgctacctgcacatattttctcttcaatttcactgatgttaatattaaaggtgcacattatttgataaatcacacaattagaagggtatctaaaaccaaatgcattaagttgtcaatggatagaataaagagttcagatatatttcagcatggcaataacttatttatatgttcccactggtaactatttcttgagaggaaaagatgacaattcacatacatctttctactccctaatgaattatttcattgccatatgaagaattttacaa

SEQ ID NO: 10426 - DNA, 599 bp, Chicken  19866894212116_2
  misc_feature (1)..(9): n is any nucleotide
nnnnnnnnnttgtgtcgatgttgtttaatagtgttcacccatgactaatgagaatcatgttactttctgcctgcaattacagcagttcccacagtcaaagcatttgctgcagagtatctatttcctctctgaagaaagtttgattgtctttgaaaaggaaaactgtgttggatctttaccagacataaatattgattttgattttaaattttactccaaagttgagaggagaaataggcaagaaatacttgaaagatttttgcagtactaaatttttgcataaattctaccacacacasrttgtgcactgaaagtgtttagattcttgctacctgcacatattttctcttcaatttcactgatgttaatattaaaggtgcacattatttgataaatcacacaattagaagggtatctaaaaccaaatgcattaagttgtcaatggatagaataaagagttcagatatatttcagcatggcaataacttatttatatgttcccactggtaactatttcttgagaggaaaagatgacaattcacatacatctttctactccctaatgaattatttcattgccatatgaagaattttacaat

SEQ ID NO: 10427 - DNA, 600 bp, Chicken  19866894212116_3
aagcttcagctatattggaattccaaagcatctctgttttcagaactgccatctattttttgctgatatttaaatacattccggaagtatctaattttatgggtgagaaccacaagcaaaaaaatcccagactattaaacttccttataattcccatttagatcttttctcataggtatgccacatcttgctactctaattcatgcagatgatctttactcccactgatctaaaagggcaacatgaatgatgtaggggcacagtataggtctgctgcatttaaaatgcccaaaatatgaygagggaaaaaaaaaaaaaaaaggcagctttgttgaaatatgttctttttaaaatagaagtaatgtgcttcagctactctttgactacacagatcagtaattgcaaaatcatcaaaatcataggattgttcttttagtacaggaaagactcaatagttttcgaacagaatgattctatgtgatttttttagaagaccaaatacaatcattgtaacccccagattaaagtgcctttctccttccattatataaatcctacaccagattagaagacagaatcatatatctttctccattatga

SEQ ID NO: 10428 - DNA, 599 bp, Chicken  19866894212128_1
  misc_feature (1)..(82): n is any nucleotide
nnnnnnnnnnnnnnnnnnnnnnnnnnnnnnnnnnnnnnnnnnnnnnnnnnnnnnnnnnnnnnnnnnnnnnnnnnnnnnnnnncatggagagcaatggtttttgctagttatgtttggaagttgcattcattcattgtggtggcagcatacgactgcagctgataagctcctgactgtgtgtgttgttgccatacgtcccgtttttccactggctgcaaaacaattgcctttagtcccaaatatattccttcaattatgaaagtgatgcatttgactaaagattcaaaccttcggtttccmcttgacttcaaaatctctttctgcaagtggtttgttacctatacaactgtggcaaatgctgatggctgaaaccagaaaaagaaggtgatgacaggataaatgtgggtagaagcaaacaaagtgagaaggggtccttatactgttckattctgcttgctggtagcctcacaaaacgtatcactttggcacaaaaaagtagacaaaatacaggaatgctaaaggatttaaatttaagatggttacrtttttgattgggcatgaaaatcaatctttgaaatgccagtttttttatttaatac

SEQ ID NO: 10429 - DNA, 600 bp, Chicken  19866894212128_2
atacgactgcagctgataagctcctgactgtgtgtgttgttgccatacgtcccgtttttccactggctgcaaaacaattgcctttagtcccaaatatattccttcaattatgaaagtgatgcatttgactaaagattcaaaccttcggtttccmcttgacttcaaaatctctttctgcaagtggtttgttacctatacaactgtggcaaatgctgatggctgaaaccagaaaaagaaggtgatgacaggataaatgtgggtagaagcaaacaaagtgagaaggggtccttatactgttckattctgcttgctggtagcctcacaaaacgtatcactttggcacaaaaaagtagacaaaatacaggaatgctaaaggatttaaatttaagatggttacrtttttgattgggcatgaaaatcaatctttgaaatgccagtttttttatttaataccagacctttcagaggcatgactttctggaacgagtgcttattgatcagcagtgaggcaggaagtttaaccaggctgctgccattaattgtcctcgacgtaagaaacaaataatcttttgagtaatggcagcacatatataacttcac

SEQ ID NO: 10430 - DNA, 600 bp, Chicken  19866894212128_3
ttccttcaattatgaaagtgatgcatttgactaaagattcaaaccttcggtttccmcttgacttcaaaatctctttctgcaagtggtttgttacctatacaactgtggcaaatgctgatggctgaaaccagaaaaagaaggtgatgacaggataaatgtgggtagaagcaaacaaagtgagaaggggtccttatactgttckattctgcttgctggtagcctcacaaaacgtatcactttggcacaaaaaagtagacaaaatacaggaatgctaaaggatttaaatttaagatggttacrtttttgattgggcatgaaaatcaatctttgaaatgccagtttttttatttaataccagacctttcagaggcatgactttctggaacgagtgcttattgatcagcagtgaggcaggaagtttaaccaggctgctgccattaattgtcctcgacgtaagaaacaaataatcttttgagtaatggcagcacatatataacttcacatttactgcctactcaatatatcaacacgtgtagaatttcaagtaaagaaaaatatctactacgcttcaaatacatgaagtactgtttgctttttctt

SEQ ID NO: 10431 - DNA, 600 bp, Chicken  19866894212128_4
gattgagatgcacacataatgcatttgaaagaccatgaagtggctggaaaacacacaactatatgccatgagacaagagtgtccttgattctgagatgctgataattgaaacaatacagaaaaagagatcaacaaggtaggtccccaatgagaaacagaaattctttctgtggcagtaaagagtctgccggggcaggaaagtccccaaagtatgtttaaagacaaaggcaacctgaacacgaatatctgtgctgtggcaggatttgtcacagcagtgacatctcttgagatacttggtcrckgaaagcacatccttactacttctgttccaaattcgggtggtgacaaattaataagctctaagctttctacattcatactcctgaacacagacgttatttgagtattttacaatattgctttggatttttacagattaaatatgcttctgctcacatttttcagacacggctgtttctcttccaaacagcaaaaagtctccttttctctgacgaattggagcggtttctctagggaagcccatgacatatcccacccctctgcactgaccaaggccccaagctgcctgcagtcggcatt

SEQ ID NO: 10432 - DNA, 600 bp, Chicken  19866894212128_5
ttgagatgcacacataatgcatttgaaagaccatgaagtggctggaaaacacacaactatatgccatgagacaagagtgtccttgattctgagatgctgataattgaaacaatacagaaaaagagatcaacaaggtaggtccccaatgagaaacagaaattctttctgtggcagtaaagagtctgccggggcaggaaagtccccaaagtatgtttaaagacaaaggcaacctgaacacgaatatctgtgctgtggcaggatttgtcacagcagtgacatctcttgagatacttggtcrckgaaagcacatccttactacttctgttccaaattcgggtggtgacaaattaataagctctaagctttctacattcatactcctgaacacagacgttatttgagtattttacaatattgctttggatttttacagattaaatatgcttctgctcacatttttcagacacggctgtttctcttccaaacagcaaaaagtctccttttctctgacgaattggagcggtttctctagggaagcccatgacatatcccacccctctgcactgaccaaggccccaagctgcctgcagtcggcattat

SEQ ID NO: 10433 - DNA, 599 bp, Chicken  19866894212134_1
  misc_feature (1)..(8): n is any nucleotide
nnnnnnnntagtgtaacttcagcttgcactaaaaacaatcagattcagaattttccatcactgtccggaacacaaagaaccaactctattttctttggaggtcactgaaacaagtactttttctaagcacctatagaattgttttatacatattttaaaggtttccttcccagagtgaaaggaaagtttgtaggacagctgtaaaatatttcaatagccatcaaagagttcagaaagctcgcctttttcctcagaagtagcttagaagttttgtctttaaagagactgtccttgtctgtracgttacaatatcaaaggacagatgaggaaaactgtaaatgcaattaatttctgcatacaaaggaaaggaagtagcaagcgtatagcctacggtctgttaattaaaaatgaaataacagatcagatcctaaccggtccaagcttctaagctgaccagctttgttgctttgttttagagagacaaacctttcgttcttacagcaaaaggaagcaaggcagcaccagagcagccggagcagcaytcccactccccctgctcccattttatcaaacttgattgcatyrtcatatccccttcc

SEQ ID NO: 10434 - DNA, 431 bp, Chicken  19866894212134_2
ctttttcctcagaagtagcttagaagttttgtctttaaagagactgtccttgtctgtracgttacaatatcaaaggacagatgaggaaaactgtaaatgcaattaatttctgcatacaaaggaaaggaagtagcaagcgtatagcctacggtctgttaattaaaaatgaaataacagatcagatcctaaccggtccaagcttctaagctgaccagctttgttgctttgttttagagagacaaacctttcgttcttacagcaaaaggaagcaaggcagcaccagagcagccggagcagcaytcccactccccctgctcccattttatcaaacttgattgcatyrtcatatccccttcctgttttcatctccatgacctctatcaccactatcgaccccactgtgtgcctttaacttggcccttctcgttcac

SEQ ID NO: 10435 - DNA, 389 bp, Chicken  19866894212134_3
actgtccttgtctgtracgttacaatatcaaaggacagatgaggaaaactgtaaatgcaattaatttctgcatacaaaggaaaggaagtagcaagcgtatagcctacggtctgttaattaaaaatgaaataacagatcagatcctaaccggtccaagcttctaagctgaccagctttgttgctttgttttagagagacaaacctttcgttcttacagcaaaaggaagcaaggcagcaccagagcagccggagcagcaytcccactccccctgctcccattttatcaaacttgattgcatyrtcatatccccttcctgttttcatctccatgacctctatcaccactatcgaccccactgtgtgcctttaacttggcccttctcgttcac

SEQ ID NO: 10436 - DNA, 388 bp, Chicken  19866894212134_4
ctgtccttgtctgtracgttacaatatcaaaggacagatgaggaaaactgtaaatgcaattaatttctgcatacaaaggaaaggaagtagcaagcgtatagcctacggtctgttaattaaaaatgaaataacagatcagatcctaaccggtccaagcttctaagctgaccagctttgttgctttgttttagagagacaaacctttcgttcttacagcaaaaggaagcaaggcagcaccagagcagccggagcagcaytcccactccccctgctcccattttatcaaacttgattgcatyrtcatatccccttcctgttttcatctccatgacctctatcaccactatcgaccccactgtgtgcctttaacttggcccttctcgttcac

SEQ ID NO: 10437 - DNA, 600 bp, Chicken  19866894212136_1
accagctccaagcagaatcatagcatcttacatgtcttgcttgacaggacgttctctctgtagctccaagtatgctccaacatcgacagcaagccttgaatggcagttctgctggatgtctactctgcaaactgacagatccatgctggagctccctgctccaagatttggagcatagtaatgaggacagtgaagctcagagagctctgcatcccatggctgtgcttaggtcagactcagagagctccggtcaccaaaatgtccattcagcagcatgggaagcaaagccctttctttgargctgtgcagctcaaggattagcatcagttaccaggcccatcaaaaggtgtcaaaagccagaaataggaacatcaccagaagctgccaraaaagtgacatggctggagctaaatggtgtgtgctgctgtttgtgctcagagctcaggacctcccgtgtaagccatttgtctgcagtgtggtaggcagtacatgcataatagagtctgaacgactgtgggaaatacagcaaaacaaggactaagccttctgtgttttggattaacagtaaactttagctgcatgcatgtgaactatgcagca

SEQ ID NO: 10438 - DNA, 600 bp, Chicken  19866894212136_2
gcaagccttgaatggcagttctgctggatgtctactctgcaaactgacagatccatgctggagctccctgctccaagatttggagcatagtaatgaggacagtgaagctcagagagctctgcatcccatggctgtgcttaggtcagactcagagagctccggtcaccaaaatgtccattcagcagcatgggaagcaaagccctttctttgargctgtgcagctcaaggattagcatcagttaccaggcccatcaaaaggtgtcaaaagccagaaataggaacatcaccagaagctgccaraaaagtgacatggctggagctaaatggtgtgtgctgctgtttgtgctcagagctcaggacctcccgtgtaagccatttgtctgcagtgtggtaggcagtacatgcataatagagtctgaacgactgtgggaaatacagcaaaacaaggactaagccttctgtgttttggattaacagtaaactttagctgcatgcatgtgaactatgcagcaaggcctgagagacagatatcttttacataaagtttgaaactccttggaaataccaaaactatctttttaagaatataggcaaaatagt

SEQ ID NO: 10439 - DNA, 599 bp, Chicken  19866894212137_1
  misc_feature (1)..(46): n is any nucleotide
nnnnnnnnnnnnnnnnnnnnnnnnnnnnnnnnnnnnnnnnnnnnnntccacatcattgaaggagatcaccgcaccttattggagggagatggtgttgaatcaatcattgggatcatccatggctcactggcagagccacgtgtcagtgtcagagaaggttaacttctgctcacttactgtcagtggtgaagaaaatgccaacaacattcctagttatgacagaccccaaggaactcttcctgttgaacaacatctcatctgctctgctgccagagctgggaaggccagctgaacttgatwggtctctttgtttcctctctcactcagtcatctttcctaactttcacgtgttctctctctctcctcttcccttcctatgctttgtctatttccccagtatccctgcccgtgttactgcggtgctgtgactgtcactgtgcactgctgtgggggttccccggcgatggtggcttcccacagctttggcagtatgaaaaacaaatttaggagtagacttctcgtgctctatattgttttgtcttaacagtattccaaagggtaagtgatagcacttgttgaccaagcccagtgagcagaga

SEQ ID NO: 10440 - DNA, 600 bp, Chicken  19866894212137_2
cacccccccccccccccccaccctgccttgttcagaagggtggaaggtgagggtccttgccatcacccacccttgtggggagagaggcgtggagggcaggatggatggttcaacagatgccactgtattgaacagccttaacttgggctgatacaagcaggcagagctgtccctaggtatgtacttagtttatatctctgcaaggttctgtgctttgcattaccagaaacacagtaaagcattacggctattgcttcacctttgttccttcccacctccagttgctccatccaaccaggyatttggaatgtcagggggaatagagttctccattggtcacggtataaatcctcctacccttgctctcccataaccaaagttcatgcaaacatagaagcatctacccagtaccccagtgtattttatgtagcatagggcttgcttaagccttgagtatgcattttcctctggcagtgagactggagatcccacataagttagctaagtaaaagtttgatggcatgattttaagatacagtacctttttaaaggaaacttgcataaaattcaatttaaaaatgactgacttttgctatgctg

SEQ ID NO: 10441 - DNA, 600 bp, Chicken  19866894212149_1
cctccagtgccacgaggagcagcccagacgcaggagagggcgcagtgaggcacgtgccccctcagccccatcacccacctcgaggtggccgctgtgcacggcgtggtgcagcgccgtgcggcccgtgcggtccgcgacattgacagtgctcagcagggggatgatggcctccacacacttggtggcccggttggcagcagcgacatgcagaggcgtttgccagtacttgtcgcgggcattgacatctgccgagtgcttcaggaggaggtgaagtgctttctggcaggagcagaggaaggragagctctcactcagcctgctggagcccataggctcatcccacccaagcacagctgtgaaatgcagctggatgggggtaccggcatgggagaaacacatctgagccacaggattgaactgtctgtgagggctcatttgagactaaggaggtgcagagcacccagaaggatggcaaacgtaatccattgacctgccttctgtaaggatttccccctgtcgctgggagaggccgtgtgctgcagccccacattggcagcacctcctgccttctggacacgcagtgactgtccacacacgctc

SEQ ID NO: 10442 - DNA, 599 bp, Chicken  19866894212152_1
  misc_feature (1)..(93): n is any nucleotide
nnnnnnnnnnnnnnnnnnnnnnnnnnnnnnnnnnnnnnnnnnnnnnnnnnnnnnnnnnnnnnnnnnnnnnnnnnnnnnnnnnnnnnnnnnnnnctgtgctagaatccgtgggtgtggggatggggaacccttcccaccccgttgaatgaggttgaaggagcacatacctgctcagcgtgcttctggcatcctggaattgaaagagataggaaaaaatggttcaatctcccccagctttggagaaggtggacaagaagggagagggtccaatggagtatccaacccataggaatccaaccygtaggaatccaacctgtaggaatccacgtgtgggttgcttgagtttctcctccatctcacagatgaggatgccgaggagagaaatgtccccctccaccttggcctcctcctcctcctgcctcctcwgcacagccctgtccagctcccccagccgtgccacgagcaccatctccttctccttcagaaaacggcrgagctgacggaattctgacacaattttctgcctctcagcctccgtccgtgtctgtaggttgtggaaaatcaacaacgtggaccccaaaaagacctctgtttttcca

SEQ ID NO: 10443 - DNA, 600 bp, Chicken  19866894212152_2
acccttcccaccccgttgaatgaggttgaaggagcacatacctgctcagcgtgcttctggcatcctggaattgaaagagataggaaaaaatggttcaatctcccccagctttggagaaggtggacaagaagggagagggtccaatggagtatccaacccataggaatccaaccygtaggaatccaacctgtaggaatccacgtgtgggttgcttgagtttctcctccatctcacagatgaggatgccgaggagagaaatgtccccctccaccttggcctcctcctcctcctgcctcctcwgcacagccctgtccagctcccccagccgtgccacgagcaccatctccttctccttcagaaaacggcrgagctgacggaattctgacacaattttctgcctctcagcctccgtccgtgtctgtaggttgtggaaaatcaacaacgtggaccccaaaaagacctctgtttttccagcttgaaggcaacagcttcttaccagaaggtcttggcatcgcctctccccactccttttgagttctaagagctcctccttttgtttcttgaggttctccagatcgctgtgaayctgctcctggagga

SEQ ID NO: 10444 - DNA, 600 bp, Chicken  19866894212152_3
gaattgaaagagataggaaaaaatggttcaatctcccccagctttggagaaggtggacaagaagggagagggtccaatggagtatccaacccataggaatccaaccygtaggaatccaacctgtaggaatccacgtgtgggttgcttgagtttctcctccatctcacagatgaggatgccgaggagagaaatgtccccctccaccttggcctcctcctcctcctgcctcctcwgcacagccctgtccagctcccccagccgtgccacgagcaccatctccttctccttcagaaaacggcrgagctgacggaattctgacacaattttctgcctctcagcctccgtccgtgtctgtaggttgtggaaaatcaacaacgtggaccccaaaaagacctctgtttttccagcttgaaggcaacagcttcttaccagaaggtcttggcatcgcctctccccactccttttgagttctaagagctcctccttttgtttcttgaggttctccagatcgctgtgaayctgctcctggaggaagaaaaaggggtttggggaggatattgtgatgggagaaagaagggaagagatgcaatgtgttggact

SEQ ID NO: 10445 - DNA, 600 bp, Chicken  19866894212152_4
ctcctgcctcctcwgcacagccctgtccagctcccccagccgtgccacgagcaccatctccttctccttcagaaaacggcrgagctgacggaattctgacacaattttctgcctctcagcctccgtccgtgtctgtaggttgtggaaaatcaacaacgtggaccccaaaaagacctctgtttttccagcttgaaggcaacagcttcttaccagaaggtcttggcatcgcctctccccactccttttgagttctaagagctcctccttttgtttcttgaggttctccagatcgctgtgaayctgctcctggaggaagaaaaaggggtttggggaggatattgtgatgggagaaagaagggaagagatgcaatgtgttggactttgcagagaagaagttttcagcatggacatgaaggattaaacagggctttagggaataacacagggctgaccacatcctcctgcactgactcctttatgggggctccagtgggacctccatcatcccgtggtccattggaggggaatgtcctcttgcgccacgagcagagtttctccttctcccctctgtctccatccagccccaaaagcttcagcttc

SEQ ID NO: 10446 - DNA, 600 bp, Chicken  19866894212153_1
ctagtggacttggctcagaagcaaagaatataattcataaatagccactgaaggaagcagcttcttctctttggccagcaaaaagaatctgtgtagtttcagttctgattctgaagcgtttatttagacaataactataatccttttaataaaaaacgtaggtaaaaattaagaaggttatgttttcccatccatactgtatacttcaaacttgtgtgttgtgttacaaaataataaaactgactttcgtgagttaggctaatttcagccctcaaacaagcaaagtcagagggcctggcraaaaatatttagcctccagaagcaaggggggatgtcttgtctgacaagagtattttcaggtgtctcaagttccagttaatttcatgttggtatttaactgaataacatcattcatgttattactgtctttgwttttaatctgaacagattgtatattrcttgtgggtagacacgtggttaacacaagggtcattgccactcagctggtgaaaccctttccatcagagagacgtggggagtgtgaaatgactgaactgctgctgatgctttaaaaaggcagatggtgccgtatctgtttgt

SEQ ID NO: 10447 - DNA, 600 bp, Chicken  19866894212153_2
aactataatccttttaataaaaaacgtaggtaaaaattaagaaggttatgttttcccatccatactgtatacttcaaacttgtgtgttgtgttacaaaataataaaactgactttcgtgagttaggctaatttcagccctcaaacaagcaaagtcagagggcctggcraaaaatatttagcctccagaagcaaggggggatgtcttgtctgacaagagtattttcaggtgtctcaagttccagttaatttcatgttggtatttaactgaataacatcattcatgttattactgtctttgwttttaatctgaacagattgtatattrcttgtgggtagacacgtggttaacacaagggtcattgccactcagctggtgaaaccctttccatcagagagacgtggggagtgtgaaatgactgaactgctgctgatgctttaaaaaggcagatggtgccgtatctgtttgttctcatgaaatcacaggcagagacgaagttagggacagacacaagagaaggtttgattacaggagaataatcctctaatactaagcactgtatgttgatgggaaaacattactacctgttatctttttaatt

SEQ ID NO: 10448 - DNA, 600 bp, Chicken  19866894212153_3
taggtaaaaattaagaaggttatgttttcccatccatactgtatacttcaaacttgtgtgttgtgttacaaaataataaaactgactttcgtgagttaggctaatttcagccctcaaacaagcaaagtcagagggcctggcraaaaatatttagcctccagaagcaaggggggatgtcttgtctgacaagagtattttcaggtgtctcaagttccagttaatttcatgttggtatttaactgaataacatcattcatgttattactgtctttgwttttaatctgaacagattgtatattrcttgtgggtagacacgtggttaacacaagggtcattgccactcagctggtgaaaccctttccatcagagagacgtggggagtgtgaaatgactgaactgctgctgatgctttaaaaaggcagatggtgccgtatctgtttgttctcatgaaatcacaggcagagacgaagttagggacagacacaagagaaggtttgattacaggagaataatcctctaatactaagcactgtatgttgatgggaaaacattactacctgttatctttttaatttcttaataaatgtggtgtataaaggt

SEQ ID NO: 10449 - DNA, 599 bp, Chicken  19866894212159_1
  misc_feature (1)..(211): n is any nucleotide
nnnnnnnnnnnnnnnnnnnnnnnnnnnnnnnnnnnnnnnnnnnnnnnnnnnnnnnnnnnnnnnnnnnnnnnnnnnnnnnnnnnnnnnnnnnnnnnnnnnnnnnnnnnnnnnnnnnnnnnnnnnnnnnnnnnnnnnnnnnnnnnnnnnnnnnnnnnnnnnnnnnnnnnnnnnnnnnnnnnnnnnnnnnnnnnnnnnnnnnnnnnnnnnnnnncaatagaatcaggagctgacagtggtgataaaacagattgtttcccgttattcaaaaactcagtgaagggttttctatcaaatgtatcwaatacattgaactgaatttcttttatggctaccctatcctactaaaataagtggataaaaaaaatagtctgtgttaaagtgagagcatagataataaccagctacaagtgtgaaaataattcatgttccatttgaatgcctttcttttctrctccaacattcctgaagtgctccagtccttgcaggcctgttgtgggaaggttagaatggggagstgtatgggaactgttgagtcacggcctgaaccactgattgagcacctggggaaaggaccaggtcagcccagggagcacaggtga

SEQ ID NO: 10450 - DNA, 599 bp, Chicken  19866894212159_2
  misc_feature (1)..(60): n is any nucleotide
nnnnnnnnnnnnnnnnnnnnnnnnnnnnnnnnnnnnnnnnnnnnnnnnnnnnnnnnnnnncaatagaatcaggagctgacagtggtgataaaacagattgtttcccgttattcaaaaactcagtgaagggttttctatcaaatgtatcwaatacattgaactgaatttcttttatggctaccctatcctactaaaataagtggataaaaaaaatagtctgtgttaaagtgagagcatagataataaccagctacaagtgtgaaaataattcatgttccatttgaatgcctttcttttctrctccaacattcctgaagtgctccagtccttgcaggcctgttgtgggaaggttagaatggggagstgtatgggaactgttgagtcacggcctgaaccactgattgagcacctggggaaaggaccaggtcagcccagggagcacaggtgaaggcagttcacctgtgtgactggaaggggtggagcctggctgcacctctcttagacctcatttaagggctgactgccaccagagaaaaatctctggttggagatccctcccttgtggagttttccttgtgagcctagatctttggaggtgg

SEQ ID NO: 10451 - DNA, 600 bp, Chicken  19866894212159_3
agaatcaggagctgacagtggtgataaaacagattgtttcccgttattcaaaaactcagtgaagggttttctatcaaatgtatcwaatacattgaactgaatttcttttatggctaccctatcctactaaaataagtggataaaaaaaatagtctgtgttaaagtgagagcatagataataaccagctacaagtgtgaaaataattcatgttccatttgaatgcctttcttttctrctccaacattcctgaagtgctccagtccttgcaggcctgttgtgggaaggttagaatggggagstgtatgggaactgttgagtcacggcctgaaccactgattgagcacctggggaaaggaccaggtcagcccagggagcacaggtgaaggcagttcacctgtgtgactggaaggggtggagcctggctgcacctctcttagacctcatttaagggctgactgccaccagagaaaaatctctggttggagatccctcccttgtggagttttccttgtgagcctagatctttggaggtgggtgagcacctttcctttttctttgtaacaccactccatccctttgcgctcctatatcacccttcc

SEQ ID NO: 10452 - DNA, 600 bp, Chicken  19866894212168_1
atgtggggctgggaacatgaagcactacagctgctcggcggtgctcagtgggaaggctgagccctgaggtgtggctgaggatgctgagcccagcagaacatctctctgtacctcctaagggtgtgctgctcgggcagctcagcaaattggcactgcggtgagagcagaggcagatgcagagcgctgtatgcaaggaggcaatggcgtgacttctgtcggaaggtgacttctgtactttgcatgaaagcaatgggcagcgtgcactgctggttgtctctcatttgacacacaaggagcacrtatcaggggtcaccgctgtgtctcagtctccattagctgtgttgggttgggtttttttgtcagctttaattacacggcgtgtcctcagggctgctgcacatcttgctgcacggggatgggctgcttccatgctctgtgccaacacctgcattgctcacaaggagctgggcacaggggatggggacagtgctggagccacagccaggcccatcggcagggtgggacgtggctccttgtccctgcctggaggtgacaggtgcgtatctgtaaaagcacactaatgagctgctgcaatcagat

SEQ ID NO: 10453 - DNA, 385 bp, Chicken  19866894212170_1
agccatagaacacatgggtcttgtggagatgtatgtagagtcacagagtgtgacaagtgacagacaacacatagcactgggtaaggtttgtgttccatctaaccttcacctcaaagggctctacacagtctgagtttcttaaatagcatcccttcttattcctccacaagtctagaaaccttgtttaacatctgtgttttttgctggattttggttgtctggtgattctgaaacagcttaaaatcatgttcagaatagtaaaatacttactagtttcttctctatttcttttccactttsccaaattggtctgtatataacccatctcaatgtatctttcctactcttttcatccataatacaaagacactgtttagggttaagg

SEQ ID NO: 10454 - DNA, 599 bp, Chicken  19866894212172_1
  misc_feature (1)..(20): n is any nucleotide
nnnnnnnnnnnnnnnnnnnntacgggccctaattactgctttcgctgaacggctcgacgggaagcggagcgctgcagacgtgcggggaggagagggaaggctcagccctgtgtgccagaggatggcacgaggggtccccggtgccagctgtccccaaggacagccaacacgcgtccccccagcaggatgccaggatggccaccgctatcagagcagcgaatacattccattttagaagcgatatctgaaggccccgtggggttgcttgccctcacagcagggtcctcctgcccacgggayggaggaaaggcggcctcccagccccgctcccacctcacctctctgttacgcatagagctaattgaaggagacgggcgcgcaagccaaaasagcagaaatgtaagaactcctgcaaacagcacgcagtatcccagctcccagccctgagcgctcccttcctgctgctacagcacaagcaggagccccacaggtgcctgcagccctcgcgcatcaccctgggccacgtccgcagcgctgggctggtggcgagtctgaaagcagcgctgccacgcaggtatcccggctcagctggggaacgc

SEQ ID NO: 10455 - DNA, 600 bp, Chicken  19866894212172_2
agagggaaggctcagccctgtgtgccagaggatggcacgaggggtccccggtgccagctgtccccaaggacagccaacacgcgtccccccagcaggatgccaggatggccaccgctatcagagcagcgaatacattccattttagaagcgatatctgaaggccccgtggggttgcttgccctcacagcagggtcctcctgcccacgggayggaggaaaggcggcctcccagccccgctcccacctcacctctctgttacgcatagagctaattgaaggagacgggcgcgcaagccaaaasagcagaaatgtaagaactcctgcaaacagcacgcagtatcccagctcccagccctgagcgctcccttcctgctgctacagcacaagcaggagccccacaggtgcctgcagccctcgcgcatcaccctgggccacgtccgcagcgctgggctggtggcgagtctgaaagcagcgctgccacgcaggtatcccggctcagctggggaacgcggctccgctgcagtgattaatttctctttcttaagcaggattactttaattttcaaggcctaatggagtccagctgcgacggggagggaag

SEQ ID NO: 10456 - DNA, 600 bp, Chicken  19866894212176_1
cctgtctttgcctctggacaaagaagagagactaattttgtcaaaaatacccccttagcaagtcaggaggaggaaacaacctgaaatgcattgtgttgcatttctattctgtttaaagtgtgttagccctgaaacctactgcagaaaggctttgaatagagtgggttaactgattcactctgatcgtgaaagtaatttcaaagagcactagtggagaagctggaatttctttggagggagtagagggaggtaattgactgctgtcaaagatttctgaaaggagaacaaaatacttttatyactgctctcttctgaaatataatgtctattccatccttgtcgaaatgtgggaggtaaaaaggagaatgtatcacctaagcagtaaccaaagctcaactgacttttatgtaatgaatatccagaactccctcctacaccttcctgggtgccaaaagttccagctgtcctttgtgcacctgccaaactcccctttttctcaacagctgctgcaaagtacttgtgagtatttggtgcaaagctctgtaatgtaacactgagtagattatgttagatcattgagaaggtgactaaagcaatttt

SEQ ID NO: 10457 - DNA, 600 bp, Chicken  19866894212177_1
gaaagactgaactctttagcctcttgatcccacagctgaactgttttcttaatatttttgaatgttcctgtaagatcgccatgttttttgttggctgttgtgccttttatttttcaatttaacagttaagaccgtagttcctacatcctaataaaccactaaactgatccaaaaaagagatatgtattagatgtgttctaccagacattcccttgactcttgcagctgttgctgtcatgagtataataggacaatctgaatagaggcaaaggaatgcatttttactctaaatattttacwtattctgctgtcacagtagctgatttgaatgttctcctgaccagtgctgctatgtactgagaaggaggtcagagtaggtgataacagtggtcccttgtagctttataatctatgaatctggggaactgtaacttctaagaaatctgcttaaaaaggttagttacagagaagccaataaaaaatgattggggaaggcaccccctaccataattcctaataatggttctaaatacatagactggagaaatgtgacacaaattatagatggactattttttaattaagaagaaagaaaagaag

SEQ ID NO: 10458 - DNA, 600 bp, Chicken  19866894212178_1
atgagaaaagtatgccacgcagaagaacgaacatccagcactcaatacatcctacaaaggctctctaaaaatgaggtaaaacacaactgtgaagtagctaatgaagccaggaaggaattgctgaagtacagtttttcatagtaccaagcataacgaaacagcatatcttaaaaggtttacctgtccaaacaacagtatgtactacttgaggcccaccttactttgaagcccatacaccaaaccagagccaactagagccgaacttgacaagtcatagtactgcacaagatacaaagagcrttctatctctgtgccagctattgttttgcttcacatgaaaattcttctgattccatgtgaagacccagtgaagaagtgatgtcgtagaattaatgtgtgagccctccaagtctgacctaccaaagcaccagttccctccacttcagatacaactttctgccttcagcatcacatgagcaattacacagtgattcagcccaaagctaacccagaaataaaaagaattatttccgagctaggtcagttccctgagtcacagcagtgacagcggaggatgtgagaaggcacagatcgcacact

SEQ ID NO: 10459 - DNA, 600 bp, Chicken  19866894212188_1
tgcacaaaaacctctcctaaatctggtgctgctcagcatttccaggaatgactcagagcccaagcagagctttttatgtttgcagtggacaccaggctgggaagaactgccagcatgctggacacggcactggagctcaaggccaaggaggaaaaaagaatgggagttgctgatctgaggttaggagtgcatacagaagtgccaactgaagcagcagctctgtgtcacctgcagatcctatgcatgagccaggattgtgctcttgggagaggggcagaccttgcagagaggggctggcaytgcagccctctgccctctgatggcagctggagggctcgtccagtttgggtagatgcagagcacggagaaacatgaaagagcagggaaaagcactgcaaggctggaaaaggcaagggattgtggttatttaatccagcaaacagacagctgtgttaaagtcagaacctggatgtggctctgggcagcctggtctggcggttggcgaccctgcacattgcaggggggttgaaactcaatgatcattgtggtccttttcaacccaggccattctgtgattctatgatgattctatgattcaag

SEQ ID NO: 10460 - DNA, 600 bp, Chicken  19866894212188_2
agtgaagaaacctttcacacctgcttttggcagcacaatgcgtagctggctgaaatcacagatttaattagataccaagaaaacctttccagcccttggagcagtgcagctctggagccgactgtgtgggaaagctgctgggactgctgaacatgggctggttcaccaggcaaggtgctgggtttgtctgtgagccttgccctcaggcagcaggaagtagctgaccctcaggggtttttagggtaatgaagctgtgttacgttactacagtttttaccttagggtgttactattagtaawgcactggcacaggttgctgagcaaggtggtggatgccccatccctggagacactcaaggtcaggctggacggggctctgagcacctgatggagctgtaggtgtccctgcttattgcagaggagttggactagatgacctttaagggtccattccaactcaaattattctatgattctaatagcctatgtggcctgtttgaccagagaagagcaccaagttggtgttctcaggcttacagaatcccttcagcacagggtacatctgagctgcagccaagatggtctccatccctccgacat

SEQ ID NO: 10461 - DNA, 599 bp, Chicken  19866894212190_1
  misc_feature (1)..(40): n is any nucleotide
nnnnnnnnnnnnnnnnnnnnnnnnnnnnnnnnnnnnnnnncagtatcctaacccttctgctataacataggacacagcctatgtagaaatttctctcaatgttcaggatactttaggttccaccctgttggcaggcagtgccaacgtttttaacaactcaaatcttcatctcagagttgtttaacattctcttcataaaaatttgagctgcttaccacaagatatcatctctgcttaaaaaggattttcttgtttttgtgagtcttcattgtattatttccttaatagaattcctttctrtayaaaatgaaaactattccacttacagtttacaactgatttctaattctccctattcccaccactgcaaacttccactcttcttactgaacaactttctgaaggtttttaatctgctcttttgttcctcagggaaataaatcaagaatgagaactgtttgtattccctcttacacacaagctctagcatgagcaatgaacacagtacgtactatayagctacagcttatttacttatcctctccagctatcccagagattagagcaacgcatgaaggaagactcagaaaagcaacata

SEQ ID NO: 10462 - DNA, 599 bp, Chicken  19866894212190_2
  misc_feature (1)..(37): n is any nucleotide
nnnnnnnnnnnnnnnnnnnnnnnnnnnnnnnnnnnnncagtatcctaacccttctgctataacataggacacagcctatgtagaaatttctctcaatgttcaggatactttaggttccaccctgttggcaggcagtgccaacgtttttaacaactcaaatcttcatctcagagttgtttaacattctcttcataaaaatttgagctgcttaccacaagatatcatctctgcttaaaaaggattttcttgtttttgtgagtcttcattgtattatttccttaatagaattcctttctrtayaaaatgaaaactattccacttacagtttacaactgatttctaattctccctattcccaccactgcaaacttccactcttcttactgaacaactttctgaaggtttttaatctgctcttttgttcctcagggaaataaatcaagaatgagaactgtttgtattccctcttacacacaagctctagcatgagcaatgaacacagtacgtactatayagctacagcttatttacttatcctctccagctatcccagagattagagcaacgcatgaaggaagactcagaaaagcaacatatcc

SEQ ID NO: 10463 - DNA, 600 bp, Chicken  19866894212190_3
caagatatcatctctgcttaaaaaggattttcttgtttttgtgagtcttcattgtattatttccttaatagaattcctttctrtayaaaatgaaaactattccacttacagtttacaactgatttctaattctccctattcccaccactgcaaacttccactcttcttactgaacaactttctgaaggtttttaatctgctcttttgttcctcagggaaataaatcaagaatgagaactgtttgtattccctcttacacacaagctctagcatgagcaatgaacacagtacgtactatayagctacagcttatttacttatcctctccagctatcccagagattagagcaacgcatgaaggaagactcagaaaagcaacatatccccaagtttcttctcaacagcttccattcagaaagggctttgaaaattaggcaaaggcttccagttaaataagggagcccacagtagagtaaaaaaagaaaatttagttcattaccctgcacagtgtctgtctagaactttaatacaatgtgaaattcatgttgagtagcgtaattctcatttctgacaaagcaggttttaacactgtacttccat

SEQ ID NO: 10464 - DNA, 599 bp, Chicken  19866894212205_1
  misc_feature (1)..(174): n is any nucleotide
nnnnnnnnnnnnnnnnnnnnnnnnnnnnnnnnnnnnnnnnnnnnnnnnnnnnnnnnnnnnnnnnnnnnnnnnnnnnnnnnnnnnnnnnnnnnnnnnnnnnnnnnnnnnnnnnnnnnnnnnnnnnnnnnnnnnnnnnnnnnnnnnnnnnnnnnnnnnnnnnnnnnnnnnnnnnnntaagtcctctcctgttttgctaaccatttacgtaactgttcagtaaacctaaataatctcctcccatcttgtcctttttccttccaggaaactcagatccggggtttgagggctgccacgaagccrggaaccttcagtgctcactgctctgcggtgttcatttggacattaataacttcagttatccccagataaattcagtgcatggcccagggagaagrgaaaaagagaacagagagccacaaatacaccctcagcttcaaaaactgtttcatgagaagagagaccccatgactgagtcttgcaattctaccagcatgggaactgtagggaaacaaagcaaaaagccccctcgtatgacagataagagaagtgatgtcttcaagtcagctctcacacacatcatcttgcgtaaatcttatttc

SEQ ID NO: 10465 - DNA, 599 bp, Chicken  19866894212205_2
  misc_feature (1)..(79): n is any nucleotide
nnnnnnnnnnnnnnnnnnnnnnnnnnnnnnnnnnnnnnnnnnnnnnnnnnnnnnnnnnnnnnnnnnnnnnnnnnnnnnntaagtcctctcctgttttgctaaccatttacgtaactgttcagtaaacctaaataatctcctcccatcttgtcctttttccttccaggaaactcagatccggggtttgagggctgccacgaagccrggaaccttcagtgctcactgctctgcggtgttcatttggacattaataacttcagttatccccagataaattcagtgcatggcccagggagaagrgaaaaagagaacagagagccacaaatacaccctcagcttcaaaaactgtttcatgagaagagagaccccatgactgagtcttgcaattctaccagcatgggaactgtagggaaacaaagcaaaaagccccctcgtatgacagataagagaagtgatgtcttcaagtcagctctcacacacatcatcttgcgtaaatcttatttctcaattcctattttcttccagtgtctttttcacttcccctggtgatggaaaccaaagggatgtaaagggagaactatctaaaagatgttccttct

SEQ ID NO: 10466 - DNA, 600 bp, Chicken  19866894212205_3
tgagaagagagaccccatgactgagtcttgcaattctaccagcatgggaactgtagggaaacaaagcaaaaagccccctcgtatgacagataagagaagtgatgtcttcaagtcagctctcacacacatcatcttgcgtaaatcttatttctcaattcctattttcttccagtgtctttttcacttcccctggtgatggaaaccaaagggatgtaaagggagaactatctaaaagatgttccttctcttccaagcatgtgccctcctcattgtacatgctgggttagcatgactgctaarggaaaagatttgttccactctctgcaagctggtaacatgctgggcaccgtacctgggaagggctggaacagtaatgggtttgttacaggaaayggagaagcagcacagctagttggaaactgtgagtgatctgctgggactggaatgggtgaggacagcactgctaaatcgatccaaagccaacaccaagacttyaacgtcctgacttaagttggttaattgcttccatcaattctagatccttgatttaaaattaattatggagaaaataacaaagaattttacttctgataattctac

SEQ ID NO: 10467 - DNA, 600 bp, Chicken  19866894212205_4
gagaagtgatgtcttcaagtcagctctcacacacatcatcttgcgtaaatcttatttctcaattcctattttcttccagtgtctttttcacttcccctggtgatggaaaccaaagggatgtaaagggagaactatctaaaagatgttccttctcttccaagcatgtgccctcctcattgtacatgctgggttagcatgactgctaarggaaaagatttgttccactctctgcaagctggtaacatgctgggcaccgtacctgggaagggctggaacagtaatgggtttgttacaggaaayggagaagcagcacagctagttggaaactgtgagtgatctgctgggactggaatgggtgaggacagcactgctaaatcgatccaaagccaacaccaagacttyaacgtcctgacttaagttggttaattgcttccatcaattctagatccttgatttaaaattaattatggagaaaataacaaagaattttacttctgataattctacaactggtagcatgcaattcatgtcccagcaaacagatttctgcttcctcaaacgtaggggcacaaagcaaaccagataactgcaatcacagaa

SEQ ID NO: 10468 - DNA, 564 bp, Chicken  19866894212205_5
atggaaaccaaagggatgtaaagggagaactatctaaaagatgttccttctcttccaagcatgtgccctcctcattgtacatgctgggttagcatgactgctaarggaaaagatttgttccactctctgcaagctggtaacatgctgggcaccgtacctgggaagggctggaacagtaatgggtttgttacaggaaayggagaagcagcacagctagttggaaactgtgagtgatctgctgggactggaatgggtgaggacagcactgctaaatcgatccaaagccaacaccaagacttyaacgtcctgacttaagttggttaattgcttccatcaattctagatccttgatttaaaattaattatggagaaaataacaaagaattttacttctgataattctacaactggtagcatgcaattcatgtcccagcaaacagatttctgcttcctcaaacgtaggggcacaaagcaaaccagataactgcaatcacagaatcagtgtcccagaagagggattgcttgcattcagccaccaactcgtactattcacctattgcacta

SEQ ID NO: 10469 - DNA, 600 bp, Chicken  19866894212207_1
aactgctttaaagcaagtaagagttttgattacgtctggcatcgacagtcatcctgaacatgaaaataacgatgagatgttggatctgtcagataactgaatgcgtttttcctgttcttcctttgtaattgaagcatgtatgatagcaatcactcgacaggttgctttagataggtcatgttatttgtggatttttggcagttaaactattaggcctcttagacctcacaaataaaaataggaagttctgtaatacttgcctatccaaagcctatgctcaacaaacaatggcttttatgracatcattaatttctgttgtaatcaaacacagaaggcagagcttgaaaggtttcacaattatactattaaatcttaaggtttcctacccccttagttgatatagtgctcaacatgcagcagtacatcacttttgcaagcatcccagttaatgctgtacataaatcttaacatgctttcacactattctgttaattacttctacaataaaagaattgatctttcgtcactcactgagtttataccaaaggaaaataaggtaggaagytcacatttaccaattccctttacaacagtgtttc

SEQ ID NO: 10470 - DNA, 600 bp, Chicken  19866894212207_2
aaagcctatgctcaacaaacaatggcttttatgracatcattaatttctgttgtaatcaaacacagaaggcagagcttgaaaggtttcacaattatactattaaatcttaaggtttcctacccccttagttgatatagtgctcaacatgcagcagtacatcacttttgcaagcatcccagttaatgctgtacataaatcttaacatgctttcacactattctgttaattacttctacaataaaagaattgatctttcgtcactcactgagtttataccaaaggaaaataaggtaggaagytcacatttaccaattccctttacaacagtgtttccctttatctcctataccctccataggctgggtaaaaaccacatttgttctcactttgtgttaatcccaaaaaaatgaaaagtaaaawatcagctccgtgagaaatgtgagattgtattaacagtgtcagaggtatttattcttcaaatcagtaagaatgcttttatattaggcatgaattgtataactaaggactccatacttatatatacgagagctgtatgttctatgtgaatatatttaactagaagaaaaaatagacatctg

SEQ ID NO: 10471 - DNA, 600 bp, Chicken  19866894212207_3
ccccttagttgatatagtgctcaacatgcagcagtacatcacttttgcaagcatcccagttaatgctgtacataaatcttaacatgctttcacactattctgttaattacttctacaataaaagaattgatctttcgtcactcactgagtttataccaaaggaaaataaggtaggaagytcacatttaccaattccctttacaacagtgtttccctttatctcctataccctccataggctgggtaaaaaccacatttgttctcactttgtgttaatcccaaaaaaatgaaaagtaaaawatcagctccgtgagaaatgtgagattgtattaacagtgtcagaggtatttattcttcaaatcagtaagaatgcttttatattaggcatgaattgtataactaaggactccatacttatatatacgagagctgtatgttctatgtgaatatatttaactagaagaaaaaatagacatctgtttataatactattcatcacagcagctggaaggcttggctacaatatattgttaaatcttttaagagagattatatatctcttttttcatcttaggtgaaaaagcactgagtagcatttgt

SEQ ID NO: 10472 - DNA, 600 bp, Chicken  19866894212209_1
aagaatgtcaatagaactccttatagaagttttacacagagtgtttaaatagatgttttttcctctcttcattatatttcttcagatattttataatgtctcttgattataaaagcaaaaaaataatgccataataaaaagactaaaggttttgtagagaaatactgccatgaaaagatgtgtaaagtttatggaaattgtctaaagaatactaggtgactatgtaaaagtaatgatatttgtgcagtaaggactattctagatagttccttagcattttttgtcactttcagattgccwcagtacttcctggcattctcaccaacttgtatctatttcaatcctgtgcttttaacataaatatgtgggaatacccagatgtgttttggtgtggcagtttatacttctgagctaccaatggtggtttcatcttatgatgtgatcaaatctctgaagaatttttgaaacaagatgtgaaaaacaaaatctagttaagaattgcatcttgtagtaaaatagattgtaaagtaggctgagaaaaatgcattatcattatctgctgaaggaatactaaactgaagatgttaatttcttcataca

SEQ ID NO: 10473 - DNA, 600 bp, Chicken  19866894212212_1
tttaaaatagtctaaactcaatcaatattgaaaggttggcgttgagtgggagattatttctttgtctactcagtgtgtttctatctccgtgtacacacagtcgtgtgtagaacgccttccattgctatccttgctcaaataaagcactgtttgcttacaagaagatttaacgaaatctccaaagaccagggtcatacagtttagcatcagtggaaagtgaagttctttcctgcagtagttttcctgggctgttcagtatttgaaaataggcaagacagctgtgtggtgctaggattgatstaaaaagcactcatgaatagttaaaggcatatgcatgtgctttggtgttgtacataactgcggatgtgtatatccactgtcagccctctgagacttggatctcaraccaagaatttctgtacatcttgaccttgcgcacgtcattgctctttgcatgagtaacagagcagatatgcagacaaatgatgatgagttgaatgtgactgtttaacaagtataattgaaacatcctcttatcttgaacctcttaatgtaattcactaataacaattcagtaccacagtgacactgtcaagaggg

SEQ ID NO: 10474 - DNA, 600 bp, Chicken  19866894212212_2
tgtagaacgccttccattgctatccttgctcaaataaagcactgtttgcttacaagaagatttaacgaaatctccaaagaccagggtcatacagtttagcatcagtggaaagtgaagttctttcctgcagtagttttcctgggctgttcagtatttgaaaataggcaagacagctgtgtggtgctaggattgatstaaaaagcactcatgaatagttaaaggcatatgcatgtgctttggtgttgtacataactgcggatgtgtatatccactgtcagccctctgagacttggatctcaraccaagaatttctgtacatcttgaccttgcgcacgtcattgctctttgcatgagtaacagagcagatatgcagacaaatgatgatgagttgaatgtgactgtttaacaagtataattgaaacatcctcttatcttgaacctcttaatgtaattcactaataacaattcagtaccacagtgacactgtcaagagggagttgacatcamatgaaaccttttttatttaaaaatatatatatatttaagaagrtgcagtgagacataaggaggttatgcatgttttcatgtgatctgtgggta

SEQ ID NO: 10475 - DNA, 596 bp, Chicken  19866894212212_3
atgaatagttaaaggcatatgcatgtgctttggtgttgtacataactgcggatgtgtatatccactgtcagccctctgagacttggatctcaraccaagaatttctgtacatcttgaccttgcgcacgtcattgctctttgcatgagtaacagagcagatatgcagacaaatgatgatgagttgaatgtgactgtttaacaagtataattgaaacatcctcttatcttgaacctcttaatgtaattcactaataacaattcagtaccacagtgacactgtcaagagggagttgacatcamatgaaaccttttttatttaaaaatatatatatatttaagaagrtgcagtgagacataaggaggttatgcatgttttcatgtgatctgtgggtaattattattaaagttggactccagagcttcaaaccccaaagccgttatcccattattattagaacattcttaatgcacaaacttattcgattctgctgtgaacaccgttgtttgttcacgtgttgtgtgatgtggaaatccacttacatgaagctttggtgcattaaagattgtggagagaaaaaggtgaaattctggatcgt

SEQ ID NO: 10476 - DNA, 553 bp, Chicken  19866894212212_4
aactgcggatgtgtatatccactgtcagccctctgagacttggatctcaraccaagaatttctgtacatcttgaccttgcgcacgtcattgctctttgcatgagtaacagagcagatatgcagacaaatgatgatgagttgaatgtgactgtttaacaagtataattgaaacatcctcttatcttgaacctcttaatgtaattcactaataacaattcagtaccacagtgacactgtcaagagggagttgacatcamatgaaaccttttttatttaaaaatatatatatatttaagaagrtgcagtgagacataaggaggttatgcatgttttcatgtgatctgtgggtaattattattaaagttggactccagagcttcaaaccccaaagccgttatcccattattattagaacattcttaatgcacaaacttattcgattctgctgtgaacaccgttgtttgttcacgtgttgtgtgatgtggaaatccacttacatgaagctttggtgcattaaagattgtggagagaaaaaggtgaaattctggatcgt

SEQ ID NO: 10477 - DNA, 600 bp, Chicken  19866894212215_1
aaagaagaaataccttcttgacatctcctgagggaggtggcattagctcccttcattgtggaaggagaggagatggggaaaaagaagaaactggaaagctggtacaagccagaaagttgtgctgtttcacaatatcgagagtgagggaaaaacaatgaaaattgttttatcatgctgccagacccatggccgtcaggagggtgcatctctgtgctatctcatataaagaaatagtgaatgaagccagaggcatctatgtgtgctgctgttagtgagccatacatagaaagtcagcccatytgcaattacgggcatctcagagttgtaactaatccatattatgctcactccactcagccccaaggcgtaagagytcattcctcttctatttctgaagtataaaacagaggcaaaccaaagcaatcatttagtttattatatgccaaaggtactctaggcactcaggccatctctaagcacygaccttggcaatccttagctcatttttgagaaagagaagattggatgttagtgataaaagcccctggcaccacagagctttggggaaaaaagatgtatgaagcccaagttttctaagca

SEQ ID NO: 10478 - DNA, 600 bp, Chicken  19866894212215_2
ggggaaaaagaagaaactggaaagctggtacaagccagaaagttgtgctgtttcacaatatcgagagtgagggaaaaacaatgaaaattgttttatcatgctgccagacccatggccgtcaggagggtgcatctctgtgctatctcatataaagaaatagtgaatgaagccagaggcatctatgtgtgctgctgttagtgagccatacatagaaagtcagcccatytgcaattacgggcatctcagagttgtaactaatccatattatgctcactccactcagccccaaggcgtaagagytcattcctcttctatttctgaagtataaaacagaggcaaaccaaagcaatcatttagtttattatatgccaaaggtactctaggcactcaggccatctctaagcacygaccttggcaatccttagctcatttttgagaaagagaagattggatgttagtgataaaagcccctggcaccacagagctttggggaaaaaagatgtatgaagcccaagttttctaagcacccagctaaacaaccatagacaacagtaggaaaactttttccttggtcagagatgacagtcttgcctttcacag

SEQ ID NO: 10479 - DNA, 600 bp, Chicken  19866894212215_3
acccatggccgtcaggagggtgcatctctgtgctatctcatataaagaaatagtgaatgaagccagaggcatctatgtgtgctgctgttagtgagccatacatagaaagtcagcccatytgcaattacgggcatctcagagttgtaactaatccatattatgctcactccactcagccccaaggcgtaagagytcattcctcttctatttctgaagtataaaacagaggcaaaccaaagcaatcatttagtttattatatgccaaaggtactctaggcactcaggccatctctaagcacygaccttggcaatccttagctcatttttgagaaagagaagattggatgttagtgataaaagcccctggcaccacagagctttggggaaaaaagatgtatgaagcccaagttttctaagcacccagctaaacaaccatagacaacagtaggaaaactttttccttggtcagagatgacagtcttgcctttcacagcccacttagcagcttttgctgccttttgctacctctcacctgccatggttggttcattaaatgctcagccccattaaatgctcagccccattaaatgctcaacccca

SEQ ID NO: 10480 - DNA, 600 bp, Chicken  19866894212218_1
tgtccagaagactttccatataaaacagtgatatctactaagcaatatttgagtgtgcatgtgtgtgcatatgtacacagatgctgtgaagatatcatggtcttacaggtagcaactggacaaggaagcacaggagtgagaattgttaagctgtgtaagcattactgctgcaaagtactcagaagtagaaagctgcgacttcctacactcataactcataaagtactagcaatgtcagttactacattttaatattaatacattccataattatttacagtagcagcaacttataaagtsttgatgtattcaccttaaggtcgatgcactggttggatgcgtcaacataaggctgatgtattcatgttcagcttgatgctaaagtcatagcactccattcagccatgacaaccttactctcatacagttttcccattgactacactagacaacgcttactgtttttaattggggacaaacagggacataagttttctttaccagtctttgttttgagaaaagtctggaggctagaataagacttcttgggatttgtgtaattagcaaacattttagaatgatctcagctccatgactatg

SEQ ID NO: 10481 - DNA, 600 bp, Chicken  19866894212220_1
caaccacaggaccaaatgccttatcaggcattttcctgacaaatgcacacatcctctgacaacgtgctttatggacttggaagctaatagggtacttatagcacagccgagaaacgtcatgcttaaaatttaggttaattttctgtcaagcaatgggaatttaagaagcctgaactgtgagcagcgttattaggacacatctactctgcacccagcattaactcttcttctctgaacaagacaatgggatagagtgtatcagctgtatcttcccctggctaaacatgttatgcccacggygcagacagcacactatctctaagcaactgtgcaaagcacgttatcttatcagagcactgcacttcagaacagttttcatcttgaggatgcagtaggttttgttccgtattttctcagtgacatgctgtacttgcacagaaaggagtgctgctggattgcaggaacttttcaacgttttctggcattgagataacactgcaacacctcacttatatttcaccagaaggaagataagccataggactctgtttggatgcaaaagcctgagctgggataagactgttgaagtgtttgtttttc

SEQ ID NO: 10482 - DNA, 600 bp, Chicken  19866894212222_1
tttcctgtatatggcatttgtttgttgtgttttctgtttttgcatcatagtcacttattttcattgttatctacaggtaaataaccaatgcagtaatcattctcttttttttttttctctcctcattttcctgctatggagaaaatcaggtgcttacaggaaatgtccaaacacaggctgaaccaaatctctgagtagtcctttcttgcatgtataacatatactaattaaaagtacccccccaaaaaagtacccaaaggtgcttaactcttaactctgctcttgatagatgagataaarttgccacaggacagggtaagtcatcagcagggacttacaaattccctgtcatctcttcattgaagattctaaatactgtattatcagtgggctctttggcaaattaaaacaccagaaagaagcagcgcaggactttacgtagagttcagaagatgaaaaggaaaagccggaagtaattaagtgccaacattttgttaatatgtggctcgcttaattgcttttgcttttgttcccttctgaaagtgaatgcatcattctctctttttcagagtttatacggtgatctgtatctgacagtct

SEQ ID NO: 10483 - DNA, 600 bp, Chicken  19866894212229_1
gggaaaggagatgagcagcccaacagagtttccccttctggtccaaacaccatggctgatcccaagctgccacaaagccactctgtcaagagaaaacgggcagagctgacatagtcttgaaaatctgtcccactgatagtttgctcacaccgttgaaatcttttgctgctcttccaatgaccctgcctgcatagagacgctcttgtccccctctgttccccaagggcacagactctcacccacccagagagctgccatgagtgccatgatcagcaccaatggggtgcagaggccgtggcwgggtggggagctctgggcactcaaacaaagggagaagtggacacagtttaaaggattttctgmtatktgtttagcttggctgctacactttgctgaagaaaagggaggttttactaaagctggaacaaacagtagatcagaacattaaataaagggttagcaaacctgccagtaatgctaggtcagttatgctgatgaggtcaaaatttaattccaccgtgaaatcataaatttcaagtacaagtgttcacatcaagtcaaattataatacctacccaacctctgagtgccctgaacagt

SEQ ID NO: 10484 - DNA, 600 bp, Chicken  19866894212229_2
aagctgccacaaagccactctgtcaagagaaaacgggcagagctgacatagtcttgaaaatctgtcccactgatagtttgctcacaccgttgaaatcttttgctgctcttccaatgaccctgcctgcatagagacgctcttgtccccctctgttccccaagggcacagactctcacccacccagagagctgccatgagtgccatgatcagcaccaatggggtgcagaggccgtggcwgggtggggagctctgggcactcaaacaaagggagaagtggacacagtttaaaggattttctgmtatktgtttagcttggctgctacactttgctgaagaaaagggaggttttactaaagctggaacaaacagtagatcagaacattaaataaagggttagcaaacctgccagtaatgctaggtcagttatgctgatgaggtcaaaatttaattccaccgtgaaatcataaatttcaagtacaagtgttcacatcaagtcaaattataatacctacccaacctctgagtgccctgaacagtttctttcatagtcattcacctgactggtatttgcaatactaaaatctaccctaggaagagaga

SEQ ID NO: 10485 - DNA, 600 bp, Chicken  19866894212229_3
tgccacaaagccactctgtcaagagaaaacgggcagagctgacatagtcttgaaaatctgtcccactgatagtttgctcacaccgttgaaatcttttgctgctcttccaatgaccctgcctgcatagagacgctcttgtccccctctgttccccaagggcacagactctcacccacccagagagctgccatgagtgccatgatcagcaccaatggggtgcagaggccgtggcwgggtggggagctctgggcactcaaacaaagggagaagtggacacagtttaaaggattttctgmtatktgtttagcttggctgctacactttgctgaagaaaagggaggttttactaaagctggaacaaacagtagatcagaacattaaataaagggttagcaaacctgccagtaatgctaggtcagttatgctgatgaggtcaaaatttaattccaccgtgaaatcataaatttcaagtacaagtgttcacatcaagtcaaattataatacctacccaacctctgagtgccctgaacagtttctttcatagtcattcacctgactggtatttgcaatactaaaatctaccctaggaagagagagaga

SEQ ID NO: 10486 - DNA, 600 bp, Chicken  19866894212231_1
gaagtaatatatgattggaccatagtattttcattacttcatcttgataaattgaacgttcaggaggaaaatatatatacgtaatggttatatacaatcaaaatagtatgtaataacattacaaagaatgaagtggaagtgaaataaagtagtatttaatcttgatagcccaaacatttttcctcagtcagaatagaggagctgggctgttggtctccacttgttattgcccttgattccaacctgagttgagtagccccaaagttttgtgctaacccttattatgctaggacttaataytttctcttttgtgagtggtttccgttggtaggttcacctacagaaatcaggtattcatgttttcttgaaaacgattgctgtttcacttccttgatacagtcacatttcctgattttttttcttgacagatacttatatttgctattttccgatgatgatcttcttccatttgagcactgggtcttcaacacagaggctcatcccttcccaattcttcgcaaagaggatgggagtaaagaagaaaaagaaaaatagatcgagttttaacttgcttcattccttatgtttctttccaggact

SEQ ID NO: 10487 - DNA, 600 bp, Chicken  19866894212233_1
atccatgctgcagtttccaccattgcacagaatgccaggactaagagtggtgttggttctgattggaaagttatgaacatccttcacaggtttgctttcaagctttttagggagctgttttcattcagttaatgctgaccttacacaagttaccttaacatatgcatacacatttctttgtgtatactcaaatgctttatcaggttagaacctgcaggggatgtaactagtagaagcataagggcttcttgacctggcaaacttctcaggcttttcacaagattgttaggttctcttatyctgctatttttaactatggaatttaatgtgtaaacttagaggtacagaatacaaagagcttgatgtactaaagtgcccagcagaaggcagggcagaccagtgtcacttgctaaatgatggcttcttatctttgatgaagaaaaacagaatggcaaacttatctaaataatgtggcctcttatttcttctactgtgcaggctcttaaatgagtggtgtgtatgcctttaaagcttttcactgtagtgctattgttatttcagttggcaagcttctcctgtgaaaggagagtccttccccac

SEQ ID NO: 10488 - DNA, 600 bp, Chicken  19866894212234_1
ttcctctggttgctgtcaggtctggcagatcttggagaatagaagcagagacgtatttacaaggccaggagtgtaccttttattcttgtcacggttaacacaaatagtgagtgtatgtgtttgtgtgagaagaaaataacgaggtgtgttttggcattcaaacctagcctaggcctcactctccctttggaagggaagttgtccacatctgtgcatgtctgtgttggtggtgtgcatgcttcaggcgttggtgctcagaactcaaggtggtttctctgataaccttcaagaactgtattyrttccgtgttgagaatctggatgagcgtactgttgccyagctctatagctcttcctgcttaggctcgcagttcctctgtactaatgaggtaattagtttgttacacctgcaggccgtacacattctgagaaaggcatgaaatgctgttctgtgagacctcatctatgtgtgcccaagtagaacaacttctgtttggttttttttttctaatggaatgctgaattatttctctttagttccagatatttttaaaccagatcaacagttcattggttgactcaaacatgctggttcgctgca

SEQ ID NO: 10489 - DNA, 600 bp, Chicken  19866894212234_2
tcctctggttgctgtcaggtctggcagatcttggagaatagaagcagagacgtatttacaaggccaggagtgtaccttttattcttgtcacggttaacacaaatagtgagtgtatgtgtttgtgtgagaagaaaataacgaggtgtgttttggcattcaaacctagcctaggcctcactctccctttggaagggaagttgtccacatctgtgcatgtctgtgttggtggtgtgcatgcttcaggcgttggtgctcagaactcaaggtggtttctctgataaccttcaagaactgtattyrttccgtgttgagaatctggatgagcgtactgttgccyagctctatagctcttcctgcttaggctcgcagttcctctgtactaatgaggtaattagtttgttacacctgcaggccgtacacattctgagaaaggcatgaaatgctgttctgtgagacctcatctatgtgtgcccaagtagaacaacttctgtttggttttttttttctaatggaatgctgaattatttctctttagttccagatatttttaaaccagatcaacagttcattggttgactcaaacatgctggttcgctgcat

SEQ ID NO: 10490 - DNA, 600 bp, Chicken  19866894212234_3
atagaagcagagacgtatttacaaggccaggagtgtaccttttattcttgtcacggttaacacaaatagtgagtgtatgtgtttgtgtgagaagaaaataacgaggtgtgttttggcattcaaacctagcctaggcctcactctccctttggaagggaagttgtccacatctgtgcatgtctgtgttggtggtgtgcatgcttcaggcgttggtgctcagaactcaaggtggtttctctgataaccttcaagaactgtattyrttccgtgttgagaatctggatgagcgtactgttgccyagctctatagctcttcctgcttaggctcgcagttcctctgtactaatgaggtaattagtttgttacacctgcaggccgtacacattctgagaaaggcatgaaatgctgttctgtgagacctcatctatgtgtgcccaagtagaacaacttctgtttggttttttttttctaatggaatgctgaattatttctctttagttccagatatttttaaaccagatcaacagttcattggttgactcaaacatgctggttcgctgcatcacgctgtccctggaccgatttgagaatcaatccgat

SEQ ID NO: 10491 - DNA, 600 bp, Chicken  19866894212235_1
cagtttggggcacaggtgtccagttttgggcacaggcctccagttttgggacacaggcatcccattttagggcacaggcatctcatttggggcacaggcatcccattctgggatacaggtgtcccattcttggatacaagcatcccattttggtgcgcaggcatcccgttttgggacacggtgcctgtagggagggccaagaagggggggatgttggccattcccaatctcaacaccttccccatgttgcaccaggagagtgaggatgcagtgaaagccctggccaaggagaaggacctkctggaacgggagaagtgggagctgcggaggcaagccaaggaggccaccgaccacgccagcgccctgcgctcccagctcgacctcaaagacaaccgcatgaaggagctggaggccgagctggccatggtgagctcagccttacagcatctcccatctgtgaggggtgcctggtttgggtcagggctcagcatttattgcactgaggtggatgcagcagcgttgcggcgttgcatttgagcattgtcaggagattgcacttttagggtttgttgctctgttgcctgggttcattgcagtgtt

SEQ ID NO: 10492 - DNA, 600 bp, Chicken  19866894212243_1
aaagtactgaaccagcaggatggtcctcggggccctgcagcaggattcacttccagctctgctctctgggcacatctcagtaaaactgcctccttcttatggcagtatctgaagaatttgcctcttcaaacctcctgtccccttccccaaacctgctgtgtttgctgtagctaacatatcttcccttctttcttaactttggcaacttgtggagtggtgcatctccctctcaaaacttcagtctgaccctactcctctttgcctgaatattggagctgactcagaacctgctgaagtccrtagsggaagtgccattcactacaaagggcttctgatggtttgcttgcagctgagccctccaggcaaatgccttttcatacatcccctttctttgccctggcctcaaaacccacttgtccacacagtgcaaatacaccctgttttaggcggtgctgcgccttgagaaaggaaggagcaagagggctaaagatatgttggtcccatcaaagctttacctagtcccatattcagaaaatcttttaggcrtcccctctcaactctaaataaaacacggtagattctttagtatttcttttattt

SEQ ID NO: 10493 - DNA, 600 bp, Chicken  19866894212243_2
tactgaaccagcaggatggtcctcggggccctgcagcaggattcacttccagctctgctctctgggcacatctcagtaaaactgcctccttcttatggcagtatctgaagaatttgcctcttcaaacctcctgtccccttccccaaacctgctgtgtttgctgtagctaacatatcttcccttctttcttaactttggcaacttgtggagtggtgcatctccctctcaaaacttcagtctgaccctactcctctttgcctgaatattggagctgactcagaacctgctgaagtccrtagsggaagtgccattcactacaaagggcttctgatggtttgcttgcagctgagccctccaggcaaatgccttttcatacatcccctttctttgccctggcctcaaaacccacttgtccacacagtgcaaatacaccctgttttaggcggtgctgcgccttgagaaaggaaggagcaagagggctaaagatatgttggtcccatcaaagctttacctagtcccatattcagaaaatcttttaggcrtcccctctcaactctaaataaaacacggtagattctttagtatttcttttatttacaa

SEQ ID NO: 10494 - DNA, 600 bp, Chicken  19866894212243_3
ccctactcctctttgcctgaatattggagctgactcagaacctgctgaagtccrtagsggaagtgccattcactacaaagggcttctgatggtttgcttgcagctgagccctccaggcaaatgccttttcatacatcccctttctttgccctggcctcaaaacccacttgtccacacagtgcaaatacaccctgttttaggcggtgctgcgccttgagaaaggaaggagcaagagggctaaagatatgttggtcccatcaaagctttacctagtcccatattcagaaaatcttttaggcrtcccctctcaactctaaataaaacacggtagattctttagtatttcttttatttacaaagacgaaaaaggggtaggttttttatactcgtcatagcagcaagaataagtgagaagcttatgaaggtctacatagggacaggagaaccatcartacaactaggatccttggcctatgtaagatatcaatttgcctgttgggacgagggattcagtgtctctttttgagctccatctggaaagaatcccaaagcacagcgaatagctgggtaaatcctgtgcttgctcatctgggaagctgt

SEQ ID NO: 10495 - DNA, 600 bp, Chicken  19866894212243_4
ggcctcaaaacccacttgtccacacagtgcaaatacaccctgttttaggcggtgctgcgccttgagaaaggaaggagcaagagggctaaagatatgttggtcccatcaaagctttacctagtcccatattcagaaaatcttttaggcrtcccctctcaactctaaataaaacacggtagattctttagtatttcttttatttacaaagacgaaaaaggggtaggttttttatactcgtcatagcagcaagaataagtgagaagcttatgaaggtctacatagggacaggagaaccatcartacaactaggatccttggcctatgtaagatatcaatttgcctgttgggacgagggattcagtgtctctttttgagctccatctggaaagaatcccaaagcacagcgaatagctgggtaaatcctgtgcttgctcatctgggaagctgtggggttttcttaacccgctacgtcctggaggcaaagggtcagtccacaccttgaggcagatgaagaagctgatgagcagaggataaggtttgccccagccctctttgttgtaggcagagtcaagtcctttgagcagctcttttgaggtgata

SEQ ID NO: 10496 - DNA, 599 bp, Chicken  19866894212246_1
  misc_feature (1)..(150): n is any nucleotide
nnnnnnnnnnnnnnnnnnnnnnnnnnnnnnnnnnnnnnnnnnnnnnnnnnnnnnnnnnnnnnnnnnnnnnnnnnnnnnnnnnnnnnnnnnnnnnnnnnnnnnnnnnnnnnnnnnnnnnnnnnnnnnnnnnnnnnnnnnnnnnnnnnnnnntatatatatatatatatatatatatatatatatatatttgtctagatgagctgtgaatggatgctttcaaagttaaaaacttgacaccacagggctgaccattaagcacacatccccacccaagctctgatcaccatcatcccccatctkcagtaaaatcaatacagaaatctaatcgttacagtgactatagcccctatagcactgcacaaacaccaagactgggggagtgcactgggaaaggtattttgtaaggaacagcttttagtaattagcaaaatttgccactgtgttcctgcccaggggttatttggaaatgattggtagcttcagatcacgtgcctgtgctcacatcaatgtcatgcccactgcagtcatctcagcaaagcagccaagggtaaagaaatgatggtctttacctgcagagagcactcttggtcatcaaggct

SEQ ID NO: 10497 - DNA, 600 bp, Chicken  19866894212257_1
aaaaaggaggggggaaagccagcaggcacttaactgctctcaagctgctcctttgtgccaagaccactccatctctggtattgtttacactgaaataaaagctgaacagtgtcggatcttaaaataacttgctgttttcagctcaggaaagccagggtcagggaagtttggagcaaatttaaagaggcaggatgactaagggatggactgagactcatacaaggaggcattcacatgcatgtacgtggtgcttaatcatcagcctggagcaaactgagttcaggcctctgggtctccctrtccgtactccctagactggatcgggccttgatcaagctgagatgtgacatctgcacttgttctcccaaggcaaatctgcagccacagttaggaaatcttcatacatgttagagaaggacaggtgggactgacccaaacgcccctgagatgtacaaccagtgggtctagatgtgaattrctgtgttttaaaaagaagagctccatgatgctgagtgcagaaagcactgatgggaacactgaggaagtgctgaatttatagggattgctgcagggtgacatccatagggtgagaggaaggag

SEQ ID NO: 10498 - DNA, 600 bp, Chicken  19866894212257_2
ttaaagaggcaggatgactaagggatggactgagactcatacaaggaggcattcacatgcatgtacgtggtgcttaatcatcagcctggagcaaactgagttcaggcctctgggtctccctrtccgtactccctagactggatcgggccttgatcaagctgagatgtgacatctgcacttgttctcccaaggcaaatctgcagccacagttaggaaatcttcatacatgttagagaaggacaggtgggactgacccaaacgcccctgagatgtacaaccagtgggtctagatgtgaattrctgtgttttaaaaagaagagctccatgatgctgagtgcagaaagcactgatgggaacactgaggaagtgctgaatttatagggattgctgcagggtgacatccatagggtgagaggaaggagctcaaagaggaactccatattgctttcctaatgcaagtcacctccaaatcctgaatggggcagggtgcattaggtcttcaggtgagttaagaagacatggttaggttggatacatggaggtaactaagacaggtctgcctcatacccaccatggttcaaactcaactcaaccactgat

SEQ ID NO: 10499 - DNA, 600 bp, Chicken  19866894212258_1
aaatgtcttctctctttgtgcttattagtgttcagtatggtttaacgccctgaatgtttcagattttatttaaatcttcagtgttaaaaaggaagtggcatggcttttcttttatgtgtccttttacagttttctcttatttatatgaagataagtgttttggtttcaatcaatagatctgtaacacatgcaattacatcacctctggatccttcctagaattaattgctctagtgaagcatgagaagtgtggtcctgtactgcatgcagacatgaaaataatggcttgaaattttaaascatactttatccaatagtatttttagtcacattttaaatgaaagtctgtagatgtcagtcagtgttcatgtgcatgcctgtgactgtatttctattttattaagagtttaatattgcttcttggtatttcaaagctataggcaaaaatgttaatgagaaagatatatttccatggtgagtatgtggtactgtaaacagaaaacaggtctagctttcaaaatccagatctggactccattcagaagttcataatttacactcctctgctcccttttagaaatgagtttgaagtgtgaaatt

SEQ ID NO: 10500 - DNA, 600 bp, Chicken  19866894212259_1
actctgtgcagaaattcgaaggctataactcatccgtgttgcaataggaaaaaagtttatgaatcatctaatactaactgaagtctttaaatagacttttacattatcaatgtgctacggacaagatttctcgttatagatttcccctagtttactcatatgcaactgtcagatatatacagtccggtagaatgtgcctggagaaaaataaataaacaaacaaacaaactagctggcttgcatgcactttcaaagtttatttaaactttgctttgtttatttatttaaactttgctttgrttatttatttaaacttgcttgcaacactgatgcattgttattattatgcattcatttagcatacaattattagcagaatatattttgcacttggaataaaatgggcttggtgtaaacactgaaaactgctggtaaattctatgtctctattgaatgacatggtggaaatgtttgattaattcatatttcagactcttgagaagccatttggatcttttggccaaattctagtgcctagttctctctgccagtcatttggttgggtgtcatgtgattcataagatatccttcacaaataag

SEQ ID NO: 10501 - DNA, 600 bp, Chicken  19866894212259_2
tattattatgcattcatttagcatacaattattagcagaatatattttgcacttggaataaaatgggcttggtgtaaacactgaaaactgctggtaaattctatgtctctattgaatgacatggtggaaatgtttgattaattcatatttcagactcttgagaagccatttggatcttttggccaaattctagtgcctagttctctctgccagtcatttggttgggtgtcatgtgattcataagatatccttcacaaataagtaggaaatgacatctctggcatgacaaaaatataaacygtaactaagacttgcatttttgaaatgatattttttcataagatcagtattagactgcattttctaagtgattcctgactagaattgaaccataaattctacataatcaacagaggtattgggaaaaataagtgagaaagaagcccaatcaaatgaagcgcctaaatctattaaatgagcaaaaaatttcccggttgttttattgagccttgcttcaagatgataaggaacacataatcagtaacagactaccagatattatcttttaagttactttgaagccagatgcacatcatattt

SEQ ID NO: 10502 - DNA, 600 bp, Chicken  19866894212260_1
cacttgtaatccttctgttttggtgattgatgagaagagcagaaagcagtgtttcttgggaacctacaggtttttcaagtgtccagggacaggcttgcaacaggcccagttggcttgcaagccctgacagcctcatataccaggtataaatcactttctccctctccttttccatggccctcaaccagtgtaacttccaagcagagtaggatcactctctgcccctgacagtggcctcctgggtgtgctccatcagcagcaacactgccctggaatgttcaaagcccaaaaagtgcagcrtgtgcatctkctggaacacctgagccacttcagctgcttctcagatttaatgagttacttccttgttagtaaggagaaagactgcttcctattgaaaggcttatgctgtttgtgactgtcttccaaaatatgctaacttttagatatgttgttggagctataacatgccataatgtacacagtattctctatatacagtgtttaataagttttatttttgattctttacttttcaggaagaccttggagcamaaatgacacttaaagtatactggcataggaatcactttgtgatgtgtt

SEQ ID NO: 10503 - DNA, 600 bp, Chicken  19866894212260_2
ccttctgttttggtgattgatgagaagagcagaaagcagtgtttcttgggaacctacaggtttttcaagtgtccagggacaggcttgcaacaggcccagttggcttgcaagccctgacagcctcatataccaggtataaatcactttctccctctccttttccatggccctcaaccagtgtaacttccaagcagagtaggatcactctctgcccctgacagtggcctcctgggtgtgctccatcagcagcaacactgccctggaatgttcaaagcccaaaaagtgcagcrtgtgcatctkctggaacacctgagccacttcagctgcttctcagatttaatgagttacttccttgttagtaaggagaaagactgcttcctattgaaaggcttatgctgtttgtgactgtcttccaaaatatgctaacttttagatatgttgttggagctataacatgccataatgtacacagtattctctatatacagtgtttaataagttttatttttgattctttacttttcaggaagaccttggagcamaaatgacacttaaagtatactggcataggaatcactttgtgatgtgttttctgtgatt

SEQ ID NO: 10504 - DNA, 600 bp, Chicken  19866894212260_3
tcagcagcaacactgccctggaatgttcaaagcccaaaaagtgcagcrtgtgcatctkctggaacacctgagccacttcagctgcttctcagatttaatgagttacttccttgttagtaaggagaaagactgcttcctattgaaaggcttatgctgtttgtgactgtcttccaaaatatgctaacttttagatatgttgttggagctataacatgccataatgtacacagtattctctatatacagtgtttaataagttttatttttgattctttacttttcaggaagaccttggagcamaaatgacacttaaagtatactggcataggaatcactttgtgatgtgttttctgtgatttgtttgtgaagaaagggggagaagaggatgtttagataacaaaacagaggagtggcagaatcctaggaaataccaatagtgtaaggaaggtttatcagatactcccacttaatgctttcagatgggagcatgtagtgtaatgcaaaggtaacacacttggaattagtaaactgaaatggttactttgcacaatttgcaattaacctttggagctttttatcaccagataactttaagaccga

SEQ ID NO: 10505 - DNA, 599 bp, Chicken  19866894212266_1
  misc_feature (1)..(186): n is any nucleotide
nnnnnnnnnnnnnnnnnnnnnnnnnnnnnnnnnnnnnnnnnnnnnnnnnnnnnnnnnnnnnnnnnnnnnnnnnnnnnnnnnnnnnnnnnnnnnnnnnnnnnnnnnnnnnnnnnnnnnnnnnnnnnnnnnnnnnnnnnnnnnnnnnnnnnnnnnnnnnnnnnnnnnnnnnnnnnnnnnnnnnnnnnnacccggggaaataggaggcggcagcatccagtgtggacagctggagggtgttcccttacccactgacttgtattttgatgttaatatccacaaggggtgactccatgattgctytccccagggccaccttcttcctttcctctgggctgaggtgcaccctggaaacgtggagtttgtgcatccctggctctctgtgtgttgagtataacagagctgtgatactctcattatctactgctcattctttctctgatctcacagaagttcctggcctcaattatatttagagacaattagttccacagcttaattataagctgcagcttaagaaaaaaataaaaaagttttaggactttaaatccgtcttctttttattggctgatcttattgttgcattttttgccttttttgca

SEQ ID NO: 10506 - DNA, 599 bp, Chicken  19866894212267_1
  misc_feature (1)..(17): n is any nucleotide
nnnnnnnnnnnnnnnnnctttgagggttgtaaggcactggaacaggttacccagagaaattgtgggatctacgtccctggaagtgtgcatggcaagtttagatgagaccctgggcaaccagatctggtcaaagatgtcccagtccaccacaggatgctggaactagatgacctttaaggatcccttccaacccaagccattctatgattctgtgattctatcattttatcattctttatattaacaataatttaaaactgatttatcaaagtaataagtcatatatatatatatttaaayattacttttcagatattattatctgaacatattttctatgctttaaatgtaaatgtaaatattaaaacaaaacagaccatttcaaagactttaaaaattagcttacacaaattaatcaagtctacatgggcttcaattaaaacttcttatgaataaaaagaataaaggyataccaatttaatcttaaaatatacttatgtactgatgataatatagcaaatatacaaaaattaacatatctaagcagatctatgaattggcacttttgttttattattgagtagttatttatgatgtgt

SEQ ID NO: 10507 - DNA, 600 bp, Chicken  19866894212267_2
acctttaaggatcccttccaacccaagccattctatgattctgtgattctatcattttatcattctttatattaacaataatttaaaactgatttatcaaagtaataagtcatatatatatatatttaaayattacttttcagatattattatctgaacatattttctatgctttaaatgtaaatgtaaatattaaaacaaaacagaccatttcaaagactttaaaaattagcttacacaaattaatcaagtctacatgggcttcaattaaaacttcttatgaataaaaagaataaaggyataccaatttaatcttaaaatatacttatgtactgatgataatatagcaaatatacaaaaattaacatatctaagcagatctatgaattggcacttttgttttattattgagtagttatttatgatgtgtatgtgtttcttcattatgctttttttttttttttcccttaggtccttccactcatccaaagctgtatatagactggaagaagttttggaagggaattttgccagaagaagtgctaaaagcataaggaaactatcagacacagttttcagtaatttaaatttctaatattt

SEQ ID NO: 10508 - DNA, 600 bp, Chicken  19866894212273_1
agcttgttttcctactatcacacagatcgaatattgatattaaaagagaggtttaaatatgttttagtgattatatattataaaagatatagaataaatgctaaatgcaaatattcattatttcattagcataacaggtgcaagctgagtgcttaaagcagtcaatagaaacaattatttctaaaatgttaaatgattttgtagctataattgcttactctttatttttgaagtataaaaagtagaagtgatagaaagaagagcctttaatgtaccttctttggctttggttaattttaygtacatttaaattattttccttcatatttaaagctataacatcataaaattaaagaagtgtgacgtggctaattattctggcactgcaattgtttttataacaattattttagactgcatattgtcttacactttatacaatttataactaaaaagccgttatctcaataagctatctagttggctgacatatactgctttctagccactaactttaacagtgtagcggacattgccactattggtcactcactgttcttttttgcaaaagatcttaattctatttaataatacttctat

SEQ ID NO: 10509 - DNA, 599 bp, Chicken  19866894212274_1
  misc_feature (1)..(40): n is any nucleotide
nnnnnnnnnnnnnnnnnnnnnnnnnnnnnnnnnnnnnnnnttcccaaactactcagacagtttctagggaagagtatttctaggcagaatgaaactgttacttgagtaactgtggatattgttaaggttcacaggctggccaccttaagaagagaagcactcacatgagcactgaaagtgtattgcgtataactcataaattcagcatatggtggctttaatacctgaggagaaagatgagtatttcccagatcacaattcaatatagtgggcaaagatgcaaacagccctatcagatayggctggattcagtaaattcagcagcctgacctagtaacagagctttttttttttctttttgactgtatctacagccatctttccctgtttatctttctcatcagtgcattaaaacataatcctctgagacagctgaacttcaggaggaatatgctygtctatctgctgatggtaaataatggtcacagtgatcactggtttggataaatgcccataaatgactgtttytctgaaaattccatttgwagatgtctaaataggtattttcataattgtattttgaatgttggaattaatct

SEQ ID NO: 10510 - DNA, 600 bp, Chicken  19866894212274_2
gcactcacatgagcactgaaagtgtattgcgtataactcataaattcagcatatggtggctttaatacctgaggagaaagatgagtatttcccagatcacaattcaatatagtgggcaaagatgcaaacagccctatcagatayggctggattcagtaaattcagcagcctgacctagtaacagagctttttttttttctttttgactgtatctacagccatctttccctgtttatctttctcatcagtgcattaaaacataatcctctgagacagctgaacttcaggaggaatatgctygtctatctgctgatggtaaataatggtcacagtgatcactggtttggataaatgcccataaatgactgtttytctgaaaattccatttgwagatgtctaaataggtattttcataattgtattttgaatgttggaattaatctgtaatcattaatgagacacatcatactctccaagcagaggaaggtaaaaaatctctgagcaagagtgaatttccctatgaaaatgtctgtccagaaccctgtgtagyrcacagttatggagccactgtaaatcatcccgtttaaactgaggcctctt

SEQ ID NO: 10511 - DNA, 600 bp, Chicken  19866894212274_3
ggagaaagatgagtatttcccagatcacaattcaatatagtgggcaaagatgcaaacagccctatcagatayggctggattcagtaaattcagcagcctgacctagtaacagagctttttttttttctttttgactgtatctacagccatctttccctgtttatctttctcatcagtgcattaaaacataatcctctgagacagctgaacttcaggaggaatatgctygtctatctgctgatggtaaataatggtcacagtgatcactggtttggataaatgcccataaatgactgtttytctgaaaattccatttgwagatgtctaaataggtattttcataattgtattttgaatgttggaattaatctgtaatcattaatgagacacatcatactctccaagcagaggaaggtaaaaaatctctgagcaagagtgaatttccctatgaaaatgtctgtccagaaccctgtgtagyrcacagttatggagccactgtaaatcatcccgtttaaactgaggcctcttataaaacaccgagtaagtgttttcactggaatattttctttcaaactgcagagggagaaatgtcacgtcagt

SEQ ID NO: 10512 - DNA, 600 bp, Chicken  19866894212274_4
cccagatcacaattcaatatagtgggcaaagatgcaaacagccctatcagatayggctggattcagtaaattcagcagcctgacctagtaacagagctttttttttttctttttgactgtatctacagccatctttccctgtttatctttctcatcagtgcattaaaacataatcctctgagacagctgaacttcaggaggaatatgctygtctatctgctgatggtaaataatggtcacagtgatcactggtttggataaatgcccataaatgactgtttytctgaaaattccatttgwagatgtctaaataggtattttcataattgtattttgaatgttggaattaatctgtaatcattaatgagacacatcatactctccaagcagaggaaggtaaaaaatctctgagcaagagtgaatttccctatgaaaatgtctgtccagaaccctgtgtagyrcacagttatggagccactgtaaatcatcccgtttaaactgaggcctcttataaaacaccgagtaagtgttttcactggaatattttctttcaaactgcagagggagaaatgtcacgtcagttgatatagattggagatg

SEQ ID NO: 10513 - DNA, 455 bp, Chicken  19866894212274_5
cattaaaacataatcctctgagacagctgaacttcaggaggaatatgctygtctatctgctgatggtaaataatggtcacagtgatcactggtttggataaatgcccataaatgactgtttytctgaaaattccatttgwagatgtctaaataggtattttcataattgtattttgaatgttggaattaatctgtaatcattaatgagacacatcatactctccaagcagaggaaggtaaaaaatctctgagcaagagtgaatttccctatgaaaatgtctgtccagaaccctgtgtagyrcacagttatggagccactgtaaatcatcccgtttaaactgaggcctcttataaaacaccgagtaagtgttttcactggaatattttctttcaaactgcagagggagaaatgtcacgtcagttgatatagattggagatgcaagaaatttatcat

SEQ ID NO: 10514 - DNA, 454 bp, Chicken  19866894212274_6
attaaaacataatcctctgagacagctgaacttcaggaggaatatgctygtctatctgctgatggtaaataatggtcacagtgatcactggtttggataaatgcccataaatgactgtttytctgaaaattccatttgwagatgtctaaataggtattttcataattgtattttgaatgttggaattaatctgtaatcattaatgagacacatcatactctccaagcagaggaaggtaaaaaatctctgagcaagagtgaatttccctatgaaaatgtctgtccagaaccctgtgtagyrcacagttatggagccactgtaaatcatcccgtttaaactgaggcctcttataaaacaccgagtaagtgttttcactggaatattttctttcaaactgcagagggagaaatgtcacgtcagttgatatagattggagatgcaagaaatttatcat

SEQ ID NO: 10515 - DNA, 600 bp, Chicken  19866894212275_1
gtctgtggaacactcttcgttttgtaggttacagatttaattaaataagcagacacttcaatttttaaaaacttattattaatttcaggtgtgctcacatttaattttagcttcctatctgtatcacgtgcttggagatggggaagtaaatctgcctttatatggcaatgagaaactttgtaaagcagtactaatgaggaagaaaatgaacgttaattaaacttgtggttacaggatgggctgaagctctggagtcctgaagcagcagctagatgggttgcttcattacagcctagaacmggagctgtgataggaatgggaatgaggagacaattaagttgctcactgagtgcacatttaattagccacaggaggtaaagctctaaaattcggggttttctgtagatcctaaatatgccaggcagtttttctgtcaaattagacttttaaagaatgcctttagaaatgtcagcagggttgggctgttgaggaggtgaggcccactccaacgtggaactgtgtggggagagctgctgggaggtctggctggtggggatgtacccagcatggcgatggggcagcaggtcccatggggaggtg

SEQ ID NO: 10516 - DNA, 600 bp, Chicken  19866894212276_1
atgttggttactaccaatcacctcgtctttattttccatgtgccttactaaggccttcaggaggatctgctccatgatcttgccaggcccagagctgagactgactggcctatagttctctggatctcaggggtctttttctttattgaaaatgggagttatgcttccctttttccagtttctgggaacgttaccagactgccatgaccctcatgatggatagcagcttggtggcttcgtcatccaattctcttagaacctgtggatggatcttgtcaggtcccatggatttgtgcatcrttgggttttttagacggtcttgaacccgatctttacctacagtgggctgatctttctctcagttcttagctttgcttcctgcagcttgggtggtrcagctagatcccttgctagtgaagactttcataatccctatcttaccagagagaaatatctcacacttcacagtcactccttactcgtcattgctttttggcagtatatacatctgtgaacaactgttttcaaggatgaaatacaggaagagtaacatttcatcagaaagtctctgatgaacaccttgagacttcaacaagaatt

SEQ ID NO: 10517 - DNA, 600 bp, Chicken  19866894212276_2
tgagactgactggcctatagttctctggatctcaggggtctttttctttattgaaaatgggagttatgcttccctttttccagtttctgggaacgttaccagactgccatgaccctcatgatggatagcagcttggtggcttcgtcatccaattctcttagaacctgtggatggatcttgtcaggtcccatggatttgtgcatcrttgggttttttagacggtcttgaacccgatctttacctacagtgggctgatctttctctcagttcttagctttgcttcctgcagcttgggtggtrcagctagatcccttgctagtgaagactttcataatccctatcttaccagagagaaatatctcacacttcacagtcactccttactcgtcattgctttttggcagtatatacatctgtgaacaactgttttcaaggatgaaatacaggaagagtaacatttcatcagaaagtctctgatgaacaccttgagacttcaacaagaattgtaaccactgccattgagccagcctgatgccttcatttcacacacacacacacatacacaaagtgaaatatcccactagttttgtgtttttattc

SEQ ID NO: 10518 - DNA, 599 bp, Chicken  19866894212287_1
  misc_feature (1)..(102): n is any nucleotide
nnnnnnnnnnnnnnnnnnnnnnnnnnnnnnnnnnnnnnnnnnnnnnnnnnnnnnnnnnnnnnnnnnnnnnnnnnnnnnnnnnnnnnnnnnnnnnnnnnnnnnacgtatgtgtgtgtgcatacagcatgtgcatttaaaaaaaatgcacccatgtataagagttgtcatattaaactggcttgttttgctttttccttaatacaaattaggattttttctgtgaatttagtgagcaatcaccatgtgttctttcaagatctctgttacaggtatgttccagtctttgagcaaagtaattarctttcatgactaatgtggattcatcctcttgctttaattatctacattatttgcacactacttagtaayacagattgtaaaaatcttctggagctactyaagtatcagatgcatgttctgatcccattgttttaaaacatttaaaaaaatattatttagactatgttggtacctgctggttgaagcacagtgttgaactttttcctktgccttaatattggccctgtacaggcatttttctgctgttctgcatctgctgactttagtctgggactgatcatatataaacttcttctgtt

SEQ ID NO: 10519 - DNA, 599 bp, Chicken  19866894212287_2
  misc_feature (1)..(33): n is any nucleotide
nnnnnnnnnnnnnnnnnnnnnnnnnnnnnnnnnacgtatgtgtgtgtgcatacagcatgtgcatttaaaaaaaatgcacccatgtataagagttgtcatattaaactggcttgttttgctttttccttaatacaaattaggattttttctgtgaatttagtgagcaatcaccatgtgttctttcaagatctctgttacaggtatgttccagtctttgagcaaagtaattarctttcatgactaatgtggattcatcctcttgctttaattatctacattatttgcacactacttagtaayacagattgtaaaaatcttctggagctactyaagtatcagatgcatgttctgatcccattgttttaaaacatttaaaaaaatattatttagactatgttggtacctgctggttgaagcacagtgttgaactttttcctktgccttaatattggccctgtacaggcatttttctgctgttctgcatctgctgactttagtctgggactgatcatatataaacttcttctgttgctgcagcagtaactgatgattaggattcaatagagttttcaaattgctgcttcatttaccctgaaaca

SEQ ID NO: 10520 - DNA, 599 bp, Chicken  19866894212287_3
  misc_feature (1)..(3): n is any nucleotide
nnnacgtatgtgtgtgtgcatacagcatgtgcatttaaaaaaaatgcacccatgtataagagttgtcatattaaactggcttgttttgctttttccttaatacaaattaggattttttctgtgaatttagtgagcaatcaccatgtgttctttcaagatctctgttacaggtatgttccagtctttgagcaaagtaattarctttcatgactaatgtggattcatcctcttgctttaattatctacattatttgcacactacttagtaayacagattgtaaaaatcttctggagctactyaagtatcagatgcatgttctgatcccattgttttaaaacatttaaaaaaatattatttagactatgttggtacctgctggttgaagcacagtgttgaactttttcctktgccttaatattggccctgtacaggcatttttctgctgttctgcatctgctgactttagtctgggactgatcatatataaacttcttctgttgctgcagcagtaactgatgattaggattcaatagagttttcaaattgctgcttcatttaccctgaaacagtatcatgtattccttaactctgagtaaaa

SEQ ID NO: 10521 - DNA, 600 bp, Chicken  19866894212287_4
aggattttttctgtgaatttagtgagcaatcaccatgtgttctttcaagatctctgttacaggtatgttccagtctttgagcaaagtaattarctttcatgactaatgtggattcatcctcttgctttaattatctacattatttgcacactacttagtaayacagattgtaaaaatcttctggagctactyaagtatcagatgcatgttctgatcccattgttttaaaacatttaaaaaaatattatttagactatgttggtacctgctggttgaagcacagtgttgaactttttcctktgccttaatattggccctgtacaggcatttttctgctgttctgcatctgctgactttagtctgggactgatcatatataaacttcttctgttgctgcagcagtaactgatgattaggattcaatagagttttcaaattgctgcttcatttaccctgaaacagtatcatgtattccttaactctgagtaaaatacacttccttataggaggttttgatctgcatagggtgtccctggatgtgagaacctctttccctttgatcccaattaaataatgtgtaaaattgatggagaatatcta

SEQ ID NO: 10522 - DNA, 600 bp, Chicken  19866894212288_1
caggccctcttgctcacaaagggttaaatttgtcagcctgaacacataggtaagccaagtttgtttccaaaaataaacagacgtgcactgtgtagtgctccagcagacacaaatgcatacattgcatttggtatgcaaattgcgtaatggtaagtgtggctgatttgttgtttgcatcagcatttcttcagcttgtgaaatgtgctatctcagagataaaataaataagcccatctttaacatttttaaccaaaatatgtaaaacacattctattccattctaattctaatctgctaccyaaacaactggacagatggattttcctgccttacagtttgtgttaaataatcctggtgaaagcagataggaaacaatgatattgttttgtgcctgaacatttgctgaatggtgaaaaattgaacagatactacatcttttccaagttcttttacctcccacgagtaatggcactaaatagggagatacaaagataatggagggtatcagaaccagtacccagtgagaaaatacccatacctaggatattctctctgaagttactcaactggattccatttctttcaggctcttaaacagtc

SEQ ID NO: 10523 - DNA, 600 bp, Chicken  19866894212289_1
aaacatttgctactgctattctaataccaggtgttaaactctccaaatgaattgccaacaatagaattctagggaaaggagaggtctgagcatggtgaactttcctgtcaagaaatggataaaattggctctgaaaacaaaaagaacagtaagggaatacatgttgaaatccacaggaaaaataacgtacgtccctcagtcccagaaactggtcttctttggcacttgagaacgatcacaagtagtttgcctttttattcatatagaacaaaatttacaaagtcattcatacatttttgkttttttttttcttttgttttttactgacttcgaaaattgggaatattcaaaatacacttttaccccacttcattctttcattatttacacttatatacaagaaaaatgtaagagtttctttgctgttttttttttttttctgttttgttttaaattttgtattaaaaagctctgctggttgtgttactgtttgttttcatcaaatggatgttccatgagagggctccattgcttctggaatgactccccccggcacagactgaaatgacatagggattggggttttcacggggctctgac

SEQ ID NO: 10524 - DNA, 600 bp, Chicken  19866894212289_2
ggctctgaaaacaaaaagaacagtaagggaatacatgttgaaatccacaggaaaaataacgtacgtccctcagtcccagaaactggtcttctttggcacttgagaacgatcacaagtagtttgcctttttattcatatagaacaaaatttacaaagtcattcatacatttttgkttttttttttcttttgttttttactgacttcgaaaattgggaatattcaaaatacacttttaccccacttcattctttcattatttacacttatatacaagaaaaatgtaagagtttctttgctgktttttttttttttctgttttgttttaaattttgtattaaaaagctctgctggttgtgttactgtttgttttcatcaaatggatgttccatgagagggctccattgcttctggaatgactccccccggcacagactgaaatgacatagggattggggttttcacggggctctgacgaaatagtcctccatttggcgacctgtgtttacactgtatggagggcatggtggccgagctgctcaggggcagcggcaggttgctgccagaggcagctgtgagtgtcctgctggcaccatgagttg

SEQ ID NO: 10525 - DNA, 600 bp, Chicken  19866894212290_1
accctattaaaatgagcaatgagtcttacttataaaactttgtccatgccaccatctctaagcttccaggcttgtgagcaaaactggagaccagattggcttctgacgtctggatacattatcaaactctagaacagcatcttagaagtcaaaagttataaatttacaaggaaataaatgagcagtcttctctgagcagtggaacccatgaggatttttgttttcatactctatggaaagaataaaagatctgccacaatacagagaaatccagaaacaactttaatatcacctactacmaatttctcctttttctttctattcctaaaggtgaaatcctggctaggcagaaattagcaggaggacaattgctgcagagacaggatttcactcccacatcgaacttccctcagataatcttggaacaaactgtgtccccagagccatarcagcatcagatgaacggtgcaaagcmtgtgcccccactaagcacctttgtcagcagcacctgagagaaggccgggttgtacaggggtggaaaaggtagcaaggagtccaagggccatcagtagagcttggaactgcatgagtaaatttatc

SEQ ID NO: 10526 - DNA, 559 bp, Chicken  19866894212290_2
caaaagttataaatttacaaggaaataaatgagcagtcttctctgagcagtggaacccatgaggatttttgttttcatactctatggaaagaataaaagatctgccacaatacagagaaatccagaaacaactttaatatcacctactacmaatttctcctttttctttctattcctaaaggtgaaatcctggctaggcagaaattagcaggaggacaattgctgcagagacaggatttcactcccacatcgaacttccctcagataatcttggaacaaactgtgtccccagagccatarcagcatcagatgaacggtgcaaagcmtgtgcccccactaagcacctttgtcagcagcacctgagagaaggccgggttgtacaggggtggaaaaggtagcaaggagtccaagggccatcagtagagcttggaactgcatgagtaaatttatctactttccccccaaatttttctccaaaaatctaaacttatgaaggaagttacatcagaaaacctttggaagcccataaaataacatttgagaaacaaagcagaactac

SEQ ID NO: 10527 - DNA, 533 bp, Chicken  19866894212290_3
aaatgagcagtcttctctgagcagtggaacccatgaggatttttgttttcatactctatggaaagaataaaagatctgccacaatacagagaaatccagaaacaactttaatatcacctactacmaatttctcctttttctttctattcctaaaggtgaaatcctggctaggcagaaattagcaggaggacaattgctgcagagacaggatttcactcccacatcgaacttccctcagataatcttggaacaaactgtgtccccagagccatarcagcatcagatgaacggtgcaaagcmtgtgcccccactaagcacctttgtcagcagcacctgagagaaggccgggttgtacaggggtggaaaaggtagcaaggagtccaagggccatcagtagagcttggaactgcatgagtaaatttatctactttccccccaaatttttctccaaaaatctaaacttatgaaggaagttacatcagaaaacctttggaagcccataaaataacatttgagaaacaaagcagaactac

SEQ ID NO: 10528 - DNA, 600 bp, Chicken  19866894212291_1
agggaactcagaaatatccagatcccatacatttctgtaggtgatgcagtggcattaagctactccttgtcagccctgctggtctcctgttatctgttctgatggctgaacagaagcagacataatagcgctgcattttactcacaggcactgagaacctcattcagtgcaccgatccatctgtcttgtcttcctgcctgtctacatctgaaccaggacgggcacaatctcttttggatgccaaatgtctcacaaggctgctttttgcttcccgtttgactgcactaactgtgtctctcrgtcccagatccacagcccgtattaactctgtcttctctcataaagctcaacctcagatcagttttccactgcaaattacattttccccattaacgcattaagctcagcctcaccacctctgagccatttctttacatcagagcaagttttgctccctcacaaattactgcactaagatgcagtaagaattatggcgattaatagcatggggcccagataatctttcctatgctgcatttgacattaagtacagaatatacaagaaaactacctaggttacagattttattctaaaacata

SEQ ID NO: 10529 - DNA, 599 bp, Chicken  19866894212297_1
  misc_feature (1)..(112): n is any nucleotide
nnnnnnnnnnnnnnnnnnnnnnnnnnnnnnnnnnnnnnnnnnnnnnnnnnnnnnnnnnnnnnnnnnnnnnnnnnnnnnnnnnnnnnnnnnnnnnnnnnnnnnnnnnnnnnnntggctatggcaacagctgttgagaagaactttctattgtaataatattccacaaggtggccttgagcatagatgtttcctctttctgctgcagctttcaagcactccagagaggccttagtgttccgacgtacaccttgtccatagagatacataacaccaagtgcaccctgtgattccaggcttccrttgccacatgcttctgaatgccagaaaaaggcctaagcaagaggcacaaagttgtttcctgtttacctcaatgaatgttttgcattatctaatgaacttttgatgcgatgtactcactttagctggttgtcttgcataccgtttcattaaaaccctttacgtcaactagtcagtaagaagtgcttacgtgtaaaagaaagcagaatccccagcrrgcttttaaacctgcatcatttactgagagctgtcaaccagcaayacctgcttgatttttgaagggcatcaaggctggcagaatt

SEQ ID NO: 10530 - DNA, 600 bp, Chicken  19866894212297_2
actccagagaggccttagtgttccgacgtacaccttgtccatagagatacataacaccaagtgcaccctgtgattccaggcttccrttgccacatgcttctgaatgccagaaaaaggcctaagcaagaggcacaaagttgtttcctgtttacctcaatgaatgttttgcattatctaatgaacttttgatgcgatgtactcactttagctggttgtcttgcataccgtttcattaaaaccctttacgtcaactagtcagtaagaagtgcttacgtgtaaaagaaagcagaatccccagcrrgcttttaaacctgcatcatttactgagagctgtcaaccagcaayacctgcttgatttttgaagggcatcaaggctggcagaattttaatccgctctatctttctctctgatattcctactacatagaaataaatctcagctagcagtgtcaagccagtccaaagggagacgtactgaccttctcctcctacgggcttaaatgaatgataatgtctaggattacttggaatacacagttttaaagagtcaaatataccaccacaaccttcttgtgaaatccaaaattagttgggactcat

SEQ ID NO: 10531 - DNA, 600 bp, Chicken  19866894212297_3
ctccagagaggccttagtgttccgacgtacaccttgtccatagagatacataacaccaagtgcaccctgtgattccaggcttccrttgccacatgcttctgaatgccagaaaaaggcctaagcaagaggcacaaagttgtttcctgtttacctcaatgaatgttttgcattatctaatgaacttttgatgcgatgtactcactttagctggttgtcttgcataccgtttcattaaaaccctttacgtcaactagtcagtaagaagtgcttacgtgtaaaagaaagcagaatccccagcrrgcttttaaacctgcatcatttactgagagctgtcaaccagcaayacctgcttgatttttgaagggcatcaaggctggcagaattttaatccgctctatctttctctctgatattcctactacatagaaataaatctcagctagcagtgtcaagccagtccaaagggagacgtactgaccttctcctcctacgggcttaaatgaatgataatgtctaggattacttggaatacacagttttaaagagtcaaatataccaccacaaccttcttgtgaaatccaaaattagttgggactcatg

SEQ ID NO: 10532 - DNA, 600 bp, Chicken  19866894212297_4
gatacataacaccaagtgcaccctgtgattccaggcttccrttgccacatgcttctgaatgccagaaaaaggcctaagcaagaggcacaaagttgtttcctgtttacctcaatgaatgttttgcattatctaatgaacttttgatgcgatgtactcactttagctggttgtcttgcataccgtttcattaaaaccctttacgtcaactagtcagtaagaagtgcttacgtgtaaaagaaagcagaatccccagcrrgcttttaaacctgcatcatttactgagagctgtcaaccagcaayacctgcttgatttttgaagggcatcaaggctggcagaattttaatccgctctatctttctctctgatattcctactacatagaaataaatctcagctagcagtgtcaagccagtccaaagggagacgtactgaccttctcctcctacgggcttaaatgaatgataatgtctaggattacttggaatacacagttttaaagagtcaaatataccaccacaaccttcttgtgaaatccaaaattagttgggactcatgaaattcgtaaagggtgcaaatgggctttaccttcttcagatcct

SEQ ID NO: 10533 - DNA, 600 bp, Chicken  19866894212298_1
atgcatgaggccatttgggaatgatttcatgttgtctgcagacacgatagcgatgccctgaatttccctgggctgcaggcttaggcaggaggtgtgggactggagggatgctctgcaggctgagctcctccgggctcagggcagcagcactggggcttatggctggcatctgggcagagcctggatagtgaagttccccttccttgagtatcgcctgtgctcttgctttgggaagatgaggatatcagatgggagaagtgagctgagtatgttggttgaggggttaagaggagagtcatmacttctctgttgactgcagctgcttctagtggggggcatgtggaatttcatggcatttctcatgcaggctgccagtgtagaagacgcgaaaattgctatagaaaggataggagctgctgcacaaatacttgattgaggcaaagtttcctgcttctgcctaagtgtagcttcagcattaatggggacgtttctcatcttctgtgtgcagggcagggtggcactggctgccctctgagccgcttcttgctgctgttccaggggtacctcctacaaaggaacgtagggagctcaggacatgaa

SEQ ID NO: 10534 - DNA, 600 bp, Chicken  19866894212301_1
ctgtgattcatggaggtgtgcaaagcgctgcttaccagtgttgggagctctctgatgggagaatggtttctctgtggccacactgcacctcgttttggtatggcagcactgagcgaaggcagctgcaaccacacttctctttcttatgtattaggaaaggacacagtgtgccacaattactgctgctaattatgtgcaaggttctagagtacttctgaagatttagagtgcagtgctgcatttaccacacttggatttatagttaaagctacctcgtgagtacactgaatgacacagtgyacttttytccttcacattttggggcaaatttcaacattcgaaagcaaaacaagaatatgaattaatcactgcatgctgctgaggtttcagcatagttacagtgaatgatgggatggatcgtggcagctgggtgttaacctcagaatggcgacctgcgcagccccagacacacatgacactgacacatcaccattacacctctgtatcacagcactgatttgacaaggtctttatgcagatggttattttttagcatgtgattaattccagtgttttaattgcacacagagagaaatgaaa

SEQ ID NO: 10535 - DNA, 600 bp, Chicken  19866894212301_2
tcatggaggtgtgcaaagcgctgcttaccagtgttgggagctctctgatgggagaatggtttctctgtggccacactgcacctcgttttggtatggcagcactgagcgaaggcagctgcaaccacacttctctttcttatgtattaggaaaggacacagtgtgccacaattactgctgctaattatgtgcaaggttctagagtacttctgaagatttagagtgcagtgctgcatttaccacacttggatttatagttaaagctacctcgtgagtacactgaatgacacagtgyacttttytccttcacattttggggcaaatttcaacattcgaaagcaaaacaagaatatgaattaatcactgcatgctgctgaggtttcagcatagttacagtgaatgatgggatggatcgtggcagctgggtgttaacctcagaatggcgacctgcgcagccccagacacacatgacactgacacatcaccattacacctctgtatcacagcactgatttgacaaggtctttatgcagatggttattttttagcatgtgattaattccagtgttttaattgcacacagagagaaatgaaatctttct

SEQ ID NO: 10536 - DNA, 599 bp, Chicken  19866894212302_1
  misc_feature (1)..(1): n is any nucleotide
nagagtaaataagatagggcagaatatgtgttattgtaaaataaataaaaataataattgtttactgtgcagccaatgtgacaagaagattttgacagtggaaacaaagcggaagttgcaccgaggaagataaagtgtgtgccctcaggttgacaaggtctgaactaacttcaaaatgatgtggctaaggcttataaatcagcttaataaattcagggctgtgccttactcagtgatgaggagtctgtctagaagtaagtgctggtgcagttttgggtgttagaagatatttcacattgsgtgaagagtttgttgatgtggtttagatgcagcatactctgtaactctgcgcaactactgatgggaattcacaggcccagttctgcaaataattctttgtaacctttttgaatttagccaacaagacactagatgaggaaaagtgatttgtttgcttgggctcccagaaaacttcaggagcagtgtatttccctaaccacaatttctagttgtggatgtgcctgtcaccatctcctgcatgcatggaattctctgtggacaaaacacagcttagtgcaggtttgtgcaagtgcttgcta

SEQ ID NO: 10537 - DNA, 600 bp, Chicken  19866894212303_1
acaactttgttgatgttttccactgtttactatggctcccaggatatctgaatgaacaaaaagtgttagcatagcaatggtaaattgtaatgaccgagatccacctgctaggcagtattttaatgtttttctatcatttgcatttctacttcttctcagtaacaaagtacttactacaaacctgagtgcttttggcaactatcagcgaccaattaacagttaaaacatcaaatgaccaacatttctcagtgaattctctgagagcaaagggacatttcatagtctaaggtgagtacttckgtatagtaaggaaagcaaggaaaggaagacaaaaagtctcggtgacattaggatttcattactgtagtccctggctagctttgctgtttccctggaatatcaggatttcagcaataatyctatgcaaagcatgtatgggaaagtctggctgctgcaggggatgaaaacatcagctggagcaggctccctgccaccgtgttccttccaaacagaggacccatcccgtttctgataaggaatcgatgctccggccccaagggcccccgccttgtcccctggccctcagttgggctccccaac

SEQ ID NO: 10538 - DNA, 501 bp, Chicken  19866894212303_2
ttaatgtttttctatcatttgcatttctacttcttctcagtaacaaagtacttactacaaacctgagtgcttttggcaactatcagcgaccaattaacagttaaaacatcaaatgaccaacatttctcagtgaattctctgagagcaaagggacatttcatagtctaaggtgagtacttckgtatagtaaggaaagcaaggaaaggaagacaaaaagtctcggtgacattaggatttcattactgtagtccctggctagctttgctgtttccctggaatatcaggatttcagcaataatyctatgcaaagcatgtatgggaaagtctggctgctgcaggggatgaaaacatcagctggagcaggctccctgccaccgtgttccttccaaacagaggacccatcccgtttctgataaggaatcgatgctccggccccaagggcccccgccttgtcccctggccctcagttgggctccccaacctccatctccttttgtggag

SEQ ID NO: 10539 - DNA, 600 bp, Chicken  19866894212306_1
ggccagggcagcccagcccacttaccatttccttcacattcccgcatccatcagctcgataacattgcctaattctcaactccattgcaggaagacaacacacctctgcccctgccaccccctacccccccaaatgcagccacaacataaaagaccctataatacacagagcctcagaaactattctgtcccagaaacaattacaacactgaaaacactgatttgcaatcaaacaaagccattatgctgcatttgaaactgttcagcaaaacaagcaccagattctgtctatatagatcwcagacagtatttatatagatgcatgcacattgatacaaacatgaaactcgtaagtcacatcttattgcattagaacttttaacaaccagctgatttcttctttgaagctgcaaactgtatttgaatgaaaagagaaattaaaaatgtaaataaccagcactttacaattgcttcttctttgtaaaataaaattctgacgtgtttttagcaattgcagaaactgtgatttcagtggtaattccctgcaatgtcttcagataagaagcaaagacaaaaaaaccccaaacatttttacaagca

SEQ ID NO: 10540 - DNA, 600 bp, Chicken  19866894212310_1
atactagatgctattacagagttaaacaaggctgggaacagagaagaaactggaaaatctggacattaggctggggaaactagtatattagcctgattccttgcctctatcaagcagatgaagcagaagaattgaatcacagaatcacatcatggttaaggttgcagggccctttgggtccatctgctccagattctgccctagaagggacaaccagagcagggtgccaggtccaaatccagatggttcctgcagatctccagggaggatattccatagcctctgggcagcctatgcctrtgctccatcatccacacagcatagaagtcctgcctggtgttcatagggaatctcctgtgttcccttgcactttccattctggtatgaataaataccgatgagattttccctgaggtgccccaccttccaggtaatgggaactctggagaaagtttcttcctctcttctctttcttctattttggatgggttgtttttgttggttttttttttccctatgtggaaattttggatttgtcaaaacattgcgtaacatcactttgccactgagccagcctcaggccgaagtgttatacatcag

SEQ ID NO: 10541 - DNA, 600 bp, Chicken  19866894212310_2
gcttgtctatgaggttgttaaaggagtatcaaaagccttggtaatgttgagatgaacagcataaactcttttcaactgctaagccagtaatctttttataaaggtctatcaggttgttcaagagagattttccattcataaatccagctgactactctcaattatcttcttgtcctcctagatgctgctagcatctggaaaatacaggctaaaagtaaggctttcattaacttcaatttcagttttggatgatgaggaagttattttcagttgttttttcctaaatgtttaggtctgtgrtgtgctggccatcagaacaaggagcagaaagcaccatttattttgtccattctgttacctcctaagtttggtacaacagaaacccaccttgtttaaacaaggacaagacttctggggtagggcagtaggaatgtcgacaaaaagagatcagatagtgtaagataaataagagacgatgcttggagtcaaattaggactggaactgggatcatgaagggatcagaggggactgaaaaaacctagggagagaaagaccaagtctgtacagcgatggaagctgaaaacaggaaatctgtgggt

SEQ ID NO: 10542 - DNA, 599 bp, Chicken  19866894212312_1
  misc_feature (1)..(71): n is any nucleotide
nnnnnnnnnnnnnnnnnnnnnnnnnnnnnnnnnnnnnnnnnnnnnnnnnnnnnnnnnnnnnnnnnnnnnnnacttcagagcgttcatgatctgcggataacttattagttattcagaatcaatctcatccacaggaaaaagcttatttagaagcaagatgaatgtccatgtaatgatttatcctacaaatccaagactccctgaaaaaatattacctttttaaaaagcaggcagatgctaaaagtaaccacgaagaggatgttttctcttcagccaaaatgatttaaagttgtactcttyagatgcctagtttgtaagctacataaaaattctgacttcaagcaaaaccaaaaagccatcaaaaccctgacaaaacactataaatccacattccacattgcaaaattactatgaactcacccccaatttattctkaagaactaatcaactaacagaacaacacgactagaattttactcatctactgcatctgtgactgagctttgtttcaaaactgtgtataccttgttcaagtgtctcttcttcttgtctagttccccatccagactgtgggcttgatgaatttcgtcctcttcttg

SEQ ID NO: 10543 - DNA, 600 bp, Chicken  19866894212312_2
aaaaagcttatttagaagcaagatgaatgtccatgtaatgatttatcctacaaatccaagactccctgaaaaaatattacctttttaaaaagcaggcagatgctaaaagtaaccacgaagaggatgttttctcttcagccaaaatgatttaaagttgtactcttyagatgcctagtttgtaagctacataaaaattctgacttcaagcaaaaccaaaaagccatcaaaaccctgacaaaacactataaatccacattccacattgcaaaattactatgaactcacccccaatttattctkaagaactaatcaactaacagaacaacacgactagaattttactcatctactgcatctgtgactgagctttgtttcaaaactgtgtataccttgttcaagtgtctcttcttcttgtctagttccccatccagactgtgggcttgatgaatttcgtcctcttcttgaataatarttctgcacatcagcaggtaaagtctttcttacagcccagctggatgcagacgtccacccagatctatcagcaggcgtatcaaacgaatcctgttcattcttacgcttgtatggctgctgctctgagaa

SEQ ID NO: 10544 - DNA, 600 bp, Chicken  19866894212312_3
tagtttgtaagctacataaaaattctgacttcaagcaaaaccaaaaagccatcaaaaccctgacaaaacactataaatccacattccacattgcaaaattactatgaactcacccccaatttattctkaagaactaatcaactaacagaacaacacgactagaattttactcatctactgcatctgtgactgagctttgtttcaaaactgtgtataccttgttcaagtgtctcttcttcttgtctagttccccatccagactgtgggcttgatgaatttcgtcctcttcttgaataatarttctgcacatcagcaggtaaagtctttcttacagcccagctggatgcagacgtccacccagatctatcagcaggcgtatcaaacgaatcctgttcattcttacgcttgtatggctgctgctctgagaaccttgaagtttcattcccagaaccatttgagttccctgagagaggttttctactctgccagtgattttcactcaggtctccatatgtgaaaccacctcttccacgcccacctctgccacggtgacctctccccctgtttggaatccaacctgaaccaaagtttttattccaa

SEQ ID NO: 10545 - DNA, 600 bp, Chicken  19866894212316_1
cttgagtactgtactcagtttttgaccccttgttacaaggaagacattgaaaacctggagagtgtccagagaggggatacgaagctgtgaggagtctggagcacaagcctaatgaggagcagctgagggaactgagattctttagtctaaagaagaggaggctcataggagaccttattgctttctacaactacctgaaaagaggttgcagcaatgtggggattggtctcttctcccaggtaacattagaatgagagataatggccttaagttgcaacaggggaggttctggttggattwtttggaaaaatttcttcttcaaaagagtgatcaggcactgggatgggctgtccagggaggtgatttagtaactatccctagatgtgttcaagaaacttgtggatgtggcacttaggaacatggttagtgagcatgtcgatgatgggttgatggttggactacattatcttactggtcttttccarccttaattattctatgactcaatgaatacaatacttttttgcggttgttttttctatcactttctcacctawatttagtcccacttcttcaaaataaaagcttccagtgtccgcc

SEQ ID NO: 10546 - DNA, 600 bp, Chicken  19866894212316_2
tacaactacctgaaaagaggttgcagcaatgtggggattggtctcttctcccaggtaacattagaatgagagataatggccttaagttgcaacaggggaggttctggttggattwtttggaaaaatttcttcttcaaaagagtgatcaggcactgggatgggctgtccagggaggtgatttagtaactatccctagatgtgttcaagaaacttgtggatgtggcacttaggaacatggttagtgagcatgtcgatgatgggttgatggttggactacattatcttactggtcttttccarccttaattattctatgactcaatgaatacaatacttttttgcggttgttttttctatcactttctcacctawatttagtcccacttcttcaaaataaaagcttccagtgtccgccaagtggataaaaaaacaagatagttctcactagagagcttttgagctttttccacatctatttatttttaaaatgtattgtaagactttaaataggtagagctagaaaatcagtcaggtggaattttttctgtcaggaataagaagaacaggttctataggaatttaagtaaaagattaatctga

SEQ ID NO: 10547 - DNA, 600 bp, Chicken  19866894212316_3
ataatggccttaagttgcaacaggggaggttctggttggattwtttggaaaaatttcttcttcaaaagagtgatcaggcactgggatgggctgtccagggaggtgatttagtaactatccctagatgtgttcaagaaacttgtggatgtggcacttaggaacatggttagtgagcatgtcgatgatgggttgatggttggactacattatcttactggtcttttccarccttaattattctatgactcaatgaatacaatacttttttgcggttgttttttctatcactttctcacctawatttagtcccacttcttcaaaataaaagcttccagtgtccgccaagtggataaaaaaacaagatagttctcactagagagcttttgagctttttccacatctatttatttttaaaatgtattgtaagactttaaataggtagagctagaaaatcagtcaggtggaattttttctgtcaggaataagaagaacaggttctataggaatttaagtaaaagattaatctgacagaaagtgagttcaagcaaaagcacagtttgtaaaagaaattttgtgatatcacattttttctaagsactt

SEQ ID NO: 10548 - DNA, 600 bp, Chicken  19866894212316_4
ctawatttagtcccacttcttcaaaataaaagcttccagtgtccgccaagtggataaaaaaacaagatagttctcactagagagcttttgagctttttccacatctatttatttttaaaatgtattgtaagactttaaataggtagagctagaaaatcagtcaggtggaattttttctgtcaggaataagaagaacaggttctataggaatttaagtaaaagattaatctgacagaaagtgagttcaagcaaaagcacagtttgtaaaagaaattttgtgatatcacattttttctaagsacttcactggatgtgttagctagcatatacttctagaatatttatctgctgcagcccccttcattttgctttacaggtaaaagaaaaattggtgcctcataaatcagattcagtacagtaaccagtaaggaaggattttcattgacatgattgttttatatcagctggggaaaaaatagaccatctcaagctcagcaaaattgaaaaggtgttaaaacacatcatgtattacttctcctaatgtgaataagtatttttaatttttaccaatgattataaatattttggtcttgttttccc

SEQ ID NO: 10549 - DNA, 599 bp, Chicken  19866894212319_1
  misc_feature (1)..(2): n is any nucleotide
nncggtttgacaaaaaacaaacaaacaaacaacaacaaaaaaaaaccaacaaaaaaaaaagacaaaaaaaaatacaaaaccaaccgacaaaaccaacacgaaaccatgctataattccgttgtattaaaaatattatcctactactctctgtgttcaatagtctctgtacctgtaatgctttcagttctgttgtatccggagcagaggtttgctccgctccttgtttaacccagtacggaaataaaatgttaagagttgacgatcccctcccgctctctgtgcctcgcaggtccgcgctscgctccggccgtggctgcaggcggagccgggcacggcgcgctgcctcgccgggtccgctttcgtaaccttcctttgtattcttttgtttctcgccttcgcatttcttgccacggggctcacctcggaacaataggggcaaggactgtcaccaagagattcatcacggagcagtgactaagccaggggatccaaactttgcccggctgaagcccacacccgcatgtaatctggaattaattcatctggacgacagatctcggcatgcagcagagccggggctctccgctcctaacggagc

SEQ ID NO: 10550 - DNA, 447 bp, Chicken  19866894212329_1
tgctgcttcagctgcgctcagcagaacttgtctcttgacttggaaactttctgttactcccaacgctgccatgtctccaatggtaccctctttcatatctgaaagaaaacacaggttaaaaagtggtttgtttagtgtggttgtggttttggttttttttccttcccttgcttacttggaaggaaattactagaatctgccaacccagtagtttacctgctcaaatgaaccatactgatagcaggggaggtattaaatgaagcgattcacatcaaggtccctcccttaagttcaagattyctctccaatttttaatttttttaaaaaaaatcactgcacttactgtggcatcaatatatttgattcttccagctgaattaattagtgacaaacaagttcagtaagtctaaccatcccatcccccccccccactcaaacatcaaccca

SEQ ID NO: 10551 - DNA, 599 bp, Chicken  19866894212335_1
  misc_feature (1)..(87): n is any nucleotide
nnnnnnnnnnnnnnnnnnnnnnnnnnnnnnnnnnnnnnnnnnnnnnnnnnnnnnnnnnnnnnnnnnnnnnnnnnnnnnnnnnnnnnnaacgtgatgatttaaacagaagcatgtccaattatggccaaatgaatagagcagaagaaatggcattatacttataatgtgcgtgctttttggctgaaaagaaaatagatgaagacaggtatgttttgttatatcttgagatgctgccaaatcttacttcattgggttttttccctgtgctattttttttcccccagtttaggaaagggaaartttaatttagttacaatttgttcctgtgtttgctgatcgcgcagtctttggtacccagtgctgtagcacactgcatgagtcctttgttgcctgtggcacagcgtaattgaaggtacaaaaaggaattgtggtgttataattactcaattttaaacacatcttcmcattttagacatttatttttgagcactcggggagtttttccgttttcaccttctataaacctaatgagtattggttttaaatccactgtcagcttgtctggaagctcagctctggtcacagctatgtctaaaagc

SEQ ID NO: 10552 - DNA, 600 bp, Chicken  19866894212335_2
tgtgcgtgctttttggctgaaaagaaaatagatgaagacaggtatgttttgttatatcttgagatgctgccaaatcttacttcattgggttttttccctgtgctattttttttcccccagtttaggaaagggaaartttaatttagttacaatttgttcctgtgtttgctgatcgcgcagtctttggtacccagtgctgtagcacactgcatgagtcctttgttgcctgtggcacagcgtaattgaaggtacaaaaaggaattgtggtgttataattactcaattttaaacacatcttcmcattttagacatttatttttgagcactcggggagtttttccgttttcaccttctataaacctaatgagtattggttttaaatccactgtcagcttgtctggaagctcagctctggtcacagctatgtctaaaagcagtggagaaaggcggatgtgagccgggtctgttcactctcactgtgcagtaatggacaaaaaaaatagaagtatcctaacatcttgagctgctagcaatgatgtgttatctgcyccctttcaaccaccttcacagcactaaactggattggctttttctcttgaa

SEQ ID NO: 10553 - DNA, 600 bp, Chicken  19866894212335_3
tacaaaaaggaattgtggtgttataattactcaattttaaacacatcttcmcattttagacatttatttttgagcactcggggagtttttccgttttcaccttctataaacctaatgagtattggttttaaatccactgtcagcttgtctggaagctcagctctggtcacagctatgtctaaaagcagtggagaaaggcggatgtgagccgggtctgttcactctcactgtgcagtaatggacaaaaaaaatagaagtatcctaacatcttgagctgctagcaatgatgtgttatctgcyccctttcaaccaccttcacagcactaaactggattggctttttctcttgaacttttaacatacttcctattgggaaagggaaaaggggaaagctgaatgacctcaaatctgcatgttttatgtctaagtttgcccacgtgcacaggagggggtatatgtagtatacctgatgaacgtggttgatgtgctgctgtttattctgtcaagcacttggtacatttacaagcaaaataaatgataatcagtgcaggccacaggcagtacagtgagctgaagtgtgaaccctagagcctgttctca

SEQ ID NO: 10554 - DNA, 600 bp, Chicken  19866894212335_4
ttatgtctaagtttgcccacgtgcacaggagggggtatatgtagtatacctgatgaacgtggttgatgtgctgctgtttattctgtcaagcacttggtacatttacaagcaaaataaatgataatcagtgcaggccacaggcagtacagtgagctgaagtgtgaaccctagagcctgttctcagcagggggcttaagtgtggacctaactttatctctgtgacattttatccatcttttttgtttttttttctctttttgcttacctggctgggctgcatcaaaggaagtgcagccagtrggttgagggaggtgctcctgcccctctgttgtgcactgtgaggcctcacctggagtactgcatccagatgtggagtccttggtacaggagagacatggacctgttggagtgcatccagacaagggccgcaaaaaggatccaagggatggaacacctctcctacaaggacaggctgagagagctgggactgttcagcctggagaagagaaggctccagggagacccaagtgtggcctttcagcccctaaaggggagctgtaagaaaagaaggggacaaactctttagcaaagtctgtggtg

SEQ ID NO: 10555 - DNA, 599 bp, Chicken  19866894212338_1
  misc_feature (1)..(99): n is any nucleotide
nnnnnnnnnnnnnnnnnnnnnnnnnnnnnnnnnnnnnnnnnnnnnnnnnnnnnnnnnnnnnnnnnnnnnnnnnnnnnnnnnnnnnnnnnnnnnnnnnnnttgagcatctcatggctttgtgagctcagacagcaaactgctataaacttggctcttggaaaaagccaagagtgaaacactaaaaatactccgatgctcaatagttttacatgacactgttagctgctacccaccctggctctgatgctgctaattcagcctcacctgtgctgaaaaacaggcacaaaccattctagcatraaaaaaaaaaaaactgatgaactggactaatcggtaggtaaacagagtagctcctatattagcacactggtttatgtaaacgtcacgtctttttacctcattagtttctctgttacagcaaagaagtaaatgacacagtacaactgtactgctgtggcaaaagggttgggagatttggatgaaggttcagggatcttcccagttcagtcactgattttttgtcttgtatcagagaattttttttgcctcaggttacacatccaagcaatgactttgagaaagtcatttgagaagctgga

SEQ ID NO: 10556 - DNA, 599 bp, Chicken  19866894212338_2
  misc_feature (1)..(98): n is any nucleotide
nnnnnnnnnnnnnnnnnnnnnnnnnnnnnnnnnnnnnnnnnnnnnnnnnnnnnnnnnnnnnnnnnnnnnnnnnnnnnnnnnnnnnnnnnnnnnnnnnnttgagcatctcatggctttgtgagctcagacagcaaactgctataaacttggctcttggaaaaagccaagagtgaaacactaaaaatactccgatgctcaatagttttacatgacactgttagctgctacccaccctggctctgatgctgctaattcagcctcacctgtgctgaaaaacaggcacaaaccattctagcataraaaaaaaaaaaactgatgaactggactaatcggtaggtaaacagagtagctcctatattagcacactggtttatgtaaacgtcacgtctttttacctcattagtttctctgttacagcaaagaagtaaatgacacagtacaactgtactgctgtggcaaaagggttgggagatttggatgaaggttcagggatcttcccagttcagtcactgattttttgtcttgtatcagagaattttttttgcctcaggttacacatccaagcaatgactttgagaaagtcatttgagaagctggag

SEQ ID NO: 10557 - DNA, 600 bp, Chicken  19866894212339_1
ggaagaacttctttactgtaatggtgacggatggtcttagcaaccctttccaaccttagcaattccatgaggacatctcatgtcccacacctcctgaggaggctcggtaagttacctgtatttttggctggcagagctgcgtgttgtagagcccgtacagaaggtacagagcaccaactcggatctggaaggcatacggcggcaagaagtactgctgtgccagctctaaggtcttctttgtgatcttgttcctctccagagctctcattctaccactacagcaaacagaaaagagtacamtgcagcaagtgaccatagaagcacaggtgtctcagcatccagaacgcagcagcaagcttgaggagctataaaacgttaccacagggcagggctgtgctctacgtgctctacgcagtactrcgtgtagtaaattagattcggagcacaaaaggcaacaatctacgttatattgtttaatgccaacccataagggcagggccgatcactcactggaagatggtgtggaagcggcgctcccgccacagctcagcaaagcgctcgaagcggacggtgtcggcttcctggaaggcaccgagcagc

SEQ ID NO: 10558 - DNA, 600 bp, Chicken  19866894212339_2
tttttggctggcagagctgcgtgttgtagagcccgtacagaaggtacagagcaccaactcggatctggaaggcatacggcggcaagaagtactgctgtgccagctctaaggtcttctttgtgatcttgttcctctccagagctctcattctaccactacagcaaacagaaaagagtacamtgcagcaagtgaccatagaagcacaggtgtctcagcatccagaacgcagcagcaagcttgaggagctataaaacgttaccacagggcagggctgtgctctacgtgctctacgcagtactrcgtgtagtaaattagattcggagcacaaaaggcaacaatctacgttatattgtttaatgccaacccataagggcagggccgatcactcactggaagatggtgtggaagcggcgctcccgccacagctcagcaaagcgctcgaagcggacggtgtcggcttcctggaaggcaccgagcagcgccttcgcagtcctcctgcagcccgggcacgccgctcatcgtcccagcgctcaactcagcccagattacaactctcacccagctcccagctcagcccgccgccattaacgcggcgcccgg

SEQ ID NO: 10559 - DNA, 599 bp, Chicken  19866894212343_1
  misc_feature (1)..(233): n is any nucleotide
nnnnnnnnnnnnnnnnnnnnnnnnnnnnnnnnnnnnnnnnnnnnnnnnnnnnnnnnnnnnnnnnnnnnnnnnnnnnnnnnnnnnnnnnnnnnnnnnnnnnnnnnnnnnnnnnnnnnnnnnnnnnnnnnnnnnnnnnnnnnnnnnnnnnnnnnnnnnnnnnnnnnnnnnnnnnnnnnnnnnnnnnnnnnnnnnnnnnnnnnnnnnnnnnnnnnnnnnnnnnnnnnnnnnnnnnntggctgttcccatttctgattcctgttggtctgtacaggcagtggtctcacatttacccttacaccyatcccagctactacaagatggcagtatttgtccattttgttgggcactaaatttaaaaatttttwaagaagattgtataaggagaattgtacattcatacagygtttaagacagtctccatgcttcatgtcttgaacatgtcatgacagttctctgcttcgtgaattgaggcttcagttaaaatgaggatgtcactggagatgacatgggagaagaaagcagaaaagtttgagcttgtgaaaccaacaactcagtaatctggataaaccttaaactaatcacttttatatgcataatga

SEQ ID NO: 10560 - DNA, 599 bp, Chicken  19866894212343_2
  misc_feature (1)..(168): n is any nucleotide
nnnnnnnnnnnnnnnnnnnnnnnnnnnnnnnnnnnnnnnnnnnnnnnnnnnnnnnnnnnnnnnnnnnnnnnnnnnnnnnnnnnnnnnnnnnnnnnnnnnnnnnnnnnnnnnnnnnnnnnnnnnnnnnnnnnnnnnnnnnnnnnnnnnnnnnnnnnnnnnnnnnnnnnntggctgttcccatttctgattcctgttggtctgtacaggcagtggtctcacatttacccttacaccyatcccagctactacaagatggcagtatttgtccattttgttgggcactaaatttaaaaatttttwaagaagattgtataaggagaattgtacattcatacagygtttaagacagtctccatgcttcatgtcttgaacatgtcatgacagttctctgcttcgtgaattgaggcttcagttaaaatgaggatgtcactggagatgacatgggagaagaaagcagaaaagtttgagcttgtgaaaccaacaactcagtaatctggataaaccttaaactaatcacttttatatgcataatgaaaaaataaggtaaattcttttagagaggaatttttaaagcacttgaataaaaccttatcattaca

SEQ ID NO: 10561 - DNA, 599 bp, Chicken  19866894212343_3
  misc_feature (1)..(130): n is any nucleotide
nnnnnnnnnnnnnnnnnnnnnnnnnnnnnnnnnnnnnnnnnnnnnnnnnnnnnnnnnnnnnnnnnnnnnnnnnnnnnnnnnnnnnnnnnnnnnnnnnnnnnnnnnnnnnnnnnnnnnnnnnnnnnnnnnntggctgttcccatttctgattcctgttggtctgtacaggcagtggtctcacatttacccttacaccyatcccagctactacaagatggcagtatttgtccattttgttgggcactaaatttaaaaatttttwaagaagattgtataaggagaattgtacattcatacagygtttaagacagtctccatgcttcatgtcttgaacatgtcatgacagttctctgcttcgtgaattgaggcttcagttaaaatgaggatgtcactggagatgacatgggagaagaaagcagaaaagtttgagcttgtgaaaccaacaactcagtaatctggataaaccttaaactaatcacttttatatgcataatgaaaaaataaggtaaattcttttagagaggaatttttaaagcacttgaataaaaccttatcattacagtagagagaaagcaaaagctctcctagaaaaccttatt

SEQ ID NO: 10562 - DNA, 600 bp, Chicken  19866894212350_1
aatatgataccacaaattatggaggaaagattatcagagatactgatatgaaatgttgtgaagtgagatctgaactgttcatcttaatgttttggatttagaatcaaaagatgtgtggccagcagggagagggaggtgatcctgccccctctaatctgtgctggtgagatctcacctggagtactgtgtccagttgtggactcctccatacaggagagatgtagacctgttggagtgtgtcctgaggaaggccacaaaaatgatccacagagaggaacacctgtcctatgaggacagacygagagagttgttcagactggasaagagaaggctgtgaggtgacctgattacagcctttcagtatctaaaggagagctacaggaaagaaggggacagactcttcagcagggtctgtgatgatcaaacaaggggaaatggcttccagctcatggagggtagatcttggttagatataagggaaaagtctcctacagtgagggtgctgaggcactggaacagactgcccagagatgtggttgatgccctgtccctggagactttcaaggtgaggctgggtcaggccctgggcaacctgatcta

SEQ ID NO: 10563 - DNA, 600 bp, Chicken  19866894212350_2
aggaaagattatcagagatactgatatgaaatgttgtgaagtgagatctgaactgttcatcttaatgttttggatttagaatcaaaagatgtgtggccagcagggagagggaggtgatcctgccccctctaatctgtgctggtgagatctcacctggagtactgtgtccagttgtggactcctccatacaggagagatgtagacctgttggagtgtgtcctgaggaaggccacaaaaatgatccacagagaggaacacctgtcctatgaggacagacygagagagttgttcagactggasaagagaaggctgtgaggtgacctgattacagcctttcagtatctaaaggagagctacaggaaagaaggggacagactcttcagcagggtctgtgatgatcaaacaaggggaaatggcttccagctcatggagggtagatcttggttagatataagggaaaagtctcctacagtgagggtgctgaggcactggaacagactgcccagagatgtggttgatgccctgtccctggagactttcaaggtgaggctgggtcaggccctgggcaacctgatctagctgtggtgaccctgttcattt

SEQ ID NO: 10564 - DNA, 600 bp, Chicken  19866894212351_1
cacagcagctgaagacaaactaaattggggttgcttctgtctcacctatccctttttgcccccaacgtgtgttcccattgcctctgttaggcctgctctggcatttgtgtgtttatacagtgcccgtatcgattcagggcattgatgtgactaaagctaagcctcctgagagaggggggataacaagagagacatccttgtgtttcttgaagcatcttgtgaaacaactctactaatgccaattccgacaaaagcggatggcaggaacacaaagctcagggtcaggagagagagcactgyagctccattactggagatagttcaatggaagtttaaaacagtgtaggtggtaatgagagtaccaagccttcggctcatttttaatgccgtggctgtctttgagatgctaccttttatttgtggcagtctgcatggaatgagtaatgcagagacacatggatgcaatctggcctgaaggatgttataacaatgatctttcatcgggtcagctcttcagagagggtgaaaggtgatccagtctccagacaaagatagcaggttatatgagtgccagctacctttggggtaggttgatgtgag

SEQ ID NO: 10565 - DNA, 600 bp, Chicken  19866894212352_1
gcagcactgaggtttgttagccaccatttaggaacctgtactttcaagtgtacttcaaatggccacgtctgctttttccataagccctcctgagggtggaacattacagccagaccatcctctttcatatccacagcatccatttctgttttatcaaatgtattttattgcaagctgaattctttcccagctttttgtactttgccagattcccttgaccttgtgtcagtcagtgatgaattgtacgagtccctgctgaaaacactgcagaagccggaggaatgccagccttgccgtgtrgtacattgagacaaaatatttaaagccaaagactgatgggtacgacttctctatttcggtctgctccttcagattaaaaagctattaaaaacttttatttgtcttgrtgcatctgctgcctcatgaccaatgaatggcatgactaggactggaggctgcgggtaggagggtgatatttgtgataaatgtatctgacggtgttttattttcaggaaaaatacttaaaagcatgccatagcaaatggttggtttgttacagagactgcagaagtagcatctagtgcttctggccaagggcca

SEQ ID NO: 10566 - DNA, 600 bp, Chicken  19866894212352_2
agccagaccatcctctttcatatccacagcatccatttctgttttatcaaatgtattttattgcaagctgaattctttcccagctttttgtactttgccagattcccttgaccttgtgtcagtcagtgatgaattgtacgagtccctgctgaaaacactgcagaagccggaggaatgccagccttgccgtgtrgtacattgagacaaaatatttaaagccaaagactgatgggtacgacttctctatttcggtctgctccttcagattaaaaagctattaaaaacttttatttgtcttgrtgcatctgctgcctcatgaccaatgaatggcatgactaggactggaggctgcgggtaggagggtgatatttgtgataaatgtatctgacggtgttttattttcaggaaaaatacttaaaagcatgccatagcaaatggttggtttgttacagagactgcagaagtagcatctagtgcttctggccaagggccaagcagtgtttgaaaagaccacagacctctaacatgcacaaaggtgctttctcctggtgccccttagctgtccttccctctgccctggtgtgactgttaggttgtctg

SEQ ID NO: 10567 - DNA, 600 bp, Chicken  19866894212353_1
agatgaatcaaattgcttcctaatgttttagaagttttcctgagtcatctggtgagacttgcctttaccacaaggctcgcattttcccacagcagctctctacatgcaaggagccaatactgtagtgtgatttcaaaggtggtattcttataacttattttatagcaatacccaggggccttcaatgtagccaaagaagaaaaaaaaaatcccgtatctgagcttaacatctaattaaagacaagatccaagaattcatctaagagctgaaaagaacaggaggggaaaggtgaacttttkaatacaaaaacttgtaatcacattttcatagtaggggttttggagtgcttgaagtttgagaaataaaataataatccaaatcttttctgtgctggtataggattagaggtactgagatgagaaagggcaagtaatttttcccctgcagctcaaatacccaggaggcatatgcagggagaagtgttctatgaatttcagtgattttcttacacactcgttttaagggagccagtctctccagtgctccaagcttggttgctgggtttgcattcagctttgatgtagtccacctcaaactct

SEQ ID NO: 10568 - DNA, 600 bp, Chicken  19866894212363_1
tctcttctctagatccagctctctccttgcagtggtgggggtcagatggctgccaaacagcctgatccccgctcctccctcccaagatggcacaccctgtgctcccagctcatgccccatagccagatttgcttctaggagtggcagcagcttgcaagggagggaggacggcacaggggacaccctgctctcgtggggtgcggtggcgatgggcgggcaggagagccccagtctccccttaagcaaaggagttgctggtgccagtgctgcagctcagggtcagggctggactctgctccyagggctgctgcagtgccatggccgtgtacatagggggggtgttacggtactgctgtaggatataagctaagaaatactcgaggagcagagggctccatggataggtgccgtggggtagccagcactgctgtgctccttcccaggctcagccscagagccctcctgctttgctgcttctcttccgctattcctagggctgcatgagactgaaatatatacacatatatactcgtacccccggccctgccaaaggggaaggggtttttggagcaggagccgcrtctttgctgcatgatgcag

SEQ ID NO: 10569 - DNA, 600 bp, Chicken  19866894212363_2
tgcaagggagggaggacggcacaggggacaccctgctctcgtggggtgcggtggcgatgggcgggcaggagagccccagtctccccttaagcaaaggagttgctggtgccagtgctgcagctcagggtcagggctggactctgctccyagggctgctgcagtgccatggccgtgtacatagggggggtgttacggtactgctgtaggatataagctaagaaatactcgaggagcagagggctccatggataggtgccgtggggtagccagcactgctgtgctccttcccaggctcagccscagagccctcctgctttgctgcttctcttccgctattcctagggctgcatgagactgaaatatatacacatatatactcgtacccccggccctgccaaaggggaaggggtttttggagcaggagccgcrtctttgctgcatgatgcagctggcaccagagaggcacggctgggagcagtgcccagaggttctgcctttcccgttgtattcgtcatgttgcacttttttaattgcttgagcacagaggaccgctcgggttgctgtgactgtaggtttagcccaggtggcagagagccgacy

SEQ ID NO: 10570 - DNA, 600 bp, Chicken  19866894212363_3
agggctggactctgctccyagggctgctgcagtgccatggccgtgtacatagggggggtgttacggtactgctgtaggatataagctaagaaatactcgaggagcagagggctccatggataggtgccgtggggtagccagcactgctgtgctccttcccaggctcagccscagagccctcctgctttgctgcttctcttccgctattcctagggctgcatgagactgaaatatatacacatatatactcgtacccccggccctgccaaaggggaaggggtttttggagcaggagccgcrtctttgctgcatgatgcagctggcaccagagaggcacggctgggagcagtgcccagaggttctgcctttcccgttgtattcgtcatgttgcacttttttaattgcttgagcacagaggaccgctcgggttgctgtgactgtaggtttagcccaggtggcagagagccgacygcgttggtcactgctggtggggttctgctatggaagggctttccagtcagagccagctgctggcgttgctgtgccccctcccacrgctcgtggaggtgccctgcaagagagcatccccacgcagggcca

SEQ ID NO: 10571 - DNA, 590 bp, Chicken  19866894212363_4
cagagccctcctgctttgctgcttctcttccgctattcctagggctgcatgagactgaaatatatacacatatatactcgtacccccggccctgccaaaggggaaggggtttttggagcaggagccgcrtctttgctgcatgatgcagctggcaccagagaggcacggctgggagcagtgcccagaggttctgcctttcccgttgtattcgtcatgttgcacttttttaattgcttgagcacagaggaccgctcgggttgctgtgactgtaggtttagcccaggtggcagagagccgacygcgttggtcactgctggtggggttctgctatggaagggctttccagtcagagccagctgctggcgttgctgtgccccctcccacrgctcgtggaggtgccctgcaagagagcatccccacgcagggccaaagtgatgctggctgcccccaggacacgttttgctcctggagacatcgctgcttcctgtgtgggcctggagcagcactgtgacccccagcatctgcccaccagagcccacctccagggtgctgtcctccggcaccgctgcatggggaagccaccaccttgt

SEQ ID NO: 10572 - DNA, 505 bp, Chicken  19866894212363_5
ccggccctgccaaaggggaaggggtttttggagcaggagccgcrtctttgctgcatgatgcagctggcaccagagaggcacggctgggagcagtgcccagaggttctgcctttcccgttgtattcgtcatgttgcacttttttaattgcttgagcacagaggaccgctcgggttgctgtgactgtaggtttagcccaggtggcagagagccgacygcgttggtcactgctggtggggttctgctatggaagggctttccagtcagagccagctgctggcgttgctgtgccccctcccacrgctcgtggaggtgccctgcaagagagcatccccacgcagggccaaagtgatgctggctgcccccaggacacgttttgctcctggagacatcgctgcttcctgtgtgggcctggagcagcactgtgacccccagcatctgcccaccagagcccacctccagggtgctgtcctccggcaccgctgcatggggaagccaccaccttgt

SEQ ID NO: 10573 - DNA, 599 bp, Chicken  19866894212365_1
  misc_feature (1)..(142): n is any nucleotide
nnnnnnnnnnnnnnnnnnnnnnnnnnnnnnnnnnnnnnnnnnnnnnnnnnnnnnnnnnnnnnnnnnnnnnnnnnnnnnnnnnnnnnnnnnnnnnnnnnnnnnnnnnnnnnnnnnnnnnnnnnnnnnnnnnnnnnnnnnnnnntaatacaacgggtaaactgatgaagctactagaaaagtaaaggtagagaataacacagtgctttcctcctttgtctcttcttcctgacacccaccctgttatcaggcaaatgagcaaaaagctaagaaaaagagtggcccaccccgacagtccctttmtgaaatgacagttctcagaacagcgctctcacacctttcctcacactggaggaaaagctgcaaaaagaaaaataccttattaaattgtacagattaaattgacctttactgggctgcckgtattcttcaaatcataattttaaaatgagtgctctgcrgttagctggttataggtcagagccacactgggctgtctagaactagatattatcttgctgaatccatggataattctctaaacaaagattatgtgcaacgctgatgattaagagagcagtaaatgtgatttccactgctct

SEQ ID NO: 10574 - DNA, 599 bp, Chicken  19866894212365_2
  misc_feature (1)..(23): n is any nucleotide
nnnnnnnnnnnnnnnnnnnnnnntaatacaacgggtaaactgatgaagctactagaaaagtaaaggtagagaataacacagtgctttcctcctttgtctcttcttcctgacacccaccctgttatcaggcaaatgagcaaaaagctaagaaaaagagtggcccaccccgacagtccctttmtgaaatgacagttctcagaacagcgctctcacacctttcctcacactggaggaaaagctgcaaaaagaaaaataccttattaaattgtacagattaaattgacctttactgggctgcckgtattcttcaaatcataattttaaaatgagtgctctgcrgttagctggttataggtcagagccacactgggctgtctagaactagatattatcttgctgaatccatggataattctctaaacaaagattatgtgcaacgctgatgattaagagagcagtaaatgtgatttccactgctctgaaagaactggtacctgctgataaggatcccgtgggggcagctggttccaacgtcccttgatttgcccactgagaagacaagccagctttcttcactgcacatttgtaattatcatata

SEQ ID NO: 10575 - DNA, 600 bp, Chicken  19866894212365_3
ctgatgaagctactagaaaagtaaaggtagagaataacacagtgctttcctcctttgtctcttcttcctgacacccaccctgttatcaggcaaatgagcaaaaagctaagaaaaagagtggcccaccccgacagtccctttmtgaaatgacagttctcagaacagcgctctcacacctttcctcacactggaggaaaagctgcaaaaagaaaaataccttattaaattgtacagattaaattgacctttactgggctgcckgtattcttcaaatcataattttaaaatgagtgctctgcrgttagctggttataggtcagagccacactgggctgtctagaactagatattatcttgctgaatccatggataattctctaaacaaagattatgtgcaacgctgatgattaagagagcagtaaatgtgatttccactgctctgaaagaactggtacctgctgataaggatcccgtgggggcagctggttccaacgtcccttgatttgcccactgagaagacaagccagctttcttcactgcacatttgtaattatcatataatgtcttgccatactgcaaaacaatcaaaacaatacaaaa

SEQ ID NO: 10576 - DNA, 600 bp, Chicken  19866894212365_4
gctgtctagaactagatattatcttgctgaatccatggataattctctaaacaaagattatgtgcaacgctgatgattaagagagcagtaaatgtgatttccactgctctgaaagaactggtacctgctgataaggatcccgtgggggcagctggttccaacgtcccttgatttgcccactgagaagacaagccagctttcttcactgcacatttgtaattatcatataatgtcttgccatactgcaaaacaatcaaaacaatacaaaaagcatggcattagacttgaaataagtcaacyattcactttgttttttgacagcttttctaactccactgcctacttgcccagttttgctaaaaagcagctttcagcaagtggtgcccctatttctgtacaggaccatgtggaaagcatctctctaacatcacaataaaacaggaattcccatcaatatgatcaaatgcagtcatactgatatcattctcacatttttttgcattttgctatctgtaaacatcttgaaatttggctttaaatccaaccatgctcaatagattatctctttccagtgcttttcaagtattacattttcagact

SEQ ID NO: 10577 - DNA, 600 bp, Chicken  19866894212365_5
tactgatatcattctcacatttttttgcattttgctatctgtaaacatcttgaaatttggctttaaatccaaccatgctcaatagattatctctttccagtgcttttcaagtattacattttcagactggagacttggagtgctgaatcgtggatcaaagtctgtgctgtgtaacacaaaataattttatgcccatcccacattgttaaatgtcacccagcagcagaactggcagaaaataatacacaaccccaaacagcaggtctatatattcagatatggccactacactgggctacrtayaaatccatcttccttaatgttttgtgcaaaacaaaactggctgtgaattaggatctttaagaagagagcggggcmagcaatttgggtagaagtgtctgaaatacgtcatagctggactgaacagaacttgcacaacttgatccatagcatcttatatcagataactggagtaggagttttatgaataggagttttatagctgcacaattcacacactgataactgggatacaggaacatccagcaaagccatgctggtaatgcctttctgctctttcttcctatggtatgatcagca

SEQ ID NO: 10578 - DNA, 600 bp, Chicken  19866894212365_6
tgatatcattctcacatttttttgcattttgctatctgtaaacatcttgaaatttggctttaaatccaaccatgctcaatagattatctctttccagtgcttttcaagtattacattttcagactggagacttggagtgctgaatcgtggatcaaagtctgtgctgtgtaacacaaaataattttatgcccatcccacattgttaaatgtcacccagcagcagaactggcagaaaataatacacaaccccaaacagcaggtctatatattcagatatggccactacactgggctacrtayaaatccatcttccttaatgttttgtgcaaaacaaaactggctgtgaattaggatctttaagaagagagcggggcmagcaatttgggtagaagtgtctgaaatacgtcatagctggactgaacagaacttgcacaacttgatccatagcatcttatatcagataactggagtaggagttttatgaataggagttttatagctgcacaattcacacactgataactgggatacaggaacatccagcaaagccatgctggtaatgcctttctgctctttcttcctatggtatgatcagcacga

SEQ ID NO: 10579 - DNA, 600 bp, Chicken  19866894212365_7
tcaatagattatctctttccagtgcttttcaagtattacattttcagactggagacttggagtgctgaatcgtggatcaaagtctgtgctgtgtaacacaaaataattttatgcccatcccacattgttaaatgtcacccagcagcagaactggcagaaaataatacacaaccccaaacagcaggtctatatattcagatatggccactacactgggctacrtayaaatccatcttccttaatgttttgtgcaaaacaaaactggctgtgaattaggatctttaagaagagagcggggcmagcaatttgggtagaagtgtctgaaatacgtcatagctggactgaacagaacttgcacaacttgatccatagcatcttatatcagataactggagtaggagttttatgaataggagttttatagctgcacaattcacacactgataactgggatacaggaacatccagcaaagccatgctggtaatgcctttctgctctttcttcctatggtatgatcagcacgaacagacacatccactcttgtcacagtatctccagttgagatgataacagtcagtaacctgagggacacaggattt

SEQ ID NO: 10580 - DNA, 599 bp, Chicken  19866894212376_1
  misc_feature (1)..(62): n is any nucleotide
nnnnnnnnnnnnnnnnnnnnnnnnnnnnnnnnnnnnnnnnnnnnnnnnnnnnnnnnnnnnnntctgcttcctgcttacgggattgtctaaaactgatgtgtatgtgcatgtgtgagtgtgcatatgttgactaaaactcataacccttcgtgctgctctgaatgcatagtttgcttgcctttctgctcctgtgacatcctgtctctcagatccgaatgtatcttgaaacagtaccactcagctttagccacacttaccacactaacagctagctaaggatgttagctagctaaggaaagyaatgcccctagtgatgctctagcaggcttgcccactaatattgattctatcctacatgcaacttcacaaagttgtgcratctttgattttctatttgcccaaaggcatggttgtgagcactccaaaagcatgtgttgtatgaattttagtgatgattcaaaatcaaagtatcagagtatatgaaagttgaagattttttctaaccagttacaggtaaacacagaatgggaccctcagggattcttttccaggttgcagaagcttgggtcgtgggccaaacgtgtgttctttttaatgga

SEQ ID NO: 10581 - DNA, 600 bp, Chicken  19866894212376_2
gggattgtctaaaactgatgtgtatgtgcatgtgtgagtgtgcatatgttgactaaaactcataacccttcgtgctgctctgaatgcatagtttgcttgcctttctgctcctgtgacatcctgtctctcagatccgaatgtatcttgaaacagtaccactcagctttagccacacttaccacactaacagctagctaaggatgttagctagctaaggaaagyaatgcccctagtgatgctctagcaggcttgcccactaatattgattctatcctacatgcaacttcacaaagttgtgcratctttgattttctatttgcccaaaggcatggttgtgagcactccaaaagcatgtgttgtatgaattttagtgatgattcaaaatcaaagtatcagagtatatgaaagttgaagattttttctaaccagttacaggtaaacacagaatgggaccctcagggattcttttccaggttgcagaagcttgggtcgtgggccaaacgtgtgttctttttaatggatttaacagcacttcttgtcattatgctatgtttgccttgtatcttttcttacattaagcatagaatcatagaatcgcta

SEQ ID NO: 10582 - DNA, 600 bp, Chicken  19866894212382_1
aaattaatgtctgggacataaacccgctacaggcaatgctttaatgggtttagctattatatttagattacctgacaaatgtagcattaaaaacctcctagctttattctcacttttcttatttcttgttttccttgtgttctccagcttggcaaactgtctttaacgctcccaattggagttcttagtttctatgcacttctccaatttatttttttatttttaaacaagtttgcctgcattgcagagctctgctgtggcagtgacgcccctacaacttaattctggcacgtgtcaatycacagatgccatccagcctcattgacctcctggccttttcttctggccaatggaagcagcatcccacccgagtggccaggagaagtttgagaagggacttaaaatatttatccaaacacctgttattatcgttattaatagaacctgcactctgcaaagggatagatcagcctggaggatgccagcttcgtgcagctggttgccaaagcccattcccccrttttctgtgtggatgttgggaagcagagggtgagctgtgacaccttccaaagtcaatagaagtggtccttctgtctcagg

SEQ ID NO: 10583 - DNA, 481 bp, Chicken  19866894212382_2
ttttaaacaagtttgcctgcattgcagagctctgctgtggcagtgacgcccctacaacttaattctggcacgtgtcaatycacagatgccatccagcctcattgacctcctggccttttcttctggccaatggaagcagcatcccacccgagtggccaggagaagtttgagaagggacttaaaatatttatccaaacacctgttattatcgttattaatagaacctgcactctgcaaagggatagatcagcctggaggatgccagcttcgtgcagctggttgccaaagcccattcccccrttttctgtgtggatgttgggaagcagagggtgagctgtgacaccttccaaagtcaatagaagtggtccttctgtctcaggcagatttggcaccaaaattgactggatgctccagtaacattccctgtggcagattgttgttcaagtccaggcagtggttttgttaaaaaccaaccacacaa

SEQ ID NO: 10584 - DNA, 600 bp, Chicken  19866894212386_1
gaacggctatggcagactatgacaaggctgagggctgcagcctgcccatagactgcttaagggaaaagtgagaataaagtcatttccctctcgggaggtttctgcataaacaaccaaaacagcagcagcaataccccagtattctgtcaagagaatcaatcctatccttacataacagttggaactatgaataatttctccatccaaaactaaataaggaaaacaaatgctcctgttcacttttaacatctggtcaatcaacagaaagaataaaatcaatttgaagtaatttgaaatacmaaagtcagcctaatgaaaatatttaaaaagcatatattcaaatgtatagtatagacacacactaccaacatttaatagcaagaaagatctagttagcagtgagattttttttttccatcctgagtttctaatacttctatcaatatgcgtttcaaacctactctttawttccctccttatggaagrtttctgtaaggtttctgcaggggactagtctttccctatccatatgttgtgctgttcatgagcatgatagaactgacatgcactcattaactcccagactcccactccaacctg

SEQ ID NO: 10585 - DNA, 600 bp, Chicken  19866894212386_2
tacataacagttggaactatgaataatttctccatccaaaactaaataaggaaaacaaatgctcctgttcacttttaacatctggtcaatcaacagaaagaataaaatcaatttgaagtaatttgaaatacmaaagtcagcctaatgaaaatatttaaaaagcatatattcaaatgtatagtatagacacacactaccaacatttaatagcaagaaagatctagttagcagtgagattttttttttccatcctgagtttctaatacttctatcaatatgcgtttcaaacctactctttawttccctccttatggaagrtttctgtaaggtttctgcaggggactagtctttccctatccatatgttgtgctgttcatgagcatgatagaactgacatgcactcattaactcccagactcccactccaacctgtggctcttcttcccggaccaagctcccagccatctgttgcctcctacacatgtgcagctctttagcccaagcacagcctggctggagaaggacccaggttcagtccatctcctccctcagccctgtaaacaatactatcatgaaatcaatgcctttgtccctcctccc

SEQ ID NO: 10586 - DNA, 600 bp, Chicken  19866894212386_3
atgaataatttctccatccaaaactaaataaggaaaacaaatgctcctgttcacttttaacatctggtcaatcaacagaaagaataaaatcaatttgaagtaatttgaaatacmaaagtcagcctaatgaaaatatttaaaaagcatatattcaaatgtatagtatagacacacactaccaacatttaatagcaagaaagatctagttagcagtgagattttttttttccatcctgagtttctaatacttctatcaatatgcgtttcaaacctactctttawttccctccttatggaagrtttctgtaaggtttctgcaggggactagtctttccctatccatatgttgtgctgttcatgagcatgatagaactgacatgcactcattaactcccagactcccactccaacctgtggctcttcttcccggaccaagctcccagccatctgttgcctcctacacatgtgcagctctttagcccaagcacagcctggctggagaaggacccaggttcagtccatctcctccctcagccctgtaaacaatactatcatgaaatcaatgcctttgtccctcctcccttttgagcttcacaatcg

SEQ ID NO: 10587 - DNA, 560 bp, Chicken  19866894212388_1
attctccagtatggatggacatcgaaatctgtccctcatacagactccatcatctctgtgtctggcatctttctgccctcttgttatttatgagtaaatccgtgacacataaactcaataaaacttctgtggagtaagaaattccatttaattcagtgatgttaaccagctccatcaagcttagcatagtaacagcccttaaaataatattaggtttaattagggttgtgaacaatttaaaattcttatactaatatttgcatgcataatcactaaggcaatatgcagctactggattawacgaaagaaaaaaaaaagaagtgtagactgaaactaagagaaatgaactattgaattgatataaaaattcttataaatacatgaagcatatcrttcattttaaattttcaattgttttcagtttgtttttccatctgggatcttaggctgttggatcagacacaaatcctttacttcaagcttttactcaagttgcacagggtgctttctaagtatttattaggccatagaagaaagtaccatagttgtcacaacttaac

SEQ ID NO: 10588 - DNA, 467 bp, Chicken  19866894212388_2
gtaaatccgtgacacataaactcaataaaacttctgtggagtaagaaattccatttaattcagtgatgttaaccagctccatcaagcttagcatagtaacagcccttaaaataatattaggtttaattagggttgtgaacaatttaaaattcttatactaatatttgcatgcataatcactaaggcaatatgcagctactggattawacgaaagaaaaaaaaaagaagtgtagactgaaactaagagaaatgaactattgaattgatataaaaattcttataaatacatgaagcatatcrttcattttaaattttcaattgttttcagtttgtttttccatctgggatcttaggctgttggatcagacacaaatcctttacttcaagcttttactcaagttgcacagggtgctttctaagtatttattaggccatagaagaaagtaccatagttgtcacaacttaac

SEQ ID NO: 10589 - DNA, 599 bp, Chicken  19866894212410_1
  misc_feature (1)..(127): n is any nucleotide
nnnnnnnnnnnnnnnnnnnnnnnnnnnnnnnnnnnnnnnnnnnnnnnnnnnnnnnnnnnnnnnnnnnnnnnnnnnnnnnnnnnnnnnnnnnnnnnnnnnnnnnnnnnnnnnnnnnnnnnnnnnnnnntgtgcatttttatagctgtaacaatgaaaaagcatgccattggtttcaataggcattctaaacacggaggtatattggcagggagatgtgtctgaccagactttttgctgatcagggttaatgaagccatggttttaattccaggtcaagggtgggggaatttttttttcatkttgtcagtggagatttgtagctaccatgctaccatatgtgaaaggagctctccactgctggcaggctgtttcttttttttttctctctttttttttttaccatctggtctgctgctgctgtggacctgaacctttgcaaaggtttaatttggtgtacattggagtgccctcggtttcaaactgtatttttgaaacttgaaagagtaagataattagaaaagtacactcagacccctccagtggttgcttatttagagtgtgatggttgaggggatgctgtgtcagcaggagcaaacaca

SEQ ID NO: 10590 - DNA, 600 bp, Chicken  19866894212419_1
aatgaatgccagtcctcagtattacttgtgtctgtgggctcgcagagcaatgtctgagctaccatgctgcccttcattattctactcttgagaccaattctcttgtgtgtaatacctgtatagttgtatctctctactcaatggcattcacattagcttagagagaccttgcagatttttgcctctctataagaactagacttaagaacttttactagactgttttagtacatggaacatttaatgattttttaatgattgtatgaattcatccatcatgcctagcacttccacctctcygcactcaaatggattcatacaaccaccctcaaggagttcggtcttgcctaatgagaactcttacaactaccttatagaaccgtgctctttattggagcagcagataacagattcttttgaatttctggtgataaatacactgtctgcaaggcatgtgtgagtaccaataatgtgaataatacagtcaaccacaaacacattaaactaaggaataactatagaaatttctacattctctrggggaagcactcagtataactgagagtgtgaaacttacccaatagttgtcactatgatgag

SEQ ID NO: 10591 - DNA, 482 bp, Chicken  19866894212419_2
tttaatgattttttaatgattgtatgaattcatccatcatgcctagcacttccacctctcygcactcaaatggattcatacaaccaccctcaaggagttcggtcttgcctaatgagaactcttacaactaccttatagaaccgtgctctttattggagcagcagataacagattcttttgaatttctggtgataaatacactgtctgcaaggcatgtgtgagtaccaataatgtgaataatacagtcaaccacaaacacattaaactaaggaataactatagaaatttctacattctctrggggaagcactcagtataactgagagtgtgaaacttacccaatagttgtcactatgatgaggagggaagcaatgctcagctcattaactggtcccagaagcccagtggtgtccatttgacttgtctccaacagtatcttccccaaaattccttctctcaagccatttttatactactttttt

SEQ ID NO: 10592 - DNA, 600 bp, Chicken  19866894212422_1
ggcagtgtgtgtatgcaaaatgtctgtgtgaacccacacatggatatattttgtccttaacgtgtgcagaaattgtgaggtaaaacaggaatgcaaatggtgaatactgggtttacaagtcctttgagtggtcttgatctcatggattatggcagcaaagtacacacctcccaagtcatacactgcacacaatttctgcacgctcacatgtactcttcagacagtaggtgatatgctaacttgtactgtgagtctggaggatgtgttattgttcaggtaactcttcaaacctaatggaartgctgcaggaaacaaagtaggaaaacaggtattttttagtgtaaggtgctgtcaatatcttgctcctagcaaagtaattaccagttgcttctctgtttctggttgtgttgatctgtttactaggcttgaaactatttttcagcatgttctgaatccttcaaattcagtcaacccttgacctatgttatagcttaaaaataaaacgtaactgtggtagtgactgactatcagtattgtaattacctttcacgtcctgtgtgataaataaggtgttttttccacacacattaattatgtggt

SEQ ID NO: 10593 - DNA, 600 bp, Chicken  19866894212427_1
gtttttgtttgtttgtttgtttcttttgttttgttttccctcagtttttaacttggaacaattcaaaaataattttgaccaataaactgaccaattccttcagtttccacactttttttcacattttttagtagaaactgcatagaaggattctctaagatactgttagatagtatcttaggtaaaaattacctcctgaaggtaaaaattaccatgaaaaaaaacctgacatacagctttccttggtcttggttaacttctaaaaatctggaccgcaatcaagttttcaccatcttactrctgtgctatgcaactccaaacaggttcttctgttgtccacatcacttcgtatctgaatgtcccaggccagtgcattaagcaacatgactgacattgttwcatttggtttatacttctgtcctctcccttggggagaaataaggtgtgatggtttgttctcttgcrtcattttcacacatccatcatcatgtaaatactcctccttttattagctaatagatcagcagcttttgtcctggcagaaacatacttcccatgaaactgatacacctactaaaaggatcccttaagcaggtcacc

SEQ ID NO: 10594 - DNA, 600 bp, Chicken  19866894212427_2
tcagtttccacactttttttcacattttttagtagaaactgcatagaaggattctctaagatactgttagatagtatcttaggtaaaaattacctcctgaaggtaaaaattaccatgaaaaaaaacctgacatacagctttccttggtcttggttaacttctaaaaatctggaccgcaatcaagttttcaccatcttactrctgtgctatgcaactccaaacaggttcttctgttgtccacatcacttcgtatctgaatgtcccaggccagtgcattaagcaacatgactgacattgttwcatttggtttatacttctgtcctctcccttggggagaaataaggtgtgatggtttgttctcttgcrtcattttcacacatccatcatcatgtaaatactcctccttttattagctaatagatcagcagcttttgtcctggcagaaacatacttcccatgaaactgatacacctactaaaaggatcccttaagcaggtcaccatcattatccctaacctccaagccacagttgtctcagtagcacctttctctcagcaggcagtaatactcaagtcatgccagaacttggcatgttcaggt

SEQ ID NO: 10595 - DNA, 600 bp, Chicken  19866894212427_3
ttagatagtatcttaggtaaaaattacctcctgaaggtaaaaattaccatgaaaaaaaacctgacatacagctttccttggtcttggttaacttctaaaaatctggaccgcaatcaagttttcaccatcttactrctgtgctatgcaactccaaacaggttcttctgttgtccacatcacttcgtatctgaatgtcccaggccagtgcattaagcaacatgactgacattgttwcatttggtttatacttctgtcctctcccttggggagaaataaggtgtgatggtttgttctcttgcrtcattttcacacatccatcatcatgtaaatactcctccttttattagctaatagatcagcagcttttgtcctggcagaaacatacttcccatgaaactgatacacctactaaaaggatcccttaagcaggtcaccatcattatccctaacctccaagccacagttgtctcagtagcacctttctctcagcaggcagtaatactcaagtcatgccagaacttggcatgttcaggtggcgttggtttgcagcactgaaaaccaccaggttgacctaatctatgattacaagaattcaccaag

SEQ ID NO: 10596 - DNA, 600 bp, Chicken  19866894212436_1
ggggatcatcatgttaagggtaatgaagcatatgtaagtttacttagatttaattaagctttggcttatttcctatttctgcctcactcgttcccctttaggctgaggcaggtctgaagaatgagtctgcagatctcagaaatctagatttttatgggatgacccattaagataatgaaatatcctaactgagtgcaactggcctttttatttctgcagcttaccagatttatgcatttgtttgttttttttttaataattaaggattcttccttacacaaacataaacatcacatagcrggggattgaaactagatgatcattatggtcctttcaactcaggccattctatgattctrttctatgattctatcttaaacagatcagtgctgtggtaaactgttagagaaatctgtcatgcattaggcacaaacatcgccatgtgtatactgaggcacagtttatgtgatggactagataagggcactaaaatgtaagtggtcagcagtgaactttaaacttaatgttgtaactttgttttaaactaaacattattctttccttcagtgattgcagtcatacccttgaactgctcttgat

SEQ ID NO: 10597 - DNA, 600 bp, Chicken  19866894212436_2
tttggcttatttcctatttctgcctcactcgttcccctttaggctgaggcaggtctgaagaatgagtctgcagatctcagaaatctagatttttatgggatgacccattaagataatgaaatatcctaactgagtgcaactggcctttttatttctgcagcttaccagatttatgcatttgtttgttttttttttaataattaaggattcttccttacacaaacataaacatcacatagcrggggattgaaactagatgatcattatggtcctttcaactcaggccattctatgattctrttctatgattctatcttaaacagatcagtgctgtggtaaactgttagagaaatctgtcatgcattaggcacaaacatcgccatgtgtatactgaggcacagtttatgtgatggactagataagggcactaaaatgtaagtggtcagcagtgaactttaaacttaatgttgtaactttgttttaaactaaacattattctttccttcagtgattgcagtcatacccttgaactgctcttgatctttccctttctgaaaaggcataagttgaactgctgtttttctggaaaggatgtcactg

SEQ ID NO: 10598 - DNA, 599 bp, Chicken  19866894212445_1
  misc_feature (1)..(38): n is any nucleotide
nnnnnnnnnnnnnnnnnnnnnnnnnnnnnnnnnnnnnnctgactgcttgcatatttgcagacttgagaatgtgtgtgatctcactaaatgagccctgcttcttttattaaaccaaaattcagtgatgtatttttgtctgcagcttagtagggcacatctttctccaagacaactgtttctaattcaaagccatttgaagtaaacgtggtataacatgatgcatatgcacactggtattttaatgcaattgtattcttgatatcaaacacctggctacctgctggggggtggtgggcagtkttttgggcccataatatctcacagggcttgctgtgggctcctcagctccttgctgtgacttgttggcctgctgggtttcagcataacgctgctgaggtttggctggtgtgattgggatgacagcagaatgcctattgattcagggctggacaaatgatcatctctctctctttcaatctgaaataactctttgattttagctactgcatttgtgtttgctgggaagaacatcacaattgctcaggtttctgtaaatagtggcactctctgcgttatggcttcaatgttttgcccattct

SEQ ID NO: 10599 - DNA, 600 bp, Chicken  19866894212464_1
ccagttctagcacttgataagttctgcgttgataagagaccttgccctgcttgcatttccttcctggtaagacttaagcctgcagcatccccacccagggagggctggagccccatgaggggttggtttggttctggtgttggtctcacggtgaggagggaccaaagccaaacctgtggcacagcataattttgggacagctgtgagtggagttgcagggatagcagaggataacccatcccacaggctctcctcacccaggtgcgttcggccacgctttggggcagcggctcagtgccmtgtrgggttccctgcatgacaaacaagcacttcttcctcccgtgcttgctcacaatcaggagacaaagctgcarttgttgtttttgtctgccctgtagcttgatagattaacgtcacgcttctggctgctgtgatttgatgaggaacgtgtggtattggtgtctagaaatcagagtggtgggtgctttgcaaacatctcagtgtctaaaaatagctgcagtgctgctcaggcatttcaagcaaaagaacatgcgacgaaagcccagcaatgcttaagggaatcgcagactttccatttaa

SEQ ID NO: 10600 - DNA, 600 bp, Chicken  19866894212464_2
ttctagcacttgataagttctgcgttgataagagaccttgccctgcttgcatttccttcctggtaagacttaagcctgcagcatccccacccagggagggctggagccccatgaggggttggtttggttctggtgttggtctcacggtgaggagggaccaaagccaaacctgtggcacagcataattttgggacagctgtgagtggagttgcagggatagcagaggataacccatcccacaggctctcctcacccaggtgcgttcggccacgctttggggcagcggctcagtgccmtgtrgggttccctgcatgacaaacaagcacttcttcctcccgtgcttgctcacaatcaggagacaaagctgcarttgttgtttttgtctgccctgtagcttgatagattaacgtcacgcttctggctgctgtgatttgatgaggaacgtgtggtattggtgtctagaaatcagagtggtgggtgctttgcaaacatctcagtgtctaaaaatagctgcagtgctgctcaggcatttcaagcaaaagaacatgcgacgaaagcccagcaatgcttaagggaatcgcagactttccatttaaggca

SEQ ID NO: 10601 - DNA, 600 bp, Chicken  19866894212464_3
taagcctgcagcatccccacccagggagggctggagccccatgaggggttggtttggttctggtgttggtctcacggtgaggagggaccaaagccaaacctgtggcacagcataattttgggacagctgtgagtggagttgcagggatagcagaggataacccatcccacaggctctcctcacccaggtgcgttcggccacgctttggggcagcggctcagtgccmtgtrgggttccctgcatgacaaacaagcacttcttcctcccgtgcttgctcacaatcaggagacaaagctgcarttgttgtttttgtctgccctgtagcttgatagattaacgtcacgcttctggctgctgtgatttgatgaggaacgtgtggtattggtgtctagaaatcagagtggtgggtgctttgcaaacatctcagtgtctaaaaatagctgcagtgctgctcaggcatttcaagcaaaagaacatgcgacgaaagcccagcaatgcttaagggaatcgcagactttccatttaaggcagtattatttaattggataatctgattaaatatataggttatgtgaggtcttgattccaactccccttata

SEQ ID NO: 10602 - DNA, 600 bp, Chicken  19866894212464_4
aaatcagagtggtgggtgctttgcaaacatctcagtgtctaaaaatagctgcagtgctgctcaggcatttcaagcaaaagaacatgcgacgaaagcccagcaatgcttaagggaatcgcagactttccatttaaggcagtattatttaattggataatctgattaaatatataggttatgtgaggtcttgattccaactccccttataaactgctgcatgcatgtgaaaatggcgtaacagccaactgcatgcgagggagaatgacagtcaatgctattcttgatgcaattgctccggcraatcggaggcagatgcgttctgctgctatttggatgaagggctctccacacgaagagatttatgaaccactgtgaattgtcttttcctgaagtaactgattaaatctgagtcatcagacttgaatttgtcccgttttctttatccttttattcatttgctgggattatgtgccaaacgtacgcgctcgtgtgatgacgctgcagtggacctaactgaaggctgcagaggttgctgtttgatccctgtggttttggcagcagtcgtgccctgctcctgtgagttaagcacactgcacatat

SEQ ID NO: 10603 - DNA, 548 bp, Chicken  19866894212468_1
ctttggaataacataccatagttttcaaactttaacagtgcacatatctgcatgtcataagcaaatgcattttggaaaagttaggagactcattccgaaacagtactgcatttctggattagaagcttcccagaagcaatcctaagtagaagccttcctaaacttagaggttccttgaaacagcccacatgtatgcacatttcttactacagggcaaaaagaaaacgcaaggaccaaggttcttgaatgctgatacagaaacaagctgcatgatttaaaagcaaacaacagagcaggacwggtcttcgtggtctgtgtggtagcgaacatctttttcttaccgctggatctgtgccaggggaggttcagattggatatcaggaagaatttcttctcccagagagtggtgatgcagtggcacagctgcccagggagaggtggggtcaccgtccttggaggtgttccagaacagtggggatgtggcactgagagaggtgggcagtggtgggctggggttggatttggtgatctgagagctcttttccaac

SEQ ID NO: 10604 - DNA, 600 bp, Chicken  19866894212494_1
caagctgagtctctttctgaactcacacagcctgtgctgaagtctattttacaaaatcttcactattatcactgcaaaatggattaaagctaagagggagtacgcctactcactctattcttataccaggtggctatgtcaacatagtatttactgctagtttttataacgtgtaataggacacaacagatgctgcaaaatctgaaccacacacagcaaatctgtcttcatgaaaatggacacagcctgctaagttccagtctagtagaatatttaatcatcaaaagtaattttaaaagraggaaacaaataaggaacktaagggttattttctatttcccagtatatggaagtttattgaaggcaatacaattgcragtgacaaagggctttagtttacaagtaccatctctagctgcaaacattatgatactaaaaaaaccttaagtaatcggggggattctaggagttaataggacttctagctatagtactaccagtagtatattttgacactaaaatgaaaatgatgatattgtttcaatttaaaatgtttatgccattacaggactgttttctacactgtaacttagttggtat

SEQ ID NO: 10605 - DNA, 600 bp, Chicken  19866894212494_2
aactcacacagcctgtgctgaagtctattttacaaaatcttcactattatcactgcaaaatggattaaagctaagagggagtacgcctactcactctattcttataccaggtggctatgtcaacatagtatttactgctagtttttataacgtgtaataggacacaacagatgctgcaaaatctgaaccacacacagcaaatctgtcttcatgaaaatggacacagcctgctaagttccagtctagtagaatatttaatcatcaaaagtaattttaaaagraggaaacaaataaggaacktaagggttattttctatttcccagtatatggaagtttattgaaggcaatacaattgcragtgacaaagggctttagtttacaagtaccatctctagctgcaaacattatgatactaaaaaaaccttaagtaatcggggggattctaggagttaataggacttctagctatagtactaccagtagtatattttgacactaaaatgaaaatgatgatattgtttcaatttaaaatgtttatgccattacaggactgttttctacactgtaacttagttggtatcatctgtgacaggtcacgt

SEQ ID NO: 10606 - DNA, 600 bp, Chicken  19866894212494_3
aatggattaaagctaagagggagtacgcctactcactctattcttataccaggtggctatgtcaacatagtatttactgctagtttttataacgtgtaataggacacaacagatgctgcaaaatctgaaccacacacagcaaatctgtcttcatgaaaatggacacagcctgctaagttccagtctagtagaatatttaatcatcaaaagtaattttaaaagraggaaacaaataaggaacktaagggttattttctatttcccagtatatggaagtttattgaaggcaatacaattgcragtgacaaagggctttagtttacaagtaccatctctagctgcaaacattatgatactaaaaaaaccttaagtaatcggggggattctaggagttaataggacttctagctatagtactaccagtagtatattttgacactaaaatgaaaatgatgatattgtttcaatttaaaatgtttatgccattacaggactgttttctacactgtaacttagttggtatcatctgtgacaggtcacgttcctgtgatactacaaataatttttttcagaaaagtgtgatcaataatatatttctta

SEQ ID NO: 10607 - DNA, 599 bp, Chicken  19866894212504_1
  misc_feature (1)..(66): n is any nucleotide
nnnnnnnnnnnnnnnnnnnnnnnnnnnnnnnnnnnnnnnnnnnnnnnnnnnnnnnnnnnnnnnnnnccctcacaaagatggcggccgccttacagcgcggcgcctcaccaagatggcgccggccgtgcggacgtggccgcgctctggagggggagcggggcgccgctctgcgcatgcacggctgcggacgggcccgggaccatgggcaagaagcgagaggggctgagcgtggcccgggaggtgagggcgggcggcggcggtgaggggggcggctgggcccgggcagtgctgggctgtgcygtgtgtggctgcaggacttgtctttgttgcacccacggggtgtagatggggggtggaaaataaaatcccttcaagtcagagaaggcgaagcttgtgtttcagtactgatatcataagttaaactttccgttcagccttacctcctgagctgctgtggttgataaagctttctgaatgagtctccgtgtgatgtgatgcaatgattgttgggatgaggcctttcagacaggcatgcttgtttaactgaagtcaccatgctaaatgaatgcagttttctataggagcacttagcagattag

SEQ ID NO: 10608 - DNA, 599 bp, Chicken  19866894212506_1
  misc_feature (1)..(53): n is any nucleotide
nnnnnnnnnnnnnnnnnnnnnnnnnnnnnnnnnnnnnnnnnnnnnnnnnnnnnccctgtccgtatctccttgaggacagcagtaacttgcagtaacaccctccctagatgcaggactgggggctcctgcccatgttgcacaatgctctcagcttccctgacagctgtgtgttgactgacagctcctgcgacagcgctggctgccacctgccttcactggctgcgagttgcacaagctgttcgctcagcccactgctggctcctgtttcctgttagcactgaaaggtcacggataggtttscttgtgagacaccccgagacagccagcctcttccatgcctaaagccctgctagctgaggactaagcaggcgttagctcacagctgaaactactccagccaaccagttctatccccagagacccgttcaagcctggttcccatcaaattgrccccmaaaaacccaattctagggcagaaaattactgctttgatccagttcctaccaagcagtgaccagttcgactgscaggcaccgctgcctcgctgggagccccaaccacaatgtccagagggaaatgaatatgggttctccctgtct

SEQ ID NO: 10609 - DNA, 600 bp, Chicken  19866894212506_2
gcttccctgacagctgtgtgttgactgacagctcctgcgacagcgctggctgccacctgccttcactggctgcgagttgcacaagctgttcgctcagcccactgctggctcctgtttcctgttagcactgaaaggtcacggataggtttscttgtgagacaccccgagacagccagcctcttccatgcctaaagccctgctagctgaggactaagcaggcgttagctcacagctgaaactactccagccaaccagttctatccccagagacccgttcaagcctggttcccatcaaattgrccccmaaaaacccaattctagggcagaaaattactgctttgatccagttcctaccaagcagtgaccagttcgactgscaggcaccgctgcctcgctgggagccccaaccacaatgtccagagggaaatgaatatgggttctccctgtctgcaaacaacagccactgctgcatgaccaaacactacagacaccgcggttccagttccagcctcactgtaattgtctttcaaaccacaaacacatcgagattgcccccaaaccagcaggaacctgcagcgcrcagacaacgcgcrctaggtg

SEQ ID NO: 10610 - DNA, 600 bp, Chicken  19866894212506_3
cctgacagctgtgtgttgactgacagctcctgcgacagcgctggctgccacctgccttcactggctgcgagttgcacaagctgttcgctcagcccactgctggctcctgtttcctgttagcactgaaaggtcacggataggtttscttgtgagacaccccgagacagccagcctcttccatgcctaaagccctgctagctgaggactaagcaggcgttagctcacagctgaaactactccagccaaccagttctatccccagagacccgttcaagcctggttcccatcaaattgrccccmaaaaacccaattctagggcagaaaattactgctttgatccagttcctaccaagcagtgaccagttcgactgscaggcaccgctgcctcgctgggagccccaaccacaatgtccagagggaaatgaatatgggttctccctgtctgcaaacaacagccactgctgcatgaccaaacactacagacaccgcggttccagttccagcctcactgtaattgtctttcaaaccacaaacacatcgagattgcccccaaaccagcaggaacctgcagcgcrcagacaacgcgcrctaggtggcagt

SEQ ID NO: 10611 - DNA, 600 bp, Chicken  19866894212506_4
tgcacaagctgttcgctcagcccactgctggctcctgtttcctgttagcactgaaaggtcacggataggtttscttgtgagacaccccgagacagccagcctcttccatgcctaaagccctgctagctgaggactaagcaggcgttagctcacagctgaaactactccagccaaccagttctatccccagagacccgttcaagcctggttcccatcaaattgrccccmaaaaacccaattctagggcagaaaattactgctttgatccagttcctaccaagcagtgaccagttcgactgscaggcaccgctgcctcgctgggagccccaaccacaatgtccagagggaaatgaatatgggttctccctgtctgcaaacaacagccactgctgcatgaccaaacactacagacaccgcggttccagttccagcctcactgtaattgtctttcaaaccacaaacacatcgagattgcccccaaaccagcaggaacctgcagcgcrcagacaacgcgcrctaggtggcagtgggctctggaactgattccattgctcagctgcttcacacgcagcaggaattgggactgcaatcgcaccgcac

SEQ ID NO: 10612 - DNA, 600 bp, Chicken  19866894212506_5
cctggttcccatcaaattgrccccmaaaaacccaattctagggcagaaaattactgctttgatccagttcctaccaagcagtgaccagttcgactgscaggcaccgctgcctcgctgggagccccaaccacaatgtccagagggaaatgaatatgggttctccctgtctgcaaacaacagccactgctgcatgaccaaacactacagacaccgcggttccagttccagcctcactgtaattgtctttcaaaccacaaacacatcgagattgcccccaaaccagcaggaacctgcagcgcrcagacaacgcgcrctaggtggcagtgggctctggaactgattccattgctcagctgcttcacacgcagcaggaattgggactgcaatcgcaccgcacgctcccttaaccctgaggtggatggtaactcaccgaagggccgttccctcaaaaaatccccagtaaggggggatctgagttaattcagctcatcagggctgctatggaagctgtgctatggaagcagggctgaccccaccttccagcctagtgagctgtggctaacagctccgccgtgctgctgcttcctgaccgcctcacag

SEQ ID NO: 10613 - DNA, 600 bp, Chicken  19866894212506_6
aaattgrccccmaaaaacccaattctagggcagaaaattactgctttgatccagttcctaccaagcagtgaccagttcgactgscaggcaccgctgcctcgctgggagccccaaccacaatgtccagagggaaatgaatatgggttctccctgtctgcaaacaacagccactgctgcatgaccaaacactacagacaccgcggttccagttccagcctcactgtaattgtctttcaaaccacaaacacatcgagattgcccccaaaccagcaggaacctgcagcgcrcagacaacgcgcrctaggtggcagtgggctctggaactgattccattgctcagctgcttcacacgcagcaggaattgggactgcaatcgcaccgcacgctcccttaaccctgaggtggatggtaactcaccgaagggccgttccctcaaaaaatccccagtaaggggggatctgagttaattcagctcatcagggctgctatggaagctgtgctatggaagcagggctgaccccaccttccagcctagtgagctgtggctaacagctccgccgtgctgctgcttcctgaccgcctcacagctcagctcaccag

SEQ ID NO: 10614 - DNA, 600 bp, Chicken  19866894212509_1
cccacttgcagcagccctttccctgaagggccacccagtattttcccagagcaagaatggtggggaaagagtctgggatgctccaagaaaagaacagctggggacagcctgcaactgcaaggacaacttgtgcagtctgaagtccattcccaaagggccctgttgaaaggacaggacgggatcaggccagacaaggaatcctggcaagtttcattcggccctggggcagctgagtgagttgctttagagcaaagaaagaagttgatggtattagacccgcaaaataaatcgcttgcaggrtttattatcatcactgtaataaatgtggtctgcttgtggtatctaagagackttgttaaagtctacgaggggttgaaggctcaagtcatcaagcaaaatgtcttgaaggcagaagggcgagmagctctgaaagcagattcttgcaaaaggcaatcaaatccacaggagcatgtcagtacttgggtcctcctcacaaagcattttacagctctagcttccagttttaaagtgtcaccaccaatctcactactgcactctgaactagtctgtaaactaattcttttaacaaataacaattaa

SEQ ID NO: 10615 - DNA, 600 bp, Chicken  19866894212509_2
aagaatggtggggaaagagtctgggatgctccaagaaaagaacagctggggacagcctgcaactgcaaggacaacttgtgcagtctgaagtccattcccaaagggccctgttgaaaggacaggacgggatcaggccagacaaggaatcctggcaagtttcattcggccctggggcagctgagtgagttgctttagagcaaagaaagaagttgatggtattagacccgcaaaataaatcgcttgcaggrtttattatcatcactgtaataaatgtggtctgcttgtggtatctaagagackttgttaaagtctacgaggggttgaaggctcaagtcatcaagcaaaatgtcttgaaggcagaagggcgagmagctctgaaagcagattcttgcaaaaggcaatcaaatccacaggagcatgtcagtacttgggtcctcctcacaaagcattttacagctctagcttccagttttaaagtgtcaccaccaatctcactactgcactctgaactagtctgtaaactaattcttttaacaaataacaattaacattactacaacaaggctaggaaatgtctattatcttctttctaattccttc

SEQ ID NO: 10616 - DNA, 600 bp, Chicken  19866894212509_3
acaacttgtgcagtctgaagtccattcccaaagggccctgttgaaaggacaggacgggatcaggccagacaaggaatcctggcaagtttcattcggccctggggcagctgagtgagttgctttagagcaaagaaagaagttgatggtattagacccgcaaaataaatcgcttgcaggrtttattatcatcactgtaataaatgtggtctgcttgtggtatctaagagackttgttaaagtctacgaggggttgaaggctcaagtcatcaagcaaaatgtcttgaaggcagaagggcgagmagctctgaaagcagattcttgcaaaaggcaatcaaatccacaggagcatgtcagtacttgggtcctcctcacaaagcattttacagctctagcttccagttttaaagtgtcaccaccaatctcactactgcactctgaactagtctgtaaactaattcttttaacaaataacaattaacattactacaacaaggctaggaaatgtctattatcttctttctaattccttctatgccccagaaagcattctgtggttcaccaaatttgtgagggaaactaagactgtttcttttgctttcc

SEQ ID NO: 10617 - DNA, 599 bp, Chicken  19866894212513_1
  misc_feature (1)..(41): n is any nucleotide
nnnnnnnnnnnnnnnnnnnnnnnnnnnnnnnnnnnnnnnnncattttaaatttaaaaaatccccttgagaaatatccttatttcacacttattattagtaaagccagctttggagagaaaatttttgcttccatgactggaacgagtgtcttcagcaagaagcaagtgtacagaaatctctcgtatggggacagcgatgctccatctgttctgaaaatctagtagctgctgagtcatctcccatgctgtgtgtatttgacatattttttaaaggttattaatactggggcactgaatgcytaactgatatatatgttttttatatcttatttcattttcctgagagcctgaatgtaaatacttgtctgatcctgccactgttaaattcaatgactgaactccttgtttgttccaatggtggaggtttaatgttgcaggcttatataattgaaataagtgacccacagtgatacaaggctcaggtccaacagacagggcattttcttcttaagctgtttataggtgtgaattaagatgcctatgaaaaatgctttaccatttcttccagattcacccttgtagcaaaatacatgcagagc

SEQ ID NO: 10618 - DNA, 600 bp, Chicken  19866894212514_1
tacagcatacaagtctctctagtacaagggctacaatacataggaaggtattttcgtgggtgagttcccaaacttccaatatgtactaccaaaccagaaagcagactcatactttctctttttcaggtttgcctgtttgtcctcatgcaaaaggactagtgggaatggattcaagctgtgccagggaaggttcaggctggatgttaggaaatactacttctctgaaagagtggtcaggcactggaatgggctgcccagagaggtgacggagtcaccgagcctggtggtgttcaatgagcrtttggatgttgtgttgagggacatggtttagtgagaaccattggtgaaggacgaatggttggactggatgatcctgtgggtcttttccaaccttagcgattctatgattctatgattctaaaaacttttgaaagtatgtttggtttgtctgagtaatggtgaagtcatatcacagaatcttgtaataattcttggccagcttttctagagctgaagagtagtttgcttttggctaatgctttatagcctatcctaatgaaatttatatttgattgatgtactactttgttgacagtaaga

SEQ ID NO: 10619 - DNA, 545 bp, Chicken  19866894212514_2
tctgagtaatggtgaagtcatatcacagaatcttgtaataattcttggccagcttttctagagctgaagagtagtttgcttttggctaatgctttatagcctatcctaatgaaatttatatttgattgatgtactactttgttgacagtaagacatactgttaactagacagtacaaatgcaaggcatattgcttccagccagctttgttttcctttgtgcttcagcatcatttaaaacatttttatttcccatcagatatgttgactcctcttgatatgctaaatcttttattttcttrttttttttttaaagtaagatagatgagacaggcatgaagaaatatacttctctatcttatgaagtcacagccaaaacaatattcccttgcctgcacaataagggaaaacttttatggcccagaaaaacaaacaaacaaacaaaacaaaaacaaaacaaacaaaaaaacacagaaatcctttaaagctatggtagtgtttatcctatgtctagaaattactcatagttagcattttccttaatacg

SEQ ID NO: 10620 - DNA, 600 bp, Chicken  19866894212518_1
tcaagtgtacctcatcttcttataacttgttaagtcgctgtcttattcacgattaagcttagttaaatcactattttatgccactaaatatattcctgtttctctcttataagtgaagtatacagttccacccatgacaccaggctccagtggtgcaccttttggtaaggagtaaagatgatggaaccagactcttttcagtgatatccagtggcaagacaaaaagcagtgggcacaaactgaaatgtaaaaaggacaacttgaacatgaaaagtcttactgtgttgtagatggtcaaasagttgatcaggttgcctaggctcttccatctttggaggacctgttctgagcagtagagttgaattaaattatcaccagaattccatttctacttcaacaattctgtgattctatggtggtattttatttttatatttatatctaagtttatataagtaattgtatgtacttagacatgcttacatgaattcacatatttaaacatactaatattgtgcatatatgttactcattcaaagtcagacgcagaatgtcttatacataagaatagctaatttatttagcttatgagttggtcta

SEQ ID NO: 10621 - DNA, 600 bp, Chicken  19866894212518_2
ttccatttctacttcaacaattctgtgattctatggtggtattttatttttatatttatatctaagtttatataagtaattgtatgtacttagacatgcttacatgaattcacatatttaaacatactaatattgtgcatatatgttactcattcaaagtcagacgcagaatgtcttatacataagaatagctaatttatttagcttatgagttggtctattgaaatcatttaataaaactgcacagctgaaaaatgtgaaaaagtgagactgtatacatcagaatgtaatcaaggttgyatattgttaatttttcaagtgtttgtattttatctgcagttctatggatggattcatcctgaatgattttattcagctagtagtagaaatgtctgtactcccagtagttgatagtagaatataatcacatccagatagtgcttaatgacatctcaaaaacgaatttaacattagtgatacctgtcttcactgactataaagaaaactaaaatgcctgtcttagaccatatctctcaaacagataaaattttgctagatgcgtaaattatttgaatatttttttactacagactgaaattt

SEQ ID NO: 10622 - DNA, 600 bp, Chicken  19866894212520_1
cttttgtaatcacaaatctcctatcacgaaggaaaacaagcagaattgcaggcaaagctgttaaagtaagctacttttcactactgactgcaataaaacagaacgacataacattaaaaaggtttctgtattacagaaatgataaatataaaataattcagaatcaaagccaaaaacttatttgcagatagctactattcctcaacttcaagaatgcaggtactaagcaacagaaaacccttggaaaaatcaattaagttgaataatgaagcatttcttcactaattcttgtaaaggaakgtaaagtacaaacatccaaaatcagatattctatttcaacctctcttcttctccatatgctagccacttgcacaaagtatgtgcatttctgttacacacatcctttacagttgccccatagccgatrtaattccttaatacagaactgcaattccaacttccaagcaaaaaattcatttacactcatctcaaatcaatttaactgagaaatactgccaaaagggaaggctgcaccttttcctctcactctttggtgctctccacaatctcacatcactacgctttggctcagtgaccatg

SEQ ID NO: 10623 - DNA, 600 bp, Chicken  19866894212520_2
gtattacagaaatgataaatataaaataattcagaatcaaagccaaaaacttatttgcagatagctactattcctcaacttcaagaatgcaggtactaagcaacagaaaacccttggaaaaatcaattaagttgaataatgaagcatttcttcactaattcttgtaaaggaakgtaaagtacaaacatccaaaatcagatattctatttcaacctctcttcttctccatatgctagccacttgcacaaagtatgtgcatttctgttacacacatcctttacagttgccccatagccgatrtaattccttaatacagaactgcaattccaacttccaagcaaaaaattcatttacactcatctcaaatcaatttaactgagaaatactgccaaaagggaaggctgcaccttttcctctcactctttggtgctctccacaatctcacatcactacgctttggctcagtgaccatggacttaaagtataagggacatgaaaagaagcactcaattcaaagcactgttcttttcagtaacatagctgtttaaactgaaccaagccagcagcaaaactgctccactagggactacagtccctaac

SEQ ID NO: 10624 - DNA, 600 bp, Chicken  19866894212521_1
tccggtcagctcctaatttcagccagccctgcccagcagagatatgtgcaagcacatcgctgctccttgcctatttctgggggctgggtttgcatcatgcaaagcttgctgttatttttgatccggtattggcctcagagcaaagggaagggctttccatgcgaggccccacagggggaaatgaggccgacagcttgaaatcccaccagagaaacacctctgagattggccagctttacccactgcctgggtctgcccacagtatgagcagggctcaccctgtattcaccacctctcagsacccaggagtgaaaaacagcccaygggaggctgctgtgcagggaaacctgtgcttcgggtcgtgtctacccaacagcgggcctctttcttcctgstttgctgtgagcgatgagaaagcctcaagccaaaagagatcactgcagtaccttgttcaagccccaggacacagcagaccacatctgtctgaggtcgagagcctgagaaatgctggcagtgttagaaaacattgtgcctgaatccaaggagatggagcgtggtcccctccctgagcagtgcatcaccttcactgctacggggaaa

SEQ ID NO: 10625 - DNA, 600 bp, Chicken  19866894212521_2
agccctgcccagcagagatatgtgcaagcacatcgctgctccttgcctatttctgggggctgggtttgcatcatgcaaagcttgctgttatttttgatccggtattggcctcagagcaaagggaagggctttccatgcgaggccccacagggggaaatgaggccgacagcttgaaatcccaccagagaaacacctctgagattggccagctttacccactgcctgggtctgcccacagtatgagcagggctcaccctgtattcaccacctctcagsacccaggagtgaaaaacagcccaygggaggctgctgtgcagggaaacctgtgcttcgggtcgtgtctacccaacagcgggcctctttcttcctgstttgctgtgagcgatgagaaagcctcaagccaaaagagatcactgcagtaccttgttcaagccccaggacacagcagaccacatctgtctgaggtcgagagcctgagaaatgctggcagtgttagaaaacattgtgcctgaatccaaggagatggagcgtggtcccctccctgagcagtgcatcaccttcactgctacggggaaagcataaagcctttttcctggctgg

SEQ ID NO: 10626 - DNA, 600 bp, Chicken  19866894212521_3
catgcaaagcttgctgttatttttgatccggtattggcctcagagcaaagggaagggctttccatgcgaggccccacagggggaaatgaggccgacagcttgaaatcccaccagagaaacacctctgagattggccagctttacccactgcctgggtctgcccacagtatgagcagggctcaccctgtattcaccacctctcagsacccaggagtgaaaaacagcccaygggaggctgctgtgcagggaaacctgtgcttcgggtcgtgtctacccaacagcgggcctctttcttcctgstttgctgtgagcgatgagaaagcctcaagccaaaagagatcactgcagtaccttgttcaagccccaggacacagcagaccacatctgtctgaggtcgagagcctgagaaatgctggcagtgttagaaaacattgtgcctgaatccaaggagatggagcgtggtcccctccctgagcagtgcatcaccttcactgctacggggaaagcataaagcctttttcctggctggagcttgtctgcctttgccctccagcaccaactcctgttattccttgctctgacagattaaagaccccttta

SEQ ID NO: 10627 - DNA, 600 bp, Chicken  19866894212534_1
gaatttctcaagggggttcagaagcgctgatctgaagagatgttctcattccgctgtgcggtttgcattgcttgttttgcatggcttaaaagagcgcgtaaggaaatggactctgtgtcagaacctgagatattagagaatggtaagaaacagcatgaattttgcaggaaaaatgtcttcccttagttatgtatttgtcaggatacagtctgcaggccaaactctaagtttatgtctgagagtcaagccaagaggtttccaccttttcatcttctgagtgatgccattgtatccagagcrtattacatggaatagaaaagcttgcttcaaactcagtggatttcatgtgtgaaaccaatgtttgattgtgtgaaagttctgacaaaccttctcaggaggttattttccttagtagtttcacttggattacataaagctaaagaaagtggatgtttcttggctcagtataggatgctgctgtacatcagttcaggaaaaccaatacaagattttcccttgtcttctcagctatttgctcatgtttaaaaagtcagtctctctcccaattataagctccctttaaatgcttgaaggttgtta

SEQ ID NO: 10628 - DNA, 600 bp, Chicken  19866894212535_1
gccccaatatcctcagtaaatcttcccacaacgtaacgtatttggcaaggcttttaacctttaactcaaatgctctgaaatgcaaaccttctttgctgaggtttttgagaagtgaaagcattacctttgaccagtgcaagaatacgatgactagcatcctcctttctcagcaacaagacaagacagcgctctcgtgattcagcagaaagctctcctcttgcaggactgttctcaggtaaactagaaatcttgccagggcaaaatacagcaatctgaaataacaaggaccagattagactmctaaatccagatttaatcactacagggctcaagcaaatagttaagttatgatagcatgtgaagatacagcacaccagctgaaccacattaacctccattaactaggtgttcatttgtcgtctctacatgaggcagaggaatttaacttcaatctcatgaaaagatttaatataaaatgttttgctgggctggatgaaaaccacaacagttataaatgcagaggatatgtggtagtattctaaattactcattcaaaaaagatcttgagccccaagtcctgaaacacttagcaccagagaa

SEQ ID NO: 10629 - DNA, 600 bp, Chicken  19866894212542_1
acacccatgcaacttttcctcactcatctgtctcacttttattttgggagctcttcaggaatagcttttgttctcatgtcagttctttgttgagaaactgtctgtcgtgatgtccttcccccaagacttggaagtgattcataaaaaaagaaagttaaaaaaaatgacacctagtttggcttgtattacgtatttgagatagcatgcttcacccacaggacaagatggtagttgctgattttaacttattcctggtaaaaaacctctacagtgacccatatagacacctcttattgacarcagggaaacaaattgtctttactgccaaggtttcttttccagaaaattcagctttttgtttcctctttgcaatttatattctttgttgttcagaagcaagtcataactacgggatgtttctaattttccagggagcatagacattttgaaaaggaatacaggcttgacagctgtggggtaagcgtctacaaaaaggtaagattagatcaatacaagcatggcctcttgctagcttggatcttaaagtaagaggagggtggcactccaggaagggaagcgaagtctaggaggtgcctgaaa

SEQ ID NO: 10630 - DNA, 600 bp, Chicken  19866894212545_1
aaaaataaacaaggggctgttttcagccatacgctgtccctggagtccctggagctgtgctggtggaggactgcgctcccaggagagctgagcctagctggctctgttaatagcagcgtggcacaaaggagcagccagctccctcggtgtggtgtgagctgaggcggctcctgcaccttcctgtgcaacagcctcaggtgggagccctcaggtctgatcctgaatggcatttcctgcaagtttttgactgttcccagacccgtggggatttatttgtgggtgcgtagatgctcggcctcrctgaggccctggcacctctcacacacctcagtgtcagcagaagacttctgtcagctacagcaatctcaygctccccaaaaagcaaggtgctcgatgcttcaggacccttgcataacagtattcagtgccctgtgaaatctgargtgctggagaatattttgcaggctgcatgccgtgctgtttagtgagaataaacattgagaatattatgcaagaaggagttggcgagctgagttcttcaggcttaggtgcaataggaaatgccctgcggtgggactgatctcttactgttacgtatca

SEQ ID NO: 10631 - DNA, 600 bp, Chicken  19866894212545_2
actgcgctcccaggagagctgagcctagctggctctgttaatagcagcgtggcacaaaggagcagccagctccctcggtgtggtgtgagctgaggcggctcctgcaccttcctgtgcaacagcctcaggtgggagccctcaggtctgatcctgaatggcatttcctgcaagtttttgactgttcccagacccgtggggatttatttgtgggtgcgtagatgctcggcctcrctgaggccctggcacctctcacacacctcagtgtcagcagaagacttctgtcagctacagcaatctcaygctccccaaaaagcaaggtgctcgatgcttcaggacccttgcataacagtattcagtgccctgtgaaatctgargtgctggagaatattttgcaggctgcatgccgtgctgtttagtgagaataaacattgagaatattatgcaagaaggagttggcgagctgagttcttcaggcttaggtgcaataggaaatgccctgcggtgggactgatctcttactgttacgtatcacgagtcacggtgttcaggggcagctctgacagccatcccacccagggagcagattcacagagctgtcac

SEQ ID NO: 10632 - DNA, 600 bp, Chicken  19866894212545_3
tcggtgtggtgtgagctgaggcggctcctgcaccttcctgtgcaacagcctcaggtgggagccctcaggtctgatcctgaatggcatttcctgcaagtttttgactgttcccagacccgtggggatttatttgtgggtgcgtagatgctcggcctcrctgaggccctggcacctctcacacacctcagtgtcagcagaagacttctgtcagctacagcaatctcaygctccccaaaaagcaaggtgctcgatgcttcaggacccttgcataacagtattcagtgccctgtgaaatctgargtgctggagaatattttgcaggctgcatgccgtgctgtttagtgagaataaacattgagaatattatgcaagaaggagttggcgagctgagttcttcaggcttaggtgcaataggaaatgccctgcggtgggactgatctcttactgttacgtatcacgagtcacggtgttcaggggcagctctgacagccatcccacccagggagcagattcacagagctgtcacgactcccttccttacagacttctcagtggtgctagtggaggagccagacgtgtgccctgctctgtggggcaggt

SEQ ID NO: 10633 - DNA, 600 bp, Chicken  19866894212546_1
agtatccatagaattaattaagctaatatatttaacacatgaaccattttctaagagattgttttgcatactactgtaaatcagataactatgaattcatatgtctaaaaaaatattaaatatcatttgccaatctgggaaacaaattgctttcttttcaacatccaaatgatagcaagcatcatctttggaattatataattatttattttaacatacttatatacagcgagtgactcatcctgatataatagtttacttcaacataaactaagtaaagatttttatgaagtaatgaartcttttaacacatttgtgacttagaaactttcctcataagcctacagaaatataatcatagtaatgatatgtcttttgctatcatgatatccagtttgcctttaatgagggcgagcaccatttagtgatgttctaattgcayctgagatggataacacttgaacaaaatactcaacacacattttgaaattaattctaagcagctaaaaaggttttaaacatacatgtttataagtacatgtatattatatacttgtgtataataatatatacacacacatttattttaatgtttagctt

SEQ ID NO: 10634 - DNA, 523 bp, Chicken  19866894212546_2
caaattgctttcttttcaacatccaaatgatagcaagcatcatctttggaattatataattatttattttaacatacttatatacagcgagtgactcatcctgatataatagtttacttcaacataaactaagtaaagatttttatgaagtaatgaartcttttaacacatttgtgacttagaaactttcctcataagcctacagaaatataatcatagtaatgatatgtcttttgctatcatgatatccagtttgcctttaatgagggcgagcaccatttagtgatgttctaattgcayctgagatggataacacttgaacaaaatactcaacacacattttgaaattaattctaagcagctaaaaaggttttaaacatacatgtttataagtacatgtatattatatacttgtgtataataatatatacacacacatttattttaatgtttagctttaatagcaaaaggtacagtagaattccactgatagcaagattgactctagattatccatagaaaa

SEQ ID NO: 10635 - DNA, 600 bp, Chicken  19866894212549_1
gaaatgcaagatgcctgaaagctatagaactattttaacattgagcatgcaggagtccacaccgcagagcagacacgttcactgggaactgcagttggaaaactaacaagtctcctactgctacaataaccgtagctgcgtaacgcaagacttgccaggatcgcaggacactccagtgcttctagcgctttctgtgatctccattaagcgaacagcccaaggagcaccttatttaagcttacactgagggcctgaatatcaagggatgctgggcaggaaggataacctaccacttttttwaaaaaaatttttaaatctcttcaatcaagttgtacaccaaatagagatttttgtttttccagggggcagggagaagaaaagacagttacttccctgtatggcaacagaaaactgagcatctcaccttgcaacccaaaggtgacagctagcagaggggcatttcatgcattcttcacatagctgcaatccgttctctattgtactcccttttatttcttttccggggtgatgttgacatactgaccatactgactttcccagctcagaggacaccatcttcagacccatgtttttcacgtt

SEQ ID NO: 10636 - DNA, 600 bp, Chicken  19866894212549_2
gtcatctttccaattaagacctgctccttccttcctccctaattttcccagtatcttacacaaaatttagttgctgacgtgttgcaacagggataagagaaatgatcagtggagattagacagtgccatacatcagccaactcctcaaacaactgacagaggaaacacaaggcatcttcagaaggagaggattccagagatggcagctctgttatgatggctggtcccacttctgtcagttgtcagaagtgttttatggctaaaaagaaaggcagtgaaatccccaaacgaacacaaaakaygaacccctacrcaccacctctacattttgttaatttgaatccaagcaagaccaatcacttactgtagggtcacctttaacgtctactaaaagacactacatgagctctatcctggggtaagctaatccaggaaacaaaacaaacacaaggacaaaagtgaacagtgtcttcatggattacttttgcaggagtactcattaacatgagcatcatagctgtttttgcagtccctaggcatargaatttgtcaagggcttcagatcaagagcttgtctggtcatatatatcgttatgcaga

SEQ ID NO: 10637 - DNA, 600 bp, Chicken  19866894212549_3
catctttccaattaagacctgctccttccttcctccctaattttcccagtatcttacacaaaatttagttgctgacgtgttgcaacagggataagagaaatgatcagtggagattagacagtgccatacatcagccaactcctcaaacaactgacagaggaaacacaaggcatcttcagaaggagaggattccagagatggcagctctgttatgatggctggtcccacttctgtcagttgtcagaagtgttttatggctaaaaagaaaggcagtgaaatccccaaacgaacacaaaakaygaacccctacrcaccacctctacattttgttaatttgaatccaagcaagaccaatcacttactgtagggtcacctttaacgtctactaaaagacactacatgagctctatcctggggtaagctaatccaggaaacaaaacaaacacaaggacaaaagtgaacagtgtcttcatggattacttttgcaggagtactcattaacatgagcatcatagctgtttttgcagtccctaggcatargaatttgtcaagggcttcagatcaagagcttgtctggtcatatatatcgttatgcagagt

SEQ ID NO: 10638 - DNA, 600 bp, Chicken  19866894212549_4
ttaagacctgctccttccttcctccctaattttcccagtatcttacacaaaatttagttgctgacgtgttgcaacagggataagagaaatgatcagtggagattagacagtgccatacatcagccaactcctcaaacaactgacagaggaaacacaaggcatcttcagaaggagaggattccagagatggcagctctgttatgatggctggtcccacttctgtcagttgtcagaagtgttttatggctaaaaagaaaggcagtgaaatccccaaacgaacacaaaakaygaacccctacrcaccacctctacattttgttaatttgaatccaagcaagaccaatcacttactgtagggtcacctttaacgtctactaaaagacactacatgagctctatcctggggtaagctaatccaggaaacaaaacaaacacaaggacaaaagtgaacagtgtcttcatggattacttttgcaggagtactcattaacatgagcatcatagctgtttttgcagtccctaggcatargaatttgtcaagggcttcagatcaagagcttgtctggtcatatatatcgttatgcagagtgcaccattata

SEQ ID NO: 10639 - DNA, 600 bp, Chicken  19866894212549_5
tcagaagtgttttatggctaaaaagaaaggcagtgaaatccccaaacgaacacaaaakaygaacccctacrcaccacctctacattttgttaatttgaatccaagcaagaccaatcacttactgtagggtcacctttaacgtctactaaaagacactacatgagctctatcctggggtaagctaatccaggaaacaaaacaaacacaaggacaaaagtgaacagtgtcttcatggattacttttgcaggagtactcattaacatgagcatcatagctgtttttgcagtccctaggcatargaatttgtcaagggcttcagatcaagagcttgtctggtcatatatatcgttatgcagagtgcaccattataggagatcagcatttatcacacaactcyggatgaacagtaaatgaaccatccagttgaaccacaaacagagtagctagtggtaggttttgtttttaaacaaagatgctactgattatatatcagcaagaagtcaagttgcaaggcattaactagtatgctctcatctcattttcccaccagcaacaggattcacagatccaagttttgttgctcaatagccacagtttct

SEQ ID NO: 10640 - DNA, 600 bp, Chicken  19866894212549_6
atccaagcaagaccaatcacttactgtagggtcacctttaacgtctactaaaagacactacatgagctctatcctggggtaagctaatccaggaaacaaaacaaacacaaggacaaaagtgaacagtgtcttcatggattacttttgcaggagtactcattaacatgagcatcatagctgtttttgcagtccctaggcatargaatttgtcaagggcttcagatcaagagcttgtctggtcatatatatcgttatgcagagtgcaccattataggagatcagcatttatcacacaactcyggatgaacagtaaatgaaccatccagttgaaccacaaacagagtagctagtggtaggttttgtttttaaacaaagatgctactgattatatatcagcaagaagtcaagttgcaaggcattaactagtatgctctcatctcattttcccaccagcaacaggattcacagatccaagttttgttgctcaatagccacagtttctgccaaaaatcacaagggagccagggggagggaatggcaaatatgaaatgggacaacagctgtcaaggtaatttgatagcagtgatggcttcttgaacc

SEQ ID NO: 10641 - DNA, 600 bp, Chicken  19866894212554_1
gggatccggtggaacctggatttacaactggaaatcaaatacaagcatgtggaaatgttattatgtaaactaatacttagctacttcttgcaccattccctcaacagcaacagaatggtagcatggaaaccaaataccaagtgtaaatttttttaagcctgttctatgagaatgaaaagaaaaacagtcctgtgtaggatgaggaggactcactaccttttcatttgtgaagaattaaatgtcgcaacccctgggctgaattcaacagaaccaatgaatatgatgttaggatgtcactcygatgactcccactgctcaggtaggacacacacttcagagaagctgtagttcaggaacaggcagagcaacaagactgcaagtgctggtgattctgcatcatctaccctgaagcactgctgcatgaacccagagagcaaagggccaagacacagcatagtcccgctcatctgcatttcccctactgccacattgacaaccacactgactctggttggcttttggcagttttacatgatattctcataaataaacagagaacataacctgtaactgaaattaccactgagagtgtcataaaaa

SEQ ID NO: 10642 - DNA, 599 bp, Chicken  19866894212558_1
  misc_feature (1)..(35): n is any nucleotide
nnnnnnnnnnnnnnnnnnnnnnnnnnnnnnnnnnntgggtgtatcttgctggagcaagtaaaatctttgtcacatctgccattaatatgtatagcagattgacacttaaaaagcttaatacatttcatgtcttttcattttatggaggttttcattatgtatactatgtaggctttcccaccacccctgaagggtgtgctttctcaccagagctggcactatgatggatgcaaatgccaaaatgagaagttagataactgcacctacaaacttcaagggggaagttaggagctgtgcatytaaactgcatagcacatactcaattcagggatctgttcatcctgctgcagagggcaccaacaaactgttgatgtgaaatgttggttgccatttgaaaacccaaactctttaactggcagtctgaagctctgcagcrttgttcaacagctgcctatgactgcagtaattaygagagctacaaatgaccgtgacctgggaaacagcgtgatgctttgagctgttcttttactgaaaagggcatctgtttttattcttgtctcctttcttccagggtgaatttgtagaagatgggactgaaa

SEQ ID NO: 10643 - DNA, 600 bp, Chicken  19866894212558_2
attttatggaggttttcattatgtatactatgtaggctttcccaccacccctgaagggtgtgctttctcaccagagctggcactatgatggatgcaaatgccaaaatgagaagttagataactgcacctacaaacttcaagggggaagttaggagctgtgcatytaaactgcatagcacatactcaattcagggatctgttcatcctgctgcagagggcaccaacaaactgttgatgtgaaatgttggttgccatttgaaaacccaaactctttaactggcagtctgaagctctgcagcrttgttcaacagctgcctatgactgcagtaattaygagagctacaaatgaccgtgacctgggaaacagcgtgatgctttgagctgttcttttactgaaaagggcatctgtttttattcttgtctcctttcttccagggtgaatttgtagaagatgggactgaaactcacttcagtgttggtgatcacagctgttacattaaggctgtcagtagtggaaaacgaaaggaaggaattattcacactcttattgtggatgacagagaaattccagaggctgtggagtagcttctagttaactga

SEQ ID NO: 10644 - DNA, 600 bp, Chicken  19866894212558_3
ggctttcccaccacccctgaagggtgtgctttctcaccagagctggcactatgatggatgcaaatgccaaaatgagaagttagataactgcacctacaaacttcaagggggaagttaggagctgtgcatytaaactgcatagcacatactcaattcagggatctgttcatcctgctgcagagggcaccaacaaactgttgatgtgaaatgttggttgccatttgaaaacccaaactctttaactggcagtctgaagctctgcagcrttgttcaacagctgcctatgactgcagtaattaygagagctacaaatgaccgtgacctgggaaacagcgtgatgctttgagctgttcttttactgaaaagggcatctgtttttattcttgtctcctttcttccagggtgaatttgtagaagatgggactgaaactcacttcagtgttggtgatcacagctgttacattaaggctgtcagtagtggaaaacgaaaggaaggaattattcacactcttattgtggatgacagagaaattccagaggctgtggagtagcttctagttaactgattgttgtaggactcagatcaggtacttttaatta

SEQ ID NO: 10645 - DNA, 600 bp, Chicken  19866894212560_1
tcaaatacttgccttcagcttcagcacagttttgcttttctttgctcttcttacctcctgttccagtgggcagcactatcccagaactctgctgacagagatgggttggacatcctaagatatctcaaatggtgctggatatgtctggcatactttacatgtccccaaacataaaaaaaagtctgaagttcccttcttgagtcaaagaaacagcaatatagcacccacgagatgcttttcacgtgtttgctatcttgcataatgttcataattattttcctgtgttaaaaagagtatatscgagtgtgactttggtcagtttttacacatagaagttctaaatcaagtattctgtatgcaccaartgtgtcttcattacttgagcatcacaaatatrtgggaaaattgtagattttctggtgcagaaaagaatgcagacaagccctgaaataagacaaaaccttccaggacttctttagcatcttgtatttgatttcatgtaaaaattaactgtgaggagtggcgattctaagggtgtttccagaagtgcagtaatgtcccagagggactcaccattcagcatcatgctgcacctgaagt

SEQ ID NO: 10646 - DNA, 600 bp, Chicken  19866894212560_2
gtgggcagcactatcccagaactctgctgacagagatgggttggacatcctaagatatctcaaatggtgctggatatgtctggcatactttacatgtccccaaacataaaaaaaagtctgaagttcccttcttgagtcaaagaaacagcaatatagcacccacgagatgcttttcacgtgtttgctatcttgcataatgttcataattattttcctgtgttaaaaagagtatatscgagtgtgactttggtcagtttttacacatagaagttctaaatcaagtattctgtatgcaccaartgtgtcttcattacttgagcatcacaaatatrtgggaaaattgtagattttctggtgcagaaaagaatgcagacaagccctgaaataagacaaaaccttccaggacttctttagcatcttgtatttgatttcatgtaaaaattaactgtgaggagtggcgattctaagggtgtttccagaagtgcagtaatgtcccagagggactcaccattcagcatcatgctgcacctgaagtgcacgggaagggggcagcacagtggggctcagggctttcccagcctcgagcttgtcggtgtcttc

SEQ ID NO: 10647 - DNA, 600 bp, Chicken  19866894212560_3
gagatgggttggacatcctaagatatctcaaatggtgctggatatgtctggcatactttacatgtccccaaacataaaaaaaagtctgaagttcccttcttgagtcaaagaaacagcaatatagcacccacgagatgcttttcacgtgtttgctatcttgcataatgttcataattattttcctgtgttaaaaagagtatatscgagtgtgactttggtcagtttttacacatagaagttctaaatcaagtattctgtatgcaccaartgtgtcttcattacttgagcatcacaaatatrtgggaaaattgtagattttctggtgcagaaaagaatgcagacaagccctgaaataagacaaaaccttccaggacttctttagcatcttgtatttgatttcatgtaaaaattaactgtgaggagtggcgattctaagggtgtttccagaagtgcagtaatgtcccagagggactcaccattcagcatcatgctgcacctgaagtgcacgggaagggggcagcacagtggggctcagggctttcccagcctcgagcttgtcggtgtcttcatctggaccagcagcattcctgctcctccagc

SEQ ID NO: 10648 - DNA, 600 bp, Chicken  19866894212560_4
ccagcagcattcctgctcctccagccctaggatttccctcaggtgcatcccaggctgatgaatttatgatggcctaaatgctggcaaatgtccagttgccaacatgaaacagatgctgctcgtgaggttgtgctagacttgggccctgcttttgagagatgaacaaaggaatgaaactcattacttctactctctgagaggtaaaatgtctccttgtcttctggaggatcggacagggtgtgtgattgcttgtgacatgttgcactgattttgcttgtcactgcaatcccacatcacttygtggagttttaggtacatgttgttctatgccagagatctatttgatttgggaaggctgtaatagaagtttgctgctgctccaaactttattagatgattgtgctggccggttgccatagctgcaggtgccaactagtcagagcttttccttttccatgggaacttcaactttcctgtctaaagaaaagaaatatttttttcttttatcatttacagcagtagtttacgtcatcattattgaagaacaagtgttgagaacagccacaggaagtgattcaccagtgaaaaatgaatgtaaag

SEQ ID NO: 10649 - DNA, 600 bp, Chicken  19866894212581_1
gttactaagttcatttgaagtaataaactccatgcgtgtaactgtcttttatctctgaataaatactgatagccacagcagtcctacagtatttttctaccaggaaaggttaaatccaccactgcattgaaaaagtaaaagatgcaagttctgtagtcattctatagtcagtaaaattaatggaagttgagagctttagcatgttacagcataggggtcccagtttccagccaaaatatttggttaacagagtaaggctgtctcttttttggtgcttgtgcaagtaaagaaagtgcctcytctacattgtaaaacagtggaagagacacgagcaattagcacaagcaaaacattttcacttgataagtcaagtctgggctgttttttctggctggtcagcagtgtctgaaaacaaaggagacacagcagccctaggagacagcttgtctgcccaaccacttttctgggggatctcttaatttgatttagaaagcacatagcaagacttctaggtgtcaaaatttaatataccacatagcacactactgcagctgatgctgtcaggcacgtgaaagcctatagctaatctgtgtctttagg

SEQ ID NO: 10650 - DNA, 599 bp, Chicken  19866894212582_1
  misc_feature (1)..(21): n is any nucleotide
nnnnnnnnnnnnnnnnnnnnnacctttggttctttatgcactctctgtgcctcagaacacctgtgctctgtatgttctgtaaggcactgctccttgagaaggcagcaagagagggacagctattggagagaggagctggaagaggaatcccaggaacagaatggctgctgatgtaacattctggaataattcttccacaggtacagtttatgctttcagttacaatgactgaccattaattaaagttggctcatctcaacagttaatttacacctgtaaatacttacagaacactgaaakgaactcgtgaaggaagagctgggaggcccacactgaggaaaacgcaatgggccaacagaacctggggaggtctgcaccacgcayacccgtgtgaaagctgcatccgtataccattgcacttttgagtacgtgaacgctgttaccacacaaaccaggttctccagccttcaggccgttctgtacaggaatgtgatgccgagcctgtgcagtgctgggccacagctcctcaaagagcaacggctgatcccattacctgatcttattgcccgttttcatgcgaatccattgaggaatggggc

SEQ ID NO: 10651 - DNA, 600 bp, Chicken  19866894212582_2
cactgctccttgagaaggcagcaagagagggacagctattggagagaggagctggaagaggaatcccaggaacagaatggctgctgatgtaacattctggaataattcttccacaggtacagtttatgctttcagttacaatgactgaccattaattaaagttggctcatctcaacagttaatttacacctgtaaatacttacagaacactgaaakgaactcgtgaaggaagagctgggaggcccacactgaggaaaacgcaatgggccaacagaacctggggaggtctgcaccacgcayacccgtgtgaaagctgcatccgtataccattgcacttttgagtacgtgaacgctgttaccacacaaaccaggttctccagccttcaggccgttctgtacaggaatgtgatgccgagcctgtgcagtgctgggccacagctcctcaaagagcaacggctgatcccattacctgatcttattgcccgttttcatgcgaatccattgaggaatggggcggttttgcttctgcttcttcgcgaggaagcgtttgatcttgaaggtcttgtgagacgactgcaagagaaaggggcagtcagtgcg

SEQ ID NO: 10652 - DNA, 405 bp, Chicken  19866894212584_1
agaaactatgataggtgtgatgtgagttcagtcagcttgccatttcattgactgctgctggaattcattatctggatgttggtaagcacttggtctgatacagacaccaggatttggttgttactcacattcctacctcaggtagaaagctgttggccgtatccttgagtgttctttgtacttggcactcaaagtatcttttctgtctgctttgaaacggtcggttcaggagctgcacattttacatacccaaattcaattgcagctgttagttttattgctgccagtagagttcccttrcttaccaattgtaaactgcagtgtcattttaattcagttgtatatgtttagaaatcacaggcagacagttcagtgaaaggacgtgttcattttcagtgttttagt

SEQ ID NO: 10653 - DNA, 599 bp, Chicken  19866894212586_1
  misc_feature (1)..(81): n is any nucleotide
nnnnnnnnnnnnnnnnnnnnnnnnnnnnnnnnnnnnnnnnnnnnnnnnnnnnnnnnnnnnnnnnnnnnnnnnnnnnnnnnnaaatgagaaatcccatggaaatctatggataattaaaaaagcaaaccaaaaaccactaactagttggtctgtatatttttagtatttagtcatgcacgaaaggtaagtttgaaaataacatcttattctcaaaaaatctctccaggggatcagtgcattaatgttggataatataactgtttattcttatgtttcaatgtttctttgaattaaagaaasaacaacacaaggaaacatgatgaaattctgtagtttagataatcagccagacaatacgcaaaagtaggttatgatcagacgttactgaggacctaagmcagttcaccaactagtagaaactgttgtaattctcacttagttctctcaaataattacttgtagtagataaacatctgatctatatctaatacccacgagcagagtagtggctgaagcatttgtcaactaatttgtagtaataaaaatacgtatcttaaattatttcagggttttattttaacatatcagttttctgtatc

SEQ ID NO: 10654 - DNA, 600 bp, Chicken  19866894212586_2
gaaatctatggataattaaaaaagcaaaccaaaaaccactaactagttggtctgtatatttttagtatttagtcatgcacgaaaggtaagtttgaaaataacatcttattctcaaaaaatctctccaggggatcagtgcattaatgttggataatataactgtttattcttatgtttcaatgtttctttgaattaaagaaasaacaacacaaggaaacatgatgaaattctgtagtttagataatcagccagacaatacgcaaaagtaggttatgatcagacgttactgaggacctaagmcagttcaccaactagtagaaactgttgtaattctcacttagttctctcaaataattacttgtagtagataaacatctgatctatatctaatacccacgagcagagtagtggctgaagcatttgtcaactaatttgtagtaataaaaatacgtatcttaaattatttcagggttttattttaacatatcagttttctgtatcacatgaattaatcactgatttcttaatacagctaaggaaaatggaaaaaatgcagataagtgaactgtatttacagaaagtataagaaaaatagaattt

SEQ ID NO: 10655 - DNA, 600 bp, Chicken  19866894212589_1
agaagattaatgaatcagatttctggtagatcagagtgagaaactaaattaggaacatgcagttcttcagaagaattcctaccagttgcctgtcttcacatgcaatttttgtcaacaaagttccatttggaatatcattgtaaatcacgacgaaagtagcatgatccaaagatgcagaatatttatcaattcgtagattcttacagaagaattatgcctacatttgcagccctaaattgtaaaaatagccaacagcaatcctgaaaagttacacattgtcttcatgttttttgtttgttwgtttgtttgggttttttgttgttgttgtttgtttgttttttgaattgatgarcaaatgtcacatgactagacttttaatgtcatattagatatagacaagtagacagctaaacagaaaatgaacatgagaacacactaaatgcaaactatctttccagttaatgccgyttaacttttttctggcttgaaacctcctctcccatcccatagctttcatttaaattgctttcattgtaaaaacatttttatgtacgtgtgtcttgctaggttggacagtagcacaatgaaaataagagctca

SEQ ID NO: 10656 - DNA, 600 bp, Chicken  19866894212589_2
gaacatgcagttcttcagaagaattcctaccagttgcctgtcttcacatgcaatttttgtcaacaaagttccatttggaatatcattgtaaatcacgacgaaagtagcatgatccaaagatgcagaatatttatcaattcgtagattcttacagaagaattatgcctacatttgcagccctaaattgtaaaaatagccaacagcaatcctgaaaagttacacattgtcttcatgttttttgtttgttwgtttgtttgggttttttgttgttgttgtttgtttgttttttgaattgatgarcaaatgtcacatgactagacttttaatgtcatattagatatagacaagtagacagctaaacagaaaatgaacatgagaacacactaaatgcaaactatctttccagttaatgccgyttaacttttttctggcttgaaacctcctctcccatcccatagctttcatttaaattgctttcattgtaaaaacatttttatgtacgtgtgtcttgctaggttggacagtagcacaatgaaaataagagctcacattcaaatccagaataaacatgaggatggtcactaataccagaacacattc

SEQ ID NO: 10657 - DNA, 600 bp, Chicken  19866894212589_3
aagatgcagaatatttatcaattcgtagattcttacagaagaattatgcctacatttgcagccctaaattgtaaaaatagccaacagcaatcctgaaaagttacacattgtcttcatgttttttgtttgttwgtttgtttgggttttttgttgttgttgtttgtttgttttttgaattgatgarcaaatgtcacatgactagacttttaatgtcatattagatatagacaagtagacagctaaacagaaaatgaacatgagaacacactaaatgcaaactatctttccagttaatgccgyttaacttttttctggcttgaaacctcctctcccatcccatagctttcatttaaattgctttcattgtaaaaacatttttatgtacgtgtgtcttgctaggttggacagtagcacaatgaaaataagagctcacattcaaatccagaataaacatgaggatggtcactaataccagaacacattctacacaatcaagaaacatagactggagtggcgatgcaaagtggtgatgcaaagtggcaatgcaaagtactgcatcctctttcaccttacaggttcagtgacagccataaccttcct

SEQ ID NO: 10658 - DNA, 600 bp, Chicken  19866894212595_1
tttgtaatagtgtctcctggcagaacagatgtgcctgtctgcatttacaacgtggttgtgggcttcctgtcactaagccatgtagtgctcaaatcctaacactgtcttgggccaatgctctggtttcagtgtttattcctgcagtaaagcttctgtgacattttctcctggtcttagcaaatgagcagatcagtaataattcatcagcagtgtttgccactcctaaaggaatgttgaattataaatatctaattacaatacagatactggctataaaaaaaattagtggattaaaataaygtttacaaagtgtgggatgatgttgtactgatcatctaggcaagctgcataggtggtgactattattgggagttatttaagttaatattttattactcaggcaaacacatagtataatttttgctgtattttttaaatccatactttgagggacgtacttggaggaatattttagagcatgttcaattatgtcaagactccaagagcttagaacaagaagtacacttgccttgttcatgtgtaaagatgtggtttaatagtagtgttaaaatgatcaattgaaaagttctttatgtgtta

SEQ ID NO: 10659 - DNA, 600 bp, Chicken  19866894212603_1
ccagcttcttactgtttgcactcttgaactttcagctgaacaaagaaaataagaccttgaaacgaattagtatgctttatatggcaaagctgggcccagaaatcatcactgaagagattaacattgatgaggatgatccatccacggatacggaagctaactctggatcatgcaattctgtgcattgtcaacagcaaataaaaggtaagcattgttgctgggcctacaacaccatagcaaaagtggtctagagggtggctgcgttggcctggcactaggtacctgtctggctccaaattrtgcttctgagagtggtccacaaaggatttctggggaagactgtaaggacacggtaggcctgtagtgatactgcataacagatgtgataaatatatgtcctgcaaagtattctgcaatgcagtaggaaaaagggatctacacagccaagagagttcaatgttgctgagttggtaaaagaaacattttcttatatccttaacaaagcaaaagttaagcagaaggacaaggtcaccttggtattcaactgcactgtaactatttcagagcttgtgaaacaagaccctccgatgatgtttccat

SEQ ID NO: 10660 - DNA, 600 bp, Chicken  19866894212615_1
cttactgggatggttccttagcagaagtgctataatcctcacatttttgagttaacaaaagaataacagtctactcttaaatatgttaattaacacagcaccctaaaaaaaaaaaaaaatagttggggaggagatgaaggtttaaagagaagtagaattttcacaagtagcccttaaatgccctacagagcaaccctcaattacagggattaccaaagcttcactgcttcccagaacagagaactcgcacccacattcgagattgcctttctccaagagctccctgtgctggcaggacartacacaccagggctacctggggtatgaagcactcaggtgtaaatcaaagacctctgcaactcctgcagcccagaacacaacccggagggtgcttctggttggaatggagatccctgaggccaaaacaagggggtggtagcaggggctttgtctatggctgactaagcacagcttgtcagatagaatcccaactagcacagcagcctttcagctttctcctacagttatttacctactatgcaaagcatttccaacagcttatgtgtattaaaaatacagccagacagtagcttcattcag

SEQ ID NO: 10661 - DNA, 600 bp, Chicken  19866894212615_2
aaagcacactaacacaccatctgctcattataacaagctagacaggcttcagcttcttgctgcagagatgcacccacaccatgtcccttgatcacacaggcagctgttggatattgccaaaatcttgccacagctattttggagaagatgttatatgtctctggattcaagagctgctttcccaggcagccgtgccttggagcagaactagttacactaacatatagcccagagtcaggttcctccagctagagatatgcagacacaaccaaagtgatttgcttaaagctccagactttygctttcacctcagaaaaaggcacactgaatttcctgcaaacatgaacactaaagaacacraaatctgttctcaggggagataccggctcttgaaaaagcagcaagaacaacatttctccccagtcctgcaggcaagatgacaagwcttccagtccccctctcctccccttgttatgtttctcccttcaaacacagaaattatagaacagctgttgcttttgccagctttgtgagaggcaaagagcagcagtcagaaggagcagcagggaacaagactccaatatactccaggtcccatct

SEQ ID NO: 10662 - DNA, 600 bp, Chicken  19866894212615_3
tgcagagatgcacccacaccatgtcccttgatcacacaggcagctgttggatattgccaaaatcttgccacagctattttggagaagatgttatatgtctctggattcaagagctgctttcccaggcagccgtgccttggagcagaactagttacactaacatatagcccagagtcaggttcctccagctagagatatgcagacacaaccaaagtgatttgcttaaagctccagactttygctttcacctcagaaaaaggcacactgaatttcctgcaaacatgaacactaaagaacacraaatctgttctcaggggagataccggctcttgaaaaagcagcaagaacaacatttctccccagtcctgcaggcaagatgacaagwcttccagtccccctctcctccccttgttatgtttctcccttcaaacacagaaattatagaacagctgttgcttttgccagctttgtgagaggcaaagagcagcagtcagaaggagcagcagggaacaagactccaatatactccaggtcccatctgttgggactgggtaacagaagacagcgggcaaggaggaaacggggactccaatgtgcaat

SEQ ID NO: 10663 - DNA, 600 bp, Chicken  19866894212615_4
agatgttatatgtctctggattcaagagctgctttcccaggcagccgtgccttggagcagaactagttacactaacatatagcccagagtcaggttcctccagctagagatatgcagacacaaccaaagtgatttgcttaaagctccagactttygctttcacctcagaaaaaggcacactgaatttcctgcaaacatgaacactaaagaacacraaatctgttctcaggggagataccggctcttgaaaaagcagcaagaacaacatttctccccagtcctgcaggcaagatgacaagwcttccagtccccctctcctccccttgttatgtttctcccttcaaacacagaaattatagaacagctgttgcttttgccagctttgtgagaggcaaagagcagcagtcagaaggagcagcagggaacaagactccaatatactccaggtcccatctgttgggactgggtaacagaagacagcgggcaaggaggaaacggggactccaatgtgcaatccaacacctcctttcttccaacctaccttacgctctttggctccatactcagcgactacagcaaagggaagaataaagctcttca

SEQ ID NO: 10664 - DNA, 509 bp, Chicken  19866894212617_1
tcttcccttctttatttcctcccttcttcccttctttatttccttcctccttcccttctttaattccttctttcttcgctcatttcctccctcctttccttctttagatcctcccttcttcctttctttatttccttccttcttcccttttttatttccttccttcttcccttccctttcccttcctgcttcccttcctatttgttccttctttccttccttcctcctacccttccttttaccttcccttcttcccttccatttctccttccttttttccttccttctcccctttccttyttttcccttccttcttcctttcttccttcttcccttccttttccctccctacttccctcccttccttttcttgttccctcccttttccccttcctttttcctttccttcttcccttttctccttccctctctccttcctttatcttcctccttccttttactcttcctctttcctccttccttttccttcatcctttcttccttcttcc

SEQ ID NO: 10665 - DNA, 600 bp, Chicken  19866894212621_1
acaactttttcaatgaaacaggttattttataaatccctatttttagccttaaaattttggaatctttgaaagtcttgtaaatcactacaacttgcttctttgccctagtgattacatacaccagttatttcctcctggaaaaacgctgtatcacaaaatctcatgttcacagagcagttaatttgtataagctgaaagatcctgaaaacaagttgaactccgtggagagcatttgaattaagacttaagtagtagatgttccctctacgtaggagcaatttgcgtgccacagctgatayccagtacttagaattcactgaatcttcccctaggtaaaattcatttgtggaaatggcctgataaatagagatttcagcataattaatgtgaaagcttttaaaaaatggggtacgtatggatatctggaagtcaatctagtctatcttctgtgtaaaatgagattaacattagtgtgtttttttctgactgtgccttgtaaaccttgaaagacagagatttcgctacttctcagtctgtttcagtcttaagttacttgcataatgagaaagcttttattatagttctgtttgaatttccaa

SEQ ID NO: 10666 - DNA, 599 bp, Chicken  19866894212623_1
  misc_feature (1)..(85): n is any nucleotide
nnnnnnnnnnnnnnnnnnnnnnnnnnnnnnnnnnnnnnnnnnnnnnnnnnnnnnnnnnnnnnnnnnnnnnnnnnnnnnnnnnnnnggaagatctcgaaaagccgcctatattgagtttttaaaacatttgtaacatattagctttatgactattaggaacctaggaattgtcatactgggccaagtgaatattttctctcatccaatagaaaatttctgatgtctcaaggagagataatacgaagctcacaagataattccttgttaatgttgcctgatagttgatggcatatagccatyccacataattcttattatttaaacaaatgtccagtcattttttgaaccctgatatttttgacaattttttattattattatttgcatggccttgctgatcacagtgagaaaaatataaacaccatttgaaaaattgtatttcctctgcttttaatttgaaatcttctgcttcttgaattgtagtacagagtaatgttagggcaaaatctgcagatggtgtgaacctgaatgtaaagtaccaaaacagaattttatacayctggtactcgtgaagattttctttgtgttttaggatgagt

SEQ ID NO: 10667 - DNA, 600 bp, Chicken  19866894212623_2
ccttgttaatgttgcctgatagttgatggcatatagccatyccacataattcttattatttaaacaaatgtccagtcattttttgaaccctgatatttttgacaattttttattattattatttgcatggccttgctgatcacagtgagaaaaatataaacaccatttgaaaaattgtatttcctctgcttttaatttgaaatcttctgcttcttgaattgtagtacagagtaatgttagggcaaaatctgcagatggtgtgaacctgaatgtaaagtaccaaaacagaattttatacayctggtactcgtgaagattttctttgtgttttaggatgagtatttaaatccttctgtgacttaattttccacatgttcatgtggttacctgtatatgtgtgctaattccttgattctgatgcagtaattacttaagaataattttgatccctctcatattttcatatttttgtattattctctacctcttatagagcagatgaacaaatttcttagttaaggattccctaacctactgtttgtctctggagtaaacaatatcacaaacttaaggaaatcagacttaaaaatagtgaaaatt

SEQ ID NO: 10668 - DNA, 599 bp, Chicken  19866894212631_1
  misc_feature (1)..(236): n is any nucleotide
nnnnnnnnnnnnnnnnnnnnnnnnnnnnnnnnnnnnnnnnnnnnnnnnnnnnnnnnnnnnnnnnnnnnnnnnnnnnnnnnnnnnnnnnnnnnnnnnnnnnnnnnnnnnnnnnnnnnnnnnnnnnnnnnnnnnnnnnnnnnnnnnnnnnnnnnnnnnnnnnnnnnnnnnnnnnnnnnnnnnnnnnnnnnnnnnnnnnnnnnnnnnnnnnnnnnnnnnnnnnnnnnnnnnnnnnnnnnatgctttaattccatgtgcactgtagaatgaaaagctgcaaggatcttgaagactaatactttyttcttttctttttttttgacagataaatataaagttgtgtcatttaaatgacactactgtaaatgattccccctattagagtgccagcatgatagcctgttgcaaaacacctatcacataatccattcagactgatccaagcagttgatttgcaaagaaaattgcctcccctgcagtgcattgttttctctcccttttattagatatttttcatttaacaaaaccaaagcagcacatacgtgaagggttatatatgttggttggtgtgttttgttaaaagtgcccttctgtaagagaag

SEQ ID NO: 10669 - DNA, 600 bp, Chicken  19866894212631_2
aaatgattccccctattagagtgccagcatgatagcctgttgcaaaacacctatcacataatccattcagactgatccaagcagttgatttgcaaagaaaattgcctcccctgcagtgcattgttttctctcccttttattagatatttttcatttaacaaaaccaaagcagcacatacgtgaagggttatatatgttggttggtgtgttttgttaaaagtgcccttctgtaagagaagtagaagataggtttgagagctctgcatgctgctggtgataaagcagtaatgctttgctccygtagtcacagcgccacacagcaaagccacatctgtatctctggaaaaaagaacacctttgttcttccacagcctccrgggtgactgaacacagtttttgcctgatgcttagagggctggtagtttgccatggcggacaggaaaggtgtgtagttgtgctgccatagggactgcaaacagatcacagtttgctataagaatctttctaatcagcctctatgacatttttttatggcagctggtgcatgtaggaagatcacagaattgtaggggatggaagggacctctagagatcatgtag

SEQ ID NO: 10670 - DNA, 566 bp, Chicken  19866894212631_3
caagcagttgatttgcaaagaaaattgcctcccctgcagtgcattgttttctctcccttttattagatatttttcatttaacaaaaccaaagcagcacatacgtgaagggttatatatgttggttggtgtgttttgttaaaagtgcccttctgtaagagaagtagaagataggtttgagagctctgcatgctgctggtgataaagcagtaatgctttgctccygtagtcacagcgccacacagcaaagccacatctgtatctctggaaaaaagaacacctttgttcttccacagcctccrgggtgactgaacacagtttttgcctgatgcttagagggctggtagtttgccatggcggacaggaaaggtgtgtagttgtgctgccatagggactgcaaacagatcacagtttgctataagaatctttctaatcagcctctatgacatttttttatggcagctggtgcatgtaggaagatcacagaattgtaggggatggaagggacctctagagatcatgtagtccaacccccctgccaaagcatattcctagaccgggttgcaca

SEQ ID NO: 10671 - DNA, 600 bp, Chicken  19866894212634_1
cttgtttgattttgcatttccagtaacgtggtgcagctgcctttgtataagtgtgatgggacctagactgttagggaagagactttatgaaaacctaccattgtactagaaggatgtcatccccccatctttaccttctaatgactttatgtttgcctgtgtttcattttaatttcaaaagatgccctcctcttcttttctacacttactctcttactcctcctgattatttctgtgctaaaatgatagaaatgcactcatctttttgcatgcagtgcagtgtatttccttcagcttgaygaattgctatttttcttataggtcttttaaaaaatgttcatatgttgtttcatcttttggtcagaaagttttgcactatatatgtcaatattaagaatgtagttgaaaagtctgttcaactatttagtagagaagaaaaatgaaagcacaattctgtcattacaaaatttattttatcatggtgtaataaaaacataactaatttataaattttaatgtaattattggtgtgtccgtactgtggacttgtatgcataggagaaaagcaacaaaatgtgaagtgtttaaacttccactctg

SEQ ID NO: 10672 - DNA, 599 bp, Chicken  19866894212637_1
  misc_feature (1)..(93): n is any nucleotide
nnnnnnnnnnnnnnnnnnnnnnnnnnnnnnnnnnnnnnnnnnnnnnnnnnnnnnnnnnnnnnnnnnnnnnnnnnnnnnnnnnnnnnnnnnnnntaaacttcacatattcctttactgaaattgaaggagattgttaagtttcacttatgtgtatgtgtcacagattggagaggaaataaatcttactatgtaattgtgccttatgttacagggaaaatcagaacttggattctcttcatttccaaaattagcacttgctttttcttatcaaaaggccaacatgtgctaaaatgaaagacyggcagtgtttacattagtgcagccagtagtggaataaaccagaaaaggctgagagacccaggactgctcagactggagaagagaaaacggagagaggatcttatcattttttcagtgatgtgcagaaatagaaaaaggggcaatggacagaaactagaacacaaaaagttccatacaaacatgagaaaaaaagaaaaattactgtgaggatcatggagcactggaacaagctgcccagtctcctcctttgaggatattcaaaacccacctggatgctttcctctgcaacctactcaaga

SEQ ID NO: 10673 - DNA, 600 bp, Chicken  19866894212639_1
gccacgtcgatgggacactgggctccagcacaagccagcggggaatgggtgtgagctgctggtgcgagctttccccgccctgatggaagatgagatgaagttttctgctattaagcacgctctggcttggtctgactgcaggagcatatgttacaaataacaataaatgaagccaacatttggtactacttgagataatggcttggctatgagtgtgcagctctacaggcaggaaataaaacctttcaggagaagacactatccccagtaaacactctcattttagacttacaggactcmcaagaaatctggtttagttaccagcctgagcaattctcattagtgaagtgaagctgaactcaatcttccctaaaaataagctgccagaaagagattgctggtgaagggtctggatcacaagtrttatggggaacggctgagggaactggaatgggtcaatctggagaaaagaaggctcaagggagacctcattgctccctgcaactccctgagaggaggcagtggtgaggtgggggtcagcctctgctcccaggtaacagcagagaggtgtcaacagagatgagaggtgatggcctcgag

SEQ ID NO: 10674 - DNA, 600 bp, Chicken  19866894212639_2
ggcttggtctgactgcaggagcatatgttacaaataacaataaatgaagccaacatttggtactacttgagataatggcttggctatgagtgtgcagctctacaggcaggaaataaaacctttcaggagaagacactatccccagtaaacactctcattttagacttacaggactcmcaagaaatctggtttagttaccagcctgagcaattctcattagtgaagtgaagctgaactcaatcttccctaaaaataagctgccagaaagagattgctggtgaagggtctggatcacaagtrttatggggaacggctgagggaactggaatgggtcaatctggagaaaagaaggctcaagggagacctcattgctccctgcaactccctgagaggaggcagtggtgaggtgggggtcagcctctgctcccaggtaacagcagagaggtgtcaacagagatgagaggtgatggcctcgagttgtgccaggggaggtcaggttgggtattaggaaacattccttctcagaaagagcagtgaagcgccgcacagctgcacagggaggtggggaatcaccgtccctggaggtgttcagagctgtgg

SEQ ID NO: 10675 - DNA, 600 bp, Chicken  19866894212645_1
agttgacaagttcatatttaataccaaaagccagtttatcaaaacaaaaatcagtctgaatgtgaaatctagtatgggagatataagaagtctatatcctaaagaagacagagagcaatggaattgctgtcctgtatgatcttgaacaaagctccgagctgatggaagatgtcattcttctgattttcattattgcctaagtgcaggcatttttcatggccctttcctgcagctgacttccatcctagctgcttggttttgatccttaatgtcagatttataataatattattaataatrttaattgattgtcttatggaaatacattttaataaagtacaagtataattgcaaggcatatggcaagtagcctgcagcaaactagtttaacacrgacacaacccctcccacctttaaatgctttaactttgccagtgcttttgtttttatcctgtactttagcacatcatttgcattgcacgtatttaggccaggattaacttctgttggaatattttctctgaaattaaatcccactgctttcattctggaagtgaaaatcctttccagaaattctttccagcctctcagtgctcttta

SEQ ID NO: 10676 - DNA, 600 bp, Chicken  19866894212645_2
tatcctaaagaagacagagagcaatggaattgctgtcctgtatgatcttgaacaaagctccgagctgatggaagatgtcattcttctgattttcattattgcctaagtgcaggcatttttcatggccctttcctgcagctgacttccatcctagctgcttggttttgatccttaatgtcagatttataataatattattaataatrttaattgattgtcttatggaaatacattttaataaagtacaagtataattgcaaggcatatggcaagtagcctgcagcaaactagtttaacacrgacacaacccctcccacctttaaatgctttaactttgccagtgcttttgtttttatcctgtactttagcacatcatttgcattgcacgtatttaggccaggattaacttctgttggaatattttctctgaaattaaatcccactgctttcattctggaagtgaaaatcctttccagaaattctttccagcctctcagtgctctttataggtatcccatgactgaaaggacttcataatgcagacctcatgcatttgcactcagctgtccaaacacatggatgacctggacagttacaatt

SEQ ID NO: 10677 - DNA, 600 bp, Chicken  19866894212646_1
cacagatgctggcagctctctccagttaatagaagcgtttttaggtatctgttttttaatgtggctgtttttagacaaatcgtatttaatagccattaacttgtatccagactgatctcagtgcacactgtataaagtctctccttggaatgtactgtgccagtaattgttaaaacagatggaggttgttttcaggaaaaagtaatggtttgggaatgagaatgaagagaaataaatctggtagtgaatcagaacaagattttaaacattttttaaatattataaacctcagcagattarattttcttctcggggtctctgttagtattgtaagccaaggaagaacatttccattatgarctttggcagactgagaaaagttgagagtattctttctgaaatgtgaagaataacaaatgagaccagaaaaagtattttcctgacaagcatgtgtggaatttttaaagctatgttgtttccagtcattgaaggtgaagggaaagaatgagttgaggtatctgttcagcaattgctctgaaacccatagaaaaaaaaaaaaaaaagatatttttgttctttttagagaccttttagagaaag

SEQ ID NO: 10678 - DNA, 600 bp, Chicken  19866894212646_2
gtggctgtttttagacaaatcgtatttaatagccattaacttgtatccagactgatctcagtgcacactgtataaagtctctccttggaatgtactgtgccagtaattgttaaaacagatggaggttgttttcaggaaaaagtaatggtttgggaatgagaatgaagagaaataaatctggtagtgaatcagaacaagattttaaacattttttaaatattataaacctcagcagattarattttcttctcggggtctctgttagtattgtaagccaaggaagaacatttccattatgarctttggcagactgagaaaagttgagagtattctttctgaaatgtgaagaataacaaatgagaccagaaaaagtattttcctgacaagcatgtgtggaatttttaaagctatgttgtttccagtcattgaaggtgaagggaaagaatgagttgaggtatctgttcagcaattgctctgaaacccatagaaaaaaaaaaaaaaaagatatttttgttctttttagagaccttttagagaaagattttgtgctttgctcagtctggtgggttctttttccaaagcatgttatccgtagtcatg

SEQ ID NO: 10679 - DNA, 600 bp, Chicken  19866894212647_1
atgaacttggttcacttttctcagtttgtcgaaatccctgatagatttatacagaagttgatttggaaagagcattagcgtgcaaatatgattattttctgataaatggattggccttcttgttgctgctcatcacctctcaatggctgactgggccttgagtccttgctgggaaggtcagtacctgacgtgtgcattgctcagattaaattagtatctggctggtggctgttaaatattctagactaaacgagactgttctgttaaataagattttaaattgtaaaaaaaaaagttcargttttactacttcaagattggctataaagattcaatggtgagtaataaacagatctgttacctttattaaaattagcagtgaccatgccctgaaacaggtacatgctccaattaagtgaactggaagagaaggagctgcaaagggaccaaacttctcatagccatgaaactgctttgcagctgctgccatgaggctgccagaagtcttcagtagcttctgtctgtctggtatggaggtagcacactttgtacaactgcactactactggcatatacccagtcactctggttttgccagga

SEQ ID NO: 10680 - DNA, 600 bp, Chicken  19866894212648_1
gaattaaagaaaaatgtatcagtaccttgtgtaacatcagcctgtatgaatactaaggtctctcatgcactgatccctaactgtttttctacagttcatttaccatagctattgaaccagatgatgagttacattttgaatgcattaccataacaaccaaaggtaaagtcaatctcagccagcctctctgtgcacgaatcacagaactacagaatggctcaatgatcacctagttccaaacccctgccacaggcagggctgacaactgctagatcaagcactagatcagtttgaacaggmcwccatccagcctggccttgaacatctccagggatagggcatccacaacctctctggacagcctgttccagtacctcaccactctctcagtaaaaaacttctccccgacacctaatgtacatatccattcctttagtttaaaactatcctccttgtcctatcactatctatctgtgtataaagttcatttcctttctgtttataatctccctttaaatactggaaggccacaaatgaggtctccccagagctttctgttctccagtatgaacaaacaaagctcccttagcctgtcttcat

SEQ ID NO: 10681 - DNA, 600 bp, Chicken  19866894212648_2
attaaagaaaaatgtatcagtaccttgtgtaacatcagcctgtatgaatactaaggtctctcatgcactgatccctaactgtttttctacagttcatttaccatagctattgaaccagatgatgagttacattttgaatgcattaccataacaaccaaaggtaaagtcaatctcagccagcctctctgtgcacgaatcacagaactacagaatggctcaatgatcacctagttccaaacccctgccacaggcagggctgacaactgctagatcaagcactagatcagtttgaacaggmcwccatccagcctggccttgaacatctccagggatagggcatccacaacctctctggacagcctgttccagtacctcaccactctctcagtaaaaaacttctccccgacacctaatgtacatatccattcctttagtttaaaactatcctccttgtcctatcactatctatctgtgtataaagttcatttcctttctgtttataatctccctttaaatactggaaggccacaaatgaggtctccccagagctttctgttctccagtatgaacaaacaaagctcccttagcctgtcttcatag

SEQ ID NO: 10682 - DNA, 600 bp, Chicken  19866894212654_1
agaaaaattgcagacaataagaaaaaaaattgatatatccttcgtttcttatttttcagcatggtctttgctgatttatatatgagggctgaaacaaaactatgcctcctgtttttttacattggtccataacccagaggtggatgctagtgatacgacagtagaggctgaaccttctcaccaatatttcgttacattttgttgctatgcaatgaatggcagtagagaggcaatccaacaaaatggcatctgacatggaagtgcatatgaagcaaagatgcgtcactgaattcctccatscatagattaaaaaaatgaataagggatgtctcactgtgcaaagagaagtacaagtaatggaaattatttaaaatatcttctttaaaaaatgtcacttgattctccttttatgcctctaattattcagtgtcttttgacaggattctaagagacttcttccaccctacactcctctttttagaacttagctctgagcactcstctttacaaaactgcatgatggggcagagtaaatggtcagcaggtttgttggtgacacaaaatactacaagcttgcgtcagagtggctggaagactgtg

SEQ ID NO: 10683 - DNA, 554 bp, Chicken  19866894212654_2
ttgctatgcaatgaatggcagtagagaggcaatccaacaaaatggcatctgacatggaagtgcatatgaagcaaagatgcgtcactgaattcctccatscatagattaaaaaaatgaataagggatgtctcactgtgcaaagagaagtacaagtaatggaaattatttaaaatatcttctttaaaaaatgtcacttgattctccttttatgcctctaattattcagtgtcttttgacaggattctaagagacttcttccaccctacactcctctttttagaacttagctctgagcactcstctttacaaaactgcatgatggggcagagtaaatggtcagcaggtttgttggtgacacaaaatactacaagcttgcgtcagagtggctggaagactgtgtagaggaaatggacctaggggaattgtttgacgcttggctgaacatgagcctgcagtgtgcccaggtggtcaagaagaccaatggcattctggcttgtatcagaattagcgttgccagcaagagcagcgaagtgatcatctttctgtactcagta

SEQ ID NO: 10684 - DNA, 600 bp, Chicken  19866894212657_1
atgcatgcaaactagtagctgtataacctgcaagatataattaggctttttaaagagattcatgctgctacctggactacaggcaaaacaggatcattattattattattttaaatgcctcagaacaaatgtatttggcactcaactgtggctcttccaagagagtgtgctgcctttagtagagattcagaaggcagaaacccaaagttagttgaatgggatggcaccagcctgagcaatgatcttactgcagcctgccattcttgtgaagtccccaagccctccagtagggagcccagwagtttccagcatccctccttgccaaacagcttccttctctctgctcaatgaggacctttcagaaaggaggtagagctgggtatggagcacaaactggaggctagcattgcttagttcyttaagggctgagtaggagcaacctgctctcatcttcagctttctggcttctctgcagtgggaatgatggacccttagtgttgaaaagagcagaaagaaagtgattttcaaaggagagtaaccaagagagggaggctacttttcctggtgtgtgctgtggcttaacacaggcagctgtgagag

SEQ ID NO: 10685 - DNA, 600 bp, Chicken  19866894212657_2
ctcagaacaaatgtatttggcactcaactgtggctcttccaagagagtgtgctgcctttagtagagattcagaaggcagaaacccaaagttagttgaatgggatggcaccagcctgagcaatgatcttactgcagcctgccattcttgtgaagtccccaagccctccagtagggagcccagwagtttccagcatccctccttgccaaacagcttccttctctctgctcaatgaggacctttcagaaaggaggtagagctgggtatggagcacaaactggaggctagcattgcttagttcyttaagggctgagtaggagcaacctgctctcatcttcagctttctggcttctctgcagtgggaatgatggacccttagtgttgaaaagagcagaaagaaagtgattttcaaaggagagtaaccaagagagggaggctacttttcctggtgtgtgctgtggcttaacacaggcagctgtgagagcttacctgtatatctaggaaaaggagtgcttagtggtgcttcttttctcttgtaggagagaaagaaagactgatagcaatgttcttgaatttacataatttacagctctaccttgact

SEQ ID NO: 10686 - DNA, 599 bp, Chicken  19866894212658_1
  misc_feature (1)..(204): n is any nucleotide
nnnnnnnnnnnnnnnnnnnnnnnnnnnnnnnnnnnnnnnnnnnnnnnnnnnnnnnnnnnnnnnnnnnnnnnnnnnnnnnnnnnnnnnnnnnnnnnnnnnnnnnnnnnnnnnnnnnnnnnnnnnnnnnnnnnnnnnnnnnnnnnnnnnnnnnnnnnnnnnnnnnnnnnnnnnnnnnnnnnnnnnnnnnnnnnnnnnnnnnnnnnnccgtcacacactcgttttctcctcttttcttccctccgcacctgccccttccctcccctcatcccacagattgttcataaattgcgatctctctgrtgtcacgtaacactctgtacacagaggtgaagggtggtcccaccgctcggcgctggcattcggatcgcctcaggtccgcagctgccagggaggcggggacgcgggctccagccggctctgccgttcctcacacagacggagcacacagccggcgctcacactggtacgtgctctggccgctgagctgttacattaaaacagcatcaacacttgcattggccaagttttctgaatgaagcactctgaaagctttggctcgcatccagctcggttctgctggggctgtatttcaagcgccc

SEQ ID NO: 10687 - DNA, 600 bp, Chicken  19866894212664_1
cagtggtttgtaatttgtaggtatggacagaggctacaagtcctgcacagccatgctggtatcttgggagagattagtttcagaaccgaaagagttcacaggagagcttctttgcctgtcaagacagctgggtggtttttgaaacatgattttcacctattattatacttcaagtagaagatttgctgtttgatcctactacttaccaatactgatgtgcagtattacacatcaagtctataaaagtttctcctcttatcccctcccaaaatacgattctaataatcttcccagaccctyttctataaagtwttaggattacatacaagcaaaattctcaggataaaattccaaaagtctttcctgaggaatttctctcacaaagaaatttaatccaatgttcaaacaatattaaagcaaacacaatctatatcgtagtgcaggaacaaagcaaacaaagagaaacagaaagccaaccaaaaccaatcacaaccaacccacaaatcgactctcaggtttcctaaccatctgagaatgtgggaagtgatgataatgatgacattcttaaaataagttttgaatatacagatgtttcccttc

SEQ ID NO: 10688 - DNA, 600 bp, Chicken  19866894212664_2
atttgtaggtatggacagaggctacaagtcctgcacagccatgctggtatcttgggagagattagtttcagaaccgaaagagttcacaggagagcttctttgcctgtcaagacagctgggtggtttttgaaacatgattttcacctattattatacttcaagtagaagatttgctgtttgatcctactacttaccaatactgatgtgcagtattacacatcaagtctataaaagtttctcctcttatcccctcccaaaatacgattctaataatcttcccagaccctyttctataaagtwttaggattacatacaagcaaaattctcaggataaaattccaaaagtctttcctgaggaatttctctcacaaagaaatttaatccaatgttcaaacaatattaaagcaaacacaatctatatcgtagtgcaggaacaaagcaaacaaagagaaacagaaagccaaccaaaaccaatcacaaccaacccacaaatcgactctcaggtttcctaaccatctgagaatgtgggaagtgatgataatgatgacattcttaaaataagttttgaatatacagatgtttcccttccaaaaagctatg

SEQ ID NO: 10689 - DNA, 600 bp, Chicken  19866894212668_1
aggacgtgcataacaattagaatgggtaatgggtttaagactgcaactgaaagacatatattagctctttagagactagaatagatcagaagttgggaatgagaaagtagaatacttattaaatattttttccaagatgaagagaggagaacatcgccaaagatgataacaggtattcagaataaatattctagaggagcgtacttcacagaaaattacaacattcagaagaatgttacatttagtctgtcttctgtaaaaaaaaataggagagcactcataaaaatcaactcaaatctyagcgacaaaagaagcagtaaattggcttttagtagttagtagraaaaaaatgagggaaaaaaccacagagaacaacattatgcaaccacgtaaatctacgattcatgcatttctgatttgctctatttaaaaatcataatcaaatgtgataaggtacacaaaaaggcaataaaaagaagcagagtcatgagrgacttccatatgaaggaagaataacaaactagaatgcttcagcctggacaagtgataagtaaggaaagcagaatgtgagataatgaataatacaagaaaggtgattag

SEQ ID NO: 10690 - DNA, 600 bp, Chicken  19866894212668_2
caactgaaagacatatattagctctttagagactagaatagatcagaagttgggaatgagaaagtagaatacttattaaatattttttccaagatgaagagaggagaacatcgccaaagatgataacaggtattcagaataaatattctagaggagcgtacttcacagaaaattacaacattcagaagaatgttacatttagtctgtcttctgtaaaaaaaaataggagagcactcataaaaatcaactcaaatctyagcgacaaaagaagcagtaaattggcttttagtagttagtagraaaaaaatgagggaaaaaaccacagagaacaacattatgcaaccacgtaaatctacgattcatgcatttctgatttgctctatttaaaaatcataatcaaatgtgataaggtacacaaaaaggcaataaaaagaagcagagtcatgagrgacttccatatgaaggaagaataacaaactagaatgcttcagcctggacaagtgataagtaaggaaagcagaatgtgagataatgaataatacaagaaaggtgattagaaaatgatttattcactatttctcttaataacagaacaagtgg

SEQ ID NO: 10691 - DNA, 600 bp, Chicken  19866894212668_3
agaggagcgtacttcacagaaaattacaacattcagaagaatgttacatttagtctgtcttctgtaaaaaaaaataggagagcactcataaaaatcaactcaaatctyagcgacaaaagaagcagtaaattggcttttagtagttagtagraaaaaaatgagggaaaaaaccacagagaacaacattatgcaaccacgtaaatctacgattcatgcatttctgatttgctctatttaaaaatcataatcaaatgtgataaggtacacaaaaaggcaataaaaagaagcagagtcatgagrgacttccatatgaaggaagaataacaaactagaatgcttcagcctggacaagtgataagtaaggaaagcagaatgtgagataatgaataatacaagaaaggtgattagaaaatgatttattcactatttctcttaataacagaacaagtggcaccaaacagcactgtcctgcagcaggcttcatagaaaatgaaggaaatgtttttttcagaaaatacataatcaaattgtggtgttcattgccaaaggatttacaagagcccagaaatgtaaatggttttaagattacatcatttcagg

SEQ ID NO: 10692 - DNA, 600 bp, Chicken  19866894212670_1
ggaagaacttctgtgctgtgtgggtgatgaagcactggcacaggttgcctagattggctgtggagtctcctccttggagatattcaaaagttgtctagatgttggtcctgggtaccctgctgtggatttccctgctttagcagaaattagactagatggagctagtggtcccttctagcctcagccatttcatgatgtggtaaaaatatactctttgatattaacgtaaataaattaaggcaccagaagctgttaacaaaaagtcacttaagtaactagcaaatgccttaagtcacactraaaaacacccacatctggaatataatttattttcataccttgaaagaaccgatctagattctcaagtcagcatagaaagataatagataataacaagaaacatcctaggaggtcagtactgaagaattcagagcaagttttctctgaacctttaagaaatcactgtttcctgggaatttcagctaaggggattgcaaataaaacctggacctcaggaatttctgcagtaatagctgcatatgtacagctgttagtggtgtgaaattaaataaatctcttcaggttttctgatgaaaayat

SEQ ID NO: 10693 - DNA, 600 bp, Chicken  19866894212670_2
traaaaacacccacatctggaatataatttattttcataccttgaaagaaccgatctagattctcaagtcagcatagaaagataatagataataacaagaaacatcctaggaggtcagtactgaagaattcagagcaagttttctctgaacctttaagaaatcactgtttcctgggaatttcagctaaggggattgcaaataaaacctggacctcaggaatttctgcagtaatagctgcatatgtacagctgttagtggtgtgaaattaaataaatctcttcaggttttctgatgaaaayattagagcaraaaaggtgtagggctcagaaagtcacccagaccctgaaccatttcctaaataaatgagaaaaatctgtagaaggtgacgaaagattatttaacagagcaacactatgtaatattttttatttttaaataagtcagcatatgcacatacttgctgaatgatatcttctgtttaagagcaatatggaattctgaaacaggggaacaaaacatgcctgtttgtgatgcctctccagagctttgttgtaagtgacacaggtagtataacatatcagttttccagcctaatatgc

SEQ ID NO: 10694 - DNA, 600 bp, Chicken  19866894212670_3
ccacatctggaatataatttattttcataccttgaaagaaccgatctagattctcaagtcagcatagaaagataatagataataacaagaaacatcctaggaggtcagtactgaagaattcagagcaagttttctctgaacctttaagaaatcactgtttcctgggaatttcagctaaggggattgcaaataaaacctggacctcaggaatttctgcagtaatagctgcatatgtacagctgttagtggtgtgaaattaaataaatctcttcaggttttctgatgaaaayattagagcaraaaaggtgtagggctcagaaagtcacccagaccctgaaccatttcctaaataaatgagaaaaatctgtagaaggtgacgaaagattatttaacagagcaacactatgtaatattttttatttttaaataagtcagcatatgcacatacttgctgaatgatatcttctgtttaagagcaatatggaattctgaaacaggggaacaaaacatgcctgtttgtgatgcctctccagagctttgttgtaagtgacacaggtagtataacatatcagttttccagcctaatatgcaactgccttt

SEQ ID NO: 10695 - DNA, 498 bp, Chicken  19866894212671_1
tgttcaggaaggttgtggtgtagatggcattgaaaaggtactttacaacatccattcttttcaattcagtgcaaacatagcatattttcagtgaggaaaacagaaggtaacgtaagcaacacagcgtgcaaaatgatgctggcttctcctgtggtttgctttaagctgtatacctgtatttagttttaggttcttttcgcagtgtaccgcttgatctagtttgccacgtacagctgtgagttgagacagaattacagggctgcttttgctatgtcagtacagtatttagtgactataaawgggaaattcttaacaatgcggggataacgaagaccacgatctctcagatcttattagattccaaaagacttcacagaaggttacatagttgtgaatcagtggtgattattcactgcaaaaactcacttgcttggaagtatcaacttagcaggagctcattttgctggggttctgcagttaggatctgccacgtggaga

SEQ ID NO: 10696 - DNA, 600 bp, Chicken  19866894212675_1
cactgtagctaccatgcgggtgtaattcagcaaaatgcatatacaagcttctgaggtgtagaggtctctctttcaggtctttctttctgcatttatgcaacacttgcaaactgactgtatgataagtcactccattacatatataaagctaatttattaaaaaaataacactggatctagatctcttttccgttgaggttcatgcttaacatctagacttcctacaacaaaggcttttctggtaggtaagagagacaatcagttatgtttgtcacctgtgacgacatcagagatcaaagragcacaccatacaaagctgctgtatgcattgagggcttgtccttcccacacatgaggagacaaagccttctctaacttttcctctgctacattagcccaaccggttgatgcaagtgactatgttaacactatcagaaaacaatgaaagggaattgaaaacactcaagttggagacagaacatatcatctagtctcattttcctgatcaactgattgtttctcaattagttctttgaactcctagcagaaatttaccttcagtcttctaaataaaatccaaactctataaattaaagcaca

SEQ ID NO: 10697 - DNA, 600 bp, Chicken  19866894212675_2
gatgctgtaaataagacaacttcctaaaaacatctgcaacactttaagtctaccaacagtattttcatattcattatctgttgctgcagttcagactctgctgaggcttaaagtgaaaataaacttggttatttaccctgtactccaaccatgagcagcacagatttatgtgcaaacacagcagattctgcagtcgtgcaaagaccagggcaggaaaaggagatgctgcaggacatgttgaaatctctgaatctcaaaaaatttaagtaaaatattttcaagtctgaaagattctaaaayacctcaaaattaaatatttcctggaaatatgtttgaagcattttaatatttttgaaaagatgcaaaggggacagggaagcaagagtacagtcaccccaaatatgtctgtgatctgtgaaattcttgcagagcaaaccaagtctaaaggaattcagcagcttggctacccatgcaggacttcgacaaggagtgatgcctttaaagtctgaagtgttgtatttgtgcactgaaagcctatgaataagagaacattttaagtcttcttatccacctgcaaactgtatttcagaaagtgtccca

SEQ ID NO: 10698 - DNA, 600 bp, Chicken  19866894212677_1
ttttcccttgctctgcattacatgaaacgtatttcatcctttctagtagagaaacatggttagaagaataagtccatccctttagccacagccaaatctctccctctcgcagcagcgcaccacagccaggtaaatctacacaaaggagaaaggagagaatgggcaggctggcagccaagggacaacatgaactgtagccaccatttacccagcctaactccactgaacatctgtcagcagccatttaatttattgctaaacttgaactatagactgtaattggtaaatctgcaggatagwtgaaaacacacctgagaggccttcaaattatcaackattacagctgtttgattactttggaaccacttctgatacctgatatcagctcaaggccgtgtctgcaactgtccacatcagtccagtgaagagctctgcagaaagatgtcagagcagagacaaagcaggcttcgtccagaaatggttaatcaatagcttgctaggttgaccgagtgccattaagtgcagcggtgcatctaccgtatataaaatgcgaccagtcattccgtatcattctcagtcacctcttctgccatagtgtta

SEQ ID NO: 10699 - DNA, 600 bp, Chicken  19866894212677_2
tcctttctagtagagaaacatggttagaagaataagtccatccctttagccacagccaaatctctccctctcgcagcagcgcaccacagccaggtaaatctacacaaaggagaaaggagagaatgggcaggctggcagccaagggacaacatgaactgtagccaccatttacccagcctaactccactgaacatctgtcagcagccatttaatttattgctaaacttgaactatagactgtaattggtaaatctgcaggatagwtgaaaacacacctgagaggccttcaaattatcaackattacagctgtttgattactttggaaccacttctgatacctgatatcagctcaaggccgtgtctgcaactgtccacatcagtccagtgaagagctctgcagaaagatgtcagagcagagacaaagcaggcttcgtccagaaatggttaatcaatagcttgctaggttgaccgagtgccattaagtgcagcggtgcatctaccgtatataaaatgcgaccagtcattccgtatcattctcagtcacctcttctgccatagtgttagttagcaggtttgccacttggaagttttggggcact

SEQ ID NO: 10700 - DNA, 599 bp, Chicken  19866894212678_1
  misc_feature (1)..(29): n is any nucleotide
nnnnnnnnnnnnnnnnnnnnnnnnnnnnnaaccttgaattttaaatttccagctgcactgcactcaaattacttgcagggaatttttgtagttgcttttttaagagcgtatccgtggtaaatggaagagtgagccgttccctcctccacctcttccgcaagccaagtgcatgattaaaagttgttgttgtcaatcttactaatgagagccatagttaatagtcattttaattgggtacagaccccatgagagagagctggcagcagtgcttgtgtggccttgcaggttgctgggctgggragcagctttgggtaacagtgaaacagagtgagggcttttggccaggtcgggtgccagcccccagcatgtcagatgtttgtcaagctgcagcttcaggcccttcataacaaactgctgagcaaccccccagtgcctcagctcatgttgcagcttggtgcctctctgctgagcctgcaaaagcagtggtgggrgagaaagagaatggccaccacagcgtgctctgtgtttccttcatgctgggttaaggttcgaccatacaggggggcagaaagacatagaggaaatgtaagaggaggaac

SEQ ID NO: 10701 - DNA, 600 bp, Chicken  19866894212678_2
aatcttactaatgagagccatagttaatagtcattttaattgggtacagaccccatgagagagagctggcagcagtgcttgtgtggccttgcaggttgctgggctgggragcagctttgggtaacagtgaaacagagtgagggcttttggccaggtcgggtgccagcccccagcatgtcagatgtttgtcaagctgcagcttcaggcccttcataacaaactgctgagcaaccccccagtgcctcagctcatgttgcagcttggtgcctctctgctgagcctgcaaaagcagtggtgggrgagaaagagaatggccaccacagcgtgctctgtgtttccttcatgctgggttaaggttcgaccatacaggggggcagaaagacatagaggaaatgtaagaggaggaacttcaggagagacgctgccagctctttcactcactcaactgcatttctggtttctgtatttatacattttctttacaggaacctgtttgctgtgctggtagctgcagctgcagacctggggaggatgactgggagatgcagaaagtggacattttgcgaaatcacatgagagagtacccagctcagctcgcct

SEQ ID NO: 10702 - DNA, 599 bp, Chicken  19866894212679_1
  misc_feature (1)..(219): n is any nucleotide
nnnnnnnnnnnnnnnnnnnnnnnnnnnnnnnnnnnnnnnnnnnnnnnnnnnnnnnnnnnnnnnnnnnnnnnnnnnnnnnnnnnnnnnnnnnnnnnnnnnnnnnnnnnnnnnnnnnnnnnnnnnnnnnnnnnnnnnnnnnnnnnnnnnnnnnnnnnnnnnnnnnnnnnnnnnnnnnnnnnnnnnnnnnnnnnnnnnnnnnnnnnnnnnnnnnnnnnnnnngtttagatccaaaatgcctgggctttagtttattttattttatgcctcaagtaccttccaacaccagcactgcaggcagamggacacccacgagccctaaataaagaaaggaacccacagagccattttacaagagctcctgccaccatggctaaagcccctagatgcagccatctgcctctttgttcctttctcctttgctacacttccttccccagatgtttttcatcatctaaggtagcaattcaggcgttcgtgtaactgatcctaaggagtctgctgtatgtgattagcatcaagtcaccaaagaacaaagaaatgcaattaaagcctgttcaaataaaaaacagattagattagatcagattaaacttactagg

SEQ ID NO: 10703 - DNA, 552 bp, Chicken  19866894212679_2
ctcctgccaccatggctaaagcccctagatgcagccatctgcctctttgttcctttctcctttgctacacttccttccccagatgtttttcatcatctaaggtagcaattcaggcgttcgtgtaactgatcctaaggagtctgctgtatgtgattagcatcaagtcaccaaagaacaaagaaatgcaattaaagcctgttcaaataaaaaacagattagattagatcagattaaacttactaggaacggtcaaaactcacatggtttggagactggacttgggctggaaaagcatttggragtgccaatattaacccaagtcctgtccaaattttttgccacttccatccaagaaggctggaaagcagaaggaaagctctcctgtacaactctctgctttctgctctccaattcagttggaaaaaaagcagacactttcttggtatgttgacctctggcactaacacctctgatagtgctcagaatgagaaaataatgatggcagaatcatggggggattgggtaataagattctctatgggtaaaacaatt

SEQ ID NO: 10704 - DNA, 600 bp, Chicken  19866894212680_1
aacactgcctttatgcacgggcaaggtaattgctagcagaaggccacatctgtgatatgcaatacattcacaacggcagcgccttgatttccatgcccttaatcatcagtgtttggtaactacagaaattaatgttgccatccaaagtatactcttgggattgctttgggaagactgtcttgcctctcaaagacctttcattacttagccctggagcagctatctcctactatcattgtgtgcccccactaaatgcaattacagctaaatttcatgagtttaatgaagatataatggaasctcgttattctttcctatgtccacatgcaagtgtatgaaactgacacaaaaggcagaaagggagagagcaagtgcaagaacttgcttttatgaatcttgtattagcaaacaaatcttacgtaaatattgccatctctactttcaggagccatgtgcattgacaaaccacactgaggaaacacatatagtgctctactcccctggtaactacaccagaactcaggcttatgttagacttgcctcagagctacagtccagcaacatggcagagagcaaaagccacagagagctataccctga

SEQ ID NO: 10705 - DNA, 600 bp, Chicken  19866894212681_1
tattcctaggggcactgctcatcagtggcctacatatcaccttagaccacaaccctcttgctgcagccatccaaccaattccttatctgtcaaatagtgtgccctccaaatacatgtatgaacaatttagagataaggatgtagtgtgggaacatgtcagctgtcttgcagaagtccaggtaggtgacatcagttgccttacttttgtccagtgatgtcatcactctactgtagaaggccaccagattggtgaactatgatctgcccttgatgactgtcttggatcaccacctcctctckcatgtgccttaacataycttccaaaaggatctgctccatgatcttccctagcacactggtgagactcgtttgtctgtagtttcctgggtgttttttgctccctttcttgaaaatgagtgatgtttccctttttccagccaccagggacttcacctgatgttgcggacccccaagggttcgaaaccggaatctagtccgttcactggccgagccgcgtggggagtgatgacatgacctaatatgagtgcatcagaatctccatttattatccgttacttacacacatatattgattgtagc

SEQ ID NO: 10706 - DNA, 600 bp, Chicken  19866894212681_2
ctcatcagtggcctacatatcaccttagaccacaaccctcttgctgcagccatccaaccaattccttatctgtcaaatagtgtgccctccaaatacatgtatgaacaatttagagataaggatgtagtgtgggaacatgtcagctgtcttgcagaagtccaggtaggtgacatcagttgccttacttttgtccagtgatgtcatcactctactgtagaaggccaccagattggtgaactatgatctgcccttgatgactgtcttggatcaccacctcctctckcatgtgccttaacataycttccaaaaggatctgctccatgatcttccctagcacactggtgagactcgtttgtctgtagtttcctgggtgttttttgctccctttcttgaaaatgagtgatgtttccctttttccagccaccagggacttcacctgatgttgcggacccccaagggttcgaaaccggaatctagtccgttcactggccgagccgcgtggggagtgatgacatgacctaatatgagtgcatcagaatctccatttattatccgttacttacacacatatattgattgtagcaaacacrcrtcagcttg

SEQ ID NO: 10707 - DNA, 503 bp, Chicken  19866894212681_3
cttaacataycttccaaaaggatctgctccatgatcttccctagcacactggtgagactcgtttgtctgtagtttcctgggtgttttttgctccctttcttgaaaatgagtgatgtttccctttttccagccaccagggacttcacctgatgttgcggacccccaagggttcgaaaccggaatctagtccgttcactggccgagccgcgtggggagtgatgacatgacctaatatgagtgcatcagaatctccatttattatccgttacttacacacatatattgattgtagcaaacacrcrtcagcttgtaattggttggagcgctgcgaaaagctccctgcctagcaatatgtcatgaatgttttcataccattccactgtcttaatctcttcccaggcragctacccccttatcttaactgaagcctcagtttttcttcctgctttgacagcttcagggtctcatagcctgggttgtgcacaagcacccgggctcacagc

SEQ ID NO: 10708 - DNA, 501 bp, Chicken  19866894212681_4
taacataycttccaaaaggatctgctccatgatcttccctagcacactggtgagactcgtttgtctgtagtttcctgggtgttttttgctccctttcttgaaaatgagtgatgtttccctttttccagccaccagggacttcacctgatgttgcggacccccaagggttcgaaaccggaatctagtccgttcactggccgagccgcgtggggagtgatgacatgacctaatatgagtgcatcagaatctccatttattatccgttacttacacacatatattgattgtagcaaacacrcrtcagcttgtaattggttggagcgctgcgaaaagctccctgcctagcaatatgtcatgaatgttttcataccattccactgtcttaatctcttcccaggcragctacccccttatcttaactgaagcctcagtttttcttcctgctttgacagcttcagggtctcatagcctgggttgtgcacaagcacccgggctcacagc

SEQ ID NO: 10709 - DNA, 401 bp, Chicken  19866894212681_5
aaaatgagtgatgtttccctttttccagccaccagggacttcacctgatgttgcggacccccaagggttcgaaaccggaatctagtccgttcactggccgagccgcgtggggagtgatgacatgacctaatatgagtgcatcagaatctccatttattatccgttacttacacacatatattgattgtagcaaacacrcrtcagcttgtaattggttggagcgctgcgaaaagctccctgcctagcaatatgtcatgaatgttttcataccattccactgtcttaatctcttcccaggcragctacccccttatcttaactgaagcctcagtttttcttcctgctttgacagcttcagggtctcatagcctgggttgtgcacaagcacccgggctcacagc

SEQ ID NO: 10710 - DNA, 600 bp, Chicken  19866894212682_1
aattgaatttctgttcagttttggtcattgagatattttggagaagacaagtgattctgatgaagcagatctttgctgccataatggtatagccatgatgtttcgtattattacacctctttgttcttcttgcctctccaataaataaataaacaaagatctaaatatgatgaagtcagtgttcctgttcatcgtcatttcatacatcacttaactatgaagtagaatcatgaggaatcactgtccagcaaagcccacagctatgatcctatgttatgaccaggcatggtgtttgtttgkttttttttttccccaccttgaaaaggaaatatcttttaaagattgttaaattaatgatatgattcccttgtgcactatcacctttacagcaggtgatcttgtgcccaaaatattccacaggaaagcaagtactgaacagtaattttctccacgagtagagaaaaaacatcatggtgataaaatattgagtttaatatcactagctttattactgataaacgcaatcttttcaaaaataaggcattacttccattcatttattcattttcaggtttcagaggccaaaaattatctcctatt

SEQ ID NO: 10711 - DNA, 599 bp, Chicken  19866894212683_1
  misc_feature (1)..(124): n is any nucleotide
nnnnnnnnnnnnnnnnnnnnnnnnnnnnnnnnnnnnnnnnnnnnnnnnnnnnnnnnnnnnnnnnnnnnnnnnnnnnnnnnnnnnnnnnnnnnnnnnnnnnnnnnnnnnnnnnnnnnnnnnnnnnattcaatactgcaagccattaattagggtatacattatctgcttttactcctacaacagagaaaaaaaccccaatacagtagacttaaaatatggatgtaatgccagtgaaagagttaaactgtcaattgggtaattttgagtaataggagccaaatttagtgcagcatgtgttayatgcagaaatgtcaaaaggtaactttaaaaaggaagactgcccaaatgagaagtcttgtccatgtggaatgcatgtcacggaaacagctgaaagaagagaatcaatggtacattttgatctagctgtaaactattcctgagakaaaggatgtgggtaataaagatgggcatgtagaactaaaccttaagtgcataaaaaatgtgatagatttgtactgttgaccccataatcagagcaaatggagaacagaatgttgtgagacagttaaaataattaaaactaatagagcagtaagaat

SEQ ID NO: 10712 - DNA, 600 bp, Chicken  19866894212683_2
taattagggtatacattatctgcttttactcctacaacagagaaaaaaaccccaatacagtagacttaaaatatggatgtaatgccagtgaaagagttaaactgtcaattgggtaattttgagtaataggagccaaatttagtgcagcatgtgttayatgcagaaatgtcaaaaggtaactttaaaaaggaagactgcccaaatgagaagtcttgtccatgtggaatgcatgtcacggaaacagctgaaagaagagaatcaatggtacattttgatctagctgtaaactattcctgagakaaaggatgtgggtaataaagatgggcatgtagaactaaaccttaagtgcataaaaaatgtgatagatttgtactgttgaccccataatcagagcaaatggagaacagaatgttgtgagacagttaaaataattaaaactaatagagcagtaagaatgaatgatttcaactatgcacayaccgactgatcaaatatcacagtaaagcagtaagtagtatactaatcctttaaaacaattacttcttagaataattacttctcacctataaaagtttagaaatttctatcagccccttcttt

SEQ ID NO: 10713 - DNA, 580 bp, Chicken  19866894212683_3
actttaaaaaggaagactgcccaaatgagaagtcttgtccatgtggaatgcatgtcacggaaacagctgaaagaagagaatcaatggtacattttgatctagctgtaaactattcctgagakaaaggatgtgggtaataaagatgggcatgtagaactaaaccttaagtgcataaaaaatgtgatagatttgtactgttgaccccataatcagagcaaatggagaacagaatgttgtgagacagttaaaataattaaaactaatagagcagtaagaatgaatgatttcaactatgcacayaccgactgatcaaatatcacagtaaagcagtaagtagtatactaatcctttaaaacaattacttcttagaataattacttctcacctataaaagtttagaaatttctatcagccccttcttttcaaaaacaaaacaaaataataaaaaaataaaaaataaaaaaagcccccaccagatttcaataaatgtttccactaaaacgtccttctgaaaagtaaaatacattcttagaaaaaaaaactgatggcaaaaaacaacataaaccattgcaaacaaaat

SEQ ID NO: 10714 - DNA, 599 bp, Chicken  19866894212686_1
  misc_feature (1)..(241): n is any nucleotide
nnnnnnnnnnnnnnnnnnnnnnnnnnnnnnnnnnnnnnnnnnnnnnnnnnnnnnnnnnnnnnnnnnnnnnnnnnnnnnnnnnnnnnnnnnnnnnnnnnnnnnnnnnnnnnnnnnnnnnnnnnnnnnnnnnnnnnnnnnnnnnnnnnnnnnnnnnnnnnnnnnnnnnnnnnnnnnnnnnnnnnnnnnnnnnnnnnnnnnnnnnnnnnnnnnnnnnnnnnnnnnnnnnnnnnnnnnnnnnnnnttgttatttcttgagcttgctaatggagcactgagtgacatggtttagtgggcatggtrgtgatggggtgatggttagactagatggtgttagtggtcttttccaaccttaacgattctatgattctacwtgagcaccagcagaggacagacagggcctttgcagtaaacagcaaaactcacctgtagtgcaccttcacctctgcataaaaaaaatgccttcttttaaaatgtctaccacagataagttaaacacagcagatcactgctcagaacccagctaccacttgtcttcaggttactgggaggtgaagaggggcctggcatgggaaaagcaatgcagcagttgacttgtgcat

SEQ ID NO: 10715 - DNA, 600 bp, Chicken  19866894212686_10
gttaatttctttggctcgctgtggcagtgaggagtaatyctcagtgcacagctggtggaaaaataacagcagtaatgatggtgcagccagaactgtaatgttgaacagctaactagaaaatagcctggggtacagaaaacttctctgatgcccgaatacacatattgatcacagaatcacagcatcttttgagttggaagggacccttaaaggtcatctggtccaattcccctacgatgaayrgggacacctacagctacatcaggtgctcagagtaccctccaacctgacttggaacayctctgaggacagggcctcctccacccctctgggcaacctgttccagtgcctcaccacccttgttgtaaataacttcttccttacattcagtctaagtctcctatttttagtttgaaaccatttctgcttgtcctaccacaacagactcagctaaagagtctgtcccygtccttcttacagcctccctttagatattgaaaggccactctcaggcacacctcacagccttctccaggctgaacagccccagctctcttagcctttcctcactaggagtttgggggttttgcctctgctctg

SEQ ID NO: 10716 - DNA, 562 bp, Chicken  19866894212686_11
atcacagaatcacagcatcttttgagttggaagggacccttaaaggtcatctggtccaattcccctacgatgaayrgggacacctacagctacatcaggtgctcagagtaccctccaacctgacttggaacayctctgaggacagggcctcctccacccctctgggcaacctgttccagtgcctcaccacccttgttgtaaataacttcttccttacattcagtctaagtctcctatttttagtttgaaaccatttctgcttgtcctaccacaacagactcagctaaagagtctgtcccygtccttcttacagcctccctttagatattgaaaggccactctcaggcacacctcacagccttctccaggctgaacagccccagctctcttagcctttcctcactaggagtttgggggttttgcctctgctctgaacacccagaaatggacacagacacttgtaatgagctgctgcatgcagtgcaatttggttcaatacggctccctcccatccaagcattcctctgatgtatgtcctgggatctgccagcagcataatggg

SEQ ID NO: 10717 - DNA, 599 bp, Chicken  19866894212686_2
  misc_feature (1)..(170): n is any nucleotide
nnnnnnnnnnnnnnnnnnnnnnnnnnnnnnnnnnnnnnnnnnnnnnnnnnnnnnnnnnnnnnnnnnnnnnnnnnnnnnnnnnnnnnnnnnnnnnnnnnnnnnnnnnnnnnnnnnnnnnnnnnnnnnnnnnnnnnnnnnnnnnnnnnnnnnnnnnnnnnnnnnnnnnnnnnttgttatttcttgagcttgctaatggagcactgagtgacatggtttagtgggcatggtrgtgatggggtgatggttagactagatggtgttagtggtcttttccaaccttaacgattctatgattctacwtgagcaccagcagaggacagacagggcctttgcagtaaacagcaaaactcacctgtagtgcaccttcacctctgcataaaaaaaatgccttcttttaaaatgtctaccacagataagttaaacacagcagatcactgctcagaacccagctaccacttgtcttcaggttactgggaggtgaagaggggcctggcatgggaaaagcaatgcagcagttgacttgtgcatttacytaaaaaatgcaagaagaaagctcttttattcctcaraacttttaaaatgagaaggtgctatccttt

SEQ ID NO: 10718 - DNA, 600 bp, Chicken  19866894212686_3
tggggtgatggttagactagatggtgttagtggtcttttccaaccttaacgattctatgattctacwtgagcaccagcagaggacagacagggcctttgcagtaaacagcaaaactcacctgtagtgcaccttcacctctgcataaaaaaaatgccttcttttaaaatgtctaccacagataagttaaacacagcagatcactgctcagaacccagctaccacttgtcttcaggttactgggaggtgaagaggggcctggcatgggaaaagcaatgcagcagttgacttgtgcatttacytaaaaaatgcaagaagaaagctcttttattcctcaraacttttaaaatgagaaggtgctatcctttcccaaagaaatctgtaaagcctcataatgtttattcctcactgtgtctttgaagtggcatctgtccttgagtccacgttttgaagggaaatctaaaaaatgtctggataaaacaacagtttcacaaaccaccacctcatgccaagctgcatcctcagtgccaccactgaaggaccagtgtcccatcgcaggctctcctttgaggcagtgctgtttctcctccaagtgccagagg

SEQ ID NO: 10719 - DNA, 600 bp, Chicken  19866894212686_4
tttccaaccttaacgattctatgattctacwtgagcaccagcagaggacagacagggcctttgcagtaaacagcaaaactcacctgtagtgcaccttcacctctgcataaaaaaaatgccttcttttaaaatgtctaccacagataagttaaacacagcagatcactgctcagaacccagctaccacttgtcttcaggttactgggaggtgaagaggggcctggcatgggaaaagcaatgcagcagttgacttgtgcatttacytaaaaaatgcaagaagaaagctcttttattcctcaraacttttaaaatgagaaggtgctatcctttcccaaagaaatctgtaaagcctcataatgtttattcctcactgtgtctttgaagtggcatctgtccttgagtccacgttttgaagggaaatctaaaaaatgtctggataaaacaacagtttcacaaaccaccacctcatgccaagctgcatcctcagtgccaccactgaaggaccagtgtcccatcgcaggctctcctttgaggcagtgctgtttctcctccaagtgccagaggtgccattcccacgagggcttttgatttctgcaaagc

SEQ ID NO: 10720 - DNA, 600 bp, Chicken  19866894212686_5
gaatgtgatttccatggaaaaacagaagtactgacctgtgcctggggccagctaacaccagactgcaggctgtggccagcacagccctttctgggcaccagccaccacttagtagatgggttgctttgaaacagacccctcttagttatccacttcacatcctgtcatcactgacttgctgtttcatccttctgcaaaagcaggatagttctggaatgtttggttaagtcctgtcctgtctaatgtcaagtgtaaagcttccctggccctttttttttgcaacaccactgggtacacccyacccagctacactgcactgctcatctgctcagcagctgccttcaaatcaggagatggccacgtctgagtgatgttatattttcagtattcaacgtgcaaacgtctctggaggacaccaaaatgaaaagcatgtgcagtttcccattgtattttctaaacgtaccaacctcaaaaagagcaaagaatcttgggcccaccaagacaaagagggatcctccccagctgcacagtgaggttgaaactgtacccagaaaccatgtgtgcgatgtgcacaatggaaagtatcctccacaggagctc

SEQ ID NO: 10721 - DNA, 600 bp, Chicken  19866894212686_6
aaacgtctctggaggacaccaaaatgaaaagcatgtgcagtttcccattgtattttctaaacgtaccaacctcaaaaagagcaaagaatcttgggcccaccaagacaaagagggatcctccccagctgcacagtgaggttgaaactgtacccagaaaccatgtgtgcgatgtgcacaatggaaagtatcctccacaggagctccgaacagagggaaactgtggttgggataaaacaaatagacataaaataactcatctgctggtgtgaatgtttgaagatattgcactgcagtatctgrtgtcttctgatttgattttttttatttgtgagacttgtatcagctgttaatttctttggctcgctgtggcagtgaggagtaatyctcagtgcacagctggtggaaaaataacagcagtaatgatggtgcagccagaactgtaatgttgaacagctaactagaaaatagcctggggtacagaaaacttctctgatgcccgaatacacatattgatcacagaatcacagcatcttttgagttggaagggacccttaaaggtcatctggtccaattcccctacgatgaayrgggacacctaca

SEQ ID NO: 10722 - DNA, 600 bp, Chicken  19866894212686_7
agaatcttgggcccaccaagacaaagagggatcctccccagctgcacagtgaggttgaaactgtacccagaaaccatgtgtgcgatgtgcacaatggaaagtatcctccacaggagctccgaacagagggaaactgtggttgggataaaacaaatagacataaaataactcatctgctggtgtgaatgtttgaagatattgcactgcagtatctgrtgtcttctgatttgattttttttatttgtgagacttgtatcagctgttaatttctttggctcgctgtggcagtgaggagtaatyctcagtgcacagctggtggaaaaataacagcagtaatgatggtgcagccagaactgtaatgttgaacagctaactagaaaatagcctggggtacagaaaacttctctgatgcccgaatacacatattgatcacagaatcacagcatcttttgagttggaagggacccttaaaggtcatctggtccaattcccctacgatgaayrgggacacctacagctacatcaggtgctcagagtaccctccaacctgacttggaacayctctgaggacagggcctcctccacccctctgggcaacct

SEQ ID NO: 10723 - DNA, 600 bp, Chicken  19866894212686_8
ctgcagtatctgrtgtcttctgatttgattttttttatttgtgagacttgtatcagctgttaatttctttggctcgctgtggcagtgaggagtaatyctcagtgcacagctggtggaaaaataacagcagtaatgatggtgcagccagaactgtaatgttgaacagctaactagaaaatagcctggggtacagaaaacttctctgatgcccgaatacacatattgatcacagaatcacagcatcttttgagttggaagggacccttaaaggtcatctggtccaattcccctacgatgaayrgggacacctacagctacatcaggtgctcagagtaccctccaacctgacttggaacayctctgaggacagggcctcctccacccctctgggcaacctgttccagtgcctcaccacccttgttgtaaataacttcttccttacattcagtctaagtctcctatttttagtttgaaaccatttctgcttgtcctaccacaacagactcagctaaagagtctgtcccygtccttcttacagcctccctttagatattgaaaggccactctcaggcacacctcacagccttctccaggctgaac

SEQ ID NO: 10724 - DNA, 600 bp, Chicken  19866894212686_9
tgcagtatctgrtgtcttctgatttgattttttttatttgtgagacttgtatcagctgttaatttctttggctcgctgtggcagtgaggagtaatyctcagtgcacagctggtggaaaaataacagcagtaatgatggtgcagccagaactgtaatgttgaacagctaactagaaaatagcctggggtacagaaaacttctctgatgcccgaatacacatattgatcacagaatcacagcatcttttgagttggaagggacccttaaaggtcatctggtccaattcccctacgatgaayrgggacacctacagctacatcaggtgctcagagtaccctccaacctgacttggaacayctctgaggacagggcctcctccacccctctgggcaacctgttccagtgcctcaccacccttgttgtaaataacttcttccttacattcagtctaagtctcctatttttagtttgaaaccatttctgcttgtcctaccacaacagactcagctaaagagtctgtcccygtccttcttacagcctccctttagatattgaaaggccactctcaggcacacctcacagccttctccaggctgaaca

SEQ ID NO: 10725 - DNA, 600 bp, Chicken  19866894212696_1
ctgttattgatgatctaaagcatataaatgatggatattgtagcatctgagcatgaagacaaaaaatatatatagctgccgagttattcatagtatcaataaagtgttaatttcaagggctgatttagtggaatgaaatcttcataatggcagggaaacaaaggtaagggaaagaaaaagggcttgtattctactactaaaaattgccagaatttgttattcattgtcttcaatgaattttttttttttgctaataactgttggtactggtgccgacaaacttacttaggaatgcaatgygtcatcctgtgcccaaatgaaaaatgcttattgcttttgcccttctgcatacttccccaagaggacctgaaatgaccattttcaattacagttatggctgttgctatatattaatgtctacacagtattttatatatttttttcctatttacaaattctcttacatttatagaacagttcaagcttgctgtagaattataatttgagaacacaaaagaaatatgaacacgtaagaggtgccgagtgaagcataaagatccaaaaatatgtatttgaattccagctatcaatcttttttct

SEQ ID NO: 10726 - DNA, 600 bp, Chicken  19866894212697_1
ttatcaaaccattggtttcatttctatggagtcgtgccctgattttttccagtatgcattttttttcacggtgttccgggtttttcagtaatgttactagctttaaattgagatgttgtacttagaggagtttctgtgtgttcagctatgaaatagccccgtggtttctgtggtgttcctatgataataggctaatgcagagagctgaggtcaggcaggtggggctcaactaatgcgttgtaaccgaggaaagagatgttacagaaatcttaatcaatagatcttgtgaagtccatttgygaccttcttttgtgtccagactgcagcttgagtacactttgatttcctgctaaagattttccagtccagtcgtttgtcctagtcatatctctgtctctgtttgctatgcacggcatgggttcaagtaacaagcatctggcagctgaaccgctaccagcactgacattttggtgaaagctgtttgttttattttgcactgactcaaatatctttttcacattaaagatgacacttagatggaactgcgggggttttcaccaactggagggtgtagtgggaggtgccaagctgtagtaaaac

SEQ ID NO: 10727 - DNA, 600 bp, Chicken  19866894212699_1
tttactttaacctcaatctgcccagtgattttaaagcatccatagcagccgtaggtgtgaacttcaaactggggtagcgagatatatcaacatgtagtctcctttcccaccgtgctgtgcagcacatgaatttcaggtatgtaggcaaggtggagtggagacaggagccagaaacactattacctggtgatggtcagaaagacaggggactgcaagatattgtgcttccacagggtccttaaggaacgtaccacaagtgtacagatttcatatatatataactcaccatgactcagcaamaagtgaacaagtcacacagcataaattcagccctcagcctgcagctcactggacatttatacagcattgactgcccagaacacttttgcttgagatgatactgatcttttttattttgttttcagagaatttgaatcaaacgtcatcattaatagttactgtacagaacagtcaaaacctttttgttctttttattatcaataaacttttgttcctggcagttcagtattgtatactcagtacagaatgaatacttcaaacccacaagattttcttactcagaattggatgaaatagtgc

SEQ ID NO: 10728 - DNA, 600 bp, Chicken  19866894212699_2
tcatgatgaataaaaagctaaatcacagatgcacatttctaaatgaaaggttcttggaccgttctcatgtttgctcctttcagacaggaggcactgttgtcattcaaggatgaggctacgcttctgaaataagtcctttttaacttactatatcaagaactataactttttcaatggttatctagcctgaatgaaaatattgatcaacagaagctccatgaaagatactccaaaaattcaggggttactgagtgccatttaacatttactggtttccctagaaactcaatatttttgggsatctgcaaagcaacttgcccaattggaaaatttacatacatttcacaagcccttcattttctctggcttccatttgccttttatgggccactcaggatagataatctggattccctgctacatcactaytttmttattagataacaaygattaaaatggggaccagcctataaaactyatgttcctcgcagtgactactacatacatacactatgctaccaaattcagtcagtagtactcttgtaagtagccatcagaaggagcagtaattccacaatcacatatatccacttctgcatg

SEQ ID NO: 10729 - DNA, 569 bp, Chicken  19866894212699_3
taagtcctttttaacttactatatcaagaactataactttttcaatggttatctagcctgaatgaaaatattgatcaacagaagctccatgaaagatactccaaaaattcaggggttactgagtgccatttaacatttactggtttccctagaaactcaatatttttgggsatctgcaaagcaacttgcccaattggaaaatttacatacatttcacaagcccttcattttctctggcttccatttgccttttatgggccactcaggatagataatctggattccctgctacatcactaytttmttattagataacaaygattaaaatggggaccagcctataaaactyatgttcctcgcagtgactactacatacatacactatgctaccaaattcagtcagtagtactcttgtaagtagccatcagaaggagcagtaattccacaatcacatatatccacttctgcatggctctccaagtcctcccttccttcctactaccatgccccaattcaattcccagtgtgctgtgctggtgccagacatacagttctgggaaaactgcttg

SEQ ID NO: 10730 - DNA, 565 bp, Chicken  19866894212699_4
tcctttttaacttactatatcaagaactataactttttcaatggttatctagcctgaatgaaaatattgatcaacagaagctccatgaaagatactccaaaaattcaggggttactgagtgccatttaacatttactggtttccctagaaactcaatatttttgggsatctgcaaagcaacttgcccaattggaaaatttacatacatttcacaagcccttcattttctctggcttccatttgccttttatgggccactcaggatagataatctggattccctgctacatcactaytttmttattagataacaaygattaaaatggggaccagcctataaaactyatgttcctcgcagtgactactacatacatacactatgctaccaaattcagtcagtagtactcttgtaagtagccatcagaaggagcagtaattccacaatcacatatatccacttctgcatggctctccaagtcctcccttccttcctactaccatgccccaattcaattcccagtgtgctgtgctggtgccagacatacagttctgggaaaactgcttg

SEQ ID NO: 10731 - DNA, 550 bp, Chicken  19866894212699_5
tatatcaagaactataactttttcaatggttatctagcctgaatgaaaatattgatcaacagaagctccatgaaagatactccaaaaattcaggggttactgagtgccatttaacatttactggtttccctagaaactcaatatttttgggsatctgcaaagcaacttgcccaattggaaaatttacatacatttcacaagcccttcattttctctggcttccatttgccttttatgggccactcaggatagataatctggattccctgctacatcactaytttmttattagataacaaygattaaaatggggaccagcctataaaactyatgttcctcgcagtgactactacatacatacactatgctaccaaattcagtcagtagtactcttgtaagtagccatcagaaggagcagtaattccacaatcacatatatccacttctgcatggctctccaagtcctcccttccttcctactaccatgccccaattcaattcccagtgtgctgtgctggtgccagacatacagttctgggaaaactgcttg

SEQ ID NO: 10732 - DNA, 520 bp, Chicken  19866894212699_6
tatctagcctgaatgaaaatattgatcaacagaagctccatgaaagatactccaaaaattcaggggttactgagtgccatttaacatttactggtttccctagaaactcaatatttttgggsatctgcaaagcaacttgcccaattggaaaatttacatacatttcacaagcccttcattttctctggcttccatttgccttttatgggccactcaggatagataatctggattccctgctacatcactaytttmttattagataacaaygattaaaatggggaccagcctataaaactyatgttcctcgcagtgactactacatacatacactatgctaccaaattcagtcagtagtactcttgtaagtagccatcagaaggagcagtaattccacaatcacatatatccacttctgcatggctctccaagtcctcccttccttcctactaccatgccccaattcaattcccagtgtgctgtgctggtgccagacatacagttctgggaaaactgcttg

SEQ ID NO: 10733 - DNA, 600 bp, Chicken  19866894212703_1
gagaagggaggtttaggttagatattaggagggaagtttttcacacagagggtggtaacgcactggaacaggtcgcccaaggaggttgtggaggccccattcctggaggcattcaagaccaggctggatgtggttctgggcaacctgctcttgtggttggtgaccctgcctgtgtcaagggggttgaaactaggtgatcaaaaaatatgacaaaaaatatatttccacattataacggtccatgttttaaaattgaattttgtatgttcaatcctatttaataagctagaaccagaaaamaggaaagaaaactaccgttctgaaaaattctaattctttagtacatttacgagtaaatacatatagaaatatcctttatgtgcaataaaacctttccagattgagaaaaatggaggataraaatcactctttaaagagttctcaattaaaagacataatgcccaattacaaatattaaacagagttttcagtgtgacaaacaccatttggaaagcacttctgaacatctaaaagaagcaaatgtaggaatatatatacaaaccttggaagaaataaaatattttatgtgaacatctatat

SEQ ID NO: 10734 - DNA, 600 bp, Chicken  19866894212703_2
aggctggatgtggttctgggcaacctgctcttgtggttggtgaccctgcctgtgtcaagggggttgaaactaggtgatcaaaaaatatgacaaaaaatatatttccacattataacggtccatgttttaaaattgaattttgtatgttcaatcctatttaataagctagaaccagaaaamaggaaagaaaactaccgttctgaaaaattctaattctttagtacatttacgagtaaatacatatagaaatatcctttatgtgcaataaaacctttccagattgagaaaaatggaggataraaatcactctttaaagagttctcaattaaaagacataatgcccaattacaaatattaaacagagttttcagtgtgacaaacaccatttggaaagcacttctgaacatctaaaagaagcaaatgtaggaatatatatacaaaccttggaagaaataaaatattttatgtgaacatctatatgttataatatttgtttktgtgtgtgtgtgtgtgtgtgtgtgtgtgtgtgtgtatgtgtggttttatttaggccttacatgtagtactagaggcattcagttaacatgccttatgttttgt

SEQ ID NO: 10735 - DNA, 600 bp, Chicken  19866894212703_3
ttctgaaaaattctaattctttagtacatttacgagtaaatacatatagaaatatcctttatgtgcaataaaacctttccagattgagaaaaatggaggataraaatcactctttaaagagttctcaattaaaagacataatgcccaattacaaatattaaacagagttttcagtgtgacaaacaccatttggaaagcacttctgaacatctaaaagaagcaaatgtaggaatatatatacaaaccttggaagaaataaaatattttatgtgaacatctatatgttataatatttgtttktgtgtgtgtgtgtgtgtgtgtgtgtgtgtgtgtgtatgtgtggttttatttaggccttacatgtagtactagaggcattcagttaacatgccttatgttttgtattgaataaaatggtcaattcccacccacgcagtgatactgaaaacttttgcactgtttggccatagttaagtatctttttactgtctgagtttaactttatgttcataagttgattttttttttttaattaagtaaattgaatgctaatggggtaaaactgtagttcagcagccccttctccagggagagatgtcc

SEQ ID NO: 10736 - DNA, 600 bp, Chicken  19866894212715_1
ggatggctttactgtaacttgttcctgcagtgagtctttcaagtaagatctgatttgaagagaggaaagaaagacttagtgtaggaggacagtaatctgctggtgtctctgaagttagttgtatattttaagaataaattccatgaatgagaatcttcctaggagtaggacttgcatcttgagctggacacctcgggaagaaaaacactacttaacatattagacacctctgttgtctgtgctgcccataggctctgtatttcaaattacaatcacctttatagtgtgggtaatagagtratgagtttaactaaaatggtatgataatttaaagtaagtccttcaaaatataacaccatgcttaatatataatcactctgaatccagcaacctcctacgaagtgtttgtaggtggattggaagcttctatactaatataagggaatttttaagttactatatcacgatgtattctaaaaaaaattaatacccataattttacaataatctgcaattgcttttatttgttctttattaattggtgtagaagtattcctttaaaaatgctttgaattaggaacacctctaattttgtcctac

SEQ ID NO: 10737 - DNA, 600 bp, Chicken  19866894212715_2
atgtattctaaaaaaaattaatacccataattttacaataatctgcaattgcttttatttgttctttattaattggtgtagaagtattcctttaaaaatgctttgaattaggaacacctctaattttgtcctacagggccctagcagtcattctgagagaggtctaaatatacaagttgacaaatgacaaagttttagcactgtaagaaatgtcaaacgtgatcaaaatagaatttctttatatagacaatgttatgctgcttaatataggtagcagatggctgattcagaccaaattcrcactgacttcattgaattggaccttaaattttttccacatgctggcaagctgtattaaatttcacttttgcaagtaatatgccagttgatgataaattccytcagttgatgataactttctcatccaggtggcagaggagccatcgaggaggggtgctgtgctggacctcattctcaccaccaaggggagactggtggggaatgtgaaggtcaagggcagctgtggctgcagtgaccatgaagagatggagtccaaaatccttaagacagtactttttatttatttattgccttttcttg

SEQ ID NO: 10738 - DNA, 600 bp, Chicken  19866894212715_3
tttgaattaggaacacctctaattttgtcctacagggccctagcagtcattctgagagaggtctaaatatacaagttgacaaatgacaaagttttagcactgtaagaaatgtcaaacgtgatcaaaatagaatttctttatatagacaatgttatgctgcttaatataggtagcagatggctgattcagaccaaattcrcactgacttcattgaattggaccttaaattttttccacatgctggcaagctgtattaaatttcacttttgcaagtaatatgccagttgatgataaattccytcagttgatgataactttctcatccaggtggcagaggagccatcgaggaggggtgctgtgctggacctcattctcaccaccaaggggagactggtggggaatgtgaaggtcaagggcagctgtggctgcagtgaccatgaagagatggagtccaaaatccttaagacagtactttttatttatttattgccttttcttggatgcccttatagcttcatttttttcctgacatagtactgaatctgttatgtgtcaaatgtagctctgtctgacattaaaatacacaggaggtaagtaatt

SEQ ID NO: 10739 - DNA, 599 bp, Chicken  19866894212725_1
  misc_feature (1)..(48): n is any nucleotide
nnnnnnnnnnnnnnnnnnnnnnnnnnnnnnnnnnnnnnnnnnnnnnnncctgggaaacgaggagctcctgatggagcagcgattaatagggcagttctgcaaggcatcagtcaccaataaagagccctccgtgcaaatgagggatggaggagaaatgaacggaatgaaagcagctttggatggagcagagcagggctgggggggggcagtgggctgcccacgtcacagcagggctgggtggaagcccagggcacactaatggcctttggagatttgctttggagatggcagctggcatcrgcacctcctgcctgggcaacrcatgaccatagaacaacccctgttagttgcttttctctgcagtttccacacgctttacatcagctctccatccgagcatcctcacggcaaagctccacacggaccccaagaaaactgctcccttctggaggaggaygccaagtgcaggaagaggggcagagcgacgcaggcggagcgggctgtgatgcatcagatgaaagtgaggcaagaagcactgctgtattccagggaacagctgacagaactcacagctcccagcacgcttgctaacgagcgtg

SEQ ID NO: 10740 - DNA, 599 bp, Chicken  19866894212725_2
  misc_feature (1)..(27): n is any nucleotide
nnnnnnnnnnnnnnnnnnnnnnnnnnncctgggaaacgaggagctcctgatggagcagcgattaatagggcagttctgcaaggcatcagtcaccaataaagagccctccgtgcaaatgagggatggaggagaaatgaacggaatgaaagcagctttggatggagcagagcagggctgggggggggcagtgggctgcccacgtcacagcagggctgggtggaagcccagggcacactaatggcctttggagatttgctttggagatggcagctggcatcrgcacctcctgcctgggcaacrcatgaccatagaacaacccctgttagttgcttttctctgcagtttccacacgctttacatcagctctccatccgagcatcctcacggcaaagctccacacggaccccaagaaaactgctcccttctggaggaggaygccaagtgcaggaagaggggcagagcgacgcaggcggagcgggctgtgatgcatcagatgaaagtgaggcaagaagcactgctgtattccagggaacagctgacagaactcacagctcccagcacgcttgctaacgagcgtgcctgtcaattactcatctcac

SEQ ID NO: 10741 - DNA, 582 bp, Chicken  19866894212725_3
aacggaatgaaagcagctttggatggagcagagcagggctgggggggggcagtgggctgcccacgtcacagcagggctgggtggaagcccagggcacactaatggcctttggagatttgctttggagatggcagctggcatcrgcacctcctgcctgggcaacrcatgaccatagaacaacccctgttagttgcttttctctgcagtttccacacgctttacatcagctctccatccgagcatcctcacggcaaagctccacacggaccccaagaaaactgctcccttctggaggaggaygccaagtgcaggaagaggggcagagcgacgcaggcggagcgggctgtgatgcatcagatgaaagtgaggcaagaagcactgctgtattccagggaacagctgacagaactcacagctcccagcacgcttgctaacgagcgtgcctgtcaattactcatctcacattgatgtaaggactcgtgctctcagctcactgctcgctaccagggacacactgccctctcttggagagctctgcagagcagctccagagtgccgggagggacaccgagcactgcaacg

SEQ ID NO: 10742 - DNA, 599 bp, Chicken  19866894212736_1
  misc_feature (1)..(96): n is any nucleotide
nnnnnnnnnnnnnnnnnnnnnnnnnnnnnnnnnnnnnnnnnnnnnnnnnnnnnnnnnnnnnnnnnnnnnnnnnnnnnnnnnnnnnnnnnnnnnnnntttcttcttatgaattgcttttgtgtgtttgtgaaatgcctccttgcatttctatttcacttactgcttcagttaattttggtacaatgacaaattcacgtagatcccacatagcaagcagactattatagtagttctgccctctgcgcttacaaatacagcttattctacctctgtttccatgagatgggggttagtgacacrcatcttccattcctgaagcccattttctgtctgagatgaggtctgttaaatttcactcgtgtaccctctctgtttgagaaaggttttgctacctttgttgcagtgttactcgtgttcaattgcttcttgtacgtgtcatactttccttactaataaccccataaattggcatggtgcatgctgttattctcgtattaaaacacaatcatgcccctgcttattgttctgtacgaatgagcttgtgatcccaggagcagctggatacacctgatgctttttgtcttcattcaaaatggcca

SEQ ID NO: 10743 - DNA, 600 bp, Chicken  19866894212736_2
ctgaaaaaggagcaaaatgaaggatgaaagcattatggaggaggaggaggtagagatgaaggatcctgaaccttactgccatggcagagagcattacctgtgcttttgcaggcaccggactctggcctgctggtccctcagtttgtgacttgtgccagggccagtgcagcaagctggcagaccaggtgcagtgttgtggtgtgcaagtcgcacccactactttcccccagggaagaaagctgggagtaagccactgatctcctacagggcttttgcaaggttgcagagggagcaggccaygtggtaagcttgcagctcagatggccatcttctgacggtacctgtcatgtaggatgacagagaggttgcaggagagcagtgcagccgtaatgtgccactatggcagcctgcacattgcactgtgagctgatgggatgagacagcctcctgtaggacctgccaggggtttgtgcagggcttaggctgggggagaggtgcggtgccatgctgagccatggcagcggcttctggctgctgcaggcagggtgagctgcccgctgggcaccttggctgtgggctgacggggagatgtggctctgt

SEQ ID NO: 10744 - DNA, 600 bp, Chicken  19866894212737_1
agaattgtatgcagctaagtttaacacagttatctactaccagttatcacagttatgttgtagaaatgtcatactcatatgctgccaaatttaaaccagcgtaactgacattattttatctgcattgccacgcttgagctatcacatttatatgttaaagttattagagaccattacacgtatacttcagatatacatgtcatagaatcttttcttgcaagagcataccttgctcttgcagcacttatcctgcctgctaacaattttaaaagttaaggaaatgaaggtttatgaataaascaagaataacatattcttaaaaatgtactaatgaaggctttgtaacagctatttaccaaaaaaaggaaaacataaatattttaaattaaatttctggagtataatatcatttttggctggcttcattgtggtcattctactgcattaatccctaatacttatgaacatagtacaaaacacaggaaaagagaagtcaacaaatgctactggttgcagtggaaaagatagtgaataaggaaaagactaatttctatttgatagtagaataatagaaggtcaagaaacctacagcatttcttt

SEQ ID NO: 10745 - DNA, 600 bp, Chicken  19866894212737_2
taatatcatttttggctggcttcattgtggtcattctactgcattaatccctaatacttatgaacatagtacaaaacacaggaaaagagaagtcaacaaatgctactggttgcagtggaaaagatagtgaataaggaaaagactaatttctatttgatagtagaataatagaaggtcaagaaacctacagcatttctttatttctctctaaccctttaaaaactctgactttatatatacacatttgttgatattgtcatggtattaagaaatgtcaggcacagatcaagctcattgtgytagatgctctycagtattaaacaactcttgtaatacaacaagaactaaaactcatgctaaggacatggattgattttacatgccttccagctagttccttatctaagtacttggctgccagtcttgctccataaacctcagcctgaagaacagcaatgtgtcgacgaagagcttcattctccttcctcagcaacttcacctcagcttccagctgagcttccttcactttttccttcttgttagcttcaagttctctctccttaaaaaataaaaataataaaaaaagaatttagaaagctt

SEQ ID NO: 10746 - DNA, 600 bp, Chicken  19866894212737_3
ttggctggcttcattgtggtcattctactgcattaatccctaatacttatgaacatagtacaaaacacaggaaaagagaagtcaacaaatgctactggttgcagtggaaaagatagtgaataaggaaaagactaatttctatttgatagtagaataatagaaggtcaagaaacctacagcatttctttatttctctctaaccctttaaaaactctgactttatatatacacatttgttgatattgtcatggtattaagaaatgtcaggcacagatcaagctcattgtgytagatgctctycagtattaaacaactcttgtaatacaacaagaactaaaactcatgctaaggacatggattgattttacatgccttccagctagttccttatctaagtacttggctgccagtcttgctccataaacctcagcctgaagaacagcaatgtgtcgacgaagagcttcattctccttcctcagcaacttcacctcagcttccagctgagcttccttcactttttccttcttgttagcttcaagttctctctccttaaaaaataaaaataataaaaaaagaatttagaaagcttttatcraagtt

SEQ ID NO: 10747 - DNA, 600 bp, Chicken  19866894212737_4
ctctycagtattaaacaactcttgtaatacaacaagaactaaaactcatgctaaggacatggattgattttacatgccttccagctagttccttatctaagtacttggctgccagtcttgctccataaacctcagcctgaagaacagcaatgtgtcgacgaagagcttcattctccttcctcagcaacttcacctcagcttccagctgagcttccttcactttttccttcttgttagcttcaagttctctctccttaaaaaataaaaataataaaaaaagaatttagaaagcttttatcraagttaataaaaaaagagcacttactgtttctgaacatcaatgtgtgtraaacaatgctatttctaggacttgcaggaaacaaaagtgactctgtcactgtagctactgcagctatctctgaggaaacgtggccctgaactcaactttgtactcccaacactatttttattctgcttacaactcctgcayattacgcatrtactatcttaaagtctaaggactgaaataagcaacagcgcttctccttgccacaagtaggtggcaaaatgtagagtctgagtatcattgttttttcttat

SEQ ID NO: 10748 - DNA, 600 bp, Chicken  19866894212737_5
gctaaggacatggattgattttacatgccttccagctagttccttatctaagtacttggctgccagtcttgctccataaacctcagcctgaagaacagcaatgtgtcgacgaagagcttcattctccttcctcagcaacttcacctcagcttccagctgagcttccttcactttttccttcttgttagcttcaagttctctctccttaaaaaataaaaataataaaaaaagaatttagaaagcttttatcraagttaataaaaaaagagcacttactgtttctgaacatcaatgtgtgtraaacaatgctatttctaggacttgcaggaaacaaaagtgactctgtcactgtagctactgcagctatctctgaggaaacgtggccctgaactcaactttgtactcccaacactatttttattctgcttacaactcctgcayattacgcatrtactatcttaaagtctaaggactgaaataagcaacagcgcttctccttgccacaagtaggtggcaaaatgtagagtctgagtatcattgttttttcttatgttaagaaaagagatatattcaatgagagggaacagattatttttaaaa

SEQ ID NO: 10749 - DNA, 566 bp, Chicken  19866894212737_6
cacctcagcttccagctgagcttccttcactttttccttcttgttagcttcaagttctctctccttaaaaaataaaaataataaaaaaagaatttagaaagcttttatcraagttaataaaaaaagagcacttactgtttctgaacatcaatgtgtgtraaacaatgctatttctaggacttgcaggaaacaaaagtgactctgtcactgtagctactgcagctatctctgaggaaacgtggccctgaactcaactttgtactcccaacactatttttattctgcttacaactcctgcayattacgcatrtactatcttaaagtctaaggactgaaataagcaacagcgcttctccttgccacaagtaggtggcaaaatgtagagtctgagtatcattgttttttcttatgttaagaaaagagatatattcaatgagagggaacagattatttttaaaataaaaaagttaatacaaaaccacaaaatatttcaaggtggataatattctttaagtattttaatgagcttttaagatgattagatattctgtaagttcttaaaatga

SEQ ID NO: 10750 - DNA, 556 bp, Chicken  19866894212737_7
tccagctgagcttccttcactttttccttcttgttagcttcaagttctctctccttaaaaaataaaaataataaaaaaagaatttagaaagcttttatcraagttaataaaaaaagagcacttactgtttctgaacatcaatgtgtgtraaacaatgctatttctaggacttgcaggaaacaaaagtgactctgtcactgtagctactgcagctatctctgaggaaacgtggccctgaactcaactttgtactcccaacactatttttattctgcttacaactcctgcayattacgcatrtactatcttaaagtctaaggactgaaataagcaacagcgcttctccttgccacaagtaggtggcaaaatgtagagtctgagtatcattgttttttcttatgttaagaaaagagatatattcaatgagagggaacagattatttttaaaataaaaaagttaatacaaaaccacaaaatatttcaaggtggataatattctttaagtattttaatgagcttttaagatgattagatattctgtaagttcttaaaatga

SEQ ID NO: 10751 - DNA, 599 bp, Chicken  19866894212740_1
  misc_feature (1)..(30): n is any nucleotide
nnnnnnnnnnnnnnnnnnnnnnnnnnnnnngagctgaaacagggtgagcacgcaaaaactggataattccatttatgcatacaagttacagtagctacatgttagatttgttctgcagttaatgaggtgtgcacatttgtagcagctgggcacgtaacaacatgtgcatttctgaaggtgtgctctgcaaatcagtcctcagcctctccctggcaaggagagaggagcagtggagcccaggctggcagagctggaggagtggagtggctgcagcagatatggagatgagatttggtgctygggagcaggagggatgcattgggcccagtctgatgtgctttgcatactcctaaatgcactttccaggcttttcctatcaagatgatttataattcttgcagatggtgtctgggctaatccccaatgagaactctcttaagctcctgacaaatttgaatctgcagccgtgtatcctattgggagtgtggaggcatctctaacatgctacagaaatacaaatgacagcggctgttgatggctggaagagctgcctcaatgtatgtgcagaactctcttttaataatatcaaagaaggaagt

SEQ ID NO: 10752 - DNA, 600 bp, Chicken  19866894212742_1
tcactgagttcctccatgcagaaaaaaatggcactcactgacatgtgttgatgcttactgaatgtttgtagagagcagacaacagatgtgagcacaggactgataacagtgacagtgggtcacctcctttggtatagatttttacaagcatggcatgcaggctcttattcattgctggcaaaaatgcacagctattggtggtaactgtgtgaaaaaatagtgttttgtagctgaacatttgttcaatataacagtgttattgtgctctttgtatctgttctcctttctgtgaaaataaayaggaggcatcacttttggagctacctaggtatatgtggcccaagataattcctcttgaatcagcatggcccaggcaagccaaaaggttgaacacccatgccttaaggtttgtatcactactcatctctggacgaacacaaaatacagcccagctgaggcgctctcagtcatgcccacaggacagcaaggagcacatgctgaatccttagaaaggcaccaaattactcagatgggcagaatgggactagatagtaagacagctcctggtaatgcactgctgaagctgtgcatcaataaaat

SEQ ID NO: 10753 - DNA, 600 bp, Chicken  19866894212754_1
aagaagtgctatatacaatagaatcagtgtcatttgtattccagtgacacccaccatgtgctagccactgttcctacacacacacacaaatacagtcagacaggccctgaagatcacatttccaagaagtgatagaagtgctctaatgacacatcagtaatttagagcaatggtgacaccagatacatgctgttaggcataatatatcctaagcatgcttcatccactcagaaatgagattagaaaaacatattcatttatggggatgcaaaagaactgtgtttaattgtaagtgcttgsaaatatgcaattgttaatacaattaaacactaattaataatactgaaccattaatagcctagtcagataaagtctcaactatatgagctatcatataaatatataattgaagataaccaagttttaaaaactttcctggtaagtgaagctaatggaggagatgcagtagtgagggtatagtgacacagctttctttttcatgttttcttgttttagatgaactgtatcatgagtttgcaaatagaaagctgttttgctaaagggaggcaaagagaaagattggtagtgttatctcaactg

SEQ ID NO: 10754 - DNA, 600 bp, Chicken  19866894212755_1
tgttcagcccatgcaacagacctctcttctcttaaatgatattgaaagcctgcatgcttcactgtccttgtcaggtgctaatctgtaagattattttgttgctgatgtgcacagataggttctgacatgtagtcactcagctgtgtcagattaactactcaaactctcagggagcagatgttttttcttaagtacatgctttagtattgtcatttgaattttaataacttataaatataactatagagaagatgcagagttaagttctgaagcttagtgatatgaatgaggggagaagaraagtctttagagatatgcttgcatgaatttcatttgcttattcacagatgtttaagtgtataggaaaggtctgttttttagtaccaatgtttctatcaayttaaagagttttgtccgttggatcttaaggtgcaactagtttacaaatagtcttcatgacatgccatatccggataagaaaattggatataatatcacgtaagtacagcttaataagtaatcctgccccttgctccygggcccagtggcaataaaaaacaatcaaagcacrttgaggtgtgtctttcgatagtactggtg

SEQ ID NO: 10755 - DNA, 600 bp, Chicken  19866894212755_2
gctgatgtgcacagataggttctgacatgtagtcactcagctgtgtcagattaactactcaaactctcagggagcagatgttttttcttaagtacatgctttagtattgtcatttgaattttaataacttataaatataactatagagaagatgcagagttaagttctgaagcttagtgatatgaatgaggggagaagaraagtctttagagatatgcttgcatgaatttcatttgcttattcacagatgtttaagtgtataggaaaggtctgttttttagtaccaatgtttctatcaayttaaagagttttgtccgttggatcttaaggtgcaactagtttacaaatagtcttcatgacatgccatatccggataagaaaattggatataatatcacgtaagtacagcttaataagtaatcctgccccttgctccygggcccagtggcaataaaaaacaatcaaagcacrttgaggtgtgtctttcgatagtactggtgtcagaagaaagactcactggcagttgtcagtctaattctcaaagaattcaaaaatcaatgttttacatgcattaactattactgagtgaaacaatttaat

SEQ ID NO: 10756 - DNA, 600 bp, Chicken  19866894212755_3
taactatagagaagatgcagagttaagttctgaagcttagtgatatgaatgaggggagaagaraagtctttagagatatgcttgcatgaatttcatttgcttattcacagatgtttaagtgtataggaaaggtctgttttttagtaccaatgtttctatcaayttaaagagttttgtccgttggatcttaaggtgcaactagtttacaaatagtcttcatgacatgccatatccggataagaaaattggatataatatcacgtaagtacagcttaataagtaatcctgccccttgctccygggcccagtggcaataaaaaacaatcaaagcacrttgaggtgtgtctttcgatagtactggtgtcagaagaaagactcactggcagttgtcagtctaattctcaaagaattcaaaaatcaatgttttacatgcattaactattactgagtgaaacaatttaattgtaccagacttaggatctgaagagtaagattctccttcgttgtacttgtggacatttcaaatacgtaggaaacagcacagctctcctgaagcatgctagtgtacctccttagaagagcataccatactacctcttg

SEQ ID NO: 10757 - DNA, 600 bp, Chicken  19866894212755_4
gcttagtgatatgaatgaggggagaagaraagtctttagagatatgcttgcatgaatttcatttgcttattcacagatgtttaagtgtataggaaaggtctgttttttagtaccaatgtttctatcaayttaaagagttttgtccgttggatcttaaggtgcaactagtttacaaatagtcttcatgacatgccatatccggataagaaaattggatataatatcacgtaagtacagcttaataagtaatcctgccccttgctccygggcccagtggcaataaaaaacaatcaaagcacrttgaggtgtgtctttcgatagtactggtgtcagaagaaagactcactggcagttgtcagtctaattctcaaagaattcaaaaatcaatgttttacatgcattaactattactgagtgaaacaatttaattgtaccagacttaggatctgaagagtaagattctccttcgttgtacttgtggacatttcaaatacgtaggaaacagcacagctctcctgaagcatgctagtgtacctccttagaagagcataccatactacctcttgtcaggtgtcaccttatctcagcttagatctacag

SEQ ID NO: 10758 - DNA, 600 bp, Chicken  19866894212755_5
tagtgtacctccttagaagagcataccatactacctcttgtcaggtgtcaccttatctcagcttagatctacagaatagcatagcttggatgcttgcaaccatattagctgtctcattagcagtatgacccattcctcagatctaacatagataacacttgtttgcataatcagtatttttgattacaagggacaattttaggcatctgtgtccctgtgcaagcttactgattgccgcagcagataagtgattgcagtagcgtgagcaagaggactgcctaacctcagtcaggtttacartgttttttttttcacactacttcctttatttactctattgtaaatgaatttatgcaatcgtaacttgacgctaagtctccttgctttacataactgtgggatgcatttccaaacaaagtcagatgtgacttaagaagcttttaagactgagtattactgtcaaccttgtagggtcatctttattcatttcctctgcatagatactgcatattctatgtcaaaggtctcccttctcttatttgtagttcagtaatgactattaatgctgctagctaattgcattttgtcttttctttgaat

SEQ ID NO: 10759 - DNA, 536 bp, Chicken  19866894212761_1
agagaatatctctgttcaaaaggactgtcaagactgttaattactcaggtggagttagcatacagctcattaaaccatgtcaaaactttcagtccttctccactgtatcagtccctttaggggctctcacatcaggataatttgattcttaaaaatacattaattcagatcatacattacaccaacaaattattccactttctttgtaaaacaagtctgatccaaccagaactgctattgcagaggagacagcttctgtaattaatatgtagtgggcgtgtctggtgcaggcaaggaacrtttgcaggctgtactctctggataacacgtaaagaacgggcactgtttatttcttgtagcagaaatataaaaatgctacattatttgtatgaaaattttatcacagttgtaccaagtccatagtctgaacactggagtgtgaatagctcaatttttgctgtgtatcagaagaatgttctgcagaaactatcacagaacagtttgccctccatcagtgccaaaagttatcaaaattt

SEQ ID NO: 10760 - DNA, 600 bp, Chicken  19866894212762_1
aaagcaaagtaccatccaatgaaaacaacaaacatggctaattcagattgaaaagaccaaatttgtttttagcagaaagagtacacacctactggaagagtgcatttcaccaacagcggatggctgatacctcaacacttcccatccttaaacaagatggggtgccttttaagacatactgaagtccagctcagagctcggggccttgtgttatgctgggagctggcctctgtggtcacaaggaagttttcaatctgtgaacagcactgaactggctgagttgggtcttgcaatgtctaygtggtgatgtcagtgccggtcgtgttaacccagctttgtttttagctgtttggtttaaaacactggatctatttcaagtttacaccggtgcagcagatttcagcaatttgtgctttacagtccatgagaggctccttttattctccaaaagagtgcaccacgggtcagagctgaggctgacagtgcctttctaggtgaccctggctccattactagcttaacctcttggtcaaccagctgtggaattggaaaatggattcctgtttgaaaaggagatactgccctgagtctgtgtggtgg

SEQ ID NO: 10761 - DNA, 600 bp, Chicken  19866894212762_2
aaaacactggatctatttcaagtttacaccggtgcagcagatttcagcaatttgtgctttacagtccatgagaggctccttttattctccaaaagagtgcaccacgggtcagagctgaggctgacagtgcctttctaggtgaccctggctccattactagcttaacctcttggtcaaccagctgtggaattggaaaatggattcctgtttgaaaaggagatactgccctgagtctgtgtggtgggggtaaaagagccaggacagcacaagcagaaatggcctacagcacggatgtgatgmcwgattcaaactatcccaaacactttctggggctaagagggaatggagatggtggataaagacagtgccattttgagatctttccctcactgctctttctgtatctcttgcctctgaccttttttttttttttttttttcctctctcttttattccatttcacttcttttcatactcctggtgaaggagaggagctctgcacaggagtagacaacagtttactacaacgggaggatgcatcggggcaggaagtccttctgcactgatacagaagctcgaggtcagtctgtattccaagag

SEQ ID NO: 10762 - DNA, 600 bp, Chicken  19866894212762_3
aacactggatctatttcaagtttacaccggtgcagcagatttcagcaatttgtgctttacagtccatgagaggctccttttattctccaaaagagtgcaccacgggtcagagctgaggctgacagtgcctttctaggtgaccctggctccattactagcttaacctcttggtcaaccagctgtggaattggaaaatggattcctgtttgaaaaggagatactgccctgagtctgtgtggtgggggtaaaagagccaggacagcacaagcagaaatggcctacagcacggatgtgatgmcwgattcaaactatcccaaacactttctggggctaagagggaatggagatggtggataaagacagtgccattttgagatctttccctcactgctctttctgtatctcttgcctctgaccttttttttttttttttttttcctctctcttttattccatttcacttcttttcatactcctggtgaaggagaggagctctgcacaggagtagacaacagtttactacaacgggaggatgcatcggggcaggaagtccttctgcactgatacagaagctcgaggtcagtctgtattccaagagaa

SEQ ID NO: 10763 - DNA, 600 bp, Chicken  19866894212763_1
aactttgagtataattttagacagtacttgatggtccagggtagagatctgtcactcaccttttgcaggataaccaggtgttagagggtccccagctccattcaggttcagcacattcccacgctggactcctctgtctggaaggttccagccatctgggtaaggatctactcctggggcatagtagtcagcagggtctgaataaagtatgatccctatggctcctgctaaaacggcatttttaacctgtaaaatgatttggcattaagaaatacagggtttctcaaatgcaataataaytttgaatgctgtgatttacttccacggggacacagtttagaatatatatatgtggaaaggtgaaaatgatcacacactcagcagaacaaaccacaacaaaatacattaagttcattatttgtgtcacacttttaaatcatacctcaaagctatgagataaagcacaaggcataacactgaggaaaaaagaactaaccactaccctccttttccctctatcctcaattttattggagtgtgatgtccaaagccagaggaatagctactcaatgtctgtacatcagaatccttgttgaatcc

SEQ ID NO: 10764 - DNA, 600 bp, Chicken  19866894212764_1
agcttcagtgagcagctataccaagttctctccagacatttgctgtcaggaaacctgaccctgcatgaccctgcaagctgctgcaggcagggccattggctcctgtggtgctgctcagcgagccctgactgaagatttgccagctcaggccctcgctggagccgatggatgggcagcagccatggcccagcacagagagtggccccaggagcatctgctggcctcggcctgagctgcagcccaccaccctgtggcaccacgactgttctccaagggccacagatgattggtgcagactcragcctgcatgtccaagccttcatggagaggaaattcagcctgcaagctaggacaattaatacccacgtgggggaggagggaggatcagtttcatttcacaaaaagtcagacatgcaaacatcccagcagatacacagacactgggggtcaccgacccacatgcagcaggaggacagactgggcaacacagaccccagctgttggaaacacacgaggtgaggacagggctgcgtgcctgccaagttgcacccaatgctgagtgggacccctggcagcgggagcaccctttgctccccccag

SEQ ID NO: 10765 - DNA, 600 bp, Chicken  19866894212776_1
ttaagaaatgatagtcatcatatagttccattaattatacctatatctttaagttaagcaaataaaaatagaaaaaaatggatacacaaaactagtcaaacttttagcttgtagcgttcctggaactgggtatttaatctctatatacacccaagccttgcaatgcatttagcctctcctcagaataaggagtgaagttccttcctaaatgtcacccaaacacgaatgcaggctggcagtaagcagatttgtgctcactctgcccaaagagataattcatgtccaaaggcataaggaaaygttttccttcgaaactcagcagtattccttctcatagatgwccaaaaacagttagcatgattctgcaataagaacccataaggacttgtcagttgttctgcattgttcagtgaacgttcgttcttcaacatgttcattatcacaaaatcagtgaaaatcagcaagttatgtgaaacactttcactgtgaaacttcttgtaatccttctgatgcctcctattttattatgttggcccacaatgtctgaggcagatgatggtggaagagcaatagagtttgagcctccccagcaatatcaca

SEQ ID NO: 10766 - DNA, 600 bp, Chicken  19866894212776_2
tatatctttaagttaagcaaataaaaatagaaaaaaatggatacacaaaactagtcaaacttttagcttgtagcgttcctggaactgggtatttaatctctatatacacccaagccttgcaatgcatttagcctctcctcagaataaggagtgaagttccttcctaaatgtcacccaaacacgaatgcaggctggcagtaagcagatttgtgctcactctgcccaaagagataattcatgtccaaaggcataaggaaaygttttccttcgaaactcagcagtattccttctcatagatgwccaaaaacagttagcatgattctgcaataagaacccataaggacttgtcagttgttctgcattgttcagtgaacgttcgttcttcaacatgttcattatcacaaaatcagtgaaaatcagcaagttatgtgaaacactttcactgtgaaacttcttgtaatccttctgatgcctcctattttattatgttggcccacaatgtctgaggcagatgatggtggaagagcaatagagtttgagcctccccagcaatatcacattgaattttgttactgtgtgacagatggcagcagaagggta

SEQ ID NO: 10767 - DNA, 600 bp, Chicken  19866894212781_1
cacccctgttgctacaaggggaaaatacactgtattgctctctctttcttggaaagctcggctagtattttcccagccatttgtgtacaaagaaagataaatagctctttagcgggcagaacaatctctccgggttttattgacattcgtgccagcagctgaggagcagcagcttggcagagctgagcgcgggcgggtgaagctgtgcgtggggggagcagctgggggggacagcgaggggctggggctggaggagcccactgctgctgcaggaccgatgcgggctgcctgagcaccacrctgcatgctcgcttgccacctcctcacccatcgctgtcagtcctccctataaataaaatacatgtatggcaaatttagctccagcttcacacacagtaggactgtagatagatttttaaagagcttgactccaagtaataattcatgggggagatcaaaaggctatggtttaatcagggggtctgtctaataccatcagaagcctgatgcacatgaatagccatcccattttctgcctgtaaggccagcgttgctcacaatgggtgctggggaagtttggagagccatgttctgctctgc

SEQ ID NO: 10768 - DNA, 600 bp, Chicken  19866894212800_1
agtgctgctctacacaagaagggcaggtggcactctgaaacacagcaaatgggccttgattcaaaaatctattctgcctccaagcagcttccatgttaaagcagttaattcacagattattttcagtcccttactgtcagcccacagcttattattactgtattacaaatatgtccttatgctgtttactggtccgtaattgtgtttaggagcacatcatgagagaacacttgtgtattttcctccagcaagaattcatctaactttaaaagcacccagaaataaaagactgtgctttgmtaagaagcaacgcagtcactgaccaaaaaaatatcattacctttgrtattaaaaagcaataaatgcccttgttattccaacaaatcaagyccaagaacaggtcagaaaagaggattttctctttacggatgtcactgtgaaactttggtggatttgcttggtttatactgcagttgtgacattttttaatggagtactgaagaacagacttatcttagaaggactacagagcttcatactgtatttgcaattactgttacaaaggcaaaatgaacttacaaagaacattaccatctttga

SEQ ID NO: 10769 - DNA, 600 bp, Chicken  19866894212800_2
aaatgggccttgattcaaaaatctattctgcctccaagcagcttccatgttaaagcagttaattcacagattattttcagtcccttactgtcagcccacagcttattattactgtattacaaatatgtccttatgctgtttactggtccgtaattgtgtttaggagcacatcatgagagaacacttgtgtattttcctccagcaagaattcatctaactttaaaagcacccagaaataaaagactgtgctttgmtaagaagcaacgcagtcactgaccaaaaaaatatcattacctttgrtattaaaaagcaataaatgcccttgttattccaacaaatcaagyccaagaacaggtcagaaaagaggattttctctttacggatgtcactgtgaaactttggtggatttgcttggtttatactgcagttgtgacattttttaatggagtactgaagaacagacttatcttagaaggactacagagcttcatactgtatttgcaattactgttacaaaggcaaaatgaacttacaaagaacattaccatctttgaaacactaattacattaggattatcaggcaatttttcagcatatcat

SEQ ID NO: 10770 - DNA, 600 bp, Chicken  19866894212800_3
ccatgttaaagcagttaattcacagattattttcagtcccttactgtcagcccacagcttattattactgtattacaaatatgtccttatgctgtttactggtccgtaattgtgtttaggagcacatcatgagagaacacttgtgtattttcctccagcaagaattcatctaactttaaaagcacccagaaataaaagactgtgctttgmtaagaagcaacgcagtcactgaccaaaaaaatatcattacctttgrtattaaaaagcaataaatgcccttgttattccaacaaatcaagyccaagaacaggtcagaaaagaggattttctctttacggatgtcactgtgaaactttggtggatttgcttggtttatactgcagttgtgacattttttaatggagtactgaagaacagacttatcttagaaggactacagagcttcatactgtatttgcaattactgttacaaaggcaaaatgaacttacaaagaacattaccatctttgaaacactaattacattaggattatcaggcaatttttcagcatatcattcgagaattagcagacagaacaggagacgctatcagaaacaact

SEQ ID NO: 10771 - DNA, 600 bp, Chicken  19866894212801_1
gctcattggtttttgcttcactgttaggagactaaggagagaaacatgctcagttttttacttaagttactggatattctgttaatgtaaagttctcttctgttgttgaaaatttttggccaaaagaaccttgcatattgccaactggtctttgaaaaattgaagtggatcaatttttggaactccctcactgcaggaaaagtgaacatttttttttttagtagggcttctcattttttacagcttttcataaaatgatcataaacctcatcatgttatttcaaaatgatcttttgaatwatatagaaggagaaatacttmtgctttttctcagtagatatgtggttgtacatgcaagaatcaaattagccctctgtgacgcatcgctgcactgctcatgaactttgttgggtgcgatgctcrtgagcatttttaggagcagtgttctccacttacaatctgtattcatcttttccacgagtatggacttggttttagctatactaaaatgcattgtgctcaaatgagccaaatattttttgcatatgccatttgtttgaaataccgtacaggactgtcagctgcctcacaggaagctgg

SEQ ID NO: 10772 - DNA, 600 bp, Chicken  19866894212801_2
tgttaggagactaaggagagaaacatgctcagttttttacttaagttactggatattctgttaatgtaaagttctcttctgttgttgaaaatttttggccaaaagaaccttgcatattgccaactggtctttgaaaaattgaagtggatcaatttttggaactccctcactgcaggaaaagtgaacatttttttttttagtagggcttctcattttttacagcttttcataaaatgatcataaacctcatcatgttatttcaaaatgatcttttgaatwatatagaaggagaaatacttmtgctttttctcagtagatatgtggttgtacatgcaagaatcaaattagccctctgtgacgcatcgctgcactgctcatgaactttgttgggtgcgatgctcrtgagcatttttaggagcagtgttctccacttacaatctgtattcatcttttccacgagtatggacttggttttagctatactaaaatgcattgtgctcaaatgagccaaatattttttgcatatgccatttgtttgaaataccgtacaggactgtcagctgcctcacaggaagctggattttcttcagaccatcagtt

SEQ ID NO: 10773 - DNA, 600 bp, Chicken  19866894212801_3
aagaaccttgcatattgccaactggtctttgaaaaattgaagtggatcaatttttggaactccctcactgcaggaaaagtgaacatttttttttttagtagggcttctcattttttacagcttttcataaaatgatcataaacctcatcatgttatttcaaaatgatcttttgaatwatatagaaggagaaatacttmtgctttttctcagtagatatgtggttgtacatgcaagaatcaaattagccctctgtgacgcatcgctgcactgctcatgaactttgttgggtgcgatgctcrtgagcatttttaggagcagtgttctccacttacaatctgtattcatcttttccacgagtatggacttggttttagctatactaaaatgcattgtgctcaaatgagccaaatattttttgcatatgccatttgtttgaaataccgtacaggactgtcagctgcctcacaggaagctggattttcttcagaccatcagttaatttattctgtgcaactagaattttgagaagcattacctgctggatgcactgaaaatatttggactctgtactagcctgtatctgcaattgtcaacttttt

SEQ ID NO: 10774 - DNA, 600 bp, Chicken  19866894212808_1
taattgggaaaaatcatcttaaaaactgaattattcttcaattgttatcatgtctattcacaattattcacaaaccatggtaaataaaatgcagattgaactgtatttgtctttgtttttaattaggcattctgtttttttaatattaatacaaatgagaagttatgcttaggctgcaaatttcttagtacagggtccatccttcttcccaaatctttatccttctgactattctgtgagtacacaatgaatgcaacaaaagaaagaaggaagaaaacaaagtgaaacaaaatacattcrtttgacttctgagatgtgcttttaaaattggaatcatgacctcaatgctttaatgtgacagtgcaaaattcaagctatgtgtttgatagatttgctggagacagagcctgaccagtatccccttaggcaaatccttaaaagatcagcattagtatcagatccagacaacaaagtgtttccagccacaagataccaccagattccattgtggtctcaaaaggtaaaggaaatactgagaaaaataaataaaaggctgttaattaaactagtgaaataagggggagtgactacaaggaataa

SEQ ID NO: 10775 - DNA, 600 bp, Chicken  19866894212809_1
atgatgtcactgtgtggcctttgctcaaatgagtcatttactcgggtttaaaaggatcatataaaagaatgtttggggcaaagtctgagttcctaattaaaatattttacttactctttcacttttggacagtaaatagtagctttgatttgtatcaagtcagagatgggggaaacattcctgtttcactcctctgaagatagttaactactggttttgtgacatctgctatttatttttttaaggaatgcagcgtatgctgtaaggtctgcccttgggactgtgggaaatgctgttgcrttttgaatagctgtcagggtgaaatttgcatgtggtctgaaagcgctcatataattacactttaatatataatctgtgactatgctacagaatatatttaggtattactgctttctttatcacaaacttttgaagtaatcttcaaagtgtgatattgtgtgcttcatgtgggtaattctgcatccttttcatgagcaaaagctttgttcctcaagttcatcctgtctgtcttaaactaatgtaaatcagagcttattataaaatggtaatgcacccttatttccagatacatcagaaaac

SEQ ID NO: 10776 - DNA, 599 bp, Chicken  19866894212810_1
  misc_feature (1)..(51): n is any nucleotide
nnnnnnnnnnnnnnnnnnnnnnnnnnnnnnnnnnnnnnnnnnnnnnnnnnngtagaatgactttgtagaagagagttggcacgaatctgatgtctgctttaaatagctcacattttgttcctttctgcaaggagaagaaatggtcttttctatatctaatggaaactcacacagcagtgttccattgattttaggaaagcaggagactgcatttcaccctaggaacactgaagcacccttcaatttttggacagggcacgttctggcatctgtagagcaggaataagtaagcacagatasttgccattggcattttctttctgcagacttctagcactgtagtacaagtaacagtgcaaaayaaggggcattgctttgcagtaaatagtaactatatgcaactcctttcacttatccattcatctcagtgctcggtactgcaggaacatgaggtgggccagctggaagaagtctctctctttcactgcccaataccaaacctcaatctccatctccatgagtaacagcttgggtgatcatacacagtgtggctgttttcactaatggggctgctggattcctgcttcaggcttcttggc

SEQ ID NO: 10777 - DNA, 600 bp, Chicken  19866894212810_2
ttgtagaagagagttggcacgaatctgatgtctgctttaaatagctcacattttgttcctttctgcaaggagaagaaatggtcttttctatatctaatggaaactcacacagcagtgttccattgattttaggaaagcaggagactgcatttcaccctaggaacactgaagcacccttcaatttttggacagggcacgttctggcatctgtagagcaggaataagtaagcacagatasttgccattggcattttctttctgcagacttctagcactgtagtacaagtaacagtgcaaaayaaggggcattgctttgcagtaaatagtaactatatgcaactcctttcacttatccattcatctcagtgctcggtactgcaggaacatgaggtgggccagctggaagaagtctctctctttcactgcccaataccaaacctcaatctccatctccatgagtaacagcttgggtgatcatacacagtgtggctgttttcactaatggggctgctggattcctgcttcaggcttcttggctttctccacatacttctgaatgccctgtctggtccctggggctttccatggcctaatgatatg

SEQ ID NO: 10778 - DNA, 600 bp, Chicken  19866894212810_3
atagtaactatatgcaactcctttcacttatccattcatctcagtgctcggtactgcaggaacatgaggtgggccagctggaagaagtctctctctttcactgcccaataccaaacctcaatctccatctccatgagtaacagcttgggtgatcatacacagtgtggctgttttcactaatggggctgctggattcctgcttcaggcttcttggctttctccacatacttctgaatgccctgtctggtccctggggctttccatggcctaatgatatgaactcattgcaccaagctttgstctcctttctcatgtacccactgcagttgcagaggaataacttttccaagtcgtagactcttcagatcatttctgtctttaattttggatttctgcttaagttggacaattaaatcttcccctaccggcagagacatcctgaaccagctgtaaagcagtgctccaaaacctcccacccacttggcacagtgcactgccaaacccacagatactttaagcacttgcttaagtgtgattaacttctgtgcccacctgacagggggctgtttccatggaacaagcctttgacacaacacatgc

SEQ ID NO: 10779 - DNA, 600 bp, Chicken  19866894212819_1
gggccagcagctcttcctggtgagcagcatgaatgaggctatgctgtgtgggggagggaaaagagggagaaaatgcagccatatggccacaagctgtgctagcatgtttccctgcaggtcagagaaagagccctgaccaattttatttgtaagcacaggcacagcaatcacggcacccttacaaatgtaataaaagacagcagatacttggatttgtatttgtattcaatgattttgaaagttctccttcctcttgtgacagaaggtgcatccacagggattatttttaagggcagatartaatacttacacgtgggtgagttttaatgctgttcaacatacatctgaatttgttggagtgaaggttcttctgtgcttgagacttagagtttcaggagccataggtttgtcttcaaaacagtcttttcatgaatatttatagtgtgaggagaaagagacattggaagtttgttctttcttttctctcatgaacttcattgtgggctggtgggtagatcagtgtacgaggatgcttacccttatggtttgtgatctgacttgagctgaattaagagctctttgccacccaaacagagcaaa

SEQ ID NO: 10780 - DNA, 600 bp, Chicken  19866894212820_1
tattcatattaagcagttaatgtattatcaattattaatatttttttcttagcaaaggcagaagatgccaacttatttccatcattacgtaactgagaaatctacatgtgaagaattttcaggccaattctgatgtgtcagcatggcttatctgctatggctcttattcaggaagacgataaaagattcctaacttaggacatactggaaatatacctgacactggtgcataaagcatggtatttacttgtatacaggtagacccactgcttataacaatggcaaagtctgtacgtttayagattgcaggatgtgattcagtgttatttgattttaattacttctatgggaaggatgttcagactgattctatcattaacccatagccaagactgacagtggtgttactaagaaaaaactacctgaaacatatcttactgagggatttttgtagaatctcttttaaactcatatacttccagtacttggtaaggggagtttttctcttactgatcataaccattttccccttgcaataaaaacatgttatatttttttgtaaagagaaattaagacaaaggtattcataagaagtgttta

SEQ ID NO: 10781 - DNA, 600 bp, Chicken  19866894212820_2
cagactgattctatcattaacccatagccaagactgacagtggtgttactaagaaaaaactacctgaaacatatcttactgagggatttttgtagaatctcttttaaactcatatacttccagtacttggtaaggggagtttttctcttactgatcataaccattttccccttgcaataaaaacatgttatatttttttgtaaagagaaattaagacaaaggtattcataagaagtgtttacatttgcaatataaacaaaagagaaatgaaagtgaaactttaatcttgttcttgtttaycttgatctccagttttcatttatagctgggagatgactactaaaatagttagacgcttccactgtgctcaagagtaccaaaatccttttgtaacttttccgacttcagtctatatgtgcaatatgtcttatgatatgtagaggttggatccctaagagctgtaacaaatgcacagagatgctagacattaaaccagagtgaatttaaaatacagacttttataaaccatgcaaaacaataacagcaacagtgattatatctcttatgatactccccgctagttgggcatcatttgagaga

SEQ ID NO: 10782 - DNA, 600 bp, Chicken  19866894212823_1
gatgtacagagccaacaagggcaagaagcactcagtaaaagcatcactggagcctaagccactgccgatgggccaagagaccaggcagggcacagcaaggacacgcttctgctatcagaccacagagacaggcagcacaacttgtccttgtgttctcctggttctacatgtcatctgcaacactcctttcagtttcagtatttattttgaattggttttgctgtatttcttgtttgtctcccatacatgtgacttccttccatctcaccacaaatttctaccaaataaaaccatatgcaytgccatagcaacattgtaatacaaacacagggtaatctttgctcactgaagtacacagttgttttttttctctcttattaacagaatctgcatctgcatacagtttaactcaatgtcatggcaacaacataaacacagattcaagatattctttcttcagagggaggaagaataaatgttttcaggaaaagtgtgggggatttaaggaagcgggatgaaatgtttgtgaccaaatagggctgaagttacatcatcacagctgtgcactgctctttcaagcctgctctggtaaggtgttac

SEQ ID NO: 10783 - DNA, 600 bp, Chicken  19866894212825_1
actgatggcaaagaaagcttatgttggaaatccccatcgcttgtatctgagctctgtcatctctctctgttcatcctttttcacagcttctactttcaactgtgcatgggcatccatattggttttaatggggttgctccgctgcagtgcaagtatctacttctgtagaggaaaatgtatcttcctgttttaagttctcattgacaacttgctgaacttatggctacgctgtcctagtgtctgattctgttggattttatgagataactaggatctaacctgtttggttcgagacgctcmaggaactcggtggtttcagagaatcagctgctttgaatccgctgacccactggtctccatttgatcagatgtggaaccagtgttgtcaaaatgttgatgaaccacactcttgactgtttgactgacatttataatggagtctgttcactcctgttactaaaactatggctgcgttcatcatgatggtaaggtgttggtgtctgtctcctagctcaattcccatttgcacaaatctgtgcaccctacctacaaaagtattccgtccagtgaatgaaaaccttacaagaacttgtgtgatgt

SEQ ID NO: 10784 - DNA, 600 bp, Chicken  19866894212827_1
cttgctggaggtggctcaggatgctgcagttccccccactgcagcccagcactttgaccactaaatgaacagctgaaggctcacctgctggttggttgagggcttttttggtctttcttcttttttctgggcagtttgggctgtggcttgctcttccacatcaggaaaagacttggattattaaacactgccttcctgactctttaccatccccagaggatattttgaggaagcccaggcacatactgctgtaggagaagccccttcttgtcacctggaggcttttcagaagtaagctgyggagaaagcatactcccctccgtgccctggtggttacagctcaggataagctgctcctgtgtacctgtcctgcctcctcatcagtgacacacatctttctgaccctttcactcgcttggcacgtgactttcctcccgggacactgcatgacagcagcaccagtcagaaacctccgtgccaaccagagagccctgcagcgagcgagagctgagtgaggaggagcaagaggaagtaactgaacctgtgactaacgcgggcagaatatcaaggaaggttttctgttaaggtttagagaagtca

SEQ ID NO: 10785 - DNA, 600 bp, Chicken  19866894212827_2
acacacatctttctgaccctttcactcgcttggcacgtgactttcctcccgggacactgcatgacagcagcaccagtcagaaacctccgtgccaaccagagagccctgcagcgagcgagagctgagtgaggaggagcaagaggaagtaactgaacctgtgactaacgcgggcagaatatcaaggaaggttttctgttaaggtttagagaagtcatttccttgagaggggtgagagagtcagacctcggatcactttgtgctggcgagtgtttcttggggaatcatgaacaaggtgagagyaggacatgcgttcacatcctctctgatttacatctgcagatgctgttgtggtgaagggaatgtttggtgtgtgcgaggaaaatgcacagcaacggtcagctaaaggagatttaaagaatgatcatctttctcttgactttactgtgatcttttgactttcttgcttttggttccatctggtttctgcctggctgaggacactgagcagcagtggagaggagccgtttttccccagcagacaggaggggcagcagcaaagaggatgtgtagcacactgagtgtggagcagaggctgagctg

SEQ ID NO: 10786 - DNA, 600 bp, Chicken  19866894212844_1
aagctgtattaccaataaagttggtagagatatgcaaagagggcctgaggaatggaatagtctgaatagccataaaggtggtctctttatgtgctccatattgtaaaagtaagcaagttgattttggagatctgagccattgctagttggagtgtatggagagcagtagcacacacacgtttcttgaattcctgtgctaagttagcttaattggatttggtgtgggtacctgcattacggctcagatcaggtgtgcagaaacaccactcattgataactggttacggggtgtgaattatyttgctgtgtaatagcccagtggttactcagctcttctgtgactattgcaatacaaggtcatccaactgtcacacataagagacgtaggaacaggcactgtgtgtggsatgggcagcctccacattctttttaccttcagaggaaacygtggctctaggagatgatcttgatttgaggggagagcagccttcatgttacgtagctgcatctgcrtcaacaccttgatgttcttgggagcaaagtggagaccattactgctgttatgttgaactcagtccatttccttgctgttggcakacc

SEQ ID NO: 10787 - DNA, 600 bp, Chicken  19866894212844_2
agtaagcaagttgattttggagatctgagccattgctagttggagtgtatggagagcagtagcacacacacgtttcttgaattcctgtgctaagttagcttaattggatttggtgtgggtacctgcattacggctcagatcaggtgtgcagaaacaccactcattgataactggttacggggtgtgaattatyttgctgtgtaatagcccagtggttactcagctcttctgtgactattgcaatacaaggtcatccaactgtcacacataagagacgtaggaacaggcactgtgtgtggsatgggcagcctccacattctttttaccttcagaggaaacygtggctctaggagatgatcttgatttgaggggagagcagccttcatgttacgtagctgcatctgcrtcaacaccttgatgttcttgggagcaaagtggagaccattactgctgttatgttgaactcagtccatttccttgctgttggcakaccagcaaacttatgatataagacattaattcwaaaacaaatgttaaattctagtatattgytgcagatgggatggggcaggggcaggtgactgtgactgttttaaagcg

SEQ ID NO: 10788 - DNA, 600 bp, Chicken  19866894212844_3
tggagtgtatggagagcagtagcacacacacgtttcttgaattcctgtgctaagttagcttaattggatttggtgtgggtacctgcattacggctcagatcaggtgtgcagaaacaccactcattgataactggttacggggtgtgaattatyttgctgtgtaatagcccagtggttactcagctcttctgtgactattgcaatacaaggtcatccaactgtcacacataagagacgtaggaacaggcactgtgtgtggsatgggcagcctccacattctttttaccttcagaggaaacygtggctctaggagatgatcttgatttgaggggagagcagccttcatgttacgtagctgcatctgcrtcaacaccttgatgttcttgggagcaaagtggagaccattactgctgttatgttgaactcagtccatttccttgctgttggcakaccagcaaacttatgatataagacattaattcwaaaacaaatgttaaattctagtatattgytgcagatgggatggggcaggggcaggtgactgtgactgttttaaagcgttctgctgtcttaatgcgcctacttagcatttctctgact

SEQ ID NO: 10789 - DNA, 600 bp, Chicken  19866894212844_4
gatttggtgtgggtacctgcattacggctcagatcaggtgtgcagaaacaccactcattgataactggttacggggtgtgaattatyttgctgtgtaatagcccagtggttactcagctcttctgtgactattgcaatacaaggtcatccaactgtcacacataagagacgtaggaacaggcactgtgtgtggsatgggcagcctccacattctttttaccttcagaggaaacygtggctctaggagatgatcttgatttgaggggagagcagccttcatgttacgtagctgcatctgcrtcaacaccttgatgttcttgggagcaaagtggagaccattactgctgttatgttgaactcagtccatttccttgctgttggcakaccagcaaacttatgatataagacattaattcwaaaacaaatgttaaattctagtatattgytgcagatgggatggggcaggggcaggtgactgtgactgttttaaagcgttctgctgtcttaatgcgcctacttagcatttctctgactctgttcctttgacctatctgctgttgtatttgaaacccgtatcagttacactattaggattaaaac

SEQ ID NO: 10790 - DNA, 592 bp, Chicken  19866894212844_5
atyttgctgtgtaatagcccagtggttactcagctcttctgtgactattgcaatacaaggtcatccaactgtcacacataagagacgtaggaacaggcactgtgtgtggsatgggcagcctccacattctttttaccttcagaggaaacygtggctctaggagatgatcttgatttgaggggagagcagccttcatgttacgtagctgcatctgcrtcaacaccttgatgttcttgggagcaaagtggagaccattactgctgttatgttgaactcagtccatttccttgctgttggcakaccagcaaacttatgatataagacattaattcwaaaacaaatgttaaattctagtatattgytgcagatgggatggggcaggggcaggtgactgtgactgttttaaagcgttctgctgtcttaatgcgcctacttagcatttctctgactctgttcctttgacctatctgctgttgtatttgaaacccgtatcagttacactattaggattaaaacacagtgctttgtttttacaaatggggaccacgtggaaaattgtttttataatcttaaaattgtgagattatgaagg

SEQ ID NO: 10791 - DNA, 559 bp, Chicken  19866894212844_6
ctcttctgtgactattgcaatacaaggtcatccaactgtcacacataagagacgtaggaacaggcactgtgtgtggsatgggcagcctccacattctttttaccttcagaggaaacygtggctctaggagatgatcttgatttgaggggagagcagccttcatgttacgtagctgcatctgcrtcaacaccttgatgttcttgggagcaaagtggagaccattactgctgttatgttgaactcagtccatttccttgctgttggcakaccagcaaacttatgatataagacattaattcwaaaacaaatgttaaattctagtatattgytgcagatgggatggggcaggggcaggtgactgtgactgttttaaagcgttctgctgtcttaatgcgcctacttagcatttctctgactctgttcctttgacctatctgctgttgtatttgaaacccgtatcagttacactattaggattaaaacacagtgctttgtttttacaaatggggaccacgtggaaaattgtttttataatcttaaaattgtgagattatgaagg

SEQ ID NO: 10792 - DNA, 530 bp, Chicken  19866894212844_7
atccaactgtcacacataagagacgtaggaacaggcactgtgtgtggsatgggcagcctccacattctttttaccttcagaggaaacygtggctctaggagatgatcttgatttgaggggagagcagccttcatgttacgtagctgcatctgcrtcaacaccttgatgttcttgggagcaaagtggagaccattactgctgttatgttgaactcagtccatttccttgctgttggcakaccagcaaacttatgatataagacattaattcwaaaacaaatgttaaattctagtatattgytgcagatgggatggggcaggggcaggtgactgtgactgttttaaagcgttctgctgtcttaatgcgcctacttagcatttctctgactctgttcctttgacctatctgctgttgtatttgaaacccgtatcagttacactattaggattaaaacacagtgctttgtttttacaaatggggaccacgtggaaaattgtttttataatcttaaaattgtgagattatgaagg

SEQ ID NO: 10793 - DNA, 600 bp, Chicken  19866894212854_1
atgaatttggtttctctacaagtgaagaaaagcacagcccaggaggatcacacacacctcaaactcctgaatgtggcattaagaggtgcttctaaataaaggcactttgaaaaagaaggaatctgagccatgaaaagcgagtgtttacaggaaggaacctgctctgcctggatctcactgctgttgaagcaaagcccctttgaagttctccgtgcctgcattgttccaactgttaaatggtaaaacaaactttccaggggggtaaaatacaactccaagacttatagctatgcagtagckccagggagaaaaggcagccagcagacagggatgtcacgtactcgcttccctctgctgattccatgaagtwttctgagttactggtgaagtaactccaactacagaaacagtagcatctgtagccacattaggcatktgcatcagccagagtaacggtcccccaaaaaaggagaggcacccaagatgacagaagatgctgttgtgtaattcctgcgtagtgctaacggtcagggttggccttctgtaagttaaacaggtaccatctatttggaagttcagtggtggaaaggtgctctacag

SEQ ID NO: 10794 - DNA, 600 bp, Chicken  19866894212854_2
atgtggcattaagaggtgcttctaaataaaggcactttgaaaaagaaggaatctgagccatgaaaagcgagtgtttacaggaaggaacctgctctgcctggatctcactgctgttgaagcaaagcccctttgaagttctccgtgcctgcattgttccaactgttaaatggtaaaacaaactttccaggggggtaaaatacaactccaagacttatagctatgcagtagckccagggagaaaaggcagccagcagacagggatgtcacgtactcgcttccctctgctgattccatgaagtwttctgagttactggtgaagtaactccaactacagaaacagtagcatctgtagccacattaggcatktgcatcagccagagtaacggtcccccaaaaaaggagaggcacccaagatgacagaagatgctgttgtgtaattcctgcgtagtgctaacggtcagggttggccttctgtaagttaaacaggtaccatctatttggaagttcagtggtggaaaggtgctctacagactcagtcagcgataaaaagtgcctcagaagagaagggacatgtgcttcagaggaacaagtatgggtagc

SEQ ID NO: 10795 - DNA, 600 bp, Chicken  19866894212854_3
gcgagtgtttacaggaaggaacctgctctgcctggatctcactgctgttgaagcaaagcccctttgaagttctccgtgcctgcattgttccaactgttaaatggtaaaacaaactttccaggggggtaaaatacaactccaagacttatagctatgcagtagckccagggagaaaaggcagccagcagacagggatgtcacgtactcgcttccctctgctgattccatgaagtwttctgagttactggtgaagtaactccaactacagaaacagtagcatctgtagccacattaggcatktgcatcagccagagtaacggtcccccaaaaaaggagaggcacccaagatgacagaagatgctgttgtgtaattcctgcgtagtgctaacggtcagggttggccttctgtaagttaaacaggtaccatctatttggaagttcagtggtggaaaggtgctctacagactcagtcagcgataaaaagtgcctcagaagagaagggacatgtgcttcagaggaacaagtatgggtagcagaagcttgtgcctgtcacatctgcaggacacacaatgtgatgcaccggcacagggagctcagaga

SEQ ID NO: 10796 - DNA, 600 bp, Chicken  19866894212861_1
tcccctaatttctttcttattaaactgcccttagtgcatgaatttttacgcttttctatttgcagcatctcttgcagactccagccccatccacaccatccaagacctgaggattaccaacactgctgtcaatagtttgaagctgtcttggagaaggcttccaggagcaactcactataagatatcctgggtgccattcagtggtaagcatccttctcccttaggtgcagtgtgaggacaaagaacaaaggtcaccagaaaacttaactcggtccttttctcacagatcatcagggtggrtggaggctataatatctccagagacaggttgaaggcctgaaacttggccaagttttcatctgtaatctagagatcagttgaatttaggtgtagttgtattcaaaaagtcagggaagggattcccttccagcactgtatatgatttattttccaacctgagaaattctatgattctatgcagagggttgttggttagggtagtatggttaggttgtggttggactcaatgatctttaaggtctttcccaacctgagcaattctgtgccaggccagagaggaaaacagctgcagcaataatt

SEQ ID NO: 10797 - DNA, 575 bp, Chicken  19866894212862_1
atgcttactataaacccttaatatattttggtgggttctggataaaaaagggatcttgtttgtccagtgtgaaagcagttaagaaccacaataagaccattttaagtgaggaagaatggctccagtcattgttaaagctgagaacctccttggtttgccaataattgcacatcagaatttaactttccaccagacatcatggccagatccactttacccaccacacaggggaaactgtgttcccctctgggagcaaacacttttttttagaggccaggataacagaaactgatggcttaragtgccagaaagcatctgatggaggacttgtaagagaccactgtgcacgttttgctcttttctgtggaaacgtattgcaccaaggtaaccttcttcattattcagatgtatgaagaaggcctctgaagtgaaatgtttgccaggatgtccttttccctctttgcagtgtgtgtgtttttgggatatgtccacatcctttttgaatcagagctgaagttgataaaataatgacagcactagagggaaaaatgccatctggtctgcataactgctgg

SEQ ID NO: 10798 - DNA, 600 bp, Chicken  19866894212863_1
tactacagagctgtgcttatctgtagcagaacaaatccatcaagaagtgctcagaggggaaagctgacaagaaagggaaaggtacatcaaaacatgagtgacaatcctgttgacttagcctcaatcattcttaaggtaccatattgtaaatacatccacacatcagtgtacattctttgatatgataagaaaaccagggcagaactgataaatttttcagtttagacacagaacaaatgaaattgtaaaatctgtacagtataaaaccacactgctccagaactgatgttcagcatacaytgaaatcagtcttgtggaatgcaggttataactcatattttactgggtttcttctggcttatcatatgcccctgtatacatactacagtccctctccctccccataatgatgctaacagttttgatgacataagaaccctgtctcatatgaatgccatatgaacatgacttggacctcatccacctacataacatttaaaatacttctcctatttgaagcaagacttggaattccctctcacctgttactgccaagtcaaagtaagaaagactaggtagtaagggttcagatgcagtgag

SEQ ID NO: 10799 - DNA, 600 bp, Chicken  19866894212867_1
tgcccatgaccttcctctaattatttggaatccatatcatgaacattgctgcaaaagacagccaatgccaggtgttcaaattaataagctgaaccaggttttccaatcggtgctctgggctgtctgccattcctctatctctttgacatctgataaaataaccctgggctttgtttgtcaaaggtattttgcccacatgctattgatagcactttggaaaggcttttgttgctgctgttgttgtttgtttttcctactagaaacagggaaaaaataataaatgatctgatgggaaaaccmgtagggaataaaagtaatcagaatgttggtgttggtagaagacagtttctaaaggtgatcacaatcaccactggagatcaaggtgtagtttgtaatggaagtgtaactctgactcaaaatacaaggtgttttggtgctaccaagtctttaatctggactggaatggacaagaacaactccccatctaccaaccatttgaccatgcagctgaataaagtcatatttaactgtaggctgtgtgtgcgtgagcatgtcatcactgggtgttgaaactaggtgatccttaaggtttcttccaac

SEQ ID NO: 10800 - DNA, 600 bp, Chicken  19866894212874_1
cagccagcagagggccgggaatttgggggagatgatttaattaggcaccaagctcttggatgcatttcctgagagtttttagaaaatcaggaattcagcttacaccgggcagctatgactgagccaggaaaaactgacttctgtacaatgccagatgaaatgtgtacatacataaaagggcctctgttacttggaggatttgggataagcaggccaccagtgagaatctctccaaagctcaggaatccttcctgatccccaaggtcaaagcccaggtgaaagaaactgaagccagcactrttcttacaatgatgccaacttctaccaaatttgaagcaaygcagccacttgcatcaaatctctaagtatggctggtacttgagctctaaattgtagaaggggatttttctattttcaccaataaaatccaagagtttccattctgaatcagtaaattgcatgtctgtattgctctctaacatttaaagctgtgtagttttgcttgagaagtggcttatccagtgtctttcagctatctgcacaaaggggagagcccatcattttaaagggaatctcatttccattgcctagctcaagttt

SEQ ID NO: 10801 - DNA, 600 bp, Chicken  19866894212874_2
ttaggcaccaagctcttggatgcatttcctgagagtttttagaaaatcaggaattcagcttacaccgggcagctatgactgagccaggaaaaactgacttctgtacaatgccagatgaaatgtgtacatacataaaagggcctctgttacttggaggatttgggataagcaggccaccagtgagaatctctccaaagctcaggaatccttcctgatccccaaggtcaaagcccaggtgaaagaaactgaagccagcactrttcttacaatgatgccaacttctaccaaatttgaagcaaygcagccacttgcatcaaatctctaagtatggctggtacttgagctctaaattgtagaaggggatttttctattttcaccaataaaatccaagagtttccattctgaatcagtaaattgcatgtctgtattgctctctaacatttaaagctgtgtagttttgcttgagaagtggcttatccagtgtctttcagctatctgcacaaaggggagagcccatcattttaaagggaatctcatttccattgcctagctcaagtttaagactcaaggctcgcaggaaagaaaatgaaaatgagatg

SEQ ID NO: 10802 - DNA, 600 bp, Chicken  19866894212876_1
ttatagcattcaatgtctatgggaaagggacctactctatgttctctgccttgaattccttatcaaaaatgagtctgatcaaaacagtttagtctgtaaatcttagtttagtctgtaaatatctgaactgaagagcctacgatcttttttcactttggaaaaagaaaaaataagaacaacctgaagagtctggtagcatctctacatttatcaaaaataaataaccctatcttttcttctcatcttctctcatgtccgtaaccaagtgcttatttatataaaaaacaaaaacaaacaagraaaaaatggaaagaatcatagaatcatagaattactcaggctgggaaggacctcaaagatcatcaagtccaaccgccacctaaccatagtaccctaactctaacaaccctccactaaatcctatctctgagcaccacatccaaacagctcttaaacacatccaggggacggtgactcaaccacctccctggggagcctattccaatgtttaaccactctttctgtaaagaagtgttttctaacgtccaacctaaacttaccttggtgcaacttgaggccatttcccctcgtcttgtcacc

SEQ ID NO: 10803 - DNA, 600 bp, Chicken  19866894212879_1
gcaaactttaaactaagactcagaaattctaattttggcactaaacagcagaatttttctacatataagcttgaaaatgattatctgtctcttctttccttatttacaatgtggcagacatattaactgttcagtgccactagaaatgattcaaagtgccctgttctgcctccagcatgcattacaaaagggtacagaactcttctaggtcatgtgtcacatctggcaatcacatataaatttctcagatactcagtgccatctttaacgtcattagacattcatcatctgaataacatycttagtggctgattatcagttggacacaaatcctaagtcaactgctcttgaamaaacacctactgccatttgagacactgagaaccaagtaacaccagcatagaggtctggatcttcccggggaccataagaagcggggctcaccccagagtccctcagggcagggcctaacagctggaggctgttccactgccccagacagtaatgagcagtgaagacactggggcagtccaaacctcagcttcctgaggatcaggacaggttgaggctaagataatcttcaggccagggtcagaagaa

SEQ ID NO: 10804 - DNA, 600 bp, Chicken  19866894212879_2
tttttctacatataagcttgaaaatgattatctgtctcttctttccttatttacaatgtggcagacatattaactgttcagtgccactagaaatgattcaaagtgccctgttctgcctccagcatgcattacaaaagggtacagaactcttctaggtcatgtgtcacatctggcaatcacatataaatttctcagatactcagtgccatctttaacgtcattagacattcatcatctgaataacatycttagtggctgattatcagttggacacaaatcctaagtcaactgctcttgaamaaacacctactgccatttgagacactgagaaccaagtaacaccagcatagaggtctggatcttcccggggaccataagaagcggggctcaccccagagtccctcagggcagggcctaacagctggaggctgttccactgccccagacagtaatgagcagtgaagacactggggcagtccaaacctcagcttcctgaggatcaggacaggttgaggctaagataatcttcaggccagggtcagaagaaatgcatccatgctttggcataggcatagttgaaaatctactgcagcatagctc

SEQ ID NO: 10805 - DNA, 600 bp, Chicken  19866894212897_1
aatactttccagaccctactggcttttctttgtatctctgcttcaaagtatacattgttgttgcccactaaatgctaagtgatatactttcttttcacacggtagtttaagaaagcattgccagttcttatataaatgatgtcaacattaatgatgtatatttttattaatgacaaagacatttaaaactattaaagatgttttaagtctttcttgacaaaagacaagtaattggaaagttgaagagttgtaaactttttatgtgcccttgagctgacgtcaccaataaaaccatcctaygacaactttaagccaaagaaattagggcagtagctttyaaacagaaccaagtttgaaagaaatggtcttctatctcctgtaaaatcttggaaacagaagaatatacgctcagttaacagacatttctacacaatgaccaataattcagagacacttgtaagacaagattatcagtgatttttatttattttaagcaaatcaaatttttgttaaaatttaaaacattaacgccagcaaagaccagattgttcagacagttctcctgagaggtagatgtgaactgaccttgataaaaggcaa

SEQ ID NO: 10806 - DNA, 600 bp, Chicken  19866894212897_2
tgcttcaaagtatacattgttgttgcccactaaatgctaagtgatatactttcttttcacacggtagtttaagaaagcattgccagttcttatataaatgatgtcaacattaatgatgtatatttttattaatgacaaagacatttaaaactattaaagatgttttaagtctttcttgacaaaagacaagtaattggaaagttgaagagttgtaaactttttatgtgcccttgagctgacgtcaccaataaaaccatcctaygacaactttaagccaaagaaattagggcagtagctttyaaacagaaccaagtttgaaagaaatggtcttctatctcctgtaaaatcttggaaacagaagaatatacgctcagttaacagacatttctacacaatgaccaataattcagagacacttgtaagacaagattatcagtgatttttatttattttaagcaaatcaaatttttgttaaaatttaaaacattaacgccagcaaagaccagattgttcagacagttctcctgagaggtagatgtgaactgaccttgataaaaggcaaaaaaacagtagaattgaatttgaatgcaaatgtattaa

SEQ ID NO: 10807 - DNA, 600 bp, Chicken  19866894212897_3
gaaagaaatggtcttctatctcctgtaaaatcttggaaacagaagaatatacgctcagttaacagacatttctacacaatgaccaataattcagagacacttgtaagacaagattatcagtgatttttatttattttaagcaaatcaaatttttgttaaaatttaaaacattaacgccagcaaagaccagattgttcagacagttctcctgagaggtagatgtgaactgaccttgataaaaggcaaaaaaacagtagaattgaatttgaatgcaaatgtattaatgccaattgttttctygtttcactactggactctgaggagctattttcaagcaaccaagtttaaatactttttcaggctttaattaatctcaacacctttccccattgacacactattactgagagagagaaggcaattccctaatgcttaaattgaatatatacacatatatatgtrtatatatatatatatatatatttaaaacttcagcaagagtgtgtttttggacatttttgcactgatagaaaaaatttggcatttgtcagctatgctttcctgagatgacgaataacttttataaccactcttggatct

SEQ ID NO: 10808 - DNA, 600 bp, Chicken  19866894212897_4
ttaaaacattaacgccagcaaagaccagattgttcagacagttctcctgagaggtagatgtgaactgaccttgataaaaggcaaaaaaacagtagaattgaatttgaatgcaaatgtattaatgccaattgttttctygtttcactactggactctgaggagctattttcaagcaaccaagtttaaatactttttcaggctttaattaatctcaacacctttccccattgacacactattactgagagagagaaggcaattccctaatgcttaaattgaatatatacacatatatatgtrtatatatatatatatatatatttaaaacttcagcaagagtgtgtttttggacatttttgcactgatagaaaaaatttggcatttgtcagctatgctttcctgagatgacgaataacttttataaccactcttggatctcaccggtgtgtagacagatctgattttctttagtgagatggaaaaaatatggaaaacttaggattttcctaatttacacatttttacttttttaataagttgttcacaagacaagccctcaccactttctagatctacttattcacagaagatttgctatgt

SEQ ID NO: 10809 - DNA, 599 bp, Chicken  19866894212901_1
  misc_feature (1)..(74): n is any nucleotide
nnnnnnnnnnnnnnnnnnnnnnnnnnnnnnnnnnnnnnnnnnnnnnnnnnnnnnnnnnnnnnnnnnnnnnnnnntttgcagaatagaattctccacgtttttctaaaactatctgtttataattatattctttatgatgattgtcaaactgttttctttatagatttaattcctgaaggtacagttgtcatctgtccctcaaagaatttgtcaaaggaggtaaacaaagaaaatcaaaagcctcttagcctgtctgatgcacacatagagattgagtcccagctgagcatctcttcagaygaaatagaagaaggagaaatcataagtagtgatgaagacgaggaaaaatctaaatcagaaggacactctgaaaatccacaaaagtcgagaccaaaaacttctcctgaaacacggaatttgaccagcagtccacgaaatcaaaagaacaaaactatacactgcaatgaggataatggaaaaattgtttctgtgaaagtaagtacgaagaacagagcgaaacataaaaatcagactttcaggtcttcaaaggaaatgaagaaaaataaaactgtgagcattacttgtcttgaaaaaatagt

SEQ ID NO: 10810 - DNA, 599 bp, Chicken  19866894212907_1
  misc_feature (1)..(157): n is any nucleotide
nnnnnnnnnnnnnnnnnnnnnnnnnnnnnnnnnnnnnnnnnnnnnnnnnnnnnnnnnnnnnnnnnnnnnnnnnnnnnnnnnnnnnnnnnnnnnnnnnnnnnnnnnnnnnnnnnnnnnnnnnnnnnnnnnnnnnnnnnnnnnnnnnnnnnnnnnnnnngtactgctaccaactatgcaagtaatacaacagtctactgggaaagcaaaaaaaaaaaaaaaaaaagaatatgggtatggtgcaactccattctttacactatgagctggatgatgtctgctgaccttatttcaaattcttcrgttttaaattagcctrctaagatcatgtaaatgtggtttcagagtgagccagttattgaaggctttasaaagtcatcttgcrggtatttacaaagtctaggcaagttacatygggtccttctcmcttcytgggagaaagagaagtttgttcctacagaagatgatctcaggtttccagctggcaaccaactttaggtgctctgaattgccccaagaggaacatacctctctagcaaataagactcacctgcttaggttaaagaaggcttttatgaatatcctgcccccagatccctgtc

SEQ ID NO: 10811 - DNA, 599 bp, Chicken  19866894212907_2
  misc_feature (1)..(141): n is any nucleotide
nnnnnnnnnnnnnnnnnnnnnnnnnnnnnnnnnnnnnnnnnnnnnnnnnnnnnnnnnnnnnnnnnnnnnnnnnnnnnnnnnnnnnnnnnnnnnnnnnnnnnnnnnnnnnnnnnnnnnnnnnnnnnnnnnnnnnnnnnnnnngtactgctaccaactatgcaagtaatacaacagtctactgggaaagcaaaaaaaaaaaaaaaaaaagaatatgggtatggtgcaactccattctttacactatgagctggatgatgtctgctgaccttatttcaaattcttcrgttttaaattagcctrctaagatcatgtaaatgtggtttcagagtgagccagttattgaaggctttasaaagtcatcttgcrggtatttacaaagtctaggcaagttacatygggtccttctcmcttcytgggagaaagagaagtttgttcctacagaagatgatctcaggtttccagctggcaaccaactttaggtgctctgaattgccccaagaggaacatacctctctagcaaataagactcacctgcttaggttaaagaaggcttttatgaatatcctgcccccagatccctgtcctacattcctcaccat

SEQ ID NO: 10812 - DNA, 599 bp, Chicken  19866894212907_3
  misc_feature (1)..(89): n is any nucleotide
nnnnnnnnnnnnnnnnnnnnnnnnnnnnnnnnnnnnnnnnnnnnnnnnnnnnnnnnnnnnnnnnnnnnnnnnnnnnnnnnnnnnnnnnngtactgctaccaactatgcaagtaatacaacagtctactgggaaagcaaaaaaaaaaaaaaaaaaagaatatgggtatggtgcaactccattctttacactatgagctggatgatgtctgctgaccttatttcaaattcttcrgttttaaattagcctrctaagatcatgtaaatgtggtttcagagtgagccagttattgaaggctttasaaagtcatcttgcrggtatttacaaagtctaggcaagttacatygggtccttctcmcttcytgggagaaagagaagtttgttcctacagaagatgatctcaggtttccagctggcaaccaactttaggtgctctgaattgccccaagaggaacatacctctctagcaaataagactcacctgcttaggttaaagaaggcttttatgaatatcctgcccccagatccctgtcctacattcctcaccatcagtttgctatttccatacctccaccagcatgtctattacacttatactcta

SEQ ID NO: 10813 - DNA, 599 bp, Chicken  19866894212907_4
  misc_feature (1)..(75): n is any nucleotide
nnnnnnnnnnnnnnnnnnnnnnnnnnnnnnnnnnnnnnnnnnnnnnnnnnnnnnnnnnnnnnnnnnnnnnnnnnngtactgctaccaactatgcaagtaatacaacagtctactgggaaagcaaaaaaaaaaaaaaaaaaagaatatgggtatggtgcaactccattctttacactatgagctggatgatgtctgctgaccttatttcaaattcttcrgttttaaattagcctrctaagatcatgtaaatgtggtttcagagtgagccagttattgaaggctttasaaagtcatcttgcrggtatttacaaagtctaggcaagttacatygggtccttctcmcttcytgggagaaagagaagtttgttcctacagaagatgatctcaggtttccagctggcaaccaactttaggtgctctgaattgccccaagaggaacatacctctctagcaaataagactcacctgcttaggttaaagaaggcttttatgaatatcctgcccccagatccctgtcctacattcctcaccatcagtttgctatttccatacctccaccagcatgtctattacacttatactctataacaggacatgtg

SEQ ID NO: 10814 - DNA, 599 bp, Chicken  19866894212907_5
  misc_feature (1)..(45): n is any nucleotide
nnnnnnnnnnnnnnnnnnnnnnnnnnnnnnnnnnnnnnnnnnnnngtactgctaccaactatgcaagtaatacaacagtctactgggaaagcaaaaaaaaaaaaaaaaaaagaatatgggtatggtgcaactccattctttacactatgagctggatgatgtctgctgaccttatttcaaattcttcrgttttaaattagcctrctaagatcatgtaaatgtggtttcagagtgagccagttattgaaggctttasaaagtcatcttgcrggtatttacaaagtctaggcaagttacatygggtccttctcmcttcytgggagaaagagaagtttgttcctacagaagatgatctcaggtttccagctggcaaccaactttaggtgctctgaattgccccaagaggaacatacctctctagcaaataagactcacctgcttaggttaaagaaggcttttatgaatatcctgcccccagatccctgtcctacattcctcaccatcagtttgctatttccatacctccaccagcatgtctattacacttatactctataacaggacatgtgaaggacagatttccagcctttaagttgaat

SEQ ID NO: 10815 - DNA, 599 bp, Chicken  19866894212907_6
  misc_feature (1)..(33): n is any nucleotide
nnnnnnnnnnnnnnnnnnnnnnnnnnnnnnnnngtactgctaccaactatgcaagtaatacaacagtctactgggaaagcaaaaaaaaaaaaaaaaaaagaatatgggtatggtgcaactccattctttacactatgagctggatgatgtctgctgaccttatttcaaattcttcrgttttaaattagcctrctaagatcatgtaaatgtggtttcagagtgagccagttattgaaggctttasaaagtcatcttgcrggtatttacaaagtctaggcaagttacatygggtccttctcmcttcytgggagaaagagaagtttgttcctacagaagatgatctcaggtttccagctggcaaccaactttaggtgctctgaattgccccaagaggaacatacctctctagcaaataagactcacctgcttaggttaaagaaggcttttatgaatatcctgcccccagatccctgtcctacattcctcaccatcagtttgctatttccatacctccaccagcatgtctattacacttatactctataacaggacatgtgaaggacagatttccagcctttaagttgaatgtgctttgcaga

SEQ ID NO: 10816 - DNA, 599 bp, Chicken  19866894212907_7
  misc_feature (1)..(28): n is any nucleotide
nnnnnnnnnnnnnnnnnnnnnnnnnnnngtactgctaccaactatgcaagtaatacaacagtctactgggaaagcaaaaaaaaaaaaaaaaaaagaatatgggtatggtgcaactccattctttacactatgagctggatgatgtctgctgaccttatttcaaattcttcrgttttaaattagcctrctaagatcatgtaaatgtggtttcagagtgagccagttattgaaggctttasaaagtcatcttgcrggtatttacaaagtctaggcaagttacatygggtccttctcmcttcytgggagaaagagaagtttgttcctacagaagatgatctcaggtttccagctggcaaccaactttaggtgctctgaattgccccaagaggaacatacctctctagcaaataagactcacctgcttaggttaaagaaggcttttatgaatatcctgcccccagatccctgtcctacattcctcaccatcagtttgctatttccatacctccaccagcatgtctattacacttatactctataacaggacatgtgaaggacagatttccagcctttaagttgaatgtgctttgcagatttca

SEQ ID NO: 10817 - DNA, 472 bp, Chicken  19866894212907_8
aattgccccaagaggaacatacctctctagcaaataagactcacctgcttaggttaaagaaggcttttatgaatatcctgcccccagatccctgtcctacattcctcaccatcagtttgctatttccatacctccaccagcatgtctattacacttatactctataacaggacatgtgaaggacagatttccagcctttaagttgaatgtgctttgcagatttcagttcagaccttccacactgtctattgcttgttttatattaaaggcctgttttgttttgttttatttttttcttawattagtggtgttttctgtgcctgatggtgtgtgaaatgacatgccaccctgcattatcagcacataaataattcacattgccactgtatataccacagtaaatgtacttacaagaattagggctttcaaagcattatttgacctccatgacctttttattttcaacggatga

SEQ ID NO: 10818 - DNA, 600 bp, Chicken  19866894212908_1
cagaggtgggttcatgccaacctcatgaagttcaaaaaggccaagtgtaaggtcttgcacctggattggggcaatcccaagaatagatacagattgaatcatataatcataaggttggaaaggacctacaatattatctagtacaactgtcctcccattacccttgctaccacaagccactaaaccatatctcatagctcctcatccagacgcctcttccagaacactgccaaaaaaagcgactccatcacctccctgggaaggccattccagtgcctgaccactctctgagagaaagtktttccttatgtctratctaaacctcctctggtacaacttgtggtcatttcctcaggtcctgtttgttgccttggagaagaggccaaaaccctcctcatcacaatctcccttcaggaagttgtagagtgcagtaaggtctcctctgagcctcctcttctccagactaaacaatcccagctccctcagccactcctcataagatttgtgctccagacccctcactggtttcattgctcttctctggacacattccagggcctcagtgtctttcttgtagtgaggggcccaaaactgaacaca

SEQ ID NO: 10819 - DNA, 600 bp, Chicken  19866894212908_2
tgccaacctcatgaagttcaaaaaggccaagtgtaaggtcttgcacctggattggggcaatcccaagaatagatacagattgaatcatataatcataaggttggaaaggacctacaatattatctagtacaactgtcctcccattacccttgctaccacaagccactaaaccatatctcatagctcctcatccagacgcctcttccagaacactgccaaaaaaagcgactccatcacctccctgggaaggccattccagtgcctgaccactctctgagagaaagtktttccttatgtctratctaaacctcctctggtacaacttgtggtcatttcctcaggtcctgtttgttgccttggagaagaggccaaaaccctcctcatcacaatctcccttcaggaagttgtagagtgcagtaaggtctcctctgagcctcctcttctccagactaaacaatcccagctccctcagccactcctcataagatttgtgctccagacccctcactggtttcattgctcttctctggacacattccagggcctcagtgtctttcttgtagtgaggggcccaaaactgaacacagtacttgaggtgca

SEQ ID NO: 10820 - DNA, 592 bp, Chicken  19866894212908_3
ctctgctcccatgagatgccacctggagtaacatgtccagttctggggcccccaatacaaggatgtcatcgagctgttggaattggtccagaggaaggacacgaagatgatcagagagctggagcacctacccttcaaggatagactgagagagctgggactcttcagcctggagaagagaaggttccagaaggaccttataataaccttctagtacctgaaggggacctacaggagagctggggaaggattttttagaaaggcatgtagcaacaagatgaggggaaatggttataaacwktaagagagtaaatttagaatagacatttggaagaaatttttttctgtgagggtggtgaggcacttgaacaggttgcccagagaagttgtggaggtctcaccttggaagcattcaaggccaggatggatgaggctttgagcaacctagtctagagggaggtgtccctgcctatagcaggtgattggaactagatattaacggtcctttccaatgcacaccattctatgattatgattctatgatttaattttgaagtttaaaatttctcggcaaaattatttgctgcaattt

SEQ ID NO: 10821 - DNA, 591 bp, Chicken  19866894212908_4
tctgctcccatgagatgccacctggagtaacatgtccagttctggggcccccaatacaaggatgtcatcgagctgttggaattggtccagaggaaggacacgaagatgatcagagagctggagcacctacccttcaaggatagactgagagagctgggactcttcagcctggagaagagaaggttccagaaggaccttataataaccttctagtacctgaaggggacctacaggagagctggggaaggattttttagaaaggcatgtagcaacaagatgaggggaaatggttataaacwktaagagagtaaatttagaatagacatttggaagaaatttttttctgtgagggtggtgaggcacttgaacaggttgcccagagaagttgtggaggtctcaccttggaagcattcaaggccaggatggatgaggctttgagcaacctagtctagagggaggtgtccctgcctatagcaggtgattggaactagatattaacggtcctttccaatgcacaccattctatgattatgattctatgatttaattttgaagtttaaaatttctcggcaaaattatttgctgcaattt

SEQ ID NO: 10822 - DNA, 600 bp, Chicken  19866894212910_1
tcatagcgcagtctccagtgattttaaagtcctttgttgagctaacttgcactcatacctttctgtgtattcttaccgttgttttcctaagtgcactgatctgcatttgttcatactgcatttcatctgacatgtaagtagcccttgtaagatccccctgcagcatctcataggcaaataattttgattagaaaacttttctcttttttccccataactttcatggttatatgaaagggcccagatcctcttctaaggactatctgcttatccttgttctttgcttgtaagattttgcaygattattaattcacagtggactccactctcgtgttccatgacagctccytttcctgaacagcttttgttgtttatgttgaaagaatttggaaattctgatgccccactatgcactctgggccacactgatccatatccttgttcatgactgacaaactggcaagcactcctgaagcataacatccatctgtgagaatcatttggattttttcctcagtttatcacatttattcagctgtctataaaaatctattctttgtgtcatttcaattaattcactctgtatccttgtccagctta

SEQ ID NO: 10823 - DNA, 600 bp, Chicken  19866894212910_2
cactcatacctttctgtgtattcttaccgttgttttcctaagtgcactgatctgcatttgttcatactgcatttcatctgacatgtaagtagcccttgtaagatccccctgcagcatctcataggcaaataattttgattagaaaacttttctcttttttccccataactttcatggttatatgaaagggcccagatcctcttctaaggactatctgcttatccttgttctttgcttgtaagattttgcaygattattaattcacagtggactccactctcgtgttccatgacagctccytttcctgaacagcttttgttgtttatgttgaaagaatttggaaattctgatgccccactatgcactctgggccacactgatccatatccttgttcatgactgacaaactggcaagcactcctgaagcataacatccatctgtgagaatcatttggattttttcctcagtttatcacatttattcagctgtctataaaaatctattctttgtgtcatttcaattaattcactctgtatccttgtccagcttagtggagagtagctctttcagtccccagagacttctaaaattcataccaa

SEQ ID NO: 10824 - DNA, 600 bp, Chicken  19866894212910_3
tcatttggattttttcctcagtttatcacatttattcagctgtctataaaaatctattctttgtgtcatttcaattaattcactctgtatccttgtccagcttagtggagagtagctctttcagtccccagagacttctaaaattcataccaaattttcagctttttcctctcttggtactaaggctggtttaaatagtatgcagcatactacagaccctgtattttatttagagcttctgcatgaatagcatctggtcccatgcatttgttactatttatttcactaactctttcaaarccttttccactggcacttgaatttgaaacagctactgagactcatctcaggatggtgcaggtgagggatcaggccttaaatatcatgtagtttctttttatgcctcttttgcgcgttagaaataaatagtaaaccaatcatctgagcattttcggaagtctatatttgagcctkagcattttcacttttttttttcttttcttttcttttyttttttttccccagggagaaggcgttaggaagatagctatggatagcacatggtgtttcttatcctgaatatgttgtaattaatttagt

SEQ ID NO: 10825 - DNA, 600 bp, Chicken  19866894212910_4
tggtactaaggctggtttaaatagtatgcagcatactacagaccctgtattttatttagagcttctgcatgaatagcatctggtcccatgcatttgttactatttatttcactaactctttcaaarccttttccactggcacttgaatttgaaacagctactgagactcatctcaggatggtgcaggtgagggatcaggccttaaatatcatgtagtttctttttatgcctcttttgcgcgttagaaataaatagtaaaccaatcatctgagcattttcggaagtctatatttgagcctkagcattttcacttttttttttcttttcttttcttttyttttttttccccagggagaaggcgttaggaagatagctatggatagcacatggtgtttcttatcctgaatatgttgtaattaatttagttccctgtatcttttaggacttttccttttttaattttagtttttattttagcttactccctcttggagtgatcttcttgtgggtgaagtctaataaattgtaacaggcaatatgtgaggttataattttctcaagtgcctttcatgtgtcatcttgagtaccatcagtacgttc

SEQ ID NO: 10826 - DNA, 600 bp, Chicken  19866894212910_5
acagaccctgtattttatttagagcttctgcatgaatagcatctggtcccatgcatttgttactatttatttcactaactctttcaaarccttttccactggcacttgaatttgaaacagctactgagactcatctcaggatggtgcaggtgagggatcaggccttaaatatcatgtagtttctttttatgcctcttttgcgcgttagaaataaatagtaaaccaatcatctgagcattttcggaagtctatatttgagcctkagcattttcacttttttttttcttttcttttcttttyttttttttccccagggagaaggcgttaggaagatagctatggatagcacatggtgtttcttatcctgaatatgttgtaattaatttagttccctgtatcttttaggacttttccttttttaattttagtttttattttagcttactccctcttggagtgatcttcttgtgggtgaagtctaataaattgtaacaggcaatatgtgaggttataattttctcaagtgcctttcatgtgtcatcttgagtaccatcagtacgttcaaagctacagctcagtggtggctaaagtctccccttc

SEQ ID NO: 10827 - DNA, 599 bp, Chicken  19866894212919_1
  misc_feature (1)..(185): n is any nucleotide
nnnnnnnnnnnnnnnnnnnnnnnnnnnnnnnnnnnnnnnnnnnnnnnnnnnnnnnnnnnnnnnnnnnnnnnnnnnnnnnnnnnnnnnnnnnnnnnnnnnnnnnnnnnnnnnnnnnnnnnnnnnnnnnnnnnnnnnnnnnnnnnnnnnnnnnnnnnnnnnnnnnnnnnnnnnnnnnnnnnnnnnnnaaatcctcttttactgacagaaaaaattgtgtgtaaagtagtaaggagataaagtcacacaactatcatctctaactaacagaagaatagcactggcagattttaccccacactwgaactatcaaaggtcataaaggtgataatatgaactgcaacactactcaaataacaaaaaatgatagaaaatgtttaaggatattcaagcactattttggaaaattttagttttattatcagttttgccagctttctcatttcttcttctctgcccttctggtgaaactcactgcttcctccctgctggtttccagcacattttggagaaaaacacaggctagactaactttcaatccttcctcatggccacagtcagcacccattacagccaaactgaaggagactggtctctacatg

SEQ ID NO: 10828 - DNA, 599 bp, Chicken  19866894212921_1
  misc_feature (1)..(12): n is any nucleotide
nnnnnnnnnnnnttgtgactttccatcacggactgatcccagtgtcaacacaggacaggtggacgtacaggagttggatgcccttggtgacaggagagggaaatgtgactgtcctgatgggatgtggtcagctgtctcacgtggcttgtaagtaggttcctcttaaaaagcagagagggcagggctttgtgaggagactgaaatcctgtcagcaaaaaggaacttatgacgagaataaattatgtggaaatgactttgagttgtgggccagaatgaaacctaaaaagggagcgtttgaaratatarctgtaaatggttcaacaaaagttgctggggaggtgggagagcgtgaaaatgagcggctgacggctattgggaatgggrcgggtgtgaacagcgccgaggtgcagccgtggtgcttaccctgcagcaaacgtgtgggaagagatggctggctgcaggcctgccaaccactacacacgtgcaatttgcaagctgtcagaccctggccgctgtctctaacctgtgctcatgcagaagctggtgtgaggtggggctgaggtcagcagaagcggagttgcgagttttacttattgata

SEQ ID NO: 10829 - DNA, 599 bp, Chicken  19866894212921_2
  misc_feature (1)..(6): n is any nucleotide
nnnnnnttgtgactttccatcacggactgatcccagtgtcaacacaggacaggtggacgtacaggagttggatgcccttggtgacaggagagggaaatgtgactgtcctgatgggatgtggtcagctgtctcacgtggcttgtaagtaggttcctcttaaaaagcagagagggcagggctttgtgaggagactgaaatcctgtcagcaaaaaggaacttatgacgagaataaattatgtggaaatgactttgagttgtgggccagaatgaaacctaaaaagggagcgtttgaaratatarctgtaaatggttcaacaaaagttgctggggaggtgggagagcgtgaaaatgagcggctgacggctattgggaatgggrcgggtgtgaacagcgccgaggtgcagccgtggtgcttaccctgcagcaaacgtgtgggaagagatggctggctgcaggcctgccaaccactacacacgtgcaatttgcaagctgtcagaccctggccgctgtctctaacctgtgctcatgcagaagctggtgtgaggtggggctgaggtcagcagaagcggagttgcgagttttacttattgataccccag

SEQ ID NO: 10830 - DNA, 600 bp, Chicken  19866894212921_3
tggtgacaggagagggaaatgtgactgtcctgatgggatgtggtcagctgtctcacgtggcttgtaagtaggttcctcttaaaaagcagagagggcagggctttgtgaggagactgaaatcctgtcagcaaaaaggaacttatgacgagaataaattatgtggaaatgactttgagttgtgggccagaatgaaacctaaaaagggagcgtttgaaratatarctgtaaatggttcaacaaaagttgctggggaggtgggagagcgtgaaaatgagcggctgacggctattgggaatgggrcgggtgtgaacagcgccgaggtgcagccgtggtgcttaccctgcagcaaacgtgtgggaagagatggctggctgcaggcctgccaaccactacacacgtgcaatttgcaagctgtcagaccctggccgctgtctctaacctgtgctcatgcagaagctggtgtgaggtggggctgaggtcagcagaagcggagttgcgagttttacttattgataccccagggttttggcaactcttagcgtcagttttgtaaccacaccaagaatctgcttcagcgtctgcattttctaatgcacaccc

SEQ ID NO: 10831 - DNA, 600 bp, Chicken  19866894212922_1
gccagggtgaaggctttgaacgagtacctgagcactcgtagttatatccaggggttcacattttcacatgcagatgtggaggtgttcagaaagttttcggggccacctgtggaccagtatttccatgttgtccggtggtacagacacatagaagcaatctatgatggcagcagtgaaaaaaatgacccttgtaaacttcaaacaagtgagtaatatgatctcggtgggcaggttatagactagctgccattgtaatgatttttcctgctgagaactaaaagtttcctttcttgctctctygcacactttacagtttactgtatccacttgtattcaagctcatgaaattcttcttgcatactgttactgtgtaactgatgaatcctgagctatttgagtgttacagctgtttccacaactctttggttttaaaactcctcaatgtactgaatttgattatttgtattttctttagaaagcttgccaatgaatagtaaatggatatgtgggttttggctggtttcctacaatagcacaatttgttcagtctgtgattttttttttttccctataagggtaactaaatagttcttgtaatta

SEQ ID NO: 10832 - DNA, 600 bp, Chicken  19866894212922_2
cattctccttagatgatttccagtgagctagtctaatgtaattgctttatagtgagagccttgctctgggagtcatgaaataattaataataatgacacggagctgttttatagtgcttgcaagatctgtaaatgaatgcagaaggcgtttgtcattttgactgacggttgttgactaatatgactccatattctctaatatactccatcttctcacaacctgtcatcatactgttcttggttcctagcagagcagcagttaaagtcagactctacgagtgagttttatatccacgtgtrtgcctgcatgcatytgtgctggttactgatttcctttcagcagctgagcgatctcagctataccactggctctggtagcagctttaatgccactaactgccrtttgcctgcaggatttcatggatcaaggtggggcgagaagagaaaagctttcrgttttcttgtccatgaaatcttcgatgttaagcctcttttcctcaatgattgtgtcttgttagctttatgatctgtgcatgtatattggaagtcttgaaaagatgctctgcagtgttcagtatgaaatatcatgtggatctgcca

SEQ ID NO: 10833 - DNA, 600 bp, Chicken  19866894212922_3
gatttccagtgagctagtctaatgtaattgctttatagtgagagccttgctctgggagtcatgaaataattaataataatgacacggagctgttttatagtgcttgcaagatctgtaaatgaatgcagaaggcgtttgtcattttgactgacggttgttgactaatatgactccatattctctaatatactccatcttctcacaacctgtcatcatactgttcttggttcctagcagagcagcagttaaagtcagactctacgagtgagttttatatccacgtgtrtgcctgcatgcatytgtgctggttactgatttcctttcagcagctgagcgatctcagctataccactggctctggtagcagctttaatgccactaactgccrtttgcctgcaggatttcatggatcaaggtggggcgagaagagaaaagctttcrgttttcttgtccatgaaatcttcgatgttaagcctcttttcctcaatgattgtgtcttgttagctttatgatctgtgcatgtatattggaagtcttgaaaagatgctctgcagtgttcagtatgaaatatcatgtggatctgccatgcttcttaggcct

SEQ ID NO: 10834 - DNA, 600 bp, Chicken  19866894212922_4
gctgttttatagtgcttgcaagatctgtaaatgaatgcagaaggcgtttgtcattttgactgacggttgttgactaatatgactccatattctctaatatactccatcttctcacaacctgtcatcatactgttcttggttcctagcagagcagcagttaaagtcagactctacgagtgagttttatatccacgtgtrtgcctgcatgcatytgtgctggttactgatttcctttcagcagctgagcgatctcagctataccactggctctggtagcagctttaatgccactaactgccrtttgcctgcaggatttcatggatcaaggtggggcgagaagagaaaagctttcrgttttcttgtccatgaaatcttcgatgttaagcctcttttcctcaatgattgtgtcttgttagctttatgatctgtgcatgtatattggaagtcttgaaaagatgctctgcagtgttcagtatgaaatatcatgtggatctgccatgcttcttaggccttggatgtgttgtcagtgtctttttaggtacagggtgtcccagaaatggcttagagcaaatgaacttcggttcagcagggggaaagtta

SEQ ID NO: 10835 - DNA, 600 bp, Chicken  19866894212922_5
ttttgactgacggttgttgactaatatgactccatattctctaatatactccatcttctcacaacctgtcatcatactgttcttggttcctagcagagcagcagttaaagtcagactctacgagtgagttttatatccacgtgtrtgcctgcatgcatytgtgctggttactgatttcctttcagcagctgagcgatctcagctataccactggctctggtagcagctttaatgccactaactgccrtttgcctgcaggatttcatggatcaaggtggggcgagaagagaaaagctttcrgttttcttgtccatgaaatcttcgatgttaagcctcttttcctcaatgattgtgtcttgttagctttatgatctgtgcatgtatattggaagtcttgaaaagatgctctgcagtgttcagtatgaaatatcatgtggatctgccatgcttcttaggccttggatgtgttgtcagtgtctttttaggtacagggtgtcccagaaatggcttagagcaaatgaacttcggttcagcagggggaaagttactgttggcagggatgtgtttgagcagactgaaaagcatgcctgttgctttgcc

SEQ ID NO: 10836 - DNA, 600 bp, Chicken  19866894212923_1
tcatttgcttcctttctgaaacgtttatatgattgccagtactcacagtaaataacagcatcaggtgagaggcagtaacctgaagtaagatgccacaactactgaggcaggcacatgcttacaataaagtagtggtataaataaattccaatacatactcatgtgagaacagatctacaaactgcctcaagtggttttagagagaatttttaaataaaatatacactactaactcttcaagtgatttcctgattcccagataatgtttaaattactcctgaagtatccccagtgccaagraatctatttttgcacctgatgcccccccagtctcttcatagttgtatttatttttagcaatctagaggaattacagatgcacattatgtaattcctacacaatagcatgaaccgaagtggtgtctaatgaaatccaaagcattcatagcaaaagttctaggaaaaaaaaaaacagtgatttagaatcattgaatggtttgagttggaagggacctctaagatcacctagttccaaccgtctgctataggcagggacacatccccctagaccaggcggctcacagccccatccagcctagc

SEQ ID NO: 10837 - DNA, 578 bp, Chicken  19866894212923_2
cctagccttgaatgcttccagggagggggtatcaacaacccctctaggcaaaatttgatctcagatacaaaatatcagtttacctaagattggataaatagcttgtaatagtcgtcacagttctgcaatttcagttcccaagacatctttgatattaaaaacagaaaaaggcaccttttgtttcaatagcagtcccaatccagagatgcaacagcttcatgttttccatcgatatctgataattttggcaaatttttagaaaattccccactttgagtaacttactacactgcttcttarttttgattttaaccattattgtgaaaatttgagatacaagtcatgttactgatggaaggtcaatcagtgagaaagaatgagggctttctactctgcagatgatcctcagagttcaagcagctgatttattcctgaagtctctgcttgtcatagaatcatacagctgaaaaggatcacaggtgtccaatttatctttgctcagtgcaaaagcacaagtagaacatgtaaacagtcttactaagaaagctgcacctacagtatcatgcatttaagtacaa

SEQ ID NO: 10838 - DNA, 599 bp, Chicken  19866894212930_1
  misc_feature (1)..(115): n is any nucleotide
nnnnnnnnnnnnnnnnnnnnnnnnnnnnnnnnnnnnnnnnnnnnnnnnnnnnnnnnnnnnnnnnnnnnnnnnnnnnnnnnnnnnnnnnnnnnnnnnnnnnnnnnnnnnnnnnnnntattaaaatatactctgcaactctgattttttaaatgaagatctctccagttgtttctttagaaatcagtggttacttgccttgtgaatctgctttggaaagtaaccaacagcagaaagcttatccatctgcaaaatgtggcaaatatctctgcctttgctagtggttgaacgagcctttctctrtgtrggagcagtggagccgcggstcttgtactatttggatccaaagccttgcatctctgctggaaagttctcttcagaagtgatgagactaccagaaccggtgttcatatggcactatccctggtgatatgctcaaagtcctggggagcagcaattaaggaataaggttcattctttagaactccaaggattcatttagggaatagggttcattctttagaactccaatggttcattttagcattacaaaatttgctttttttttttcaagtaaattgtctttaatctttatatggcgt

SEQ ID NO: 10839 - DNA, 599 bp, Chicken  19866894212930_2
  misc_feature (1)..(111): n is any nucleotide
nnnnnnnnnnnnnnnnnnnnnnnnnnnnnnnnnnnnnnnnnnnnnnnnnnnnnnnnnnnnnnnnnnnnnnnnnnnnnnnnnnnnnnnnnnnnnnnnnnnnnnnnnnnnnnntattaaaatatactctgcaactctgattttttaaatgaagatctctccagttgtttctttagaaatcagtggttacttgccttgtgaatctgctttggaaagtaaccaacagcagaaagcttatccatctgcaaaatgtggcaaatatctctgcctttgctagtggttgaacgagcctttctctrtgtrggagcagtggagccgcggstcttgtactatttggatccaaagccttgcatctctgctggaaagttctcttcagaagtgatgagactaccagaaccggtgttcatatggcactatccctggtgatatgctcaaagtcctggggagcagcaattaaggaataaggttcattctttagaactccaaggattcatttagggaatagggttcattctttagaactccaatggttcattttagcattacaaaatttgctttttttttttcaagtaaattgtctttaatctttatatggcgtgaag

SEQ ID NO: 10840 - DNA, 599 bp, Chicken  19866894212930_3
  misc_feature (1)..(92): n is any nucleotide
nnnnnnnnnnnnnnnnnnnnnnnnnnnnnnnnnnnnnnnnnnnnnnnnnnnnnnnnnnnnnnnnnnnnnnnnnnnnnnnnnnnnnnnnnnnntattaaaatatactctgcaactctgattttttaaatgaagatctctccagttgtttctttagaaatcagtggttacttgccttgtgaatctgctttggaaagtaaccaacagcagaaagcttatccatctgcaaaatgtggcaaatatctctgcctttgctagtggttgaacgagcctttctctrtgtrggagcagtggagccgcggstcttgtactatttggatccaaagccttgcatctctgctggaaagttctcttcagaagtgatgagactaccagaaccggtgttcatatggcactatccctggtgatatgctcaaagtcctggggagcagcaattaaggaataaggttcattctttagaactccaaggattcatttagggaatagggttcattctttagaactccaatggttcattttagcattacaaaatttgctttttttttttcaagtaaattgtctttaatctttatatggcgtgaagcacagagaaacagtggaaa

SEQ ID NO: 10841 - DNA, 600 bp, Chicken  19866894212938_1
gtctagctgatgatatctctgtggtgggagtttgatctctgctgggatgctggcctctgagagagagaagagggaaggagggtggtacttctattatggaatggttttcacttagatttttaagcagacagagccctctgttgcctgcaaaacaccgggtctccagtgagtccttctgcctttgctaaatcgggctaaaatgttaatgactctgaaagcagagggggaaaaaaaaaggctattctgcaaacacatttaaaagtgaactttttgtcccccattcctttttttttttttttsatctcatcaaaaaacccttctctgacacataaaatatgatcacttccctgctgtgacttcagatggagaaatatttacctagcatgacacaaactgtgggaaagcccagcccagcctccccccgccctgcaccaaagatttgagagggatgaacctgcatcaagcagagtgtggcttggggagaaaatatttctgtgtttgctcctgctgggacttttcctttcccataactgacaccaaaggcaaatattttccccactgtttcgccagttttcttcctattttgccgtgttggttgta

SEQ ID NO: 10842 - DNA, 600 bp, Chicken  19866894212938_2; identical to SEQ ID NO: 10841

SEQ ID NO: 10843 - DNA, 600 bp, Chicken  19866894212938_3; identical to SEQ ID NO: 10841

SEQ ID NO: 10844 - DNA, 600 bp, Chicken  19866894212938_4; identical to SEQ ID NO: 10841

SEQ ID NO: 10845 - DNA, 600 bp, Chicken  19866894212942_1
tgaaaaggtactgtctgatctgagcagaaactatgactctgaatgaacatcatgaccagaaatatattctaggagtattacagagattcgaaactgaagctgcagtcaggaattcaaacatcaaattgcagattgttattagttggtttcctgaagtctgctaccctacttacaaagaacaagtgctggctactgtaactatcactgcatcatgagaacatttaaatatgattgaaaccaatgggtccatttttattcaccgagggccaggttattttctactgagagaaaactacatasagactagaattttgtacagttactgtttggtattcctcactgatcctttggtgcagagggtggctgggatttgcagctctaccagttgcactcrtctgcacccacagggcagtcagccctggcaatgcctctggcagcccacagctgctgaggcagacatctgggcttctgcatcctgctccagaggtatccccggcacagcccccctctgtcatttcttttcttgtgataccactgggaaacstgactgatagctgagctctcagaaggcagatccattgggctgctccccatgacagc

SEQ ID NO: 10846 - DNA, 600 bp, Chicken  19866894212942_2
tgaagctgcagtcaggaattcaaacatcaaattgcagattgttattagttggtttcctgaagtctgctaccctacttacaaagaacaagtgctggctactgtaactatcactgcatcatgagaacatttaaatatgattgaaaccaatgggtccatttttattcaccgagggccaggttattttctactgagagaaaactacatasagactagaattttgtacagttactgtttggtattcctcactgatcctttggtgcagagggtggctgggatttgcagctctaccagttgcactcrtctgcacccacagggcagtcagccctggcaatgcctctggcagcccacagctgctgaggcagacatctgggcttctgcatcctgctccagaggtatccccggcacagcccccctctgtcatttcttttcttgtgataccactgggaaacstgactgatagctgagctctcagaaggcagatccattgggctgctccccatgacagcattcctccatccagtgatggagtccatcaggcaacccacaggggaatgagactgtcactacataaatcccatttctttccttatatctaaggat

SEQ ID NO: 10847 - DNA, 600 bp, Chicken  19866894212942_3
gtccatttttattcaccgagggccaggttattttctactgagagaaaactacatasagactagaattttgtacagttactgtttggtattcctcactgatcctttggtgcagagggtggctgggatttgcagctctaccagttgcactcrtctgcacccacagggcagtcagccctggcaatgcctctggcagcccacagctgctgaggcagacatctgggcttctgcatcctgctccagaggtatccccggcacagcccccctctgtcatttcttttcttgtgataccactgggaaacstgactgatagctgagctctcagaaggcagatccattgggctgctccccatgacagcattcctccatccagtgatggagtccatcaggcaacccacaggggaatgagactgtcactacataaatcccatttctttccttatatctaaggatatttctcagacctgcagctgatacaaatacttcttgtagcaaaggctacaagaagtggatctttgggtcaccctcacccctccacctccactggcacaaccccaagggcagttcacatcaaaacttctagtgtctttttgaagaatgtct

SEQ ID NO: 10848 - DNA, 599 bp, Chicken  19866894212949_1
  misc_feature (1)..(27): n is any nucleotide
nnnnnnnnnnnnnnnnnnnnnnnnnnngcgtcccataaggacgttcagttcacttcccacggtctggaagctgaagttatcactgaactgctcccatgccacggcttccactgacttagactctcatgaaggtcagtcattcagacagagtatctaggctcatcttctgcagagggaacacttcaggaaaagcaagtgaaattcccttcatacctcctctcctcccaagaatagtttttgccagacagtctaagagaatctgagcaaggacagtttttcactcttagacaaaaaaagcargaaagtccctctgtgggatgagctaaagaaaataaaatatgagctaaagaaaataaaagtatgacagaaaaagttttcactttccatctttcactcttttagaagaaaagatatggcaatgtattgcatttttcaggaactgttgcagatgttgcctactagttagtgaagggcaagccccttatatcagggagggaaagagggaaggaagaggagaaagatagtgaaacactcaaggaaaaaacctttgctattcagtgtaaaatgaaatggcattttcaaaaattcctgaaataaat

SEQ ID NO: 10849 - DNA, 600 bp, Chicken  19866894212949_2
aaagatatggcaatgtattgcatttttcaggaactgttgcagatgttgcctactagttagtgaagggcaagccccttatatcagggagggaaagagggaaggaagaggagaaagatagtgaaacactcaaggaaaaaacctttgctattcagtgtaaaatgaaatggcattttcaaaaattcctgaaataaataaaagccctctgctgtttaaccttgacaagacaagaggttagttactcagcattcaagaaaaaaaatctatcctagagaaaaagtatggacaagggttaaagccaaktggtgcctaaaggcagaatttcaagtagtactttaggtatccatagaaagagactccttcctaaaaagcctagagctcctagtaccttcatctggctgacttcacactgctccagatctgacaggatatgatatgagcattatgagtggcagcatcttatgctattctgccccagtcctgtatgtgaactcatcatcaaagccctgcatttagccaaatcaatatacgcctacagacagctgacagcaagaatatatttctctctatgttgtctccttgttgtctcagctactttggagt

SEQ ID NO: 10850 - DNA, 600 bp, Chicken  19866894212952_1
attcttattttggttttgtatgcagaatgtaaaatgtgtctgggcagtgataaaacaagtctgtcaacatgcaccaattctgcttctcctttttttttcctggacaaaaggataagttgaatacaatcactacgtttttttttctgagcagagttgacattctagtgaggaaaagtgtaatgagcttgggccatgctatgtagaataaggcatgaaaccaatatctcagataaaatgtgtcaaaagctgatttattataaggatcatttttgttgtggttgtaagaaatgtttcaatatkaatacatttattatatatatatatattcacatattaattctaattagatgtcagcattcaaaacaaggataattggtacagttttagcagtaaatgactgttaatatttaggtaaaaataatacaaaaaaaaaaaagttaattcaatattagcccagttctatagattaattttgcatttgtctttttattcaatattttaaaagaaggtacaattcattgatgcttgtgtcattgatctaatttgctccaaaagaaatgaatttttcaaattcctagctaaataatatttttcatataa

SEQ ID NO: 10851 - DNA, 600 bp, Chicken  19866894212953_1
actagatgacccctaggggttcctttcaactcaaaagatactatagttctaagctgtaggctgccgtgaggcctctcctcatcctccccctcttctctaggctgaacaaaacaagtgattttagttgttccttgtatgtcttgtcctctagaccattcactatctttgtagccctcctttggacagtcttcgatagttttaagtccttatattgtggcacccaaaactgcacacagtgctcaagatgagtccacacagcacagagcagagctcccttccctctcctggctggcagtgctsgacctgatgcacaccagtgtacaattggcccttttggccagttttgtcttccagggcactctgctgattcagattcaagttagcattaaccagaaccctcagatgctgttctgctgggctactcttcagcatctcaagaatgtgaattgttttcttaatggaaatgcactaaggaatgatgctataaggaatgcatgtaataagggaagctataataactgaatgcagaggacagagcatttaaggattttgcattctaccgagataacagtaggaataacctgagaagttgaaaatcat

SEQ ID NO: 10852 - DNA, 600 bp, Chicken  19866894212958_1
ggctgagtaatctcaattgtctgggaataaagaatactcagtgctattaagaaggatctggcttcttgccagattaccttggaaacatgaagttttaaaatgtgaaataaaccatgacctgaattctcaaacaattttggtgctttgttttgctttttctgaaaatatatttaaaaataaatcagattattaatagtgtacatgcctgaattttgcttttttcacatatgcatactccctcgtagaagcagctgagatatcaaaaatcagttagtagcaactcaaaaatatttccatccstggactacacgtgggcctcagcacatgagtttagagacatcaagcaaatccccaacaktgcaagattaccggcacaagggatgctcactggcaactgtatgaacaacagctgctctcaccaaatacagaagtggcagcgcactattagctgctttcccctctcttgtaagggttaccattctgtagctgtggtaaactgtcaagagtggctgcaaagagggcagagctcttatgcatgccatagtatccccaaggagaagtacagctgtcatctccaggctcttgaattttgtaagaatt

SEQ ID NO: 10853 - DNA, 600 bp, Chicken  19866894212958_2
tggcttcttgccagattaccttggaaacatgaagttttaaaatgtgaaataaaccatgacctgaattctcaaacaattttggtgctttgttttgctttttctgaaaatatatttaaaaataaatcagattattaatagtgtacatgcctgaattttgcttttttcacatatgcatactccctcgtagaagcagctgagatatcaaaaatcagttagtagcaactcaaaaatatttccatccstggactacacgtgggcctcagcacatgagtttagagacatcaagcaaatccccaacaktgcaagattaccggcacaagggatgctcactggcaactgtatgaacaacagctgctctcaccaaatacagaagtggcagcgcactattagctgctttcccctctcttgtaagggttaccattctgtagctgtggtaaactgtcaagagtggctgcaaagagggcagagctcttatgcatgccatagtatccccaaggagaagtacagctgtcatctccaggctcttgaattttgtaagaattgcagtctacctaaaatctaagtgtgcactgggttgtcaggtctctcaaatgcttcatg

SEQ ID NO: 10854 - DNA, 600 bp, Chicken  19866894212962_1
aacaagcagtacagactgctctttccccctttctctcccccttccaccttcagccagtcctgacaaaatgccagttagaaaggtcagcctgtttatgtaaagataagtgtttcttcacgaagatggctgtacatcaagcctgcagtgactattagatagactttgggattcaaggtactcagtaatagtcctgttcattttctagaactgataaaatcacagagaaaacagaagacagacatagcacaagtgggatagatcaacatgctagggtgtgtggaggcagcagtatcttcatgrcagtgtttgttactgcaaatgctagtaagatctgtggaccttcatctatttgcatgcatgtatgtaactacataaacacacacacatatttataaagagatttgctgacatgatgtcctagactgaatttgttctgcagttatttcacgccagaagaggtagttaaaatcaaagagaatttgatttggagtcttaccaactctgtcccctcaaaaaaagagaaggttgactttactggactttggcacagaccgttcatagttaagttcagctttcatttcatagcacctacaagcacag

SEQ ID NO: 10855 - DNA, 600 bp, Chicken  19866894212963_1
attgtacttgctggaagaataatataacgagaagcctatagattaaagactacttagaaagtcttctatttctttttccctgctccatgctctccagtctaggaaatgcactttcaaaatctgggcatgactcgctacatgacaatagaagtccaaagggcataagaatgcgtttgcttcttgcggagttactcactaccttgaacgactggaagcctgtaaacatccaagcttctttgctatttttacattccgaagagttaaaatgaacagtttatataacatcttgtctccatagcratctctaccatcttttattttttcatttaatgaacagagttggactttttaaaaactgttccaaacacaaaacaaaccctttcaaggttcacatgttgccagctgtggataaatcacagattgctatacagtggtctgtgtaaatagtaacctggtcaaataattaggcttcttaccaattttcagatgaaaactgcgtctgaactaaaatacatctgattataatttaaggtactgaacactatccctgtgagatctaactcaggcctgcgtccaactcctttttcctttggaaaggca

SEQ ID NO: 10856 - DNA, 599 bp, Chicken  19866894212969_1
  misc_feature (1)..(98): n is any nucleotide
nnnnnnnnnnnnnnnnnnnnnnnnnnnnnnnnnnnnnnnnnnnnnnnnnnnnnnnnnnnnnnnnnnnnnnnnnnnnnnnnnnnnnnnnnnnnnnnnnncccttaagacaaatctcaaaaattctgaccgcctacaaacttgaacgtatttcaaaagcagccttgagagcttctcacactgctgtccacatctgagttacaagctgggcttttggtgtgctcactcctgcacatataacaaaatacatggctggaacaagctaggaaacttcttgaagggcctggcttaacaacgtaacarttctgtgttgtgctgtggcagatgagatcttctaaggaagctgccagtccagacccaaaaacaccagtacgcccatcacatccattaccagcactcctctgtgtcacaggggaaggacactggtcatctcagagatctgtaaaatctcttggctttgcacaggttactgaatgataacagacctgctctctgtgtcactcctgagccagtgttgctcattttaccaaggtacctcgagggcaacagatttccattacggatctttgtcacgtgagatgcytgagcattaaatgtgaagt

SEQ ID NO: 10857 - DNA, 600 bp, Chicken  19866894212969_2
ctggcttaacaacgtaacarttctgtgttgtgctgtggcagatgagatcttctaaggaagctgccagtccagacccaaaaacaccagtacgcccatcacatccattaccagcactcctctgtgtcacaggggaaggacactggtcatctcagagatctgtaaaatctcttggctttgcacaggttactgaatgataacagacctgctctctgtgtcactcctgagccagtgttgctcattttaccaaggtacctcgagggcaacagatttccattacggatctttgtcacgtgagatgcytgagcattaaatgtgaagtcaattgcaaagaaacatgctttctctgtttggtagcatctgagatttaaccaaggagagggtaagatcaatcaaaacaaaaacaaaaaagagacacttacattactggccaaggcatcctgcaatttggtgacgggattagctgctgtgccagaagcagaaccaggtggcaagctgaagtcagagtcctgaagaagtggaacatacaacattcaaatcgagacccaagggccaccagtttgcttctcatgggtaatgactttagcctgaatcatgacacta

SEQ ID NO: 10858 - DNA, 600 bp, Chicken  19866894212972_1
gacagatcttaaatacagtaagaaaatgagccttggtatgcaaatggattgatgtttgcagggttgcctttgcaacagaagaacttcagcaatgtgaaatgctgtcatgagctcacattttccaaatgtcatacaaatctcttccctttgtcaaatctgtcactcatttacaccctaaactatacgactaaaaagcatctatgaagttatgtgcaaatacagattttttgatttaatgcatactagaagaattacctccaagctatctttatcctatcatttaaatacctatgccaggcraacgccttctctaaaataggtgcaatgtatcttttcaacagtgcagtaaagttaactttggggagatgggactttttactttgttattgtaccaagcacaaagaagtcagtgacagaagtggctttgctctagactgaggtagagaaaataataaaaagcctttccaaaacacagtgccaggtgtttcagaactatctgtgtgagggcactttgtgaaatgcattttctgggaaatcagtaaggacaagatttgaaaacctgaaggatactccatccatatccatcagtacaggggttgt

SEQ ID NO: 10859 - DNA, 600 bp, Chicken  19866894212973_1
ttaagtacagaacagaacagatttaagaaaattgttgtagctaataagctacttcttgctcatctcagagatgagattttgctgaagtcttacattacttttgaaaacaaatatctttttttaaaataaaacctgttttctaatgtaattttttttgtctttccctttatagctaaaccaggtggacgggtgaaatgtcagtatatttctgctgtggataaagtgatctttgtggacgattatgcagtaggatgtaggaaagatctcaacggcatcttattgttagacacagctctgcaracacctgtttcaaaacaagatgatgtggttcagcttgaattgccagttacagaggtaagatacaggaaaaagaagtgtatgtaaataactgtcagaaatactgaaaccagatgtttgtcccctagtttctagtgtgatgttaactgcatgtaatggaaaagtttcttagttactagccattatatagcactaacttattgtaattattcatatctcaaacaaatgatagcttctttcatcaggagcacatcactttggagcttcaatgaccagaagtaaggacatatttccagagctttg

SEQ ID NO: 10860 - DNA, 532 bp, Chicken  19866894212976_1
catgaccttccctgctctgcaccctgaaggctttgtccacccttaggcttgctcagatctctgtgtagcggcctttgagtaaaccaccagtgcctggaactccttcaagccacagagttatgaccaggtcttagctttccccctgggcaggggatgctgggctgtgcctagctgtgaactgtggctgtctgggtacagccagtcacatgggggctgatggctgggttgggggttcagagaatgatggtgggagcttatggggtgtttccagtctggaaccaaggaggagaactgcttccygacccagggagagawgaaaggagtccctgattttggaggtggagcaggtgagtgttggtaggtgtggggagatgttgcccttattagtgcttcttgatggggcacaggtacctggggttagtgctgggctggaggaggttttgtccttttacagcacatgccctgcagctctgggtagggttacctgcgaaatgttccaccaccagagctcatcaatgctgcatctccttaa

SEQ ID NO: 10861 - DNA, 517 bp, Chicken  19866894212976_2
tctgcaccctgaaggctttgtccacccttaggcttgctcagatctctgtgtagcggcctttgagtaaaccaccagtgcctggaactccttcaagccacagagttatgaccaggtcttagctttccccctgggcaggggatgctgggctgtgcctagctgtgaactgtggctgtctgggtacagccagtcacatgggggctgatggctgggttgggggttcagagaatgatggtgggagcttatggggtgtttccagtctggaaccaaggaggagaactgcttccygacccagggagagawgaaaggagtccctgattttggaggtggagcaggtgagtgttggtaggtgtggggagatgttgcccttattagtgcttcttgatggggcacaggtacctggggttagtgctgggctggaggaggttttgtccttttacagcacatgccctgcagctctgggtagggttacctgcgaaatgttccaccaccagagctcatcaatgctgcatctccttaa

SEQ ID NO: 10862 - DNA, 600 bp, Chicken  19866894212984_1
cgggcaaacccacgcttccactggcgagcacagagcactctgctcctggaagccttgctgatacagctgttggaactgtctgcaggaaacagccctgaaaaacaatcgcctcaatcatcccaattacatagatgctacaaacacacttccacctgtgaggatgccactcattcccaagagaggatatgccttcaggatctgagatcttaatggctaaatgaccacagcggaggaaatcagagttgtctgggcctggcaagagagtttttgcaagtcatcccctccccaagtcatgccccygtcacacagtgaggcacggggaaggggagctcagcacagacttctcccatagccacacatttgtctacagaacatgaaacagaagctttccttctaagccacccacctgcctaacaaatgtccatcaaaaggtttcaaacatctgcatttctttcgcattcctgccattacctcagccagtcaaaccacctgcaaaagcttcatcagcttcagggaagcagaaagaggctccatccttaatcaaagcagtatgaaaggtgggtaatggtttctataawtacgattagaattagaagagga

SEQ ID NO: 10863 - DNA, 600 bp, Chicken  19866894212984_2
cccctccccaagtcatgccccygtcacacagtgaggcacggggaaggggagctcagcacagacttctcccatagccacacatttgtctacagaacatgaaacagaagctttccttctaagccacccacctgcctaacaaatgtccatcaaaaggtttcaaacatctgcatttctttcgcattcctgccattacctcagccagtcaaaccacctgcaaaagcttcatcagcttcagggaagcagaaagaggctccatccttaatcaaagcagtatgaaaggtgggtaatggtttctataawtacgattagaattagaagaggaactttttttcctatttagatctgttagcacaattagcagctgtgtcgtcgctcgttcgcacgcgctgcttaatgcactttatgctcagcaggggaaggcttcaaggctgtcatacggatgcagcataaaatggggaggaaacccaaggaagacagcagtgcagttytctaaatgcacatcctttgtggctgctgcagtttcagcacaaccaccatcaaacagggaggttggctgtgccaaggaagtgaaggatttactgtagtaaacacagagataaa

SEQ ID NO: 10864 - DNA, 600 bp, Chicken  19866894212984_3
attacctcagccagtcaaaccacctgcaaaagcttcatcagcttcagggaagcagaaagaggctccatccttaatcaaagcagtatgaaaggtgggtaatggtttctataawtacgattagaattagaagaggaactttttttcctatttagatctgttagcacaattagcagctgtgtcgtcgctcgttcgcacgcgctgcttaatgcactttatgctcagcaggggaaggcttcaaggctgtcatacggatgcagcataaaatggggaggaaacccaaggaagacagcagtgcagttytctaaatgcacatcctttgtggctgctgcagtttcagcacaaccaccatcaaacagggaggttggctgtgccaaggaagtgaaggatttactgtagtaaacacagagataaataaatgcartgactcacagggtgcgctcttttgcaaagatgggtttggactgggacggttctgttgttcctactaagacagctcagctgcaatcaaagcagtgaaaaacaaacaacaaaaattaagcagcttccaaaaaaacccacttcaatacctcaggaagactttgtgggtgcatctaattagag

SEQ ID NO: 10865 - DNA, 600 bp, Chicken  19866894212984_4
aattagaagaggaactttttttcctatttagatctgttagcacaattagcagctgtgtcgtcgctcgttcgcacgcgctgcttaatgcactttatgctcagcaggggaaggcttcaaggctgtcatacggatgcagcataaaatggggaggaaacccaaggaagacagcagtgcagttytctaaatgcacatcctttgtggctgctgcagtttcagcacaaccaccatcaaacagggaggttggctgtgccaaggaagtgaaggatttactgtagtaaacacagagataaataaatgcartgactcacagggtgcgctcttttgcaaagatgggtttggactgggacggttctgttgttcctactaagacagctcagctgcaatcaaagcagtgaaaaacaaacaacaaaaattaagcagcttccaaaaaaacccacttcaatacctcaggaagactttgtgggtgcatctaattagagcagttcttacacgtttcataacctctcttagaaaacgttgggacagagctacttggctcggtatccaggaataaatgtgagcttctttttttacctgaaggaggttaaaaagccctcactc

SEQ ID NO: 10866 - DNA, 600 bp, Chicken  19866894212989_1
ctcaacatggtaaccataatggatacaaagtggcactgctcctcagatcaggttcaaagcttcagaaagctacaaattacactacagtccaggaatatataccatggcgtaataaacaaagaagttctcgcagactgcaagtgtgcagctatctctgtaagtgatgaaaaatagctattttaagatttaacccagtactcatttttataaagtgttagggctgagttcatgaatactacaaatgtgaagtgcatgtgtctcaatatactatctgcagtatgtgtccagatgttcttaaaraaaactatttgttcaggagtttacatttcctttcatattatttttttaagaagcgtagtactctagttctttcctccttaccattctagttgcaagaaatgagaggcaaaagtagcctggcagtagtgaagcccctgtctcctcctcatttgggtgttctgctaagcactacagagcagctctatctggaaccccctcccctttgaccttgtacctgcataaacatgaaaaatatagtcctctccttaatggcctcaacataagcacagcaagattyttttccttccttagataggaaaa

SEQ ID NO: 10867 - DNA, 522 bp, Chicken  19866894212989_2
tatgtgtccagatgttcttaaaraaaactatttgttcaggagtttacatttcctttcatattatttttttaagaagcgtagtactctagttctttcctccttaccattctagttgcaagaaatgagaggcaaaagtagcctggcagtagtgaagcccctgtctcctcctcatttgggtgttctgctaagcactacagagcagctctatctggaaccccctcccctttgaccttgtacctgcataaacatgaaaaatatagtcctctccttaatggcctcaacataagcacagcaagattyttttccttccttagataggaaaaaaacagatgatttttctgtgtggtgaagattttgttatgactatccatggcagactcattccataggtactgcacatatgtttcacacctacatgcattttgaaaaagacaatgcttcagactgtgattatacacttcatacaaacaggagctctataatgtatactccatactttattagttgcatagaagatgtctg

SEQ ID NO: 10868 - DNA, 600 bp, Chicken  19866894212998_1
cttcacacaagtaagatctacagggatgtctaaccccatgcacatcactcatgcctgcctgccctggactccagtctctcccttctcagtataaaagcctcccagtcctatccctttcctaataataatgacaacatgacaaaaccaataacctaccgatataaaatacatttcatttacttgcttcataagatcctgataaggctttgtcatgcactttttgagatcctgtaggagatctacaggagctaatgaaagaattagacaaggcatcactcataataaaaagtgttttaaaarcattcggtgccaaggaggaattagactggaagctctgcagccatttcaaagttgtaagaggtgcagcaccaatgtgtgccatgagctcatgggtctcagctgctagatgtacatgcacactccatgtatacgtggtcagggggctgaggtaagttctgccatttttcttgaagagcaaagatttttgagcagctcagctacacatttaagaactcccaaagccttagagagaattatctgaaggaagattaggaaaagaattggaagcatggtctgcagtaatggcaaccgccatcacct

SEQ ID NO: 10869 - DNA, 600 bp, Chicken  19866894213016_1
cccagccaagtcagtgtttctctgcctttcctgctttaaaagtaatccccaagcaatcaacacggctgttatagttagcattcagcagaattattccttctggtagagctgctccagcttgcatcagctcagagtcctgctcctctctctcatcacacctaacatcagcacgcagcccaatcacatagtgacaaaacaccttcctcgacgtgaattgctcagtacctggcaggatatgtgtctcggcactcacaaaccctcctgcccttagagcggggtgcctgggaaattaaaatgagygtgagcatattgccatcaggacacctgggagaagtggagagccctgtcctgtgtatttcagagaaaaaggcactattaaggacacaaatgtgatacttgatttggacattttcccatgtggatgaaaggaatcactcctcatgcaacgctgaaagaaactgattagatttatgcaggcaagtatcagcttgtgattagcatttaggtgaggatgaagctatgtgctacaggaaatattggtgtgcgtgttctctgtttactttcattayytaatgtgctctgcattaagctggggaagac

SEQ ID NO: 10870 - DNA, 600 bp, Chicken  19866894213016_2
agagcggggtgcctgggaaattaaaatgagygtgagcatattgccatcaggacacctgggagaagtggagagccctgtcctgtgtatttcagagaaaaaggcactattaaggacacaaatgtgatacttgatttggacattttcccatgtggatgaaaggaatcactcctcatgcaacgctgaaagaaactgattagatttatgcaggcaagtatcagcttgtgattagcatttaggtgaggatgaagctatgtgctacaggaaatattggtgtgcgtgttctctgtttactttcattayytaatgtgctctgcattaagctggggaagacagaattggttatttgggagatttttgagcagatgtaaatttattactcctacccracagaagaaccgaacgtaccgcacgttcataacacggtgtttgggatgcagtggtataaaatgcctcccaagcagttccaagaaaagaatcagactgttgttgttctgctccagacaggtaggaaaagctttgaagaaccagtttttccaaggaaaattccacctcacaataacatttgctttaagaagtttacgttgccttgatgaaaagttc

SEQ ID NO: 10871 - DNA, 600 bp, Chicken  19866894213016_3
gagcggggtgcctgggaaattaaaatgagygtgagcatattgccatcaggacacctgggagaagtggagagccctgtcctgtgtatttcagagaaaaaggcactattaaggacacaaatgtgatacttgatttggacattttcccatgtggatgaaaggaatcactcctcatgcaacgctgaaagaaactgattagatttatgcaggcaagtatcagcttgtgattagcatttaggtgaggatgaagctatgtgctacaggaaatattggtgtgcgtgttctctgtttactttcattayytaatgtgctctgcattaagctggggaagacagaattggttatttgggagatttttgagcagatgtaaatttattactcctacccracagaagaaccgaacgtaccgcacgttcataacacggtgtttgggatgcagtggtataaaatgcctcccaagcagttccaagaaaagaatcagactgttgttgttctgctccagacaggtaggaaaagctttgaagaaccagtttttccaaggaaaattccacctcacaataacatttgctttaagaagtttacgttgccttgatgaaaagttca

SEQ ID NO: 10872 - DNA, 532 bp, Chicken  19866894213016_4
tttcagagaaaaaggcactattaaggacacaaatgtgatacttgatttggacattttcccatgtggatgaaaggaatcactcctcatgcaacgctgaaagaaactgattagatttatgcaggcaagtatcagcttgtgattagcatttaggtgaggatgaagctatgtgctacaggaaatattggtgtgcgtgttctctgtttactttcattayytaatgtgctctgcattaagctggggaagacagaattggttatttgggagatttttgagcagatgtaaatttattactcctacccracagaagaaccgaacgtaccgcacgttcataacacggtgtttgggatgcagtggtataaaatgcctcccaagcagttccaagaaaagaatcagactgttgttgttctgctccagacaggtaggaaaagctttgaagaaccagtttttccaaggaaaattccacctcacaataacatttgctttaagaagtttacgttgccttgatgaaaagttcaatcgcaagagtacatgg

SEQ ID NO: 10873 - DNA, 599 bp, Chicken  19866894213018_1
  misc_feature (1)..(7): n is any nucleotide
nnnnnnntgaataggagtgaaaatatatccgacgtatgaagaatgtaactgcccagaccactggagttagagaaatgtgaacaaacatctccagtgtgcacacttcttttccataaaaggacaaagaggtgaagcaccagaacttatcccttccaccattaaccatgaaataagcaccacatgcgcccctactttcagctataacaaatcctttaacttagggtaattccaacaattatagtcaccaatttgggaaactgaatcacttgtgcttggttgacattgatttgagtcatctcrttgcctcctgtaagttcattggactgataatgcaaaataaagagggggaaagcaagccttttttgtcctagccacttgacaggctgaagggcaagcaggagccccaacagtagacctggacacaggatcatgctctccattgtaagmagggaccgcagaagtgccacatgcgaccccttgtccccagctgtgggaaggcaggctgcctcgcctcactacaggccagtgatacaccaacctgtctctgtggggaccacacagatgtgcagctggtgaaaagcatstaccagctcaatagg

SEQ ID NO: 10874 - DNA, 600 bp, Chicken  19866894213018_2
cccttccaccattaaccatgaaataagcaccacatgcgcccctactttcagctataacaaatcctttaacttagggtaattccaacaattatagtcaccaatttgggaaactgaatcacttgtgcttggttgacattgatttgagtcatctcrttgcctcctgtaagttcattggactgataatgcaaaataaagagggggaaagcaagccttttttgtcctagccacttgacaggctgaagggcaagcaggagccccaacagtagacctggacacaggatcatgctctccattgtaagmagggaccgcagaagtgccacatgcgaccccttgtccccagctgtgggaaggcaggctgcctcgcctcactacaggccagtgatacaccaacctgtctctgtggggaccacacagatgtgcagctggtgaaaagcatstaccagctcaataggaaagacagaaagagtcagagattttgcataagaggaagagattaaatgacttccccaaggtttcactgaaagctgagaacagagacaaggagctgaacacacacatcctgaatcacagccttgtgtctcaatcacaagaccctccttc

SEQ ID NO: 10875 - DNA, 600 bp, Chicken  19866894213018_3
gatttgagtcatctcrttgcctcctgtaagttcattggactgataatgcaaaataaagagggggaaagcaagccttttttgtcctagccacttgacaggctgaagggcaagcaggagccccaacagtagacctggacacaggatcatgctctccattgtaagmagggaccgcagaagtgccacatgcgaccccttgtccccagctgtgggaaggcaggctgcctcgcctcactacaggccagtgatacaccaacctgtctctgtggggaccacacagatgtgcagctggtgaaaagcatstaccagctcaataggaaagacagaaagagtcagagattttgcataagaggaagagattaaatgacttccccaaggtttcactgaaagctgagaacagagacaaggagctgaacacacacatcctgaatcacagccttgtgtctcaatcacaagaccctccttcctcttgtgtgttttgcaccatctagggtaatcaagaaaaggactgccatgcccaaacaaatcagtaattgaatactaaacctataaatcacatagaacattcagatgccttaacagaaaggcaatgagttccaaaga

SEQ ID NO: 10876 - DNA, 600 bp, Chicken  19866894213018_4
gttgggaaaggatactgttgtgctctataaataagccacggagtaaacagcaaggaacaaagaaagctgttgcagctgaaggttttgacacaagaataaaactgacctctgcaagttctggtaataagtctttcagtcagaaaattattcttctgtaaccacagcagagcaaaaaagtcccagcattgataagatagatcttattaaatagtaacgtgattttttgaagacgtctttcccagcatatgtgtgggctgagtgacaaggaagactgcctctacacatttcttttctagacartgtttttgagatacttctaggaactagtaaagcctcatgcatacacttttcaaagtagaccattaataataaaacagagctttccacctttggagatagttttatctgactgtgcagtataaacgcacgtgcacaagtattactttcaatatcaagaccatcttcaagcaatttctcactctcataatgtatttattttatgttaaacagatgcttgtctttgggttaggcttagtcttttagtctcacaccgtgaatgtcccttgaaaataaagcargaaatacaaatttccttgtcta

SEQ ID NO: 10877 - DNA, 600 bp, Chicken  19866894213018_5
tacacatttcttttctagacartgtttttgagatacttctaggaactagtaaagcctcatgcatacacttttcaaagtagaccattaataataaaacagagctttccacctttggagatagttttatctgactgtgcagtataaacgcacgtgcacaagtattactttcaatatcaagaccatcttcaagcaatttctcactctcataatgtatttattttatgttaaacagatgcttgtctttgggttaggcttagtcttttagtctcacaccgtgaatgtcccttgaaaataaagcargaaatacaaatttccttgtctagttccaagcctgaaggccactagcataaggagccaccagcagaatcagctggaaccctttcagcaccccgcagtgtctgctggttgggtttgtgatcttcagaccagcacagatcagtgcagctccactgagctgtgtccattttcaccacctgtcaagaagatgaacttgtagcgatwcatctagccccatttcctcaaacaagttctgaagctccacagtaaactrctacattaatgctatttaatatctrctctgctggtgagtgtagaaatgcc

SEQ ID NO: 10878 - DNA, 496 bp, Chicken  19866894213018_6
tctcataatgtatttattttatgttaaacagatgcttgtctttgggttaggcttagtcttttagtctcacaccgtgaatgtcccttgaaaataaagcargaaatacaaatttccttgtctagttccaagcctgaaggccactagcataaggagccaccagcagaatcagctggaaccctttcagcaccccgcagtgtctgctggttgggtttgtgatcttcagaccagcacagatcagtgcagctccactgagctgtgtccattttcaccacctgtcaagaagatgaacttgtagcgatwcatctagccccatttcctcaaacaagttctgaagctccacagtaaactrctacattaatgctatttaatatctrctctgctggtgagtgtagaaatgccacctttggattaaggtcgctgccacgtgctgtgcctagtgggacaaagaactgctaaatacaagaagacacaagcattaaaagtgcaggttataaaa

SEQ ID NO: 10879 - DNA, 447 bp, Chicken  19866894213018_7
ggcttagtcttttagtctcacaccgtgaatgtcccttgaaaataaagcargaaatacaaatttccttgtctagttccaagcctgaaggccactagcataaggagccaccagcagaatcagctggaaccctttcagcaccccgcagtgtctgctggttgggtttgtgatcttcagaccagcacagatcagtgcagctccactgagctgtgtccattttcaccacctgtcaagaagatgaacttgtagcgatwcatctagccccatttcctcaaacaagttctgaagctccacagtaaactrctacattaatgctatttaatatctrctctgctggtgagtgtagaaatgccacctttggattaaggtcgctgccacgtgctgtgcctagtgggacaaagaactgctaaatacaagaagacacaagcattaaaagtgcaggttataaaa

SEQ ID NO: 10880 - DNA, 422 bp, Chicken  19866894213018_8
tgaatgtcccttgaaaataaagcargaaatacaaatttccttgtctagttccaagcctgaaggccactagcataaggagccaccagcagaatcagctggaaccctttcagcaccccgcagtgtctgctggttgggtttgtgatcttcagaccagcacagatcagtgcagctccactgagctgtgtccattttcaccacctgtcaagaagatgaacttgtagcgatwcatctagccccatttcctcaaacaagttctgaagctccacagtaaactrctacattaatgctatttaatatctrctctgctggtgagtgtagaaatgccacctttggattaaggtcgctgccacgtgctgtgcctagtgggacaaagaactgctaaatacaagaagacacaagcattaaaagtgcaggttataaaa

SEQ ID NO: 10881 - DNA, 600 bp, Chicken  19866894213019_1
tctctgagggtgtagctatgaatagaatttattcattataaaataccacgtccaatggcactctcagtctaacagtattgtacactttattgcatttagtaatatctgtgctgctgtaatgtaaaagtgtggctgactgagagaagtgctaacagatcttagcaacacatggaagcagggtatgcatcatccctttcctattttacagtcaaattcatcaggatacaaactgagcaaccagctcaaagtattttaatggtcttctttataggaaggagagaggatgagatgggaggacakgtagatagaagattgctttttttttttttttttaattaagacagcaaaaaggttaggaaaagcagtatacacgtgtgttgtggtatcagactggctaaatgaaagttccactctatttaaaaatgccattaatccagatggattccttgcgttagttgctggagaagcaggccttagtagttgcaggagaacgtgtatattcacttctatttgtatcctacttgtccctgatatcagaagataagaataacctattacactatcagtgtcactgcttttacatgcaaggccaagtaccaa

SEQ ID NO: 10882 - DNA, 600 bp, Chicken  19866894213019_2
gcgttagttgctggagaagcaggccttagtagttgcaggagaacgtgtatattcacttctatttgtatcctacttgtccctgatatcagaagataagaataacctattacactatcagtgtcactgcttttacatgcaaggccaagtaccaaattgctttccataacaaaataagaggggagcagttgtgtgcacacacagctgtgtagcttttgttgtgcctcacattcctccttatcattctcagtgggagttgtagttgatggcagaaaggaatgggcagggggtttgttgctgtartagaagagaatggcagttttttcccattgattcatctagtcccaacaaatggggccagtctggggaactagaagctgggtctgtgtagatataatacagatagtttgtgaaattyggtgcatagtatgagcaaaagagtatcatcagacccatccctgtacatcagaatactgcatttatcctaaggacagtttgtccttagaacttactcatacattctcagctattctttgcacctcttgtcaacttaaaatccattcatttctgagtgattttcagatgcacattacaaaagaaaat

SEQ ID NO: 10883 - DNA, 565 bp, Chicken  19866894213019_3
cagtgtcactgcttttacatgcaaggccaagtaccaaattgctttccataacaaaataagaggggagcagttgtgtgcacacacagctgtgtagcttttgttgtgcctcacattcctccttatcattctcagtgggagttgtagttgatggcagaaaggaatgggcagggggtttgttgctgtartagaagagaatggcagttttttcccattgattcatctagtcccaacaaatggggccagtctggggaactagaagctgggtctgtgtagatataatacagatagtttgtgaaattyggtgcatagtatgagcaaaagagtatcatcagacccatccctgtacatcagaatactgcatttatcctaaggacagtttgtccttagaacttactcatacattctcagctattctttgcacctcttgtcaacttaaaatccattcatttctgagtgattttcagatgcacattacaaaagaaaataaaattaaaacttacttcgtttcaataactgaatctgtttgttggggggatgtgcttccccaactccagtgctggggctg

SEQ ID NO: 10884 - DNA, 600 bp, Chicken  19866894213022_1
gaaaaaactcacaaaactgagttcaaagctcaccttcacagctaacttatcaaaaatatgctgaatcagggagaatattctcctactggatacacaagcatgggagagccatcagaaaggggatcagagaattttcttcacttgaagtcttagaactaacaacatttttccaagtttcacagcagagatattattttactttgaatgtttggagatcctaagtcccacgacttctttgccttaaagcccagcaacaaaatctgcattgctctgttcatttctctacaaatatacgtcttmgcagaatcaggtgagtaaatgaatacaatctgcacaccagaacatraaataccctgtayttcccaagttctctttaacactgctgtttaggctggtattataaacagaatagatgttagacacagcaaacaatgataaaacctgactagcaaagggagcgttagttatgtttgcggtggttatggaaatcaaatcaaccattcaaaaaaataatcagccagttattctacccatacacatttttcagtatctagtaaaaataaatgacttcagcatacactacttcctgggatttaaaga

SEQ ID NO: 10885 - DNA, 600 bp, Chicken  19866894213022_2
ttatcaaaaatatgctgaatcagggagaatattctcctactggatacacaagcatgggagagccatcagaaaggggatcagagaattttcttcacttgaagtcttagaactaacaacatttttccaagtttcacagcagagatattattttactttgaatgtttggagatcctaagtcccacgacttctttgccttaaagcccagcaacaaaatctgcattgctctgttcatttctctacaaatatacgtcttmgcagaatcaggtgagtaaatgaatacaatctgcacaccagaacatraaataccctgtayttcccaagttctctttaacactgctgtttaggctggtattataaacagaatagatgttagacacagcaaacaatgataaaacctgactagcaaagggagcgttagttatgtttgcggtggttatggaaatcaaatcaaccattcaaaaaaataatcagccagttattctacccatacacatttttcagtatctagtaaaaataaatgacttcagcatacactacttcctgggatttaaagactagctaactgtctgcactaattgtattgaagaatactaatgatca

SEQ ID NO: 10886 - DNA, 600 bp, Chicken  19866894213022_3
gctgaatcagggagaatattctcctactggatacacaagcatgggagagccatcagaaaggggatcagagaattttcttcacttgaagtcttagaactaacaacatttttccaagtttcacagcagagatattattttactttgaatgtttggagatcctaagtcccacgacttctttgccttaaagcccagcaacaaaatctgcattgctctgttcatttctctacaaatatacgtcttmgcagaatcaggtgagtaaatgaatacaatctgcacaccagaacatraaataccctgtayttcccaagttctctttaacactgctgtttaggctggtattataaacagaatagatgttagacacagcaaacaatgataaaacctgactagcaaagggagcgttagttatgtttgcggtggttatggaaatcaaatcaaccattcaaaaaaataatcagccagttattctacccatacacatttttcagtatctagtaaaaataaatgacttcagcatacactacttcctgggatttaaagactagctaactgtctgcactaattgtattgaagaatactaatgatcacaggctcctcctc

SEQ ID NO: 10887 - DNA, 600 bp, Chicken  19866894213023_1
ctcagccttcctgctctgtggagcagccatggcctttctgatggagcgagcttcaagctcttcccttcttcagcaggccacggctggacgtggagctgaaaacatctgacccatttagcagatagctctggttttccaaatctctgaggtttataatctttaaaagccttcctgcatgagtagcaattcaggttctgtagctgttggtgcttatctctgagcgcgtgtagatcatatccactttgtgtgctggaatttctatgcgttaggcttttcattttttcaggactgcagataagrctgtgagctgtattttcattgttggggatttttgtcacaaaagatggtttgggggcaggaaaacgcatcagcagtgtgtcaggctgagaatactcacgtgtttattagggcgttcggggattcgtgttttatgagggtgttgcagagtttagaaagctctcttgtgcggcatgcgagcaggagcagaaaaggtcctttatgtgaaggagcctcacaaatcacgaaagctgcatttctttaatgcttttggctcaatcactgcataaaaagtttttaactaacttttcagctggttgagct

SEQ ID NO: 10888 - DNA, 600 bp, Chicken  19866894213023_2
tggttgagctgcttggactcagaatggagcctttgtgcttcctgtcctaattaggaattaatttttaattatgtcggctgaacattttttatgatgagtgcccgtgttagcccggggttcctcattattcctttgacaatgtgtggtactggttcatgtaatattatctgtcctgctgcgttgttcctgtctttgttacctatctgagtatcaaagcgttttggatagcctggtgtaactttgattcaagcttgatctgctttacttgactcagtcattcagacctatttctgcagcagkggaatagcactttctggatagtttcttgcttgtgctgcagtttgctgttaaaggttagcagtcacattaagaatattttgcaactctggaaagagggccctcagcctgagtgatagttctgatgaacttgggtcaccattcctaaagctgaaaggtggtgagtggtgcttctgctgtaggctttgacatgggaatgtatcgagttccctttactttgaatttgaactaatagttcagcaaagccaaatctscgtgcastgctatcacacaatgctgtggtacaaaagagcttctgttgat

SEQ ID NO: 10889 - DNA, 600 bp, Chicken  19866894213023_3
ttgatctgctttacttgactcagtcattcagacctatttctgcagcagkggaatagcactttctggatagtttcttgcttgtgctgcagtttgctgttaaaggttagcagtcacattaagaatattttgcaactctggaaagagggccctcagcctgagtgatagttctgatgaacttgggtcaccattcctaaagctgaaaggtggtgagtggtgcttctgctgtaggctttgacatgggaatgtatcgagttccctttactttgaatttgaactaatagttcagcaaagccaaatctscgtgcastgctatcacacaatgctgtggtacaaaagagcttctgttgatttcatggcagtgttatctggcagaatctggccacagacactttttgtcttcagcccagctgagtggaactccaagagctgctgacaataggaagtatttttggtggggaacgcatggaaaaggactgtggcttcaatacaaacaaacaaggttatagtatgggatgccgccaccaaggcggcacttactggatgcgtaggtggaaattgcagcatatactttggcgtgcaattcattacggtcacttcctc

SEQ ID NO: 10890 - DNA, 600 bp, Chicken  19866894213023_4
gctttacttgactcagtcattcagacctatttctgcagcagkggaatagcactttctggatagtttcttgcttgtgctgcagtttgctgttaaaggttagcagtcacattaagaatattttgcaactctggaaagagggccctcagcctgagtgatagttctgatgaacttgggtcaccattcctaaagctgaaaggtggtgagtggtgcttctgctgtaggctttgacatgggaatgtatcgagttccctttactttgaatttgaactaatagttcagcaaagccaaatctscgtgcastgctatcacacaatgctgtggtacaaaagagcttctgttgatttcatggcagtgttatctggcagaatctggccacagacactttttgtcttcagcccagctgagtggaactccaagagctgctgacaataggaagtatttttggtggggaacgcatggaaaaggactgtggcttcaatacaaacaaacaaggttatagtatgggatgccgccaccaaggcggcacttactggatgcgtaggtggaaattgcagcatatactttggcgtgcaattcattacggtcacttcctcgttatgt

SEQ ID NO: 10891 - DNA, 600 bp, Chicken  19866894213026_1
ttcttctgtagggtatttgcttccaattgctcaaagtaaacttctgtagctggcagcagaaagttgtttgcctcccatacaatgaactgctttctctttaatatttcatatggagcatagatctacggctccagaaatatcttgctcataatagtggagttttgtgaaccttgctaagaagtgctgcattgtgcagaagaagaggtttccttagtttcagctgtagaaagctgctgaacaaatgaacatgagtaaaatctgtgggtttttttttttaccccccccaattcatcaatgctsttcttaccctttgtgtagacagctaatttgctcgttgtttgcctgaaggggattcaagtcaaaaaggaggattgaattactagaagaaggtgctcctgtctctagagaacaaagtacaatgattcaatgaaaaaactttgaaaatttgtcaaatgccagagtgtaatttattctggtccaggttactccatctatgaatatttgtgtaggatatttttgcaactatttcctttcgtatcttgtaaatatggatactacctgtgactgacaacctcctactgctcatgtcatgggctgaat

SEQ ID NO: 10892 - DNA, 599 bp, Chicken  19866894213028_1
  misc_feature (1)..(4): n is any nucleotide
nnnntcatggctgttgctccaacaatttagacctacccactcaggttttgtttcttacgatgctgtcacacagcagaaatcagcatcattgtctggagtggcactgatgggggaggctggcaggagacacagctgatgaaagaaaaacgtgacaaaattgataggaaagaaagggtgcagatgctgctgttttgattaatgaagtaaaagctgtaaaggatgctctagttaaagactgctgaaaaatctccaacaaatcacatactcagcagcctggtagatctggaatgagtgtaacayacaacttctcttctgtttggtagagctgcaggctgaaagtgcaacagaagggcgttggtctgcttgggttactgatttccttcatcatccttcttcatcctcctacatcactttcaacctcagttattcacctcagaacagggtgtgggggactctcaaggtctgtcatttcagcaaagctggtactgtgtgctctgcacaggactgcatagcttctctgaattcttgtcctccttcagaaactgactcactgcatgttctggagtgtaatataactattaccttggtttactggcatg

SEQ ID NO: 10893 - DNA, 600 bp, Chicken  19866894213028_2
tgtcatttcagcaaagctggtactgtgtgctctgcacaggactgcatagcttctctgaattcttgtcctccttcagaaactgactcactgcatgttctggagtgtaatataactattaccttggtttactggcatgtccatgtcacttagagaattactgtgataaaccatgaattaatatttgaatagaatcccagtaatatccaatactatctgaacatgaaaactttatgcaccgttccaacagaaataagagggagaaataacataaggaattcactacggcaataatctctttcrtgagctgtgtttctcttttcttaagcactgcagttgtggccagataatcaactactgtaattaagtacatgattaagtaacagcaaagtatctggcccagatccattttttctgaagataatttgataggaaaaaattgatcccttgtgaaacatttcattttctctctgttccctaaagcctttccagaatgtccgctttcctaacatatccctaaagagccctcaccttctgcacatgatctctgcttttcagatgtcagatttgaagctacatatgtgctggatgataagctgacat

SEQ ID NO: 10894 - DNA, 600 bp, Chicken  19866894213030_1
aaaactaagcaaatgagtacataatgcatgctgcttctagataaccttgtaatacagcttacatacattgtcataactgtgtttttacctcagggcagctcacatgcaacactgtgtacaagatcaaaagaaacacaactgttttttggccaacagtaaagagaagactcctaagaggccctgaaagctgataaatacaggtaggtgttacttgcataaagcagtctgccctgatttcaacagtcttctcctgctaaatcagtaacaatgataacattttgaccatacctaccattatcyctaaggttcaaagcaatgtacaagttgccaaaatcctttaaaattaaatgcaagcccatcagataagagaaagccaggaagaatactgccaaataagccttgctgcagcattctgagttctgcatgctgaaagcaaggcctgttgaacagcaggtgcagaaagataattagcagtaggtacctgtcagtaatccccattacatttaacatgcaactgtctctggaccagcacaaactaaaggactatctttggcaggaagtgagcttgaagaaggaagcacttaaacccttgcccatgaa

SEQ ID NO: 10895 - DNA, 600 bp, Chicken  19866894213035_1
ctgaaggaaatgatgagaatgaaaccagataaataacactaatctaacattttatttcaaaggaaactattagaatccaagggcaggtgatgtatttctcagctaaggtttagaattttaaatctgtagaacaactgtttcgtaaaaattagggttttgtatattacaaaatttcaactgaaatggataatgacatgtggcttgcaaatgccagaagcaaatatctagttgtaatactcttgcaaattcttaacctttgcagtaagacagaaaccctaatatgctacatcataaaacacracagcgttggattttgtaagttaaataacttgggttctatcactagaggcagattttgttttgctgttttgaggttgatgccatccaataatgaatttttaattcataacgcgttccttatgcatttcttgctgtgaaaccaaagactttgtaacattttttttctttttccagaatttctacaaggaaattgagagagaagaaatgtacataaggtttgtaaacgtgaccggtgacaaaaatctgcttgactgagtgtagcaaaattggagaaaattaagatcttattaagcagtcagt

SEQ ID NO: 10896 - DNA, 600 bp, Chicken  19866894213046_1
ggctgaacagacttatgtttctttcctcataaaaaatatactccgggccctttatcatctttgtggctctccattgtactccttctaggagttccctgtctttttgaatttgggaacccagagttggacacagtattctaaatgtagactcaccagggcagagtagacgaggaggatcacatcttttgacctactgaccacactctttttaatgcaccccaggatgcccttggcctttttggtgacaagggcacactacctgctaacctgttgtccaccaggacccctaggtccttctckgcaaagctcttctccagtatttcatctcctagcttgtactgatgcatctggttatttctccccaagtgcaagactctacacttgstcttgttaaatctcatcaggttccactgtgcccaactctccwctctgtccaagtcttgttgaatggtagcactgccttctggtgtgtcagccacttctcccagctccatatcagaaaacttgctgagggtggactctatcccttcatccaagttgttgatgaagatatgaaacaagatcaaacccaacaccgaccactggggaataccactaggt

SEQ ID NO: 10897 - DNA, 600 bp, Chicken  19866894213046_2
taggagttccctgtctttttgaatttgggaacccagagttggacacagtattctaaatgtagactcaccagggcagagtagacgaggaggatcacatcttttgacctactgaccacactctttttaatgcaccccaggatgcccttggcctttttggtgacaagggcacactacctgctaacctgttgtccaccaggacccctaggtccttctckgcaaagctcttctccagtatttcatctcctagcttgtactgatgcatctggttatttctccccaagtgcaagactctacacttgstcttgttaaatctcatcaggttccactgtgcccaactctccwctctgtccaagtcttgttgaatggtagcactgccttctggtgtgtcagccacttctcccagctccatatcagaaaacttgctgagggtggactctatcccttcatccaagttgttgatgaagatatgaaacaagatcaaacccaacaccgaccactggggaataccactaggtacagacctccaaccatattctcttgctgatgaaaaccttctaacctctgccagtcagcaagttctcagtccacctcaccaatcac

SEQ ID NO: 10898 - DNA, 600 bp, Chicken  19866894213046_3
acacagtattctaaatgtagactcaccagggcagagtagacgaggaggatcacatcttttgacctactgaccacactctttttaatgcaccccaggatgcccttggcctttttggtgacaagggcacactacctgctaacctgttgtccaccaggacccctaggtccttctckgcaaagctcttctccagtatttcatctcctagcttgtactgatgcatctggttatttctccccaagtgcaagactctacacttgstcttgttaaatctcatcaggttccactgtgcccaactctccwctctgtccaagtcttgttgaatggtagcactgccttctggtgtgtcagccacttctcccagctccatatcagaaaacttgctgagggtggactctatcccttcatccaagttgttgatgaagatatgaaacaagatcaaacccaacaccgaccactggggaataccactaggtacagacctccaaccatattctcttgctgatgaaaaccttctaacctctgccagtcagcaagttctcagtccacctcaccaatcactcatctatgctccactttcaaagtttcatagcaagggtgtta

SEQ ID NO: 10899 - DNA, 600 bp, Chicken  19866894213054_1
atgtcaaggtggtttctgaagatatccaaggaggagacttcacagcttctctggacaacctatgccactgctgagtcaccttcacagtaaagaagagcttctcgatgttcagacaacacttcctgtctttcagttcatgcccatagcctcttttcatgtcactggcaccgctgaagagagtctggctgcactgtctttgcactctcctttcaggtgcttatagacattaatgagaacccctcccaagcctgttcttctccaggctgaaacctcatctctctcagcctcttcccacagacsatatgttgcaatcccttcattatcttgctggtggctctgatgaaccctctctggtgtctctagccccaagttggattgagtactgaaggtgcagcctcaacagcactgcatagagggtaaaagacccactggcaatactttgcttaatgcagccctctttgctacacatatactgctagcttatagtccacttggtgcccaccaggatcccaggtcttctacacggctgctttccagacatgtggaccccagcttatctggatgcctcagactgtttcctatccagatgcagggatctgc

SEQ ID NO: 10900 - DNA, 600 bp, Chicken  19866894213057_1
tgagtgaagcaactagcaatgaaaaattccaagcaagcacagaagttaatcaatagcactgaagtaaggcagtatcagaatcaactgactttttctttgagaaagctgtagtaatttctctccaggcattgcctataacagtgtaaaaacctttcagaaagatggtacaagagtcctaactgtttgggaggtgtagagaagaaagtgtggcttctgtgtgaaatcttggggacaacaacatgagaatctgaggaataaattgactcttgacaacagtcttgtcttggtaaaaggcaccaratactatccccagtctcatcccacttcatgtatctccactggctcttattaagttccccaaatcctgcatgcagcaggtattaagatattaagcaggtctaaaggtaagtatagtcttaaatgttgtcctgactggggagagttaatagaagagaaaacatggaaatacagaggcttctctgaagaggtagaaaaaaaatcatctgattttgatctgtaattttagaatctttggatttttacagctgtggtgagttattcttaattcacacctgtgtgcaatcttaaaacagacttcaa

SEQ ID NO: 10901 - DNA, 600 bp, Chicken  19866894213062_1
tcccagtagcagggcctgggagccacagtccagctcttacctgctctgtgacgaatttgttgatgtcctggtcctcaggcaggaattccttccagctcagtcccccatcccgccacagcttgcccgcagtcttctggctctgcaagaaaacctcaagtcagccctcagtgccactgctccccatcccgcagccagctgccccagttcccaggtacagcaaggggcgttgcccaccgccaaccctctccatgtgcaaaagggttcaaccccttccctgtgccagccccaacacatacgctrgaaactgtgtgagcagtatgcacttaccatgcccttgcacaataagcccagcacctcgaccagcagtgtggtggccttcccaaggggcaccaggggctttgttatctccctgtggggcacaagcaacgtggttgttacatgtgcccccaccaggaccccatagcagtcccgcacaggggtacagccctcacctgaacagctcctccatggggatgccttcctcttgcaggataggtgttatgagttcrgcaaggtacagccagatgtgcgggatatcaatctccatgtcttctgcaatct

SEQ ID NO: 10902 - DNA, 600 bp, Chicken  19866894213062_2
atgtgcaaaagggttcaaccccttccctgtgccagccccaacacatacgctrgaaactgtgtgagcagtatgcacttaccatgcccttgcacaataagcccagcacctcgaccagcagtgtggtggccttcccaaggggcaccaggggctttgttatctccctgtggggcacaagcaacgtggttgttacatgtgcccccaccaggaccccatagcagtcccgcacaggggtacagccctcacctgaacagctcctccatggggatgccttcctcttgcaggataggtgttatgagttcrgcaaggtacagccagatgtgcgggatatcaatctccatgtcttctgcaatctccaggatctcccgcagcctggagggcagagagaggggcattgggatccaataatccccgtgccctcagctaggagggacttcaggagagctgaattcaaaggcaggccaaatagtgctttggggacaagctgcctcagtccctcaccctttatagtactgctccttggagagcgtgccagccttcaccaggtggcacagcaggacccccatgtgctcgcgggagatcgtgctccgctcaagcgtggac

SEQ ID NO: 10903 - DNA, 600 bp, Chicken  19866894213074_1
agctggattttaaaaagaatacttctgtctacagtgtttcaccagttctgagctgctgaggaggtgagtgtcattaaagggacacaggagagagaagtcatgaaactacggtaaaaaaaatgatgttttccgtatgttgttgtaagtgaatgaatattataggttcatgctgtaagtcatgtgagagacacaatagaaattgcaagtaagcaatcagaaatggacaaatcttgagagaggacaagtgatctgaaatgcatttgcagaaaaactgcacattggtagtaaaaccacagaaawgttaaaggacaggtatataaatccattacyactgatctaaagcggcaaaataggacaaatgaggcaaaaaatagcataagaacccatacttatatggatgttggcagctctgcctcaaacctggctgtaactggaaaacataaacaaatatgaatttaataataataaaaaaacccaaacattgtaatataatccctccagaaaaggtttcatgtagagkacaaaattcaggtgtatcagaacttaactatctttaggttttcacagtagtgttggtaggccaactcatatttaaatttg

SEQ ID NO: 10904 - DNA, 600 bp, Chicken  19866894213074_2
acagtgtttcaccagttctgagctgctgaggaggtgagtgtcattaaagggacacaggagagagaagtcatgaaactacggtaaaaaaaatgatgttttccgtatgttgttgtaagtgaatgaatattataggttcatgctgtaagtcatgtgagagacacaatagaaattgcaagtaagcaatcagaaatggacaaatcttgagagaggacaagtgatctgaaatgcatttgcagaaaaactgcacattggtagtaaaaccacagaaawgttaaaggacaggtatataaatccattacyactgatctaaagcggcaaaataggacaaatgaggcaaaaaatagcataagaacccatacttatatggatgttggcagctctgcctcaaacctggctgtaactggaaaacataaacaaatatgaatttaataataataaaaaaacccaaacattgtaatataatccctccagaaaaggtttcatgtagagkacaaaattcaggtgtatcagaacttaactatctttaggttttcacagtagtgttggtaggccaactcatatttaaatttgaatttatacacgttttcatttttacatttt

SEQ ID NO: 10905 - DNA, 600 bp, Chicken  19866894213074_3
tggacaaatcttgagagaggacaagtgatctgaaatgcatttgcagaaaaactgcacattggtagtaaaaccacagaaawgttaaaggacaggtatataaatccattacyactgatctaaagcggcaaaataggacaaatgaggcaaaaaatagcataagaacccatacttatatggatgttggcagctctgcctcaaacctggctgtaactggaaaacataaacaaatatgaatttaataataataaaaaaacccaaacattgtaatataatccctccagaaaaggtttcatgtagagkacaaaattcaggtgtatcagaacttaactatctttaggttttcacagtagtgttggtaggccaactcatatttaaatttgaatttatacacgttttcatttttacattttcagtataaatatttacaaccataagcattcaaaatctcatcaagcttcaaaataaaatcctggcttaaaaaaatattttatttatttatttatttatttatttatttagaacatataagaatgcatattgttgtgatcccttttttatttgtatgattatttctgagatgatacagtaccatctagatat

SEQ ID NO: 10906 - DNA, 555 bp, Chicken  19866894213079_1
tgccatttatgccaactactatttagttacatcaagtgtctctgttcttccttatgtaacttgactaccctaaagaaagttatagctgagtcctggtttagtaattttgtatttctaaaacagatcagagtgagatgggacaatacttgaatttatacaatagtttctgaaatatgttggcagaaacctggatctggatagcctgagtgcatgtagccacagaagtcaagaatgtcatcttttgcctatagcttacagtcttataagagtaggtagaatgggaaagcaaagtatagaaakacctgtgcttctggtatacttttattttaagtgtaatagatgcataatggaaaaaggggcccaatgggttaatggcagttgcttctgtagctagagctgattttgatttttcttaacagtagtgtgcagatttttttagtgcagtttgtacagaatgcttctatcaagagcagatttcaaaattgttctatgaagcatgtagctcaagatgttgtctgtttaacttcagtgcatctctagctacagagtactaat

SEQ ID NO: 10907 - DNA, 600 bp, Chicken  19866894213092_1
agaagagcacatacttctgaactggctaggctgtgatcatgagctattagctcagcttttgtgatagctgcattcttcttaacggactttaatacactgttttcattatatgaataagaataaatgctctgagaagaggaaggagccagagcatttctgatactattcctactgctgatcaggcaaaatctgctgacctgttgttctcacagtgtctcaggatagcagaaatagaagtggcaactaatgcagaagacactgaacttattttgaaagtgttagctctaagaaatcatcttygcacactctatgcacttcattgagttggtaggaaagtcatgttcagacagctaacttaaagaacactgggttattttcagaaagaaaaaaaaccaacaacaacaatagtagtaactattcacgagatgcaatcatgcaaacggtaacaaacaataccagtcctggattagtgagacttggttcctgttaagactgctctttgctgtggcaaaaagcatttctctttgtatgttcctgtgtcaggatggcactatactttacgcagacagcccaggtcagcaaggaaggcttttgcagtgc

SEQ ID NO: 10908 - DNA, 599 bp, Chicken  19866894213102_1
  misc_feature (1)..(107): n is any nucleotide
nnnnnnnnnnnnnnnnnnnnnnnnnnnnnnnnnnnnnnnnnnnnnnnnnnnnnnnnnnnnnnnnnnnnnnnnnnnnnnnnnnnnnnnnnnnnnnnnnnnnnnnnnnntgtcttctgatgcagagaaactgtggggtttaacacagccctatcttaaaaatcagaaggttttatgtcaaggctctgtcttctgtgttttaaagtctattgctggaagttgtttacttgtgtcgtactgatacaataatctgagatactgaaatgatactctgtgatgtgtataagtaataaaatgtagaawttccctatttataaataagtttctgttgattttcaaggtacatgcaagcagaaagcatacagtgctgtatggcagaggggyagtgcaggcctgcatttgtccttccccttttctagcataatgattttggctatcagccctgcaagttgtttgcttcagcctcagataatcaatctgattaagtgtcttggcagtatttgatattgtacagaaaatgtttggaatggtggagagatatttcactgagctactactcatgtgaaaggcttcgttttaatagtcttggtgataacagaact

SEQ ID NO: 10909 - DNA, 599 bp, Chicken  19866894213102_2
  misc_feature (1)..(26): n is any nucleotide
nnnnnnnnnnnnnnnnnnnnnnnnnntgtcttctgatgcagagaaactgtggggtttaacacagccctatcttaaaaatcagaaggttttatgtcaaggctctgtcttctgtgttttaaagtctattgctggaagttgtttacttgtgtcgtactgatacaataatctgagatactgaaatgatactctgtgatgtgtataagtaataaaatgtagaawttccctatttataaataagtttctgttgattttcaaggtacatgcaagcagaaagcatacagtgctgtatggcagaggggyagtgcaggcctgcatttgtccttccccttttctagcataatgattttggctatcagccctgcaagttgtttgcttcagcctcagataatcaatctgattaagtgtcttggcagtatttgatattgtacagaaaatgtttggaatggtggagagatatttcactgagctactactcatgtgaaaggcttcgttttaatagtcttggtgataacagaactaactgaaacaagagagagatggaaataatatatattggatcatatcttttagagcgagtgattgtagacataaaccactat

SEQ ID NO: 10910 - DNA, 600 bp, Chicken  19866894213113_1
aatttcagatggttttctatttgcaatatggttgtgctgtttggcagttcactcccaggggctctattcctttggaaatgctgccctggcaagaacagccttactctccactctaataacagtttgcacttttaatacaatgccttctggacaagatctcatcacagactctagctagcaattaattaagacattcagagatatgctgtttggcaggctcccacacactgcagccttctccatagaacattcccagttgtgctgcagtcccagaattaaattaccctcaaaagcattatrtacttggacaattygacctgtggtgccttgctagtgtatgtttatgctttctgtgattcaaagagtgtcaaagcctccctgagcactggaatgggttaaactatattttccattgctctgctatgggcttgaagactttccagccactgccaggcactgaaagactcttccatgcatgtaaactccatgctgcccactgcaaaactgccctgtgtagattacatccctacatagaaacttaatctgttacccactgagtaccatcatcaagagactgctgacatcccaatatccctgttt

SEQ ID NO: 10911 - DNA, 600 bp, Chicken  19866894213113_2
ttctatttgcaatatggttgtgctgtttggcagttcactcccaggggctctattcctttggaaatgctgccctggcaagaacagccttactctccactctaataacagtttgcacttttaatacaatgccttctggacaagatctcatcacagactctagctagcaattaattaagacattcagagatatgctgtttggcaggctcccacacactgcagccttctccatagaacattcccagttgtgctgcagtcccagaattaaattaccctcaaaagcattatrtacttggacaattygacctgtggtgccttgctagtgtatgtttatgctttctgtgattcaaagagtgtcaaagcctccctgagcactggaatgggttaaactatattttccattgctctgctatgggcttgaagactttccagccactgccaggcactgaaagactcttccatgcatgtaaactccatgctgcccactgcaaaactgccctgtgtagattacatccctacatagaaacttaatctgttacccactgagtaccatcatcaagagactgctgacatcccaatatccctgtttcaaatgttatcttg

SEQ ID NO: 10912 - DNA, 600 bp, Chicken  19866894213113_3
taagagtgaacagtagaaggtgtgaacaattgttcagtggcaatgttggtgtgtaacaccaatttccttcgccccagctcctggtcacgcattctaccttcttaatcctgcctgctgttacaccatctcagctgtttttgtagcaatgcaatgaatcagactgaggaacggatatggctggaaaatgccttaattttcttgccatactactttacagccctagcagttctgttggttttgcagcacacgaagccagatgatgcagacgcaaataaacagccagaagcaaatctacaaagwgtcgtttgtgaatgcttaaccaggttctgaatagtagtaaacagaagtttatccttaaaagaacagccctcccttaccttgggcaaacagagtaacagggagtggctggaaggggtaaggttcaattttctgccctgtgtttaagctgtgcaaagctggcagacaggcccttaggaaatgctgcagccagacacagacggtacaattggggttaatcacasgcaaagcaaaagggcagaagctcttaatgtgtattatttcttaaggctaattgttgagtatattcactaagaagtgttt

SEQ ID NO: 10913 - DNA, 600 bp, Chicken  19866894213113_4
agcagttctgttggttttgcagcacacgaagccagatgatgcagacgcaaataaacagccagaagcaaatctacaaagwgtcgtttgtgaatgcttaaccaggttctgaatagtagtaaacagaagtttatccttaaaagaacagccctcccttaccttgggcaaacagagtaacagggagtggctggaaggggtaaggttcaattttctgccctgtgtttaagctgtgcaaagctggcagacaggcccttaggaaatgctgcagccagacacagacggtacaattggggttaatcacasgcaaagcaaaagggcagaagctcttaatgtgtattatttcttaaggctaattgttgagtatattcactaagaagtgtttgtctatctattataaccaacatgtaacatttggcaccatggatggataggaatgagaaatgaggagacgtatatttaatatgcagaaatgacacctattggttatccagcattgcatcctgtgcatatcctgagctattttccagatcacactgaaagcttgtgctgctgagttaatctgtgcaggtttttatgctatgttcctcactacagtattgcaat

SEQ ID NO: 10914 - DNA, 600 bp, Chicken  19866894213124_1
gtgagtagaaggcttttatttttcctaacggagtcttgttatatgaactatctcatttcctgattagcaaagtaaaagcatgaaattattctcaccctggctggatcccagctggatcaaagcatggcgcagaacatacggcaccagtttccttgttgagaaagtccaggagaaattcaagcatctacatctcatctcgtctgataaagatatcagcccaagaatgtaaagacagggctggctgagcaatgtatatctatacacttgcctggtgagctttgtacctggttttgttgcacygttagtccttcagcacagagtcctgttctgcttttggagcacagtccaagcccagccccagatgacaagtcaccagcattcgtaactcttatgtcttctcttctcaggtgttatggggtacggtctgtcccattcccagaaataccagacctctgatgggggccggggggcacagcttgcacaggagctcggagtactgttgaggctgtgtgtgtatgtgggtgcagggaaccctgcgaggagtgagaggtgggtcaagtgcccgagtgcagctcctagcagatacatgtcactgcaatg

SEQ ID NO: 10915 - DNA, 599 bp, Chicken  19866894213125_1
  misc_feature (1)..(68): n is any nucleotide
nnnnnnnnnnnnnnnnnnnnnnnnnnnnnnnnnnnnnnnnnnnnnnnnnnnnnnnnnnnnnnnnnnnnagatggggctgcctgaaaagcactggaggtctcagccccccagcagagccacagcctactgctgtgcagcttctgcgtgctccagcatgaaaggtacatggcaatgacaacccaaacacatgcacactgccatcctggagacaggagagctgaaagggctgaactcatcaagagaacccagggagctgcctgccggcaggggcacacactgagaggcagcaaaggtgattaygatgaagaaaacaagcccatccttccaatgatcccaaactgggatatcttacgggagctgaactgcagagtgcccgcctggctggatgccccaggaacattcagatctgagactgtattttgaactttatctctagtttaggctgcagctcgctgrgtgcccaggcacataatcrcacgcatccctgatgccaacagcttaaataatctcattacatatgacggcaaacaccgcaacagtcgcgggctgcttgagccaacttgctcacctgccctttccgctgggagaatttcctttgt

SEQ ID NO: 10916 - DNA, 600 bp, Chicken  19866894213125_2
gaaaggtacatggcaatgacaacccaaacacatgcacactgccatcctggagacaggagagctgaaagggctgaactcatcaagagaacccagggagctgcctgccggcaggggcacacactgagaggcagcaaaggtgattaygatgaagaaaacaagcccatccttccaatgatcccaaactgggatatcttacgggagctgaactgcagagtgcccgcctggctggatgccccaggaacattcagatctgagactgtattttgaactttatctctagtttaggctgcagctcgctgrgtgcccaggcacataatcrcacgcatccctgatgccaacagcttaaataatctcattacatatgacggcaaacaccgcaacagtcgcgggctgcttgagccaacttgctcacctgccctttccgctgggagaatttcctttgtcacagcaaagccacgcaccaacatgacgcactaattcatggaaagatgaacgccgtcctccccagcagcatcaggcttcaaggctgacccatggccgggcttccacgtgctcccagcacagcatcaaagggttgttggagctctctgggctcagcct

SEQ ID NO: 10917 - DNA, 600 bp, Chicken  19866894213125_3
caacccaaacacatgcacactgccatcctggagacaggagagctgaaagggctgaactcatcaagagaacccagggagctgcctgccggcaggggcacacactgagaggcagcaaaggtgattaygatgaagaaaacaagcccatccttccaatgatcccaaactgggatatcttacgggagctgaactgcagagtgcccgcctggctggatgccccaggaacattcagatctgagactgtattttgaactttatctctagtttaggctgcagctcgctgrgtgcccaggcacataatcrcacgcatccctgatgccaacagcttaaataatctcattacatatgacggcaaacaccgcaacagtcgcgggctgcttgagccaacttgctcacctgccctttccgctgggagaatttcctttgtcacagcaaagccacgcaccaacatgacgcactaattcatggaaagatgaacgccgtcctccccagcagcatcaggcttcaaggctgacccatggccgggcttccacgtgctcccagcacagcatcaaagggttgttggagctctctgggctcagcctcgctctctgcacacagggt

SEQ ID NO: 10918 - DNA, 600 bp, Chicken  19866894213127_1
ttgagcaattaggtaggtttaaccaatgtccacaggaaacagcagaatccagcagcccttctagatttattaactctcagacaccctcttgactggttgatggttggacttgatgatcttgaaggtcttttccaaccaagatgattctgtgattcttaagagctagccaactgtattatccaaaattaagttgtatcgaatccagcaatgccactcaatcccaccagctccacgctgaggaagcgttaagacatgcctgcttcttcttcattcagaaaataagcttcagccagtttcttyattaaacacarttctatttcraatttctttcaggagccatctagagatgcatacgttactgtaaatatcacgaacaccaccatcccacagctctcggaagacgtgcgtctcctgggccctgctggctcccctgcmccyggragctcaccctgtggtcactcctcgtgcaggcacggcagcccaggcacggcaccctgcagggctgggggcaacctccaggaggtctccgtggggactgrgacagacgatgagcatttctcacccgtacccacggaagatgaatatatggataaagatctc

SEQ ID NO: 10919 - DNA, 600 bp, Chicken  19866894213127_2
ggtaggtttaaccaatgtccacaggaaacagcagaatccagcagcccttctagatttattaactctcagacaccctcttgactggttgatggttggacttgatgatcttgaaggtcttttccaaccaagatgattctgtgattcttaagagctagccaactgtattatccaaaattaagttgtatcgaatccagcaatgccactcaatcccaccagctccacgctgaggaagcgttaagacatgcctgcttcttcttcattcagaaaataagcttcagccagtttcttyattaaacacarttctatttcraatttctttcaggagccatctagagatgcatacgttactgtaaatatcacgaacaccaccatcccacagctctcggaagacgtgcgtctcctgggccctgctggctcccctgcmccyggragctcaccctgtggtcactcctcgtgcaggcacggcagcccaggcacggcaccctgcagggctgggggcaacctccaggaggtctccgtggggactgrgacagacgatgagcatttctcacccgtacccacggaagatgaatatatggataaagatctcaatactgccga

SEQ ID NO: 10920 - DNA, 600 bp, Chicken  19866894213127_3
accaatgtccacaggaaacagcagaatccagcagcccttctagatttattaactctcagacaccctcttgactggttgatggttggacttgatgatcttgaaggtcttttccaaccaagatgattctgtgattcttaagagctagccaactgtattatccaaaattaagttgtatcgaatccagcaatgccactcaatcccaccagctccacgctgaggaagcgttaagacatgcctgcttcttcttcattcagaaaataagcttcagccagtttcttyattaaacacarttctatttcraatttctttcaggagccatctagagatgcatacgttactgtaaatatcacgaacaccaccatcccacagctctcggaagacgtgcgtctcctgggccctgctggctcccctgcmccyggragctcaccctgtggtcactcctcgtgcaggcacggcagcccaggcacggcaccctgcagggctgggggcaacctccaggaggtctccgtggggactgrgacagacgatgagcatttctcacccgtacccacggaagatgaatatatggataaagatctcaatactgccgactatttacct

SEQ ID NO: 10921 - DNA, 600 bp, Chicken  19866894213127_4
ccaagatgattctgtgattcttaagagctagccaactgtattatccaaaattaagttgtatcgaatccagcaatgccactcaatcccaccagctccacgctgaggaagcgttaagacatgcctgcttcttcttcattcagaaaataagcttcagccagtttcttyattaaacacarttctatttcraatttctttcaggagccatctagagatgcatacgttactgtaaatatcacgaacaccaccatcccacagctctcggaagacgtgcgtctcctgggccctgctggctcccctgcmccyggragctcaccctgtggtcactcctcgtgcaggcacggcagcccaggcacggcaccctgcagggctgggggcaacctccaggaggtctccgtggggactgrgacagacgatgagcatttctcacccgtacccacggaagatgaatatatggataaagatctcaatactgccgactatttacctttactgagtcagcctgacaataaaactttgtcattgttttcggaaccggtggaggtaggggagaacgatagcttaaatcagtgcttttcagggatcgggagcgcagaggacgtg

SEQ ID NO: 10922 - DNA, 600 bp, Chicken  19866894213127_5
agatgattctgtgattcttaagagctagccaactgtattatccaaaattaagttgtatcgaatccagcaatgccactcaatcccaccagctccacgctgaggaagcgttaagacatgcctgcttcttcttcattcagaaaataagcttcagccagtttcttyattaaacacarttctatttcraatttctttcaggagccatctagagatgcatacgttactgtaaatatcacgaacaccaccatcccacagctctcggaagacgtgcgtctcctgggccctgctggctcccctgcmccyggragctcaccctgtggtcactcctcgtgcaggcacggcagcccaggcacggcaccctgcagggctgggggcaacctccaggaggtctccgtggggactgrgacagacgatgagcatttctcacccgtacccacggaagatgaatatatggataaagatctcaatactgccgactatttacctttactgagtcagcctgacaataaaactttgtcattgttttcggaaccggtggaggtaggggagaacgatagcttaaatcagtgcttttcagggatcgggagcgcagaggacgtgtcc

SEQ ID NO: 10923 - DNA, 600 bp, Chicken  19866894213127_6
tgattctgtgattcttaagagctagccaactgtattatccaaaattaagttgtatcgaatccagcaatgccactcaatcccaccagctccacgctgaggaagcgttaagacatgcctgcttcttcttcattcagaaaataagcttcagccagtttcttyattaaacacarttctatttcraatttctttcaggagccatctagagatgcatacgttactgtaaatatcacgaacaccaccatcccacagctctcggaagacgtgcgtctcctgggccctgctggctcccctgcmccyggragctcaccctgtggtcactcctcgtgcaggcacggcagcccaggcacggcaccctgcagggctgggggcaacctccaggaggtctccgtggggactgrgacagacgatgagcatttctcacccgtacccacggaagatgaatatatggataaagatctcaatactgccgactatttacctttactgagtcagcctgacaataaaactttgtcattgttttcggaaccggtggaggtaggggagaacgatagcttaaatcagtgcttttcagggatcgggagcgcagaggacgtgtccatg

SEQ ID NO: 10924 - DNA, 600 bp, Chicken  19866894213127_7
gaagcgttaagacatgcctgcttcttcttcattcagaaaataagcttcagccagtttcttyattaaacacarttctatttcraatttctttcaggagccatctagagatgcatacgttactgtaaatatcacgaacaccaccatcccacagctctcggaagacgtgcgtctcctgggccctgctggctcccctgcmccyggragctcaccctgtggtcactcctcgtgcaggcacggcagcccaggcacggcaccctgcagggctgggggcaacctccaggaggtctccgtggggactgrgacagacgatgagcatttctcacccgtacccacggaagatgaatatatggataaagatctcaatactgccgactatttacctttactgagtcagcctgacaataaaactttgtcattgttttcggaaccggtggaggtaggggagaacgatagcttaaatcagtgcttttcagggatcgggagcgcagaggacgtgtccatgcctcagggctccgacccttcctccaatgcagatggtgtacacaccaccatggacaaatacctgcagaaatcttgccagcgttcccacggttgcccaaa

SEQ ID NO: 10925 - DNA, 600 bp, Chicken  19866894213128_1
cttgccctctgtctccacttctgattgcacagccctctatcagaagccattcactgaattcccagctgaggaacacagcgctccgcaggcaggctgcattgatttctgccggtgaggtcctggccctctgtccttcccgaatgcataggatgacccctgaaggctcggtgagctttgtgaaaacactcagtatagtgaaggtcggtgtgtgtctcaggcattttctattcctgagacacatacacggctgcagcgttcagctcacaaaaaatgcttttcaggaaaaaaaaaaaaaaatgkcaagacaaagcaggcatgagcccactgactaacagcttgtagcaaagaaatctgttctgtggcgttcgagggatgctttgaacaagatgatcagggcagctcaggcttaatacagctttacatcattaacagttaacagcggagtagggtgtgcttactgctggtcacgtagcctgcgatggccaaggagaaaataatcaagtggagattaaagggaggtgacgatgtccgactgctccttttcctaaagattgtagattcgcttggcagtgctcatagcctgctttttttcaatcattc

SEQ ID NO: 10926 - DNA, 600 bp, Chicken  19866894213133_1
tccaagtgtttcacacactatttgagcttttaatattctgctgtggcattctgtggccagtactgaaaagcaaaatcctttcagatctcttgtaacttggcagagagctgtaagaggtaaatcagagataaagaggaataattaactctatcagaagtcacttttagtcaggagaatttaaggcttgcttttgatctttcaaattgaccatgacaccttgcattccgtgtatgttgtatattataattataggcaattatgctttataatatacatgtaagcagatctgcactacaaagraaaatgaattaaagtgtggaaaggattttggaggagatgcaagcaaatgaacatgaagcatatgagaaatctgatcaataaaatacaatttcaaaataaaaacatcagctgctagagcatcgtgataaatcacggcagtaggatgcagtcgtatgcatagaattggaactgaatgatgcattggtgagaaggagaacacgtcaaacacaaacaattgatgtcctctgcttcaagtgttcattttacctgtagtttgctttcaaccttttcctcttcatccctaaccataccccaagccag

SEQ ID NO: 10927 - DNA, 600 bp, Chicken  19866894213133_2
ttggaggagatgcaagcaaatgaacatgaagcatatgagaaatctgatcaataaaatacaatttcaaaataaaaacatcagctgctagagcatcgtgataaatcacggcagtaggatgcagtcgtatgcatagaattggaactgaatgatgcattggtgagaaggagaacacgtcaaacacaaacaattgatgtcctctgcttcaagtgttcattttacctgtagtttgctttcaaccttttcctcttcatccctaaccataccccaagccagctgggcctcctgtgtgccatgtccggyttgagatctctgtggttaaagccaagcttgaggctctgctagtggtggcatagctaccagtcataccaggcctagcttgttgggggagctctcatagttgcrcyrtttcacctgtgttctctgcctgccccacatcccacagactcttttagaatcattttaggcccttacattttagctcctgttcagtaaatccattcctagagtcagtgatcaagtgcctttgcagccaaaggagccctagccatagcaactgcaatgcagaacaatcagagccatgtcacagacaggctgcagaat

SEQ ID NO: 10928 - DNA, 600 bp, Chicken  19866894213133_3
tcacggcagtaggatgcagtcgtatgcatagaattggaactgaatgatgcattggtgagaaggagaacacgtcaaacacaaacaattgatgtcctctgcttcaagtgttcattttacctgtagtttgctttcaaccttttcctcttcatccctaaccataccccaagccagctgggcctcctgtgtgccatgtccggyttgagatctctgtggttaaagccaagcttgaggctctgctagtggtggcatagctaccagtcataccaggcctagcttgttgggggagctctcatagttgcrcyrtttcacctgtgttctctgcctgccccacatcccacagactcttttagaatcattttaggcccttacattttagctcctgttcagtaaatccattcctagagtcagtgatcaagtgcctttgcagccaaaggagccctagccatagcaactgcaatgcagaacaatcagagccatgtcacagacaggctgcagaatgtcacacatctgccactgcaaatgagccaccaccacacctttaacagagctcttctgatgtattctaatgcacaaattatgattgctgtcagatcttgttgc

SEQ ID NO: 10929 - DNA, 600 bp, Chicken  19866894213133_4
acggcagtaggatgcagtcgtatgcatagaattggaactgaatgatgcattggtgagaaggagaacacgtcaaacacaaacaattgatgtcctctgcttcaagtgttcattttacctgtagtttgctttcaaccttttcctcttcatccctaaccataccccaagccagctgggcctcctgtgtgccatgtccggyttgagatctctgtggttaaagccaagcttgaggctctgctagtggtggcatagctaccagtcataccaggcctagcttgttgggggagctctcatagttgcrcyrtttcacctgtgttctctgcctgccccacatcccacagactcttttagaatcattttaggcccttacattttagctcctgttcagtaaatccattcctagagtcagtgatcaagtgcctttgcagccaaaggagccctagccatagcaactgcaatgcagaacaatcagagccatgtcacagacaggctgcagaatgtcacacatctgccactgcaaatgagccaccaccacacctttaacagagctcttctgatgtattctaatgcacaaattatgattgctgtcagatcttgttgcta

SEQ ID NO: 10930 - DNA, 600 bp, Chicken  19866894213133_5
cggcagtaggatgcagtcgtatgcatagaattggaactgaatgatgcattggtgagaaggagaacacgtcaaacacaaacaattgatgtcctctgcttcaagtgttcattttacctgtagtttgctttcaaccttttcctcttcatccctaaccataccccaagccagctgggcctcctgtgtgccatgtccggyttgagatctctgtggttaaagccaagcttgaggctctgctagtggtggcatagctaccagtcataccaggcctagcttgttgggggagctctcatagttgcrcyrtttcacctgtgttctctgcctgccccacatcccacagactcttttagaatcattttaggcccttacattttagctcctgttcagtaaatccattcctagagtcagtgatcaagtgcctttgcagccaaaggagccctagccatagcaactgcaatgcagaacaatcagagccatgtcacagacaggctgcagaatgtcacacatctgccactgcaaatgagccaccaccacacctttaacagagctcttctgatgtattctaatgcacaaattatgattgctgtcagatcttgttgctat

SEQ ID NO: 10931 - DNA, 561 bp, Chicken  19866894213142_1
tcagagcagaactaggcccccagaatggtgcaggaaaatgggttccagaaaaatgtgatgaagccacgttaacaacctgtttgtgtctcgtggggattctgcatggatctctgcaactccatccatcacactgatgggggcaccgcctcccaaatgctacctgtagcacagagggcaccttctagaagtcaagtgtgttcatcctagagctaactcagtaacttttgttgttgcttgattttttttttttttttggctctatttttgtttggttttgtttcagaataaatggtcttgagrtgatctgactctaatcatagaaccatagaatcattaaggttgaaaaagatctctaagatcatctggtcaaactgtcggtccaccaccaccatgcccactaagccatgtccctaaatgccacatctccacatatcttgaacatctccaggaaacctaacctcacactgtggaatctcatggttgtgactttctttgcacagtaacactgctcctgatggatgcacaataagggcatgcaggaccagctcctgtgtgtgttgg

SEQ ID NO: 10932 - DNA, 599 bp, Chicken  19866894213145_1
  misc_feature (1)..(177): n is any nucleotide
nnnnnnnnnnnnnnnnnnnnnnnnnnnnnnnnnnnnnnnnnnnnnnnnnnnnnnnnnnnnnnnnnnnnnnnnnnnnnnnnnnnnnnnnnnnnnnnnnnnnnnnnnnnnnnnnnnnnnnnnnnnnnnnnnnnnnnnnnnnnnnnnnnnnnnnnnnnnnnnnnnnnnnnnnnnnnnnnntgaaatgagagctgggtgtgtggtggagaaaatagttaaccgatgggcaaacttcacagttaggtctcaaaggcaccttcttccctttgctctaacagccaccaagtatggtgtctcgtgttkcgaagcttgtcagtcttgtgtagtgttttttaatgtcgaataccagtgttgacatgttgagatcctattgtgagagcagccatcctttcacatcctgcagcagcatttaaccttctcttttgtcctgaatttttcagtgctgctcctagcactggtgtataaattaattgttggtaggtgtgggctttgggtgcctacagtgtccatggcacagcrttaggatgtgtgtcagatgagyggcgagcagccaacagagggaagggtgggctggagcttcaggaacacctggaatcgattgc

SEQ ID NO: 10933 - DNA, 600 bp, Chicken  19866894213145_2
ccgatgggcaaacttcacagttaggtctcaaaggcaccttcttccctttgctctaacagccaccaagtatggtgtctcgtgttkcgaagcttgtcagtcttgtgtagtgttttttaatgtcgaataccagtgttgacatgttgagatcctattgtgagagcagccatcctttcacatcctgcagcagcatttaaccttctcttttgtcctgaatttttcagtgctgctcctagcactggtgtataaattaattgttggtaggtgtgggctttgggtgcctacagtgtccatggcacagcrttaggatgtgtgtcagatgagyggcgagcagccaacagagggaagggtgggctggagcttcaggaacacctggaatcgattgctcccttagcagctgcctctcagtaacctcaggctaacaggcaaagggcgaactaggtacagataacctctcaaaaaccagcagaaaagtcagtaaatgagcccgctgaccttttttccctgcttttccctttgcagctatgacagggggtccacttttaacgtgtttgtgggaaaagggcaacttattgctgggatggacaaggccctggttggcat

SEQ ID NO: 10934 - DNA, 600 bp, Chicken  19866894213145_3
aggtctcaaaggcaccttcttccctttgctctaacagccaccaagtatggtgtctcgtgttkcgaagcttgtcagtcttgtgtagtgttttttaatgtcgaataccagtgttgacatgttgagatcctattgtgagagcagccatcctttcacatcctgcagcagcatttaaccttctcttttgtcctgaatttttcagtgctgctcctagcactggtgtataaattaattgttggtaggtgtgggctttgggtgcctacagtgtccatggcacagcrttaggatgtgtgtcagatgagyggcgagcagccaacagagggaagggtgggctggagcttcaggaacacctggaatcgattgctcccttagcagctgcctctcagtaacctcaggctaacaggcaaagggcgaactaggtacagataacctctcaaaaaccagcagaaaagtcagtaaatgagcccgctgaccttttttccctgcttttccctttgcagctatgacagggggtccacttttaacgtgtttgtgggaaaagggcaacttattgctgggatggacaaggccctggttggcatgtgcgtcaacgagcggcgcttc

SEQ ID NO: 10935 - DNA, 600 bp, Chicken  19866894213157_1
tcgatcaaagagataacagttttgtatgcaattatatgaagtttcaaatggcattataagaaatagttaattgatagctgtgttttagtactggatttagcaggagtacatcattagagagcatcacacagcagtacctgtggacagtaagtcactcatctgtggtctgctccttgtgaattggttattcaacaaatgccgtaagcctcctcctcctctgccagcatttttcatccttctctgacctgatagccaattaagcacaatacaacttggcaaaagcagctcttagaagagtgrggtttcattatactatttcaagaggatatttctaagaactctgtaaatgcaaaacctgtgcagtaggtttctaactacatctctcttcagccttcgtttgtgcagcagtgtgtaaaacattcattctgctggcagcactctaaaactagcgcacaacagaaacatactataacaatatagcatcactaccatgttattttccaaatctttgtggtctccagaagatgtgttctctgctagtgcaaatatccatatgccagagctttaccaggatttccaggggtatccagagagcttctc

SEQ ID NO: 10936 - DNA, 600 bp, Chicken  19866894213174_1
tatattgcactgttttttgtctattttctttacatgtgtgatttctttaaacttttttgctgtcattgcttttcaggaatggtaagtacataaaaaatatatattttatattaacttgaatatgtattgcataattagattcatcttgtattttttcccctgttttgtagttcttactaattccccttttataatctatatatatttatataaataaatatatataaaaggcatagttatcagtaaaatagacaagttgttgaaggacttatatatagctgaaagctaatcagtatgatwtcaaagtggagttttaatcattttcatttaagactttcttttaaatatgacgatatttatgaattttaattaaaagtagcatatgtttgggratccatttcagggctcagatattttctctatacttttttcacattgtagctgtctgcacccttagacacttattaacttgtagagttcatacagtagctgcagactgtttttagagcttgatccatggcctgtagaagtcaatagactttcatcacttttagcacaacttagattggagggttaaattgtagatctttttttttcagt

SEQ ID NO: 10937 - DNA, 600 bp, Chicken  19866894213174_2
aaaaatatatattttatattaacttgaatatgtattgcataattagattcatcttgtattttttcccctgttttgtagttcttactaattccccttttataatctatatatatttatataaataaatatatataaaaggcatagttatcagtaaaatagacaagttgttgaaggacttatatatagctgaaagctaatcagtatgatwtcaaagtggagttttaatcattttcatttaagactttcttttaaatatgacgatatttatgaattttaattaaaagtagcatatgtttgggratccatttcagggctcagatattttctctatacttttttcacattgtagctgtctgcacccttagacacttattaacttgtagagttcatacagtagctgcagactgtttttagagcttgatccatggcctgtagaagtcaatagactttcatcacttttagcacaacttagattggagggttaaattgtagatctttttttttcagttattaactttttaaagatagtcaaaggtaccgtgtttcctctaaaatcaacagctgaattgaaatgttaggaaaaaagttcaagtgatggca

SEQ ID NO: 10938 - DNA, 599 bp, Chicken  19866894213183_1
  misc_feature (1)..(31): n is any nucleotide
nnnnnnnnnnnnnnnnnnnnnnnnnnnnnnntttgtgaagcagagttttactattaatggaatacccttgacattttgaatgaactacttcagaccactaactgcgagcaatggagcttcatcagttgatgtgtgtgtcgaggaggatttggtttaggtacatttaattgcaatgcacacagctgctcaccttttcagttatatcattatcacaggagtctatactgtctctgaagaggtcttctgtgctgccattactgctgctgaagttgctattgtggaagagctgcctgaaagatyagaaggataattattttacttgatgaggagagaggaaagagtccaggtgccttacagcctggttttgcactttgcacagattttggcaccagatgttcaatcatctcagtgacaactacctctgcttaagcacaagcctggtaacaaggactggtaactaaacaaagtcatactgagcacaaccaatgacattagttccagggtgtgagctctctactggttttgatagaatccatcatcagcattagcacggttttaaaattacttgggtttattcacactacataccaacgtgtatt

SEQ ID NO: 10939 - DNA, 600 bp, Chicken  19866894213188_1
ttagtaaatactggaaaaagatacatcatctcaacaaagtacatgtggacttccaaacactttaaacaaagcaaggacaaaaaagccagtgtgttcttttgcaagaaaataattttatcttaagagaaaaaggaagatctttttctcaaagtgttaagcaagaaaacaaaggcagatacaaatgagagttttgcaccacagagtagtttagcactgaagtctcaaaggcttatatcctggacctgtgctgcaaatgtacatacatatatatatatatacacataaatatgatctgaaaasaaatggcttaatgctaaactgtctgtgctaaatggttcacaacaatcaaaagtaaaacttagtacaaagatctgcagaaaaatctcacagcgttgtgacttggcaataaaattgcaggtcacattcaatatgaatacaaactaatgcacatgaggggaaaaattccaagtatatgcacataggtacaggttctaaaatactacagtcaaaaataaaacctggagtctatgggaacataagctctttcctccatagcagtaaaggtaacattcagaactttagagaaatgcataaaagaac

SEQ ID NO: 10940 - DNA, 600 bp, Chicken  19866894213191_1
tgttccagctttaattttctccaagagcagtaagcctctttccctgccaggatatccttgaacacataaacccaattaagccaaggtaaactgatcattaggctttcaaatatgtgtctgctgatgttttataaggccgtagtctacttaaagtttcacctcctgcagccacccaaggttggccctgggagctcactgaaacaacagacttctggatttctgggagagccttggagcgtcttgcaattactgaggctgcccagaccactgtagctgttgtgaggattatgtccaaatttmtttctaccccttccagctgctgagggagcagcgctctgaagagctgctgtgggtatcctaacagcgtgccagggtgagagtgtgagggggcacaggaaacacagtgtgctgatttaggcacacgctccgtttgtgaccgtgaggaattatttgaattttctgggttttctctgtttgcaggaagttgctgtgaccacacagttactcaccaagagccagcaccggctgggaagcaaacaaaacccggtgtgcagtgcatttctttatgctttagcaaatcttgagtggtagcaaacacct

SEQ ID NO: 10941 - DNA, 599 bp, Chicken  19866894213205_1
  misc_feature (1)..(8): n is any nucleotide
nnnnnnnngtgaaggtgctgtgccagggctgatgaaccccaactgtaagctgcagaagctgcagtaagtagccactgggcattttggttgtctagcagttcacctttgtctcgtcttgcccttgggacaagcacagttctgtggccagctgtggatttctttttgttttgtttgaatgtggccacgttaatttatgggagcgggtcttgagggttcttcatagctgggtgcctattcccattgacattatttagccttcttggcagtgatggctagtaatgcaagatgtctctgatgtcmcaaggttctttctcatttcatgcactgcctggtctcaaagtagaccccacctgccctggctaatgcacattttgcctatgttgagtgggtagcaagacactcaatacttggttttgcctggatttcttctctccttgcaggctggagtattgtgagctcactgctgatatcgtggaggctctcaatgctgccctgcaagccaagcccaccctgaaggagctcagcctgagtaacaacacgctgggagatacagctgtgaagcaactgtgccgggggctggtggaggcgagctgcgactt

SEQ ID NO: 10942 - DNA, 600 bp, Chicken  19866894213216_1
ctatgctgtccaccctctctccagagaacacgtctgggaggcaatctctgtgaaagcagcaggctgctggcatttatgcaactgaatcagccctctcagcatggaacacgcccccagtataccccctacaaacctatatacaccctccctcactctctccatcagcgtgaccacggtgcacctgcctgcagacaaaggctgacagtcgtgtccatcctgcctcctgccagggccaaccaggtctagcaggcatccaggcctcgtgctctcacttaggtgcaggtgagtgctgctgccagygagcctgcccagtgcagcagctccgagtgggagcctgcccagctgtgagccaggagatggtccttggagtccaggaggcagtcggcaccaagggcagcacagtgctgcctggggatgccagctgggagggcgtccatgtggctctgggtcgaatcgcagcctgtaatggatggagagcagagygggttagcaaaacycagcgagagttacggaagcttggctaacagcagcttggtggggcttcagagcctgtgtctgcagagatgctggcggccaggggccctggaccatcatcctagt

SEQ ID NO: 10943 - DNA, 600 bp, Chicken  19866894213216_2
gcctgcagacaaaggctgacagtcgtgtccatcctgcctcctgccagggccaaccaggtctagcaggcatccaggcctcgtgctctcacttaggtgcaggtgagtgctgctgccagygagcctgcccagtgcagcagctccgagtgggagcctgcccagctgtgagccaggagatggtccttggagtccaggaggcagtcggcaccaagggcagcacagtgctgcctggggatgccagctgggagggcgtccatgtggctctgggtcgaatcgcagcctgtaatggatggagagcagagygggttagcaaaacycagcgagagttacggaagcttggctaacagcagcttggtggggcttcagagcctgtgtctgcagagatgctggcggccaggggccctggaccatcatcctagtgcagcatcttccatgacaagaaatatcagagtgcagccagttgctatggcccaagaggggcctcaaggctgttctgggatcctgatgaatgcgtgccaatgcaccagcacccagcactgctctcttgtcgtgcacaatagccagctctgctaagttacagcatttagattgcgccataaaaat

SEQ ID NO: 10944 - DNA, 600 bp, Chicken  19866894213216_3
gctgacagtcgtgtccatcctgcctcctgccagggccaaccaggtctagcaggcatccaggcctcgtgctctcacttaggtgcaggtgagtgctgctgccagygagcctgcccagtgcagcagctccgagtgggagcctgcccagctgtgagccaggagatggtccttggagtccaggaggcagtcggcaccaagggcagcacagtgctgcctggggatgccagctgggagggcgtccatgtggctctgggtcgaatcgcagcctgtaatggatggagagcagagygggttagcaaaacycagcgagagttacggaagcttggctaacagcagcttggtggggcttcagagcctgtgtctgcagagatgctggcggccaggggccctggaccatcatcctagtgcagcatcttccatgacaagaaatatcagagtgcagccagttgctatggcccaagaggggcctcaaggctgttctgggatcctgatgaatgcgtgccaatgcaccagcacccagcactgctctcttgtcgtgcacaatagccagctctgctaagttacagcatttagattgcgccataaaaatgcaatggtgcactt

SEQ ID NO: 10945 - DNA, 600 bp, Chicken  19866894213216_4
acgaacaagccaggtggcagcaccctcaaaaacagttagactaaaaaccactgaaaaaggtaaaagaaaatggaaatctccattatattcccgctgccaaaaaaccccaacaccttttacagtgtgctcatatgttgtaagcatacgctatatagcatacataattgtaatttcactttctggatgacatgcatgtgcacatacagaagacatacataaaatatgacagctgtattaaagtcatcttcatgagcacatacagaaggcacccaggctttctcccagtgggctcatagcacrgaaccaggagctatccytacgagcagagctctttctcatatcagagcaattacatccacgttcttcccccctctgcagaccaaactcactcccacctgagctactcgaattcgccatggcgttgatgcaccgtttattccgtggcacattaaactacccacagaagacagcccgctaaggagtggggatacaaagcactgcgtctgctctatcccggatgggtttgctgcagatcttccgtttgcagctttactcaggccaagttaattagaaatgtctgaaagtcaaagcgtggctctc

SEQ ID NO: 10946 - DNA, 600 bp, Chicken  19866894213216_5
cagcaccctcaaaaacagttagactaaaaaccactgaaaaaggtaaaagaaaatggaaatctccattatattcccgctgccaaaaaaccccaacaccttttacagtgtgctcatatgttgtaagcatacgctatatagcatacataattgtaatttcactttctggatgacatgcatgtgcacatacagaagacatacataaaatatgacagctgtattaaagtcatcttcatgagcacatacagaaggcacccaggctttctcccagtgggctcatagcacrgaaccaggagctatccytacgagcagagctctttctcatatcagagcaattacatccacgttcttcccccctctgcagaccaaactcactcccacctgagctactcgaattcgccatggcgttgatgcaccgtttattccgtggcacattaaactacccacagaagacagcccgctaaggagtggggatacaaagcactgcgtctgctctatcccggatgggtttgctgcagatcttccgtttgcagctttactcaggccaagttaattagaaatgtctgaaagtcaaagcgtggctctcgcatgaggtcgcgggga

SEQ ID NO: 10947 - DNA, 600 bp, Chicken  19866894213229_1
gcagaacaccccatcagggaagattcagctcatgagacttgagtcttgaattgaaatacatagtgtcttatagctcaagcaacagtctatttttcttgctttctcttcttttcctgagctgttctaaacactgtatttcttctctgcctttggcacccttcataaatgtaaaccatcctctctctgttcctgcactggcactttatgagagaaaataaagaaatacaaaattctatttccagagacagatatgtaattgcacttgtactacttaaacaactcttccttaacatcctgttygagtagtacataaactatgtaacatagttacataggagcatgagagaaggttgtgtcattttattttcaaaggattatttgtcctattaatattcacttaccatccttccagtgaccctttcagttaaagcagacacactgttctctgttcaagatgggtgacagctagaaagcagttagatggcaaatgcatttcgttcactctaaaaccaagcctgtgaggattaacactcctcagttaaacttcctgaggactttgcccagagccagttagttgttagccttggtgtcatggctgaa

SEQ ID NO: 10948 - DNA, 600 bp, Chicken  19866894213229_2
agatggcaaatgcatttcgttcactctaaaaccaagcctgtgaggattaacactcctcagttaaacttcctgaggactttgcccagagccagttagttgttagccttggtgtcatggctgaactcttccatcagcacacagaaagcactttcattcaaagaagtgaagagtggtatatggaatggtagctaaatggaaagcacaacccactctcagacccacaggccactgagggttgatgcctttattcttcctgggtttagtccctcctgtggaggagctgatcaccagctggctgaygaaacatcccagtgtcctctttggtaggacaagctttctgaccaagacaggctacaaaattaaggcctgagagaaggaagaaaggatgaaaaaagggaatggaaaaggggatgaataaacctataaatatcttaactatgagctagtggccaaattccgaaacacagaccttaattctgacttcttttgactatatcaaaagccaaaacgtgcttagcatgtggctaagctaggtcccaagcttatttttctactctctaaatcaaatgaacatctttaatcttttattctactcttgat

SEQ ID NO: 10949 - DNA, 600 bp, Chicken  19866894213229_3
tctgaccaagacaggctacaaaattaaggcctgagagaaggaagaaaggatgaaaaaagggaatggaaaaggggatgaataaacctataaatatcttaactatgagctagtggccaaattccgaaacacagaccttaattctgacttcttttgactatatcaaaagccaaaacgtgcttagcatgtggctaagctaggtcccaagcttatttttctactctctaaatcaaatgaacatctttaatcttttattctactcttgattcctgggatgtctgccacagatatatctgtaccacsctttcttctttaatgccagaaaatacatttttatttagaggtagagaagaaacagaacaagaaataagagatttaaactgttttctaaagttgcaatgtcacttcaaggcaacagttaatggataaattcttatcttccctcaaagcacaagctcagcagaattgctgtagacaactgcctgcagatcaggagagatgatattgtttaattaccgtacattctattttaccttgaagtagataaatttgcctatttaaartgttcaaaatgaactttgtgtccagtcacgtcatgtccaa

SEQ ID NO: 10950 - DNA, 600 bp, Chicken  19866894213229_4
tgattcctgggatgtctgccacagatatatctgtaccacsctttcttctttaatgccagaaaatacatttttatttagaggtagagaagaaacagaacaagaaataagagatttaaactgttttctaaagttgcaatgtcacttcaaggcaacagttaatggataaattcttatcttccctcaaagcacaagctcagcagaattgctgtagacaactgcctgcagatcaggagagatgatattgtttaattaccgtacattctattttaccttgaagtagataaatttgcctatttaaartgttcaaaatgaactttgtgtccagtcacgtcatgtccaagcctttcagaaaagttcactggtacttatccattcaaccacrtattgtcttgtcaggtcacccaaacaaaaaaacaaacaaacaaacaaaaaacaccacactwcagaatttgaaggcagatgcttgatttcttctccctattttaattgagctatgctctagggaggctaatactgttagttttgttttgacagtaagcagaaaggtttggctcttttgcttgtgtttcatctgagacaggcacctgtcctgatcacagt

SEQ ID NO: 10951 - DNA, 600 bp, Chicken  19866894213229_5
agagaagaaacagaacaagaaataagagatttaaactgttttctaaagttgcaatgtcacttcaaggcaacagttaatggataaattcttatcttccctcaaagcacaagctcagcagaattgctgtagacaactgcctgcagatcaggagagatgatattgtttaattaccgtacattctattttaccttgaagtagataaatttgcctatttaaartgttcaaaatgaactttgtgtccagtcacgtcatgtccaagcctttcagaaaagttcactggtacttatccattcaaccacrtattgtcttgtcaggtcacccaaacaaaaaaacaaacaaacaaacaaaaaacaccacactwcagaatttgaaggcagatgcttgatttcttctccctattttaattgagctatgctctagggaggctaatactgttagttttgttttgacagtaagcagaaaggtttggctcttttgcttgtgtttcatctgagacaggcacctgtcctgatcacagtactactaagtcattcctgacagcaatttattagctttggggtcacagctttttgagattatggggtctttttgttttgttgt

SEQ ID NO: 10952 - DNA, 600 bp, Chicken  19866894213229_6
tcaaggcaacagttaatggataaattcttatcttccctcaaagcacaagctcagcagaattgctgtagacaactgcctgcagatcaggagagatgatattgtttaattaccgtacattctattttaccttgaagtagataaatttgcctatttaaartgttcaaaatgaactttgtgtccagtcacgtcatgtccaagcctttcagaaaagttcactggtacttatccattcaaccacrtattgtcttgtcaggtcacccaaacaaaaaaacaaacaaacaaacaaaaaacaccacactwcagaatttgaaggcagatgcttgatttcttctccctattttaattgagctatgctctagggaggctaatactgttagttttgttttgacagtaagcagaaaggtttggctcttttgcttgtgtttcatctgagacaggcacctgtcctgatcacagtactactaagtcattcctgacagcaatttattagctttggggtcacagctttttgagattatggggtctttttgttttgttgtgggttttttttttgttgttgttgttgttagtttttagttttagtttccccgaagagaaatt

SEQ ID NO: 10953 - DNA, 599 bp, Chicken  19866894213235_1
  misc_feature (1)..(21): n is any nucleotide
nnnnnnnnnnnnnnnnnnnnntgctttaagaccctttccttgctcggtttatggccgaacgcccaggtgctgtggtaggacagtgagcgagtgaggtcagcagatagtgagctggaagagcacagacggggccccccagcaccacgagccagcatgcctccaagccagggcgtgtgagtaacagcagcctggagcttcagttctgctggagctggttgcgaaagcctgcagcaagcagcacagtgctggagccatgcaggggcagccaggtcctctgtcacaatgtcccctcatgctgaycaggagaaccatagaacatcccaagttggaagggacccacaagggtcacccagtcaaacccctggccccgcacagcaccacccaaacccaacccccatggctgagagcggtgtcccaacgctccctgagctctgtcagctcggggctgtgctcactgccctaggagctgctccatgcccactgccctctggggcacagccttctcctcacccccacctgacacagctccatgccattccctcaggctctgtcactgtcaccagagagcagagctcagcattgcccttccactccctgtg

SEQ ID NO: 10954 - DNA, 600 bp, Chicken  19866894213235_2
ggggctgtgctcactgccctaggagctgctccatgcccactgccctctggggcacagccttctcctcacccccacctgacacagctccatgccattccctcaggctctgtcactgtcaccagagagcagagctcagcattgcccttccactccctgtgaggagctgcaggccgccacaaggcctcccctcagcctcctcttctccagcctaaacaaacaaaccaagggacatcagccactcctcacacatctcaccctcagacccttcaccatctccacagccctacagagtcctcttcrttctcctgctgttccaatttgtaaagaaattaaacaggaacaaaacagggtcaatgaggcttgcgatcattttaaaacagccttttggcaaggctctagtagccaggaaaagtgtgaaactaatgctcagatgtctgttagttccatgcactgcttcccacgctcctttttggtgtgatctgtgcaagttttcccactaaaatggtggctggcacaggaataatgccacactaatatgcctgcccaaagctgatgttgtttcacgagtgctttgtggaacagctttcccctgacacagca

SEQ ID NO: 10955 - DNA, 600 bp, Chicken  19866894213235_3
actgcactgggatgtggcacccagcacagctctagctgcaggacctgaccgctcagctggggcaggacaagaccccaacggccctgccccttccctctaggtgtcactggcccaccaaggacctctcctttccaggccaggaacccttgaacatacttagccgagcaagctcagacagggtgagcaacctgatccctccatcacctgcagttccgtgcctcctctcttacttttggctcttgctcaagatacccccagccccctcagcacagccgattccaccctccaccccttgccccsaaccccccacaggaagccctgcagattgtcccatagtagcataacccattggactaccagaaggacatctcagattgctcctaggggaggataagacaccttcctccctgctgcacacaccaaggccccccaggcctcttttctcaacggcaaaagggtttggtgtacatactaagggagtgtgttctgctgccagggcaaccctgtacctccaccatcccctgcatcactcagcccagggatatgaaaggcaccccaggagaacacaccacagccccacagtctttccaaagcacagct

SEQ ID NO: 10956 - DNA, 600 bp, Chicken  19866894213235_4
agcataacccattggactaccagaaggacatctcagattgctcctaggggaggataagacaccttcctccctgctgcacacaccaaggccccccaggcctcttttctcaacggcaaaagggtttggtgtacatactaagggagtgtgttctgctgccagggcaaccctgtacctccaccatcccctgcatcactcagcccagggatatgaaaggcaccccaggagaacacaccacagccccacagtctttccaaagcacagcttcattatttgctagcagaaagctcagccctgtaacaycagaaggctcctactgcaatgcatgagaaagcacccagctccaaaaggcacaaaatgcagcggagtaaacatttgagagcgctgctgcccaccagcagcccgagctccctgacccatccctagaagtaagtctctcatcccatgcccacagcccagcaagctcccagcagcatgggcatcaggacctcagaggctcccaggcacagagcaaagagactgcagtgagctgtgggagttttccgttgctaaaaatcactgctgccaaacagtagggccagctgcccactgataaagcactgc

SEQ ID NO: 10957 - DNA, 600 bp, Chicken  19866894213237_1
agttctaccgaagttccactgtgaatcagtttcatgctgaattgctgagcttctccagatgatttccactagaatttttccctgcattttcacctctaacaactctgatcaagtgaaaaaccaaatacatatacacctaacaatgtgtagtcacttgtgtttacatagattaagttgcacgaaaacatgctaccatcctcagtaactacacatggtaaagctgagtaacatgggcgtacttcaccttgatgtagcttcaatgttttcattaacattgattacaaaatattttgagacatkagcatgggctcaaaagatgagtgtgctgctatctccctacaccaagggccattccagtttcgtacgggaaaaatatcaactttaagctaaacattaaaacaagaacattacatgcatagctgtgctttatgatatataagttccattctacaaagcagaaacattcacagatgcgatagcattaatggaaacttccttaagtgagagctaaggtgggatttaatgtacacaaacatttccaagccagttacccctttgcatatttttctgagggggcatccataagtataataaaaaaca

SEQ ID NO: 10958 - DNA, 563 bp, Chicken  19866894213238_1
attaacatcaactttacctccctctttccacccctatctctgtagcttcaaatagacaagacttgtccattttaagaaaacatcaactgaaaacatatggagggaaagaagtcaaggagagaaggcaactacagggagagaatgcagaacacagtcgtttatttagtctgcttcttgtgattgcctagtgccatctttggatgaagctcacagagtaagaaaaagccttcagtcatatccaagagaaaataaagatatcatttctttgatatctccttattcacaaaaacactcctgctktattcactatctttatctgcagttactgaactagtgtctcctattcctgtagctgaacactgtcccctgcagtgttagctggaagaagatcactttactttcatgactcagcatcctcatgcaccatagggaagaggtacgtgcaaggaagctgctttgagaagctgacagagtacagcctgaaaaaggaggaaaaaagacaaaaaaaatatattcttctgttgtttcagttatcagacatgccctgtggatttttgtacatt

SEQ ID NO: 10959 - DNA, 600 bp, Chicken  19866894213249_1
taggcatcttaaataagaaagaaattgttttctgtaagtatgcagaacctgcaatgaggacagaaattgaatgagacaagacagtgagagctccgttcctgagctcttctccagctggggaatgaggcacaggcattgctggcctctgtgattttggtcagggaaaagggaatcctttctgtttacctccatctccttgcatttttatcaagtgtgcctttttgtgttcttctgagatgaacccgcaggcttattaaacacttttatacaacacatattcagagggagatccagaaccarcttactttagcagagcagtaacaggaaggagtggaaggcatttacagacatgtactgaagtgtgagagctttaagcagttggtttttatttccaacctttgygcttccacaatcctggtgggaaaaagcggtttaaagcactgtacaagagatggaagcaacacgtgcccgatgcaccctcagtaacgtctatgccaagactgaagccaaacactctccccaagtctcacagcatgccagatttctgcaattacactgttccaaagctataaaaagtagctcttgagaaaacaytgcttg

SEQ ID NO: 10960 - DNA, 600 bp, Chicken  19866894213249_2
gctcttctccagctggggaatgaggcacaggcattgctggcctctgtgattttggtcagggaaaagggaatcctttctgtttacctccatctccttgcatttttatcaagtgtgcctttttgtgttcttctgagatgaacccgcaggcttattaaacacttttatacaacacatattcagagggagatccagaaccarcttactttagcagagcagtaacaggaaggagtggaaggcatttacagacatgtactgaagtgtgagagctttaagcagttggtttttatttccaacctttgygcttccacaatcctggtgggaaaaagcggtttaaagcactgtacaagagatggaagcaacacgtgcccgatgcaccctcagtaacgtctatgccaagactgaagccaaacactctccccaagtctcacagcatgccagatttctgcaattacactgttccaaagctataaaaagtagctcttgagaaaacaytgcttgtgtgttacttttctagccatcactctctcaacttcccaccagatccgcttgccagggatcaggaatggtgaccatcagctgatgatgcttcaaaaataagac

SEQ ID NO: 10961 - DNA, 600 bp, Chicken  19866894213249_3
aaccarcttactttagcagagcagtaacaggaaggagtggaaggcatttacagacatgtactgaagtgtgagagctttaagcagttggtttttatttccaacctttgygcttccacaatcctggtgggaaaaagcggtttaaagcactgtacaagagatggaagcaacacgtgcccgatgcaccctcagtaacgtctatgccaagactgaagccaaacactctccccaagtctcacagcatgccagatttctgcaattacactgttccaaagctataaaaagtagctcttgagaaaacaytgcttgtgtgttacttttctagccatcactctctcaacttcccaccagatccgcttgccagggatcaggaatggtgaccatcagctgatgatgcttcaaaaataagactccrttggctagttttctaaggcaaagaacaaaggaagcttacaggagtggraaaccattccattcagaagcctacatccctagcaatagggactcaacagcctggaagtagtagagcagtagtgacatccaagtataaaagaccacagaaagagcactattaaaaatgaacaaaaataagaagcagcagcc

SEQ ID NO: 10962 - DNA, 600 bp, Chicken  19866894213249_4
ccacaatcctggtgggaaaaagcggtttaaagcactgtacaagagatggaagcaacacgtgcccgatgcaccctcagtaacgtctatgccaagactgaagccaaacactctccccaagtctcacagcatgccagatttctgcaattacactgttccaaagctataaaaagtagctcttgagaaaacaytgcttgtgtgttacttttctagccatcactctctcaacttcccaccagatccgcttgccagggatcaggaatggtgaccatcagctgatgatgcttcaaaaataagactccrttggctagttttctaaggcaaagaacaaaggaagcttacaggagtggraaaccattccattcagaagcctacatccctagcaatagggactcaacagcctggaagtagtagagcagtagtgacatccaagtataaaagaccacagaaagagcactattaaaaatgaacaaaaataagaagcagcagccaactacagacactttgtgtaagcatttgaaaatctgtaggttaagatatatgaatcacaatgccttatcttaaacttaaggtattcagcatctcagaagctcattgggaaac

SEQ ID NO: 10963 - DNA, 600 bp, Chicken  19866894213249_5
gaagcaacacgtgcccgatgcaccctcagtaacgtctatgccaagactgaagccaaacactctccccaagtctcacagcatgccagatttctgcaattacactgttccaaagctataaaaagtagctcttgagaaaacaytgcttgtgtgttacttttctagccatcactctctcaacttcccaccagatccgcttgccagggatcaggaatggtgaccatcagctgatgatgcttcaaaaataagactccrttggctagttttctaaggcaaagaacaaaggaagcttacaggagtggraaaccattccattcagaagcctacatccctagcaatagggactcaacagcctggaagtagtagagcagtagtgacatccaagtataaaagaccacagaaagagcactattaaaaatgaacaaaaataagaagcagcagccaactacagacactttgtgtaagcatttgaaaatctgtaggttaagatatatgaatcacaatgccttatcttaaacttaaggtattcagcatctcagaagctcattgggaaacacttggtaatagagcacaaaaccccatggaaacagcaatgccagacac

SEQ ID NO: 10964 - DNA, 600 bp, Chicken  19866894213253_1
tgaaacgaacagcaattagtaagtgaccaacatccctgcaaagtcagtaaatatttttacacaccgttttcaaaaccatacgccagcattttcagcccagagaagagaagactgtgagaagacctgagagtggcctttcagtatctaaaggggggctataagaaagaagaggacagactctttagcagagtctgttgtgacaggacaaagagaaatggtttcaaactaaaagaggggagatttagattggatataaggaagactttttttacagtaaggttgttgaggcaccagaatagrttgcccagaggtgtgatggatgtcctgtccctggaggcattcaagatcaggctggacagggctctgaacaacctgatgtaactgtaggcgtccctgttcattgcaggggagttggactagatgacctttaaaggtcccttccaactctaaggattctatgattctatgattttggcccccagtgacaccaataataaaacacttatcaattccagcaaagctatgagttcacttcaggaatttagatgatacatactgaagttagtccacacacctagtcaatagctaaagcaaaagcag

SEQ ID NO: 10965 - DNA, 600 bp, Chicken  19866894213256_1
ctatccagatgaagattttggttttagtgctgctttagagcagagagttgaccacatacccccacttctgctttcatgcccgaaacccagcagaactaggacatcatctacaaatctccaaaatattttcaaaccctagcaactgcccccccaagtgcaatatggtaacagatgtccctaggatcatctcatccggggcagtaattgctctccctgcccaaggagagggagaaaaatgctctgagaagtatactgtcaggtcacaacccacaaatgcggtgcctactgctctccatgggygagatctggctctcaggaggtggtgctacaaagctkatcagctagcacaggtccacaaaggtaagagaggatggaactgaagcatttggagggtttcaagaggaacttaaacttgtcctcctggaagtccagctgatagaccagtgctgccctggcacactctgaaaatagctcaggagaagatgccgatgtctccttagttctctgcagctcaattggcatgcttgtctgttcagttgaatagaatagtggctctctaaaacaggaagaaaactgtttctgtcatttacattttctatt

SEQ ID NO: 10966 - DNA, 600 bp, Chicken  19866894213256_2
agagcagagagttgaccacatacccccacttctgctttcatgcccgaaacccagcagaactaggacatcatctacaaatctccaaaatattttcaaaccctagcaactgcccccccaagtgcaatatggtaacagatgtccctaggatcatctcatccggggcagtaattgctctccctgcccaaggagagggagaaaaatgctctgagaagtatactgtcaggtcacaacccacaaatgcggtgcctactgctctccatgggygagatctggctctcaggaggtggtgctacaaagctkatcagctagcacaggtccacaaaggtaagagaggatggaactgaagcatttggagggtttcaagaggaacttaaacttgtcctcctggaagtccagctgatagaccagtgctgccctggcacactctgaaaatagctcaggagaagatgccgatgtctccttagttctctgcagctcaattggcatgcttgtctgttcagttgaatagaatagtggctctctaaaacaggaagaaaactgtttctgtcatttacattttctattcatagaaactatttctttccattcagggtttccact

SEQ ID NO: 10967 - DNA, 600 bp, Chicken  19866894213257_1
actgaaattaagaaactagaaacgtattcaaaaataacataggacatcttttctctttatttttaccactcctttgcagaatctgtaccctgattaccttactattaattattgacatcaagggagaaaagtcatcctgccaagaatcttctaactgctcttgaaaatgtaaaggctgcagctaaaccagtggccttttatccagcatttgtcattttgaacggtggagttgaaggcagtccaggatgctggatctcttctcataacgtttcacccacactcaacctggaaatttctgcwtttttttttttccgtaatacaaggaatgttcacaacatgttggctgcctcatgtaaaatccagatatttcagatactcgataacaaacatgtgggaaattaagacagctgtgtggaaagcataacttgttctgtcatatgagaagaaggttacagacagctggcaacatccctttctttttctcaggacacagtgttcagcagtgaggagcaacatatcatacagtaagagatgtccaccacaaacttcaaagtgatgaaatatgaaatacatatgctccttaatgaatctgtatgtgaa

SEQ ID NO: 10968 - DNA, 600 bp, Chicken  19866894213257_2
atccctttctttttctcaggacacagtgttcagcagtgaggagcaacatatcatacagtaagagatgtccaccacaaacttcaaagtgatgaaatatgaaatacatatgctccttaatgaatctgtatgtgaaacacagaaaatagcatcatctgttgtcttaataacacactttctatcttaaagactggcaaagcaaagagaaacatttctgtaaaaggaagtgctatgtccacatgtgccatctgccaacatctgtcagtgaatccccaagagagcaaatgtggtgcaatttcaacrtttttctgtttcagtatactgaaccaatttcaagagcatgttagcatccctcttgtgttgagaagatatgtgcagatggatactttcccactgttttttttgtttttttctttaagtgaaaaaaatatgagataaaatcaacattgacagctgccctgccctaatgatctgatataatttagcttgtttaggtaggaaagacatacccagactatcacttctaggcctctctgataatgaaaatatatacagatggtgtaatcatcattaggcagacactgagttatatcaacatacata

SEQ ID NO: 10969 - DNA, 600 bp, Chicken  19866894213258_1
ccagtatagtgtcctcacagccttgcatcttctttgaaagaccttgctggacctctttagtaaagggggaaggcttgaggaagaagcaattctttcttcttttccagaaaactttgtgattggacactttgctgagggaccgggagactccagaggtcctcttccattctccagctacaggatcaagcccacataggctcagacaaagcaaggtgttgagagcgattctcagctgtcctgctgccccaggccaggactgatgagatacaatctccctcagcttcccactgagatgtgagstatgccaagaggaacagaattcttcatgcctcgtggggggagatacagacctggcatctacagggccagggcgagtgagtacagccctcaggctgatattatgggcttgctcctgcaacaaggacacctgcttctgctcccagaagggtttcagagctgctgcaggaaatgctgatagactgcaaatcaaaatgagcctttcccagccaactgagggctctgaagcacagaggctgatgggaccactttaagatttagaatgagaggcaatggcctctacttgtgctagcggaggtttag

SEQ ID NO: 10970 - DNA, 600 bp, Chicken  19866894213265_1
tacacctcttcacagcaagagttagtttgagaaagggattgcaagaacactgtattaaagaggacaccaagtaggcaacacttaagtgacatgctcagtgtactaagtcgttggcagtgaagtttctctctcaatccatgcttggctccttaagctgtctccagtaaacacccctgcagacagatgttgagctacacacaagaagggtcaaaaagctgctctccccaaaatcctgtcaccaagcaccacagaggctggcagtacccagacacgttaaggaaatagccattataccatttyaagcatcagataaatttttttcttaaggttatcttaaattaattttaaataaaggctttcaaaactcacccttctctttcaattgtgcaaagttctgctctcgatcggggtgataaatgtttactattgacttcccctccagctataaacctcaagcgtaagtaagatgaggaagccaccgtggaccacactagagagtgccgagaggagatctgctgctcctaggatatatacaatgtgcaatggataacctaatatgcctttcatttaactggctgggcaggtttctgcattctggag

SEQ ID NO: 10971 - DNA, 600 bp, Chicken  19866894213266_1
tttcagacttgtctgttgagagaccaaaccaaaaagacacattgcctaatgttgaatacattattaagtggagttattttgaaacagttacttgtatttcctgaagtgtttctaactgaaagtacaaaagaaaatctagcaattttgttgcttttgggtttgtctcacttatctctttatttttcctagagtgcctaacaatatggaatacaaaatttcagaccttacaagcttcaaaggaactgcccctgggaaccagtggacaagtgagttcagtcttttacttagtggttcataaakgttcatctagtgcatgtggcacaatatgaaggagacaggcaggctgcaattatggttctgtctggaagagcaataaatgtcaacttctgaaacaaaactaatactgggcagcttatgtcctatttttgtcataatctctaaataggagcatggtagcatttaacaacatccttagtaattcagtacttctgtcttctgttagccttctttggtgagaatgaaatcttcagtcggtatttattacattctgaaagctgaccatggttcagaatattcagctgtcaataataagtgaatggg

SEQ ID NO: 10972 - DNA, 600 bp, Chicken  19866894213272_1
atgaggactgtctggcagccaatcaccagggccacctgcccatgggtgagcatggtagagacaatgatggtactaacatcactggctctctgtgcagggaatgtttgagccctatctcaagagcttctacatccgctccacggaccccacgcagatcaagatcctcaaggtgagctggaaacacctggtggggcccaggactggggactctggggctccttggagctctccaacatggagcagccatcctccatgctggagggacaggtgggcaccaagaactcagtgtcctcaggtcaygtccccaagctgactatccttccctccttcctgcagctggaggtgctcactaacctggccaatgagaccaacatctccaccatcctgagggaatttcaggtatgtcatggccacaggcagatttaggcaccaggttgccattgtggcatggctctaggtgccaaaatgccactgtggggggacagaggagagccyctgtgggaggagagarctgaggctgtgccaaccccatggatggctccagaaaaccccagtrcaaggccaccacgtggtggggacacccagtgctggcacgcaagt

SEQ ID NO: 10973 - DNA, 556 bp, Chicken  19866894213272_2
caggactggggactctggggctccttggagctctccaacatggagcagccatcctccatgctggagggacaggtgggcaccaagaactcagtgtcctcaggtcaygtccccaagctgactatccttccctccttcctgcagctggaggtgctcactaacctggccaatgagaccaacatctccaccatcctgagggaatttcaggtatgtcatggccacaggcagatttaggcaccaggttgccattgtggcatggctctaggtgccaaaatgccactgtggggggacagaggagagccyctgtgggaggagagarctgaggctgtgccaaccccatggatggctccagaaaaccccagtrcaaggccaccacgtggtggggacacccagtgctggcacgcaagtgacagactctgcctgtgcagacctatatccgcagcatggacaaggacttcgtggcagccaccatccaagccattgggcgctgtgccactaacatcggcaaggtgcgggacacctgcctcaatggtctggtccagctcctctccaaccggga

SEQ ID NO: 10974 - DNA, 540 bp, Chicken  19866894213272_3
ggggctccttggagctctccaacatggagcagccatcctccatgctggagggacaggtgggcaccaagaactcagtgtcctcaggtcaygtccccaagctgactatccttccctccttcctgcagctggaggtgctcactaacctggccaatgagaccaacatctccaccatcctgagggaatttcaggtatgtcatggccacaggcagatttaggcaccaggttgccattgtggcatggctctaggtgccaaaatgccactgtggggggacagaggagagccyctgtgggaggagagarctgaggctgtgccaaccccatggatggctccagaaaaccccagtrcaaggccaccacgtggtggggacacccagtgctggcacgcaagtgacagactctgcctgtgcagacctatatccgcagcatggacaaggacttcgtggcagccaccatccaagccattgggcgctgtgccactaacatcggcaaggtgcgggacacctgcctcaatggtctggtccagctcctctccaaccggga

SEQ ID NO: 10975 - DNA, 495 bp, Chicken  19866894213272_4
tggagggacaggtgggcaccaagaactcagtgtcctcaggtcaygtccccaagctgactatccttccctccttcctgcagctggaggtgctcactaacctggccaatgagaccaacatctccaccatcctgagggaatttcaggtatgtcatggccacaggcagatttaggcaccaggttgccattgtggcatggctctaggtgccaaaatgccactgtggggggacagaggagagccyctgtgggaggagagarctgaggctgtgccaaccccatggatggctccagaaaaccccagtrcaaggccaccacgtggtggggacacccagtgctggcacgcaagtgacagactctgcctgtgcagacctatatccgcagcatggacaaggacttcgtggcagccaccatccaagccattgggcgctgtgccactaacatcggcaaggtgcgggacacctgcctcaatggtctggtccagctcctctccaaccggga

SEQ ID NO: 10976 - DNA, 600 bp, Chicken  19866894213280_1
aatgaaccatacgcgaccataaccagatcaactctccaggaaattctaaaagcactggcaagagcttgtagcagtggcatgctatttcatattcactgcattataaatgcacttttatgttggtagtgccatatattgagcactgacatatttttagcccaagacatatttttcactattttaattctatgtttagtcttgcacttccctggatttgagtcttaatgttcaacatcaaaggattatttaatagatttactactttttgtttgtttgttttacattagaaaggcaaaatgrggggacaaaaatgttttcagaacatgagagaatatggagaaaaaaagaagcccatacagaatgtatatgatatttttcatatgatactgtgataaatgcatacactttctattcagatcatgagacgtagttgtatgatggtggacaagtgaatcattggggatagtgkggagttttgtgatttcaaacttcagtagtattaatagtcagtttttcatgaccattaaccaaatatttcagcagcttatacaaataggtgttcatcctaattacaaacaatgcatagtatttttcctttca

SEQ ID NO: 10977 - DNA, 600 bp, Chicken  19866894213280_2
ttttcactattttaattctatgtttagtcttgcacttccctggatttgagtcttaatgttcaacatcaaaggattatttaatagatttactactttttgtttgtttgttttacattagaaaggcaaaatgrggggacaaaaatgttttcagaacatgagagaatatggagaaaaaaagaagcccatacagaatgtatatgatatttttcatatgatactgtgataaatgcatacactttctattcagatcatgagacgtagttgtatgatggtggacaagtgaatcattggggatagtgkggagttttgtgatttcaaacttcagtagtattaatagtcagtttttcatgaccattaaccaaatatttcagcagcttatacaaataggtgttcatcctaattacaaacaatgcatagtatttttcctttcaaagtcagcatgagctctgcctcagtaatgccagtcttgatggtgctggagcaggacattttcttctaaatgacagtacttgcacaaatgatgacaatccatggtgtcctgtgttgtagtcaaatgttcaatttaacaggatttaatggacagagctactttcaagatac

SEQ ID NO: 10978 - DNA, 600 bp, Chicken  19866894213284_1
acgctggaggacaaccaagtgcagctgcagaacctgatggcctccaagtacctcgccttcttcctccaggaggtgtcgggctggcagcagaagctgtcgaccgccgactccgtgatcagcatctggtttgaggtgcagaggacgtggagtcacctggagagcatcttcatcggctccgaagacatccgcagccagctgccagaggactccaggcagttcgattccatcgataaggacttcaaagtgagaagcccgacccttcctgggccccagagcccactgctgcttcaggtacagccsaatcctttttgtcttgcaggaactgatggccgacgcagtgaaaacccccaatgtcatcgaagctaccaacaaacccggcctcttcagcaagctggaggcactgcagaagaggtgggtttgggtcatctcatcctgatggagcgttgtggaggaacccccgcagcctgtcctaaggccaaaggargagtttgctttccccagcagccaaagtgtcatcttatttagcatcgttacaattgcaaatggtaaagatgggtacatttttgcagctattttttyccctccttgcttcctgccagg

SEQ ID NO: 10979 - DNA, 600 bp, Chicken  19866894213284_2
tccgcagccagctgccagaggactccaggcagttcgattccatcgataaggacttcaaagtgagaagcccgacccttcctgggccccagagcccactgctgcttcaggtacagccsaatcctttttgtcttgcaggaactgatggccgacgcagtgaaaacccccaatgtcatcgaagctaccaacaaacccggcctcttcagcaagctggaggcactgcagaagaggtgggtttgggtcatctcatcctgatggagcgttgtggaggaacccccgcagcctgtcctaaggccaaaggargagtttgctttccccagcagccaaagtgtcatcttatttagcatcgttacaattgcaaatggtaaagatgggtacatttttgcagctattttttyccctccttgcttcctgccaggctggcggtctgtgagaaggctytggccgaatacctggagacaaagcgactggccttccccaggttctacttcgtttcctccgcggatctgcttgacattctatctaatgggaacgagccaactgaggtatgggctgagcacaaaccaggaggygcagcccacctcaatcacgtcctgacatatt

SEQ ID NO: 10980 - DNA, 600 bp, Chicken  19866894213284_3
ctgctgcttcaggtacagccsaatcctttttgtcttgcaggaactgatggccgacgcagtgaaaacccccaatgtcatcgaagctaccaacaaacccggcctcttcagcaagctggaggcactgcagaagaggtgggtttgggtcatctcatcctgatggagcgttgtggaggaacccccgcagcctgtcctaaggccaaaggargagtttgctttccccagcagccaaagtgtcatcttatttagcatcgttacaattgcaaatggtaaagatgggtacatttttgcagctattttttyccctccttgcttcctgccaggctggcggtctgtgagaaggctytggccgaatacctggagacaaagcgactggccttccccaggttctacttcgtttcctccgcggatctgcttgacattctatctaatgggaacgagccaactgaggtatgggctgagcacaaaccaggaggygcagcccacctcaatcacgtcctgacatattgcagatgtcttaaaatctccgaactgaacagtgtccctgacccrytgcggcacagggatgcagcaccctgagctgcaaaacgccctctgacccca

SEQ ID NO: 10981 - DNA, 600 bp, Chicken  19866894213284_4
ctgatggccgacgcagtgaaaacccccaatgtcatcgaagctaccaacaaacccggcctcttcagcaagctggaggcactgcagaagaggtgggtttgggtcatctcatcctgatggagcgttgtggaggaacccccgcagcctgtcctaaggccaaaggargagtttgctttccccagcagccaaagtgtcatcttatttagcatcgttacaattgcaaatggtaaagatgggtacatttttgcagctattttttyccctccttgcttcctgccaggctggcggtctgtgagaaggctytggccgaatacctggagacaaagcgactggccttccccaggttctacttcgtttcctccgcggatctgcttgacattctatctaatgggaacgagccaactgaggtatgggctgagcacaaaccaggaggygcagcccacctcaatcacgtcctgacatattgcagatgtcttaaaatctccgaactgaacagtgtccctgacccrytgcggcacagggatgcagcaccctgagctgcaaaacgccctctgaccccaatggggctcctgctgctgctgcccacaggtgtcccgtcacctc

SEQ ID NO: 10982 - DNA, 600 bp, Chicken  19866894213284_5
acccccgcagcctgtcctaaggccaaaggargagtttgctttccccagcagccaaagtgtcatcttatttagcatcgttacaattgcaaatggtaaagatgggtacatttttgcagctattttttyccctccttgcttcctgccaggctggcggtctgtgagaaggctytggccgaatacctggagacaaagcgactggccttccccaggttctacttcgtttcctccgcggatctgcttgacattctatctaatgggaacgagccaactgaggtatgggctgagcacaaaccaggaggygcagcccacctcaatcacgtcctgacatattgcagatgtcttaaaatctccgaactgaacagtgtccctgacccrytgcggcacagggatgcagcaccctgagctgcaaaacgccctctgaccccaatggggctcctgctgctgctgcccacaggtgtcccgtcacctctcgaagctgtttgacagtctcgctaagctgaagttcaagatgagcccggacaaaaagccgctgaagacggccctggggatgttcagcaaagaggaggagtttgtgccgctgagcgcagagtgcgatctgtc

SEQ ID NO: 10983 - DNA, 600 bp, Chicken  19866894213284_6
cgttacaattgcaaatggtaaagatgggtacatttttgcagctattttttyccctccttgcttcctgccaggctggcggtctgtgagaaggctytggccgaatacctggagacaaagcgactggccttccccaggttctacttcgtttcctccgcggatctgcttgacattctatctaatgggaacgagccaactgaggtatgggctgagcacaaaccaggaggygcagcccacctcaatcacgtcctgacatattgcagatgtcttaaaatctccgaactgaacagtgtccctgacccrytgcggcacagggatgcagcaccctgagctgcaaaacgccctctgaccccaatggggctcctgctgctgctgcccacaggtgtcccgtcacctctcgaagctgtttgacagtctcgctaagctgaagttcaagatgagcccggacaaaaagccgctgaagacggccctggggatgttcagcaaagaggaggagtttgtgccgctgagcgcagagtgcgatctgtccgggcaggtcagtggggctgggagctgctgcacayggggtggggggctgtggagcctgggctgagaagaagcctr

SEQ ID NO: 10984 - DNA, 600 bp, Chicken  19866894213284_7
gttacaattgcaaatggtaaagatgggtacatttttgcagctattttttyccctccttgcttcctgccaggctggcggtctgtgagaaggctytggccgaatacctggagacaaagcgactggccttccccaggttctacttcgtttcctccgcggatctgcttgacattctatctaatgggaacgagccaactgaggtatgggctgagcacaaaccaggaggygcagcccacctcaatcacgtcctgacatattgcagatgtcttaaaatctccgaactgaacagtgtccctgacccrytgcggcacagggatgcagcaccctgagctgcaaaacgccctctgaccccaatggggctcctgctgctgctgcccacaggtgtcccgtcacctctcgaagctgtttgacagtctcgctaagctgaagttcaagatgagcccggacaaaaagccgctgaagacggccctggggatgttcagcaaagaggaggagtttgtgccgctgagcgcagagtgcgatctgtccgggcaggtcagtggggctgggagctgctgcacayggggtggggggctgtggagcctgggctgagaagaagcctrg

SEQ ID NO: 10985 - DNA, 501 bp, Chicken  19866894213284_8
atgtcttaaaatctccgaactgaacagtgtccctgacccrytgcggcacagggatgcagcaccctgagctgcaaaacgccctctgaccccaatggggctcctgctgctgctgcccacaggtgtcccgtcacctctcgaagctgtttgacagtctcgctaagctgaagttcaagatgagcccggacaaaaagccgctgaagacggccctggggatgttcagcaaagaggaggagtttgtgccgctgagcgcagagtgcgatctgtccgggcaggtcagtggggctgggagctgctgcacayggggtggggggctgtggagcctgggctgagaagaagcctrgaacagagcaatggagccatggagaatgccaaagcactgagccgtgcagcccctcgggcggctgcagcgtggtccatctgctcacccccccttcgtgctccataaactgcagtttgcactgtcagatggggctttcatgcagccttttatcaagtggggag

SEQ ID NO: 10986 - DNA, 461 bp, Chicken  19866894213284_9
ytgcggcacagggatgcagcaccctgagctgcaaaacgccctctgaccccaatggggctcctgctgctgctgcccacaggtgtcccgtcacctctcgaagctgtttgacagtctcgctaagctgaagttcaagatgagcccggacaaaaagccgctgaagacggccctggggatgttcagcaaagaggaggagtttgtgccgctgagcgcagagtgcgatctgtccgggcaggtcagtggggctgggagctgctgcacayggggtggggggctgtggagcctgggctgagaagaagcctrgaacagagcaatggagccatggagaatgccaaagcactgagccgtgcagcccctcgggcggctgcagcgtggtccatctgctcacccccccttcgtgctccataaactgcagtttgcactgtcagatggggctttcatgcagccttttatcaagtggggag

SEQ ID NO: 10987 - DNA, 600 bp, Chicken  19866894213285_1
agtggacatgtagtggacatgtcacactggaacccgaaaccagtttccacagtgctgataccctgagttttgggatgtgcccattttgccaggaggatacagaagatggattttgctcctaatctgtgatatatttgattttactcacagttttgctgcagtttgcattagcagaggagcagcattgtgtgcaggtgtgattcaggggactaggtctcccatatgcttaaaaataaatcaagagacaagtctaactgatcagccccacaggtgaagactagagaaattccaggtggtackgcaactcctgggacctctgcagagaatggtgctacaggatcttcattcttattttccctccctgcaaatgctgcacaagctgagagtgctgcagtaaagctctgatacaagtgactgaaagcatagggttttgactgaaagcgtaggcttttttccctgtaaatcaaactgcttctggtttacagatttccaggtatgaacctagcagtttttgcacatctgtgctagttctattcaataatagcaattccatttaaattagcagtaactactcacttgcaaagctttaagagaccagat

SEQ ID NO: 10988 - DNA, 599 bp, Chicken  19866894213286_1
  misc_feature (1)..(67): n is any nucleotide
nnnnnnnnnnnnnnnnnnnnnnnnnnnnnnnnnnnnnnnnnnnnnnnnnnnnnnnnnnnnnnnnnnnctgctgtatgcagccacgttagagcgtgactaacctgtgacgtgccccaaagcccccacacctgctctgctcctactgcccatctctgggcccgcacaatcccgctctgtgcagcaggcagctcagctgtcgggggatcagcctgacacagccctccccacagcctgccaacaccacacgtgctagctgcacagcacgctgctgtgacaacacaacggcacattattgggccycaattctacgacttaaaggatttcctgacctcccgtgcctgctgatgctctctttaagagtttgatacccgtgtcaagcaagttacaaaacctatctgttgttgcagtgaacgagcaatggacggatctgcagaatgatgcaaggctctgctgactgctagctatacttatgtaactcaatagcttcacagctgctaataattagcagatgacctgtgtaagtgctasacaaatacagggagttggaaaaggagaaccctgcttcatctctttaaaaccgagctagcaaaacgggaaca

SEQ ID NO: 10989 - DNA, 600 bp, Chicken  19866894213286_2
agcctgccaacaccacacgtgctagctgcacagcacgctgctgtgacaacacaacggcacattattgggccycaattctacgacttaaaggatttcctgacctcccgtgcctgctgatgctctctttaagagtttgatacccgtgtcaagcaagttacaaaacctatctgttgttgcagtgaacgagcaatggacggatctgcagaatgatgcaaggctctgctgactgctagctatacttatgtaactcaatagcttcacagctgctaataattagcagatgacctgtgtaagtgctasacaaatacagggagttggaaaaggagaaccctgcttcatctctttaaaaccgagctagcaaaacgggaacagggatttttaacagatctcctacgattctctttttcttmtcccaacagaattcaaacgcagcataatgaattcagcataaatcttatagctggagaygtgaatggcgccttgttcrgagcatttgggtttggaacacagatgcagttaactcactgcttaacgtcttctgtcatactctctaaagtgccgatctgtttcctcagcttccacgttaggaaaacaaaacca

SEQ ID NO: 10990 - DNA, 600 bp, Chicken  19866894213286_3
ctgctgatgctctctttaagagtttgatacccgtgtcaagcaagttacaaaacctatctgttgttgcagtgaacgagcaatggacggatctgcagaatgatgcaaggctctgctgactgctagctatacttatgtaactcaatagcttcacagctgctaataattagcagatgacctgtgtaagtgctasacaaatacagggagttggaaaaggagaaccctgcttcatctctttaaaaccgagctagcaaaacgggaacagggatttttaacagatctcctacgattctctttttcttmtcccaacagaattcaaacgcagcataatgaattcagcataaatcttatagctggagaygtgaatggcgccttgttcrgagcatttgggtttggaacacagatgcagttaactcactgcttaacgtcttctgtcatactctctaaagtgccgatctgtttcctcagcttccacgttaggaaaacaaaaccaaccacctttcttcaagtgatttctttctttaaacaaagagagattcaaacctgaatcgggcatacagctttctctgctctcgtcctctctcaaaaataagggattaattg

SEQ ID NO: 10991 - DNA, 600 bp, Chicken  19866894213286_4
tgttgttgcagtgaacgagcaatggacggatctgcagaatgatgcaaggctctgctgactgctagctatacttatgtaactcaatagcttcacagctgctaataattagcagatgacctgtgtaagtgctasacaaatacagggagttggaaaaggagaaccctgcttcatctctttaaaaccgagctagcaaaacgggaacagggatttttaacagatctcctacgattctctttttcttmtcccaacagaattcaaacgcagcataatgaattcagcataaatcttatagctggagaygtgaatggcgccttgttcrgagcatttgggtttggaacacagatgcagttaactcactgcttaacgtcttctgtcatactctctaaagtgccgatctgtttcctcagcttccacgttaggaaaacaaaaccaaccacctttcttcaagtgatttctttctttaaacaaagagagattcaaacctgaatcgggcatacagctttctctgctctcgtcctctctcaaaaataagggattaattgttaggcagcaaactgggaataacatcgcttactaagaatttcctttgcagctcctgtc

SEQ ID NO: 10992 - DNA, 600 bp, Chicken  19866894213286_5
caatggacggatctgcagaatgatgcaaggctctgctgactgctagctatacttatgtaactcaatagcttcacagctgctaataattagcagatgacctgtgtaagtgctasacaaatacagggagttggaaaaggagaaccctgcttcatctctttaaaaccgagctagcaaaacgggaacagggatttttaacagatctcctacgattctctttttcttmtcccaacagaattcaaacgcagcataatgaattcagcataaatcttatagctggagaygtgaatggcgccttgttcrgagcatttgggtttggaacacagatgcagttaactcactgcttaacgtcttctgtcatactctctaaagtgccgatctgtttcctcagcttccacgttaggaaaacaaaaccaaccacctttcttcaagtgatttctttctttaaacaaagagagattcaaacctgaatcgggcatacagctttctctgctctcgtcctctctcaaaaataagggattaattgttaggcagcaaactgggaataacatcgcttactaagaatttcctttgcagctcctgtctttatttcacaaattcttt

SEQ ID NO: 10993 - DNA, 600 bp, Chicken  19866894213291_1
gcagtggttgtggaagtgtttccccatacttagaggattaatactgttacaaggcaagtatctaaaggagcctcaatgtacaagttaacagggggatggcctgtcagtgtgcatctgaaaaccacaccctgttaaaaggtggtgagtcggctggaaagtattttgtgggttttgctgactcactggagcagttggcttcttacctttgccagagagaagagaaacaaaagcagctctcaagcagtgtgtctgtgtgtgtacttgtgagtctgcgtgtatttgcatgtccactgtgggatrtattgacactatgggagagaactgtgaatgcagtcaccatgasggaaacattctatctgctgttwcatatatttttatgcactgtattgtctgtctgcatttgtaaataaaatcaagagaagcagtacttgctaatgacactgtgctttgctgttttgttcagggatgctttttgcactatttgctcagtaatctgtatttttgatgtgtcatgccatctctgtctcttctgccacagatatagatgaatgccaagacagatccctgtgtgtcaatggacgctgcaggaacacagaaggg

SEQ ID NO: 10994 - DNA, 600 bp, Chicken  19866894213291_2
ctgttacaaggcaagtatctaaaggagcctcaatgtacaagttaacagggggatggcctgtcagtgtgcatctgaaaaccacaccctgttaaaaggtggtgagtcggctggaaagtattttgtgggttttgctgactcactggagcagttggcttcttacctttgccagagagaagagaaacaaaagcagctctcaagcagtgtgtctgtgtgtgtacttgtgagtctgcgtgtatttgcatgtccactgtgggatrtattgacactatgggagagaactgtgaatgcagtcaccatgasggaaacattctatctgctgttwcatatatttttatgcactgtattgtctgtctgcatttgtaaataaaatcaagagaagcagtacttgctaatgacactgtgctttgctgttttgttcagggatgctttttgcactatttgctcagtaatctgtatttttgatgtgtcatgccatctctgtctcttctgccacagatatagatgaatgccaagacagatccctgtgtgtcaatggacgctgcaggaacacagaagggtctttcagatgtgtttgtagccaaggttacgttctgtctgcta

SEQ ID NO: 10995 - DNA, 600 bp, Chicken  19866894213291_3
aggagcctcaatgtacaagttaacagggggatggcctgtcagtgtgcatctgaaaaccacaccctgttaaaaggtggtgagtcggctggaaagtattttgtgggttttgctgactcactggagcagttggcttcttacctttgccagagagaagagaaacaaaagcagctctcaagcagtgtgtctgtgtgtgtacttgtgagtctgcgtgtatttgcatgtccactgtgggatrtattgacactatgggagagaactgtgaatgcagtcaccatgasggaaacattctatctgctgttwcatatatttttatgcactgtattgtctgtctgcatttgtaaataaaatcaagagaagcagtacttgctaatgacactgtgctttgctgttttgttcagggatgctttttgcactatttgctcagtaatctgtatttttgatgtgtcatgccatctctgtctcttctgccacagatatagatgaatgccaagacagatccctgtgtgtcaatggacgctgcaggaacacagaagggtctttcagatgtgtttgtagccaaggttacgttctgtctgctactggagatcagtgtgaaggtaa

SEQ ID NO: 10996 - DNA, 600 bp, Chicken  19866894213297_1
gccctcctgcacccttcacaatgtcacaagggaaacaggattcccacttccccaagcgcacaacaaacctgagcactttttgcttctcttgtctatgttcttggtgtcttgctgtgggcaacaaggttaacacgaacccgaacaaggacactcacttgtcaaaggaggtcatgggagaacaggaggggaggttgcagggtgggcacgacagcctgtgctgcacagacctggcacccactgcaccagcagcagtctgtggacgtgctgctgtgacctcccttcagctgtggaagcttttaygtgagtcatggygtgtgtgagcaggaatgcagtgctgcagctaaatacctcctttcaatcaagaaaaaggccaattttgaatctctcatggacaggcaaaaattttcaaaagtgacatacaaaaatcatgggagaatctttgctaatattcaccttcagcagctgctgcacaagcacagagacagctccatcctaaagtgcctccactctgagagaaaagataatgaattggtacagaaagctatctaygaattacaaggaaacagctagaaaactggtcagcacaacaaacgctagttt

SEQ ID NO: 10997 - DNA, 600 bp, Chicken  19866894213297_2
ccttcacaatgtcacaagggaaacaggattcccacttccccaagcgcacaacaaacctgagcactttttgcttctcttgtctatgttcttggtgtcttgctgtgggcaacaaggttaacacgaacccgaacaaggacactcacttgtcaaaggaggtcatgggagaacaggaggggaggttgcagggtgggcacgacagcctgtgctgcacagacctggcacccactgcaccagcagcagtctgtggacgtgctgctgtgacctcccttcagctgtggaagcttttaygtgagtcatggygtgtgtgagcaggaatgcagtgctgcagctaaatacctcctttcaatcaagaaaaaggccaattttgaatctctcatggacaggcaaaaattttcaaaagtgacatacaaaaatcatgggagaatctttgctaatattcaccttcagcagctgctgcacaagcacagagacagctccatcctaaagtgcctccactctgagagaaaagataatgaattggtacagaaagctatctaygaattacaaggaaacagctagaaaactggtcagcacaacaaacgctagtttaagcacagcagc

SEQ ID NO: 10998 - DNA, 600 bp, Chicken  19866894213297_3
cagtctgtggacgtgctgctgtgacctcccttcagctgtggaagcttttaygtgagtcatggygtgtgtgagcaggaatgcagtgctgcagctaaatacctcctttcaatcaagaaaaaggccaattttgaatctctcatggacaggcaaaaattttcaaaagtgacatacaaaaatcatgggagaatctttgctaatattcaccttcagcagctgctgcacaagcacagagacagctccatcctaaagtgcctccactctgagagaaaagataatgaattggtacagaaagctatctaygaattacaaggaaacagctagaaaactggtcagcacaacaaacgctagtttaagcacagcagcagcctgccaattgtcacatcttttgcagccgtcacagcgagagagtattttaaaaatggatttgaaggaggggcagcccccacagaggtgctggtttgaaaatggaggaaaggaagacaaaagaaaacaaataagaattgaagtccggagtgactttgggtatttgtggcctttgtttttgagactgagctgttctgggctggtggggatatttttaggtggggaagagaaggaata

SEQ ID NO: 10999 - DNA, 600 bp, Chicken  19866894213300_1
gttaccattaatgtctaaggatgattgctcacagatgagagcatttggaactggagtagaaagaaagattggggtgatgtttgggactgggatggatttccttcccctcagagctgcaggaagggttaactcatggtgcttggaggtgtgatccagctcctagctgggatttatgggcaccacagaaacaagaccaagttgcacacgggtgaacttttttctttcttagcactggttttgtctgttgtttctctgccagggttgtagtgcaactctgcttaaggaaatgctttgtctggkggaaaactgaggtgtgttaatagaggagctgccactgcagcttgtttcacttggygtcacctaaagctgagagaaagagagcagtgtgtgttaagctgttccttctttgcttggatttcaaccactgtccatctgttctttctcttactgctgccatyggtgatgcttggatgcacagagcggcaagggcttttggagaatacctttcacaaaatcatcctgaaggcagaaatggctcaggtaagtgatgacatacattgtttttatctgcatgcacacgcacctaattaccagyatgcc

SEQ ID NO: 11000 - DNA, 600 bp, Chicken  19866894213300_2
gtagaaagaaagattggggtgatgtttgggactgggatggatttccttcccctcagagctgcaggaagggttaactcatggtgcttggaggtgtgatccagctcctagctgggatttatgggcaccacagaaacaagaccaagttgcacacgggtgaacttttttctttcttagcactggttttgtctgttgtttctctgccagggttgtagtgcaactctgcttaaggaaatgctttgtctggkggaaaactgaggtgtgttaatagaggagctgccactgcagcttgtttcacttggygtcacctaaagctgagagaaagagagcagtgtgtgttaagctgttccttctttgcttggatttcaaccactgtccatctgttctttctcttactgctgccatyggtgatgcttggatgcacagagcggcaagggcttttggagaatacctttcacaaaatcatcctgaaggcagaaatggctcaggtaagtgatgacatacattgtttttatctgcatgcacacgcacctaattaccagyatgccttagaattaaagtgtgtcaacttactcattagaaagggccagtgtgagatcccag

SEQ ID NO: 11001 - DNA, 600 bp, Chicken  19866894213300_3
cctagctgggatttatgggcaccacagaaacaagaccaagttgcacacgggtgaacttttttctttcttagcactggttttgtctgttgtttctctgccagggttgtagtgcaactctgcttaaggaaatgctttgtctggkggaaaactgaggtgtgttaatagaggagctgccactgcagcttgtttcacttggygtcacctaaagctgagagaaagagagcagtgtgtgttaagctgttccttctttgcttggatttcaaccactgtccatctgttctttctcttactgctgccatyggtgatgcttggatgcacagagcggcaagggcttttggagaatacctttcacaaaatcatcctgaaggcagaaatggctcaggtaagtgatgacatacattgtttttatctgcatgcacacgcacctaattaccagyatgccttagaattaaagtgtgtcaacttactcattagaaagggccagtgtgagatcccagcagcagagaggctgcagagtcaccctgtggatccatgtgaagcccatgaggagaaaaggcatttgggtgactgaaggttgggtgggctgtggggacaagctca

SEQ ID NO: 11002 - DNA, 600 bp, Chicken  19866894213300_4
ctggkggaaaactgaggtgtgttaatagaggagctgccactgcagcttgtttcacttggygtcacctaaagctgagagaaagagagcagtgtgtgttaagctgttccttctttgcttggatttcaaccactgtccatctgttctttctcttactgctgccatyggtgatgcttggatgcacagagcggcaagggcttttggagaatacctttcacaaaatcatcctgaaggcagaaatggctcaggtaagtgatgacatacattgtttttatctgcatgcacacgcacctaattaccagyatgccttagaattaaagtgtgtcaacttactcattagaaagggccagtgtgagatcccagcagcagagaggctgcagagtcaccctgtggatccatgtgaagcccatgaggagaaaaggcatttgggtgactgaaggttgggtgggctgtggggacaagctcagttccagtggatccatgtcctgccataaattcactcctcaagctgctgtccttggatgacacttcagctgaagaatgaaaaagtgcactgcatgaggcttctgcactggtttgttactcctaggtcttgctttcact

SEQ ID NO: 11003 - DNA, 600 bp, Chicken  19866894213304_1
gagcaatagaccccccaaaaacaaaggctattttttaaaatagcaaatcttgcattcttgtcatttgcctgctagcatttgagtgcttagggttcacacttgcaaacgtctttatgaaactatgagcaactttcttttgatttcttatttaaatgaaagtgagcaaagagtttggtgataaacaccaaatactctgagccttttgccaccacatgaagtttggcagcaccgaggcctgatttccttaccttggaaatgctccccagcaggagctgccctggaatcagtaagacttggatmttcttaatgatctggttttccactggaggagctctggatcagtaacaaggtgatcagtcaggttcgctgtcttcataatactgctatattacatagggttttattcaacaagacttttaaatcaaaagatccctaaaacagaacttctgaagtaattaggtgaggatctccagtatttgtccttgcaaggctggggaaacatgctaccattttgacttgcatagatgtggaaacaaaaaactgaatgcttcaggttcaagaagaaccaaagatttcctcctcctagcaaaggtgttgcaa

SEQ ID NO: 11004 - DNA, 600 bp, Chicken  19866894213308_1
caatcttatatagaagattggcacaaaagataggtaaaaaaaataagaggcaataattccttatacattgtagtgcagtttaacagacctcatttgttatttcttaggaaaccaaagatactaagtttttaaagctagactaccaaaaccactactcgttactttccaaatgctgtcagaatcaaagctgactgtaaccacagcatgtgcagacaactaatctgaaagcacatagtattcatgaaaacaatgtaatttattcagaagtctgtagtggcatttacttcatgtaaagatgtyattaccaaggtacgacatgaaaatccttctgtgatctttgcaggttgtctcgaattacctcccagccgagctcaatcctcctgcgcttgcttggtaccgtgtcaccacctgactgcgtaacggtgtatgactgggtgatttccagaactttggtatcctctgtaaacacctttatgacgagaaattaagaagtacacaaattagagaaggtatttacaggaaaaattgaaawgtcaaattgaaccggtcctttttttaccatgtttaaagactctcaagaggcaataagtagtattattt

SEQ ID NO: 11005 - DNA, 569 bp, Chicken  19866894213308_2
tagtattcatgaaaacaatgtaatttattcagaagtctgtagtggcatttacttcatgtaaagatgtyattaccaaggtacgacatgaaaatccttctgtgatctttgcaggttgtctcgaattacctcccagccgagctcaatcctcctgcgcttgcttggtaccgtgtcaccacctgactgcgtaacggtgtatgactgggtgatttccagaactttggtatcctctgtaaacacctttatgacgagaaattaagaagtacacaaattagagaaggtatttacaggaaaaattgaaawgtcaaattgaaccggtcctttttttaccatgtttaaagactctcaagaggcaataagtagtattatttattattgtttactctaactgaacttatacttaagttctaacaagcaacactagcaaaatctagtataatttaggaattcaatcacttataaactgcacaaaggctaaaaactatcacatcacaaggtactaatacttcagtaagggaaatgttaaaagctccattaaaaagcaaaatttatgacgtaagaatatacatcaa

SEQ ID NO: 11006 - DNA, 599 bp, Chicken  19866894213312_1
  misc_feature (1)..(6): n is any nucleotide
nnnnnngaaaagcagttaggaggggaaatgtcccaggagagaagggataggagagaatagtgtaagagtgtagaatagaataaccccgaacaaagagaacactgaacgaagtaagaggatgctgatcaaagtaagagacaactgcagttcctagcaaagcacagggatgagcccggctgctgtctgcagagccatgctgatcctgcagcccagctgcgaggctggcttactgcagcaggctttccctctagtggaggagcacaggaaaggattcctgtgctggaggagacagcacagatycctycggacctgagtttgcccatcatgtgctgatgtgatgctggggaaacttgtggcaaatgcaacctcgggaaagaaaaccttcctctgcacatggaaagcaggagggctctgtctgcaaacctgcctccatcactatctgcagaggtaacatcttttatccctttatccttttaccccagccaacaagacagccatgctgtgcaattgggaaggtttgcagcctgggtgtgtgtgctgaagaaatttggtgaagaccccccagggctggtctgtcagtctggatcagcaaccagggc

SEQ ID NO: 11007 - DNA, 599 bp, Chicken  19866894213312_2
  misc_feature (1)..(2): n is any nucleotide
nngaaaagcagttaggaggggaaatgtcccaggagagaagggataggagagaatagtgtaagagtgtagaatagaataaccccgaacaaagagaacactgaacgaagtaagaggatgctgatcaaagtaagagacaactgcagttcctagcaaagcacagggatgagcccggctgctgtctgcagagccatgctgatcctgcagcccagctgcgaggctggcttactgcagcaggctttccctctagtggaggagcacaggaaaggattcctgtgctggaggagacagcacagatycctycggacctgagtttgcccatcatgtgctgatgtgatgctggggaaacttgtggcaaatgcaacctcgggaaagaaaaccttcctctgcacatggaaagcaggagggctctgtctgcaaacctgcctccatcactatctgcagaggtaacatcttttatccctttatccttttaccccagccaacaagacagccatgctgtgcaattgggaaggtttgcagcctgggtgtgtgtgctgaagaaatttggtgaagaccccccagggctggtctgtcagtctggatcagcaaccagggccgaa

SEQ ID NO: 11008 - DNA, 600 bp, Chicken  19866894213314_1
agccagaaaataaagttcatagaagttcccagtatttttcttttatcctgacaaaatcctgttctctgcacatagctgctgatgtagatgccttgtgagagtgactctctggaactgcctcaaaaatgggtaagatctagatgcaaagaagcaaacagccatttacgtgcatttgtttcccattgcttccataaatctgatcatcatctctcactgttaaaccttaactttgataacaagaagaggtcagaatttgtcatgtcctgtgtttcatttttggttttgagtgcctgttttttktttttttttttggctaattttaaaggtacgtgctatgggaaaaaaaaaagcctcagtgggcatagataattcttagcctctttacactaaatagaaggccaaacagtcctacacaaggtacaatcctctccaaagcagcaaacccaaagtcccaattcttacttaattcaacaaataaaaaattaacacagaaaaatacaactttaacttttcttcctaaaacatgatagaaacattactaacataagcaagtaaaggtggctagagtatcattctttttaaagaagtctcagagttcca

SEQ ID NO: 11009 - DNA, 599 bp, Chicken  19866894213318_1
  misc_feature (1)..(240): n is any nucleotide
nnnnnnnnnnnnnnnnnnnnnnnnnnnnnnnnnnnnnnnnnnnnnnnnnnnnnnnnnnnnnnnnnnnnnnnnnnnnnnnnnnnnnnnnnnnnnnnnnnnnnnnnnnnnnnnnnnnnnnnnnnnnnnnnnnnnnnnnnnnnnnnnnnnnnnnnnnnnnnnnnnnnnnnnnnnnnnnnnnnnnnnnnnnnnnnnnnnnnnnnnnnnnnnnnnnnnnnnnnnnnnnnnnnnnnnnnnnnnnnnttatcctaatacgataaaagttcaggttgccaaagcacgcttctgtagcatcagaagagytcttagattagagtccttgtcatgctggaattttacagctgtagaatatagttttcctgattgtgtgacaattaatgaaggtttgtgagcaaacaaaaagttgatcaaaagctttccattatagcacagagtattccagctaatatggaatagaaatatatatttctatttcaaattcagaaaatggaaacctgtctggcattctaggagtgaaacccaaatcggaaatccagcaggacagaaaaggttactttgccattttgtcctcttcacaytgggaaacccactgycataacaac

SEQ ID NO: 11010 - DNA, 600 bp, Chicken  19866894213318_2
cacgcttctgtagcatcagaagagytcttagattagagtccttgtcatgctggaattttacagctgtagaatatagttttcctgattgtgtgacaattaatgaaggtttgtgagcaaacaaaaagttgatcaaaagctttccattatagcacagagtattccagctaatatggaatagaaatatatatttctatttcaaattcagaaaatggaaacctgtctggcattctaggagtgaaacccaaatcggaaatccagcaggacagaaaaggttactttgccattttgtcctcttcacaytgggaaacccactgycataacaacttttgcaaatggaagctgctgccagcattctctcaaaaccctcaaaataaagttattttggatatgagagtttttccaaagtttagtgataatataaaataatcatccatttctcaagacacagttgacttgacttgcttccactatgctgccacattgcagcatgttcttgtcttaggttctcctgctgctgcctcccttaacatcaaagttgggggaataagtaagggctggtgcaaaccagggccttgcactggcatatgcccgcagtaagca

SEQ ID NO: 11011 - DNA, 600 bp, Chicken  19866894213318_3
tcagaagagytcttagattagagtccttgtcatgctggaattttacagctgtagaatatagttttcctgattgtgtgacaattaatgaaggtttgtgagcaaacaaaaagttgatcaaaagctttccattatagcacagagtattccagctaatatggaatagaaatatatatttctatttcaaattcagaaaatggaaacctgtctggcattctaggagtgaaacccaaatcggaaatccagcaggacagaaaaggttactttgccattttgtcctcttcacaytgggaaacccactgycataacaacttttgcaaatggaagctgctgccagcattctctcaaaaccctcaaaataaagttattttggatatgagagtttttccaaagtttagtgataatataaaataatcatccatttctcaagacacagttgacttgacttgcttccactatgctgccacattgcagcatgttcttgtcttaggttctcctgctgctgcctcccttaacatcaaagttgggggaataagtaagggctggtgcaaaccagggccttgcactggcatatgcccgcagtaagcacacttactggaaaag

SEQ ID NO: 11012 - DNA, 600 bp, Chicken  19866894213341_1
gatttgtcgccatttatcaaacaacatatagtagcaaatcagcagcaccctagccctgcttccaagcacaagccaagagaaaggaataattcagagctatgggatttgaactgcctcctccactattcacagggtgagatttgatatgtaggccagcaaaaggtcccctttcctttgtctagacctatcctgctaacttgaacaaaggacgagacagaagttgcaatgcatattgaaagtaagagacagaaagagagacagacacagcaggtagggagctgataatgcagacaaggaaayaaaaaaaaaaaaagaagaagaacttcttaagattctttccaagaaggctatatcttcagtgcacttggtgcttttaattagaatgtctcatgctcttttcttgatctctctccctgacacaaaaagctatgctcagccagctgtggcactctgtcagggcactgtgttgttcacctgttggacagttccagcccctggtgctccggcaggaagtacaccaccacctgtgctgtggygcttgcagtcccaccagtgagcaggaaccatcacctgcaacaggatgtggcaagcctgcctttc

SEQ ID NO: 11013 - DNA, 600 bp, Chicken  19866894213341_2
aagtaagagacagaaagagagacagacacagcaggtagggagctgataatgcagacaaggaaagaaaaaaaaaaaaagaagaagaacttcttaagattctttccaagaaggctatatcttcagtgcacttggtgcttttaattagaatgtctcatgctcttttcttgatctctctccctgacacaaaaagctatgctcagccagctgtggcactctgtcagggcactgtgttgttcacctgttggacagttccagcccctggtgctccggcaggaagtacaccaccacctgtgctgtggygcttgcagtcccaccagtgagcaggaaccatcacctgcaacaggatgtggcaagcctgcctttcaaaatcaaggggcaggatacaaagtgaggctgatgtagagtgacatggggcaaggaaagtgccaaaccttttcacaagaaaccttttcttccttttcacggcagtattatcagagccagagcaggtacctcttttttgacactttaaaggttgtactttcttggagcgtgccaaaattcaaccatgtaagtcaagagtttggcttttacatatatatttttagcatcacttttcta

SEQ ID NO: 11014 - DNA, 600 bp, Chicken  19866894213344_1
ctgctgaaggagaaatattcctgttgttgtcactgctggtgttattaacataaaaacctgtggggatatcaatattccagtgaatatcagatcaaaggacacagctgaaagttggttcacccggcattcctcgcgtagtttcctgtgaaattttatcaacacaagtaatgattgctgtgatattatttggcaaaaagagagctatactttgctctcctacagtctgcaactacacaatctcatttaaaactggtgagtacagagtccctaagtaatagtatcgcaccgcaacaaagcagycttttgtgcaaccaagtgaagcaattctgagaagaaaaccattcaagtcccaagtcttgtaggaactctgtagctatttgaaactttggacaacttctcttgattcctgcttgtaaatcyacctgcatcttctcagacatttactgaatttgcctttgtcttcttcctctcacttctgaagctctttttattcattaattacctcttgggtctcctacacctactgcaatttccttgctagtaatatcagtaagtatctcgcctttaaaattcagaggttgcaggcaaaaacaagcaacc

SEQ ID NO: 11015 - DNA, 600 bp, Chicken  19866894213344_2
ccggcattcctcgcgtagtttcctgtgaaattttatcaacacaagtaatgattgctgtgatattatttggcaaaaagagagctatactttgctctcctacagtctgcaactacacaatctcatttaaaactggtgagtacagagtccctaagtaatagtatcgcaccgcaacaaagcagycttttgtgcaaccaagtgaagcaattctgagaagaaaaccattcaagtcccaagtcttgtaggaactctgtagctatttgaaactttggacaacttctcttgattcctgcttgtaaatcyacctgcatcttctcagacatttactgaatttgcctttgtcttcttcctctcacttctgaagctctttttattcattaattacctcttgggtctcctacacctactgcaatttccttgctagtaatatcagtaagtatctcgcctttaaaattcagaggttgcaggcaaaaacaagcaaccatcttaatgtatcattctgcctacatttatattaattcttaaaaggaatgaacaaagggctcttttcatttgtaacaaaacaccttctaccaaccytctgcattctgtttctctgatgct

SEQ ID NO: 11016 - DNA, 600 bp, Chicken  19866894213344_3
ctcttgattcctgcttgtaaatcyacctgcatcttctcagacatttactgaatttgcctttgtcttcttcctctcacttctgaagctctttttattcattaattacctcttgggtctcctacacctactgcaatttccttgctagtaatatcagtaagtatctcgcctttaaaattcagaggttgcaggcaaaaacaagcaaccatcttaatgtatcattctgcctacatttatattaattcttaaaaggaatgaacaaagggctcttttcatttgtaacaaaacaccttctaccaaccytctgcattctgtttctctgatgctgtgccagcttgccagtcttaagctttacggttcacctattactgtagcagctgaaattctgtgcttcttctaggtctgcttatttcattcctttatttttaatcttcccttatccctttctagcacaaagaatggaaaattcctgctgaagggaagggctctttgtgatgtctgatcttacccaaacagtactccatttaggcatacagactttctgtttttcctactatttgagactgactttttctgtgaacactcttataagtggtactatgt

SEQ ID NO: 11017 - DNA, 600 bp, Chicken  19866894213348_1
agaaaatataaaaaacagatgaaaatgtgctctattttgatatatacatttttttcctttatgcaattgatttcatgtattaattgggtgtgaagaaataaatgaataccaaaaatactcatgtattcctggagccagaatcacaagccattttctctgaagtcaatgtgaacagactatttccagactcatactgagtctaaaaccagtataatttttaattattttaattcagttactgctgcaataggagaggaaaaaagagagatggtttggaagaagggatggttagcatctgcrttaatggttgtgtatagaagggagatacttatctaaaatgacatggaagtgatcgcaaaactackgcatacaatcatgttttaatggctttaaaaatatatatwtttttacatcaaatccattgcgccgaggatcctagaaagtctttcctacattcactgataattcatagaaaatgcaaatatattaccaaaataaataaaaattcttagaagatcagaagcataataatagacggtttactttttaagatgcaatagtcatatcattttggttattaaatggaattttctttagata

SEQ ID NO: 11018 - DNA, 600 bp, Chicken  19866894213348_2
attgatttcatgtattaattgggtgtgaagaaataaatgaataccaaaaatactcatgtattcctggagccagaatcacaagccattttctctgaagtcaatgtgaacagactatttccagactcatactgagtctaaaaccagtataatttttaattattttaattcagttactgctgcaataggagaggaaaaaagagagatggtttggaagaagggatggttagcatctgcrttaatggttgtgtatagaagggagatacttatctaaaatgacatggaagtgatcgcaaaactackgcatacaatcatgttttaatggctttaaaaatatatatwtttttacatcaaatccattgcgccgaggatcctagaaagtctttcctacattcactgataattcatagaaaatgcaaatatattaccaaaataaataaaaattcttagaagatcagaagcataataatagacggtttactttttaagatgcaatagtcatatcattttggttattaaatggaattttctttagataattttgtgcattttacccaataaatggcttttatttgcatgtttttgactgtattatttgttatt

SEQ ID NO: 11019 - DNA, 600 bp, Chicken  19866894213348_3
aataccaaaaatactcatgtattcctggagccagaatcacaagccattttctctgaagtcaatgtgaacagactatttccagactcatactgagtctaaaaccagtataatttttaattattttaattcagttactgctgcaataggagaggaaaaaagagagatggtttggaagaagggatggttagcatctgcrttaatggttgtgtatagaagggagatacttatctaaaatgacatggaagtgatcgcaaaactackgcatacaatcatgttttaatggctttaaaaatatatatwtttttacatcaaatccattgcgccgaggatcctagaaagtctttcctacattcactgataattcatagaaaatgcaaatatattaccaaaataaataaaaattcttagaagatcagaagcataataatagacggtttactttttaagatgcaatagtcatatcattttggttattaaatggaattttctttagataattttgtgcattttacccaataaatggcttttatttgcatgtttttgactgtattatttgttattttcttaaaagatagacttataatggtagtataatttgac

SEQ ID NO: 11020 - DNA, 600 bp, Chicken  19866894213351_1
gaatacagagacattgtcaagggagaacattaggaaagctaaagccttaatagaattgaatctggccaagggtgtcaaagacaacaaaaaaggcttctgtaagaacattggtgactaaatgaagactaatgcaggtctgggttctttgctgaatgagttgaaaatacaagacatagaaaatgctcaggcacttaattcgttcttttcctcggtgtgtactagcaagactagccttcatgagacccagagaccagggaggaagactggaggaaggatatatccttagtggaagaaaaccasgtcaggaaatacttaggcagagttgacattcagaagtccaagagtgctgatggaatgcacccatgagtgctaagggatcttgcagatgtagctgtgaggctactcttgataatctttcatcaatcgtggtaatggagagaaatgctggaagactggaggaaggcaaatgtcactcatgtcttcgagaagggcaagaggaaactgtatcatatacttggaaatatgatggagatgttaatcctggaaaccattttgagctacacgaaagagaagaaaattgtcagaagtagttagtatggt

SEQ ID NO: 11021 - DNA, 600 bp, Chicken  19866894213356_1
gcttcagctacttcctgagaaattacagtagatagcaaactgttgcttctgttgtggttcagatctcagctaggaccacaggtgttgatattaacagctgcaaagtcttgcaggaataccggggcccaaagagagaaacagaagggggagctgagcactgggaagagatatctcagaaagaaaacatgcccaccagcaaaaaaaagtaactgaatacacagtaacactaaccacttcattaattaattccaggataatttggctagaactgaaaatacaaacagctcagaagtcagtttsaaaaaagtttccatattcatatttgtctcatattaaaagcaaggttgccactttatatagaacctttacatatgtcacaatttaaagatcagagctattactcaagcctggtacagttggaattcaaggaacatatwgaaattgagctgactagaaacttgtgtgaaagacgactgaaatgtgccactgctagaggttagtctacaagtagctggatgaattaacatgtaagctgccttcttggggtaccaggatgattgtctgaatatttatatattgtcgtgatttcttttatttcct

SEQ ID NO: 11022 - DNA, 600 bp, Chicken  19866894213356_2
acagaagggggagctgagcactgggaagagatatctcagaaagaaaacatgcccaccagcaaaaaaaagtaactgaatacacagtaacactaaccacttcattaattaattccaggataatttggctagaactgaaaatacaaacagctcagaagtcagtttaaaaaaagtttccatattcatatttgtctcatattaaaagcaaggttgccactttatatagaacctttacatatgtcacaatttaaagatcagagctattactcaagcctggtacagttggaattcaaggaacatatwgaaattgagctgactagaaacttgtgtgaaagacgactgaaatgtgccactgctagaggttagtctacaagtagctggatgaattaacatgtaagctgccttcttggggtaccaggatgattgtctgaatatttatatattgtcgtgatttcttttatttcctgcaggccaaagtaaataatgccagtctgattggaattggttatactcttgctcttcgacctggtacgtaagttcaactggtagcattgtgtgttattttattacctctggagtagaaaagattgatgacaaaaaaac

SEQ ID NO: 11023 - DNA, 600 bp, Chicken  19866894213356_3
acaagtagctggatgaattaacatgtaagctgccttcttggggtaccaggatgattgtctgaatatttatatattgtcgtgatttcttttatttcctgcaggccaaagtaaataatgccagtctgattggaattggttatactcttgctcttcgacctggtacgtaagttcaactggtagcattgtgtgttattttattacctctggagtagaaaagattgatgacaaaaaaacaaatgagcaaacgaaaaacattacctagaaatcttacacagattcatagaagtaagggctgtgcaygtgtataagttcccatagtaactgagacacattagtgaacctcaggtacttgaagggggagggggacggatggatggacattataagggaagatcaggatctcattacttgcttttgtaggtgtaaagctgaccctctcaggcttgattgatggcaagaatttcagtgctggaggtcacaaagttgggctaggatttgagctggaagcttaatgcatttttaagtaaaacaacagatggtgctctggaagatgaaggtgaagtgtacccggtgtgttttggccttaacattacactgaag

SEQ ID NO: 11024 - DNA, 600 bp, Chicken  19866894213358_1
cagtacaattgaggatagtctcattatttttgaacgttaacctttctaaatgcatttctaggcagcgtcagtggagactgaagatgaagacaccgctaataaaatctttgaaaaatggggtagaaaaaaatattctctgcttccatttattacaatccatttggataaagccatatcatgaaactgcaagagattattctgtttaggagggtaaagtgaaatattacattatgaaaaaactatcaaagtcagtttgtcctcagttacagaccacttatgtaagtggtatcaggaaaaagycaggtgtgcagccacartcagataaacagaggggtgcaagaccatccacgacacacagatggagagcaaaaggcagcggggactgagagctgtaaggtcatcttgaggattctttttctacatggacttagcacctttgacaaactgggggtggtgacaccgatgcaaaagactaggagaagcaaaaacacactagggagcaagctggtggggctcatcaccaaggctttaaactacatctgctggggaaaggaggcatactgctgagtgacagagagccagggaatactgtcaccctca

SEQ ID NO: 11025 - DNA, 600 bp, Chicken  19866894213358_2
gtctcattatttttgaacgttaacctttctaaatgcatttctaggcagcgtcagtggagactgaagatgaagacaccgctaataaaatctttgaaaaatggggtagaaaaaaatattctctgcttccatttattacaatccatttggataaagccatatcatgaaactgcaagagattattctgtttaggagggtaaagtgaaatattacattatgaaaaaactatcaaagtcagtttgtcctcagttacagaccacttatgtaagtggtatcaggaaaaagycaggtgtgcagccacartcagataaacagaggggtgcaagaccatccacgacacacagatggagagcaaaaggcagcggggactgagagctgtaaggtcatcttgaggattctttttctacatggacttagcacctttgacaaactgggggtggtgacaccgatgcaaaagactaggagaagcaaaaacacactagggagcaagctggtggggctcatcaccaaggctttaaactacatctgctggggaaaggaggcatactgctgagtgacagagagccagggaatactgtcaccctcagaggcaaggggagaaaa

SEQ ID NO: 11026 - DNA, 600 bp, Chicken  19866894213371_1
tgaaagaattacaccagcccaaagatgagatgaagcagagcaagaggcacagcactgctccatccctgtggctgactgctttgcaaacactttgcttcccattttgactcacacagcaaggggcacagactgacctttaaccagcggggccccatagtgggggcatttgtgtcccatggcatagaactcgccaccttccttgatcagcagtgccttcccacagcccaggtccacctcacgcatcctaggaagaggagcacagagagacgatggtagaactaatgccattccctcacctcrtgctgcaacccagtcccaccctgcccaccttccccttcctccagcccacctgccatgggctctgggtggctcacaggtgttgtcagccctgccccaggcaaaagcacacctgtgctgatcatgcaccctgcctgcaaaaccaaaaacagctactgcagtgccctcatctactggatacgtggttaatgatgttatcactgctggaaagcagcatttcagaacatcatctaggttggaaaagaccttcaagatcatcaagtccagtcatcaacctgacctaatgaatcccagcaacaaacc

SEQ ID NO: 11027 - DNA, 600 bp, Chicken  19866894213384_1
ttatatacacctttgactcacagtggcttatagtcgtttcttctcttagttccccatcctcctctattctcatctgaagccctccaaccatctcttgtgaaaccaaaaacagcttattttaaatctaattgacattgtgggaaggctatcaaagtgtaaattcttgacagaaactgtaggggcacaacaaatgcaaaacaaaatgaggtcaaatcaaaaaggaacaaattccaattagtcccttcaaagcaatcttgattttgagttttgaattttggaggttcttcttgccagctcccrtggaactgaaagaagttgactcatctcacttctgacagttcccagtcatttctggtgtctcagatgcttggaaggctttcctgcagcctgctcctctctaccaggtgggtcattccattctgaccacccaaatatgctttatattttgaactttacagcaactgaaggcagggagcacagtgcggtgctctttccatgttgtattcagagagcagtgttttggaaaagccaattgtttcgtgttgctgggttgttggcatagatctcatgtggagaacatgggctcggcatcctttcctg

SEQ ID NO: 11028 - DNA, 600 bp, Chicken  19866894213386_1
ggcttagtgggacagatgcttattacaaacaagtcctattacaagtacacactttagtactttcgaaagttaacacaggaataggtgatgcagatcgccggggtcatccaaatcctttttcaaagggaaatcttaactgaagagaaaaaaaacgtgtcctggcctttcgatatgaatggccaaattgctgggacttcttgtggagttcattacaggtgtactctgaatttctgctatgactctttcatggcaatatcagttacaacctagtcacttgggctttcatgtttactaacaaakacagagaactgtattggcatgcatatttttatttatacatgcaacaagtggtattctgttgcctttctttgaaaaagcagcatattcatkctgcatgcaacccaattgtttcattaccatactagtgactgagtgctgtggcttgcggaccactctaagaggagatgtactgctacaacagaagacacattaataggaacatcattttactcaagcctatcaacaatttccagatcactttggtttataaattatgcactccggaaactttgggatttattttactgcaagaattattta

SEQ ID NO: 11029 - DNA, 600 bp, Chicken  19866894213386_2
cagatcgccggggtcatccaaatcctttttcaaagggaaatcttaactgaagagaaaaaaaacgtgtcctggcctttcgatatgaatggccaaattgctgggacttcttgtggagttcattacaggtgtactctgaatttctgctatgactctttcatggcaatatcagttacaacctagtcacttgggctttcatgtttactaacaaakacagagaactgtattggcatgcatatttttatttatacatgcaacaagtggtattctgttgcctttctttgaaaaagcagcatattcatkctgcatgcaacccaattgtttcattaccatactagtgactgagtgctgtggcttgcggaccactctaagaggagatgtactgctacaacagaagacacattaataggaacatcattttactcaagcctatcaacaatttccagatcactttggtttataaattatgcactccggaaactttgggatttattttactgcaagaattatttacttctatagaaatatcaggcctgcccagactgatcattttagtgtaaaacacatgtaagactacatgtagaatttcttccttatctatag

SEQ ID NO: 11030 - DNA, 600 bp, Chicken  19866894213392_1
aatcagctttgtctaagagggaaacaattaaattacaacgttgagcaagtgctctcttgggaggctggagagatgttagaagctgcttttctgctttatggctgagcactctaacagcagacatttagaagtgtcttctagacaactctgatcctttttgtagtttattcactgattcccggggatggggtgagtgtcccacaggataaaagaatgaaagttttgttcttcaaatcccacttgcctcatgtatgagctaacagataaggcaaactacaggcagtagtttcagtgcacacygtagtgtacaattcagacactttcacatgacatcaggaaactcagcagtgaagctgcagcttagtgagaatattaattgtccatatcttggccaaggccaggctggatgtggctctgggcagcctggtctagtggttggcaaccctgcacatagcagggggtttgaaacttggtgatccctgtggtccttttcaacccaggccattctatgattctatgatatgccctgaatagctgagacaatgcatcctttcttgtttctctccctgtgttacacagagacaagactgatggtaaact

SEQ ID NO: 11031 - DNA, 600 bp, Chicken  19866894213392_2
tcagcagtgaagctgcagcttagtgagaatattaattgtccatatcttggccaaggccaggctggatgtggctctgggcagcctggtctagtggttggcaaccctgcacatagcagggggtttgaaacttggtgatccctgtggtccttttcaacccaggccattctatgattctatgatatgccctgaatagctgagacaatgcatcctttcttgtttctctccctgtgttacacagagacaagactgatggtaaactgccagcgctgctgagcagagatgcagctttagtcttcattygtgtgcttgcttttctacaggcccacgcactgctaacatcacagaagatgaaagtgtttttaatcgaagcagaaaacgtggagaaaaatatcacactgtagccaagaaagaaaaactttcagtggcactcagttcagaaggcgtttgttctggcctcttttgtagtttgtttcgtttagactctttttgttgttgttactgttgttcaattttctgctagaaagagattaaattaatggaaattgattggtgtatctgaagttatgtacagggagatgtggctacagtggacacatatat

SEQ ID NO: 11032 - DNA, 600 bp, Chicken  19866894213397_1
actgcagcagatgatcttacagagaactccatcctgttactttactgcagccaaacaattctttttcctacaaagcctggtgcttggagcggggcggcagcacacagtggaggtcagcatggctccagggccaccccacaagctaaagtgttccctgagaaccttccagctccatctatcggccatttaaaatcaggagcataaggtgaatttcactgtatatcacagaaataatttcaggttcttctataaacattaaacttttacagcataatatgctttactggcaacaaccaaacrcattatggtatcagaataaaagtaccatatgtaaattccctgatcttagaggacaactaatggaatacatttcagcacataatgatgcaagatttatatttcactctggagatactgccaaatcctatttcagagccatatctccaaggagagaaaaggttttgtttgtttccatcttatttacttctttattttaatcaaaccctttttaatcagtcagaacaaaatgttttcacgtaggaagaaagaagaaactcggtacaaaatcaagagagtcctgatggaactggggaacwtgga

SEQ ID NO: 11033 - DNA, 551 bp, Chicken  19866894213397_2
aacrcattatggtatcagaataaaagtaccatatgtaaattccctgatcttagaggacaactaatggaatacatttcagcacataatgatgcaagatttatatttcactctggagatactgccaaatcctatttcagagccatatctccaaggagagaaaaggttttgtttgtttccatcttatttacttctttattttaatcaaaccctttttaatcagtcagaacaaaatgttttcacgtaggaagaaagaagaaactcggtacaaaatcaagagagtcctgatggaactggggaacwtggagcaggaaatgaagatgcagtgaaagtgcaggaagcaaagacgtgcactcrgagtgcctctatcgcacagctgcatgcagggacagcatgctcccagaggaaatcattagaaagttgactttaaagaagctgcacctggggaccatattcagcctttggtgctgatccaaaccttgatgactgctttgctggtagttttggtgggcttctgactgtggcctcagacccatgtagtatttcctcctttt

SEQ ID NO: 11034 - DNA, 497 bp, Chicken  19866894213397_3
ggacaactaatggaatacatttcagcacataatgatgcaagatttatatttcactctggagatactgccaaatcctatttcagagccatatctccaaggagagaaaaggttttgtttgtttccatcttatttacttctttattttaatcaaaccctttttaatcagtcagaacaaaatgttttcacgtaggaagaaagaagaaactcggtacaaaatcaagagagtcctgatggaactggggaacwtggagcaggaaatgaagatgcagtgaaagtgcaggaagcaaagacgtgcactcrgagtgcctctatcgcacagctgcatgcagggacagcatgctcccagaggaaatcattagaaagttgactttaaagaagctgcacctggggaccatattcagcctttggtgctgatccaaaccttgatgactgctttgctggtagttttggtgggcttctgactgtggcctcagacccatgtagtatttcctcctttt

SEQ ID NO: 11035 - DNA, 599 bp, Chicken  19866894213405_1
  misc_feature (1)..(67): n is any nucleotide
nnnnnnnnnnnnnnnnnnnnnnnnnnnnnnnnnnnnnnnnnnnnnnnnnnnnnnnnnnnnnnnnnnntctttaaaccgtaaaaatggaaatatgttttttagttcactgtcttccaatgaattaatatgacttaccaactatgtaagcactcagaataacaacgagcatgtaaaattacttcagattctgatccacgctcagtcttgcacagtaaaagaagggacaactgcctgctatcttcccagcaaacaatctttaaacccacacccatgcctgctgtagaggtttcctgcagtaaygtttggtttgtatttatgtgaattgattgaaaatctctgaatgatgcattgccttgtctccaagcagctgaatggagatgagcattcagacagcaattaatatcatctcagggcatcaagcagaagagatgttatctaaagctgacattggtatggaaattaaatgttacatctggcaagaagtttcaaaacagactataaaggctatgaagctgtaacatacatttgtttaaatatctggttgctttttttttcccttggttttactgcagtcttttcagagtgtagggatggttcat

SEQ ID NO: 11036 - DNA, 600 bp, Chicken  19866894213409_1
taaataggaaaattctaacttttctcaagactctctttgcagcaatattagcctataccatttagttaaaaaacatttacacaccattacaaaatgttaacacaagtgtacccagcataagcctatactctgcaaaatgaatccctcaagacctcaatactaaggactacctgcggactacctgctcactgagatacttgcactgatactcctgttttactgaagttcagtgcagaattttatttaatactgaaaataaatgtacttaatgtatttggtatttaacataagcatttttarcatatatatgctttctagtaaagaatgatatatactaaatataaacaatgacatccagaaaggaggttcaaaatcccctttaggcgctagcatttatgaattgtarcttatctgccagttaasaacagtagcaaatcacagcattgatcctgtaagtggattccttacagctttggcctttttctgcagatccacaatctgagagagaagatgggtgatttcttcctgctgccgggcagcatcttcagttttctttgctaactcctcggagatattggcaatctgtatgtttgcatcccc

SEQ ID NO: 11037 - DNA, 600 bp, Chicken  19866894213409_2
tgtacccagcataagcctatactctgcaaaatgaatccctcaagacctcaatactaaggactacctgcggactacctgctcactgagatacttgcactgatactcctgttttactgaagttcagtgcagaattttatttaatactgaaaataaatgtacttaatgtatttggtatttaacataagcatttttarcatatatatgctttctagtaaagaatgatatatactaaatataaacaatgacatccagaaaggaggttcaaaatcccctttaggcgctagcatttatgaattgtarcttatctgccagttaasaacagtagcaaatcacagcattgatcctgtaagtggattccttacagctttggcctttttctgcagatccacaatctgagagagaagatgggtgatttcttcctgctgccgggcagcatcttcagttttctttgctaactcctcggagatattggcaatctgtatgtttgcatcccctttaagataagcgattacaatcaccattacaatatgcaaaggcagagaagtaagaagaaagatgttctttcagaacgtcacttgactcagcagaatccttccccag

SEQ ID NO: 11038 - DNA, 600 bp, Chicken  19866894213409_3
tatactctgcaaaatgaatccctcaagacctcaatactaaggactacctgcggactacctgctcactgagatacttgcactgatactcctgttttactgaagttcagtgcagaattttatttaatactgaaaataaatgtacttaatgtatttggtatttaacataagcatttttarcatatatatgctttctagtaaagaatgatatatactaaatataaacaatgacatccagaaaggaggttcaaaatcccctttaggcgctagcatttatgaattgtarcttatctgccagttaasaacagtagcaaatcacagcattgatcctgtaagtggattccttacagctttggcctttttctgcagatccacaatctgagagagaagatgggtgatttcttcctgctgccgggcagcatcttcagttttctttgctaactcctcggagatattggcaatctgtatgtttgcatcccctttaagataagcgattacaatcaccattacaatatgcaaaggcagagaagtaagaagaaagatgttctttcagaacgtcacttgactcagcagaatccttccccagaatgcagtaatgttttt

SEQ ID NO: 11039 - DNA, 600 bp, Chicken  19866894213409_4
ctttggcctttttctgcagatccacaatctgagagagaagatgggtgatttcttcctgctgccgggcagcatcttcagttttctttgctaactcctcggagatattggcaatctgtatgtttgcatcccctttaagataagcgattacaatcaccattacaatatgcaaaggcagagaagtaagaagaaagatgttctttcagaacgtcacttgactcagcagaatccttccccagaatgcagtaatgtttttggaaaaaatggtaggacacaaaaccagaaagacacaaagtgctcatrttgcataggagattgtcctttccctaacactaacattttctatgcaaaactgttttgcacctgagaaagatttatcttacagcagaaaattctggctgtaataaatcagctgaaattttcttcccacaaccacttatataacgacaataagtgctgcaggaataaatgactgactgatctgatgcagttgttttgtttttttttttcctttttttaaaccaaacaacctcaaataagatcttaaaataataaaaagacatacttagctcttttacacagtcattgacaagctgttgttct

SEQ ID NO: 11040 - DNA, 600 bp, Chicken  19866894213410_1
attggtctcagtgttccaatcagcctatttcagatgtatttgcatttcttgggcatatataccagttaccacaatggcagataggtaaaggtaagtgttactgttacagaaatagtggctaaccttggaacaatggctggaattaaaataatgaattaaatttcagtgaaaagctaaaacacgacagaacaagctatcaataactgaggagctgctgttttggtcatcatgggaactacagctgtgtcttagctgcagacttgcacgtgaaagatttttggccgaaggatgcatgtgtcyatatgtgcaggtgctgctatatctacccaaaggaaacagaatctgcaactatgattgacaaataaattaacatcaccaacatctgaggggcaaataatgtgccctatccttttcccagtactttcccctgtagtagttgctgatgataaagcagaagcagaagctcatgagagcataaaaggtaccaaatgctggagcaacagtatgcagcttagatacaaataaagctgttctaaagatgctgttctaaaattgttaaactgataacttcccacatgtcatgcttgctcacataaacac

SEQ ID NO: 11041 - DNA, 600 bp, Chicken  19866894213431_1
tggaattatgatttttatcttaaactaatggattaaaaaaacccctatcatttatatttaccggtaattgtaatacagagatgctgtgaactataaactgtcatgtcatgcataaaacggctgttaatgttcaactcaaattctagctgtgctcataagctctataaatcacatctataaatagacttgagttagtgccatggggaaagcctctgaatattcataagcctctcgttttgtattttgtcaccagagtaagccttgaaaccataagcggtttgcattcagtgaatcggtggygaggtaatggcattatgataacaaaaataaatcaatgtgataaacaactgctatctccagatcatctatattgtccttgtgtgtaaagtgaaagccatttattcacatgtcataagtagcctctttgattaataacattagttgcccttgatgagatgctgttttcttaaggatatctggaggctaaatatattatgatattcagaaaaaaagaaaatattttctcattttttacatattctgtaattactattcattactttgatggcatcatagagataaatgatgctttataaaata

SEQ ID NO: 11042 - DNA, 600 bp, Chicken  19866894213435_1
tggccatctggtaacctacaagatttgtggtaacctacagatttctacaagctttgaaacagtagacttctagaaactaaatttgaattttatatgaaaggctgttggccctcctagaggaaatctacagaacaaaatttgggcattgcaacacagcatacatttgttctgcattttgccagtgagtgtaagcctcaacttttcaaagtgaaaagtgagttgaggaaaaccagaaatctcaggtaaaaccaaaccaaatcaaaccaaaaccaaggcaagacaatctcatatttcaaattmaaaaaactgagcttccattcttttgcctcccaaagaagtggggcaatacctgaaatttttggggtacttcttactttgagatgttttttttttttttttaaagtatatcaagtctgtggtcacatatcttctgtaatcacatgcttctcagcagcaaattcrggaatccatgtgcrcttttcaaacaattatgccatctcaactcttktaaacaactcaccttttcatgtttatgtttctccttttctttctccttcttctctctttccttcctctccttttccttatccttcttctcct

SEQ ID NO: 11043 - DNA, 600 bp, Chicken  19866894213435_2
tttgttctgcattttgccagtgagtgtaagcctcaacttttcaaagtgaaaagtgagttgaggaaaaccagaaatctcaggtaaaaccaaaccaaatcaaaccaaaaccaaggcaagacaatctcatatttcaaattmaaaaaactgagcttccattcttttgcctcccaaagaagtggggcaatacctgaaatttttggggtacttcttactttgagatgttttttttttttttttaaagtatatcaagtctgtggtcacatatcttctgtaatcacatgcttctcagcagcaaattcrggaatccatgtgcrcttttcaaacaattatgccatctcaactcttktaaacaactcaccttttcatgtttatgtttctccttttctttctccttcttctctctttccttcctctccttttccttatccttcttctccttttctttgtctttctccctttctttctttttctttttctcttttttgtctttcttcttctcttttggtttttctttgtcctcaaacaacttttcaggaagcataggagacaaggaaggtaacatgctgggaagcctcatggcagttggtgtgctgaacaagg

SEQ ID NO: 11044 - DNA, 600 bp, Chicken  19866894213435_3
tgccagtgagtgtaagcctcaacttttcaaagtgaaaagtgagttgaggaaaaccagaaatctcaggtaaaaccaaaccaaatcaaaccaaaaccaaggcaagacaatctcatatttcaaattmaaaaaactgagcttccattcttttgcctcccaaagaagtggggcaatacctgaaatttttggggtacttcttactttgagatgttttttttttttttttaaagtatatcaagtctgtggtcacatatcttctgtaatcacatgcttctcagcagcaaattcrggaatccatgtgcrcttttcaaacaattatgccatctcaactcttktaaacaactcaccttttcatgtttatgtttctccttttctttctccttcttctctctttccttcctctccttttccttatccttcttctccttttctttgtctttctccctttctttctttttctttttctcttttttgtctttcttcttctcttttggtttttctttgtcctcaaacaacttttcaggaagcataggagacaaggaaggtaacatgctgggaagcctcatggcagttggtgtgctgaacaagggcaaagacatttct

SEQ ID NO: 11045 - DNA, 600 bp, Chicken  19866894213435_4
tgaaaagtgagttgaggaaaaccagaaatctcaggtaaaaccaaaccaaatcaaaccaaaaccaaggcaagacaatctcatatttcaaattmaaaaaactgagcttccattcttttgcctcccaaagaagtggggcaatacctgaaatttttggggtacttcttactttgagatgttttttttttttttttaaagtatatcaagtctgtggtcacatatcttctgtaatcacatgcttctcagcagcaaattcrggaatccatgtgcrcttttcaaacaattatgccatctcaactcttktaaacaactcaccttttcatgtttatgtttctccttttctttctccttcttctctctttccttcctctccttttccttatccttcttctccttttctttgtctttctccctttctttctttttctttttctcttttttgtctttcttcttctcttttggtttttctttgtcctcaaacaacttttcaggaagcataggagacaaggaaggtaacatgctgggaagcctcatggcagttggtgtgctgaacaagggcaaagacatttctttgggaggtaacacaagaggtgctgatggagg

SEQ ID NO: 11046 - DNA, 444 bp, Chicken  19866894213436_1
tccctctgttaaccctatcggtgggtcagcccagtcagaccgatgcattgcaacgcgctccttaaagcacaaaacacggcttccctttctgaaggtccacaaagacggccttgtttcgggactgagctgcgagtttccagcaggcttggcctgaaaggctgctgctcacagctcctgatggctctttgtccacgtccacagcgaaggccacatcgctggcctgccatgaagttccgcaatcacaccaaccacgccacgtactccgaggtggaggcagccagccacgagaaggagggcttygtggaagcagagcagtgctgagcgcttctccccctgcacctccgacctccccagctgttggagtcttctgttatcccatcgcaaagtctttcccctgttggaaaaggaggagcaagtagaggaaaaagacccgatggagcgttg

SEQ ID NO: 11047 - DNA, 599 bp, Chicken  19866894213443_1
  misc_feature (1)..(59): n is any nucleotide
nnnnnnnnnnnnnnnnnnnnnnnnnnnnnnnnnnnnnnnnnnnnnnnnnnnnnnnnnnnaaacctaaccttttcctgtgaagctcatcagacactggcacaggttgcccagagaggttgtggagtttccatgcttagagataatcaaaatctaatgaagttgaaagtacattcaggataattgaggtctatgacagagttaaccatgcaactcactaagggtaggttagattaaaaatagtatgtacagatagcattttttgtcaacggagaaggaaacagttaagtgtatgggaactgytgagtcatggcttgaacctctgattgatcacctgaggcgagcactgagtcagccgtgggagcacaggtgaaggcaattcacctgtgtgaccggaaggggtggaacctggccccacctctcctggactccatttaagggctgactgccactgaggaagggtttcttttgggaggtccctcctttgtggaatctttaatcatgagcctgaatcttcaaatgcaggtgattattccttctctgyttgtatctttctatttctccacgatattctttccaactgtaacagtaagaaatgataa

SEQ ID NO: 11048 - DNA, 600 bp, Chicken  19866894213443_2
atgtacagatagcattttttgtcaacggagaaggaaacagttaagtgtatgggaactgytgagtcatggcttgaacctctgattgatcacctgaggcgagcactgagtcagccgtgggagcacaggtgaaggcaattcacctgtgtgaccggaaggggtggaacctggccccacctctcctggactccatttaagggctgactgccactgaggaagggtttcttttgggaggtccctcctttgtggaatctttaatcatgagcctgaatcttcaaatgcaggtgattattccttctctgyttgtatctttctatttctccacgatattctttccaactgtaacagtaagaaatgataaagcaggtttagaaccaattgcaaaacccggtgtctttgaatacaccagaaattgagatcacagcctaaaatgctggtcaataaattagrtcaaagcatataatagagccaatgtaaacagcctgaaactaacamaaamggaagtgatctgcatggtgggatgaggttgggtgtcctacttcctgcaacacagccacaaagctgtatgtgtcctaccagccacatgctattaggcagattctg

SEQ ID NO: 11049 - DNA, 600 bp, Chicken  19866894213443_3
accggaaggggtggaacctggccccacctctcctggactccatttaagggctgactgccactgaggaagggtttcttttgggaggtccctcctttgtggaatctttaatcatgagcctgaatcttcaaatgcaggtgattattccttctctgyttgtatctttctatttctccacgatattctttccaactgtaacagtaagaaatgataaagcaggtttagaaccaattgcaaaacccggtgtctttgaatacaccagaaattgagatcacagcctaaaatgctggtcaataaattagrtcaaagcatataatagagccaatgtaaacagcctgaaactaacamaaamggaagtgatctgcatggtgggatgaggttgggtgtcctacttcctgcaacacagccacaaagctgtatgtgtcctaccagccacatgctattaggcagattctgaaggattagcctgtgtgctccccagcaggatccagcactttctgtgtagagaaaccccttagaaactgtgactgtggctataggaaccacacaggagctgctatcagctgcaggggatgagatgggagggtctgtgcggtaacttgc

SEQ ID NO: 11050 - DNA, 569 bp, Chicken  19866894213443_4
aagggctgactgccactgaggaagggtttcttttgggaggtccctcctttgtggaatctttaatcatgagcctgaatcttcaaatgcaggtgattattccttctctgyttgtatctttctatttctccacgatattctttccaactgtaacagtaagaaatgataaagcaggtttagaaccaattgcaaaacccggtgtctttgaatacaccagaaattgagatcacagcctaaaatgctggtcaataaattagrtcaaagcatataatagagccaatgtaaacagcctgaaactaacamaaamggaagtgatctgcatggtgggatgaggttgggtgtcctacttcctgcaacacagccacaaagctgtatgtgtcctaccagccacatgctattaggcagattctgaaggattagcctgtgtgctccccagcaggatccagcactttctgtgtagagaaaccccttagaaactgtgactgtggctataggaaccacacaggagctgctatcagctgcaggggatgagatgggagggtctgtgcggtaacttgcgtcatgtgaaatca

SEQ ID NO: 11051 - DNA, 565 bp, Chicken  19866894213443_5
gctgactgccactgaggaagggtttcttttgggaggtccctcctttgtggaatctttaatcatgagcctgaatcttcaaatgcaggtgattattccttctctgyttgtatctttctatttctccacgatattctttccaactgtaacagtaagaaatgataaagcaggtttagaaccaattgcaaaacccggtgtctttgaatacaccagaaattgagatcacagcctaaaatgctggtcaataaattagrtcaaagcatataatagagccaatgtaaacagcctgaaactaacamaaamggaagtgatctgcatggtgggatgaggttgggtgtcctacttcctgcaacacagccacaaagctgtatgtgtcctaccagccacatgctattaggcagattctgaaggattagcctgtgtgctccccagcaggatccagcactttctgtgtagagaaaccccttagaaactgtgactgtggctataggaaccacacaggagctgctatcagctgcaggggatgagatgggagggtctgtgcggtaacttgcgtcatgtgaaatca

SEQ ID NO: 11052 - DNA, 600 bp, Chicken  19866894213444_1
tccccgcgggtgatgaggccggcgtagccctcctggtgggagaaggcatagctggaatggcggtggaaggaaccgcggggggatgtgggttcgcagctccaccgagggctctggctcctgcctggccttccagcagatcttctgcaaggagatgagggcctggtgacctccctggggaatcgcatccatcccatcaccagcaacgcccttactggtcccagatgccggtccttgaagcagatcctcacctgctggatgctggtgttgcctgtgatggcgttgtacgagcggatggtgagygaggggatggtgttcaccaccagggacagcaggacgaccagcaggatgtaggggtcggtcagagcattctgggtggcatctgcgggccgtgtttaagcagtgaaggtgtagaggagagagaacaatggtgaggggacagccccacactcacaaaggtgctaagggatctaaaccagggtcaaaagccaaggctgcaagatcaagaaatggtcaatctgtcacccaggaccatgtagcaagaggatcagaccaatggggtgtgatacagccaagygaagacacgacctactgggagaacag

SEQ ID NO: 11053 - DNA, 600 bp, Chicken  19866894213444_2
tggcgttgtacgagcggatggtgagygaggggatggtgttcaccaccagggacagcaggacgaccagcaggatgtaggggtcggtcagagcattctgggtggcatctgcgggccgtgtttaagcagtgaaggtgtagaggagagagaacaatggtgaggggacagccccacactcacaaaggtgctaagggatctaaaccagggtcaaaagccaaggctgcaagatcaagaaatggtcaatctgtcacccaggaccatgtagcaagaggatcagaccaatggggtgtgatacagccaagygaagacacgacctactgggagaacagctcctggctctgggaggaatggactacagggatttggggtacctcacctggaaagcgaaagacagtgggggcgatcctgaaggcatcgatgctctgggtcaggaaggagaagaggcagaagagcagcaagctggctgtgaccatcaggaaggacaacgccgtccagaacttggtgtccaggatgatctgcaaggacatacagctccttgtgaaggctggaggatgtacttctatttggccacttgtccctgccccatgggagatcatctgcagc

SEQ ID NO: 11054 - DNA, 600 bp, Chicken  19866894213445_1
ggaccagctcacttccaggttcctcctgctgcaccatctaagtcatgggttgacttgagaaattctgtccttgcaaacgtctcacacgctcacaatatcatagaaccagtaagtaatacaaaggagtctgagaccctattttttccctctgcataattctgtgctgttgcgacgtggctgctccaaggcagcttgctgcttgcagccctgggccccacagcagttgtgcatgtaactcaccccggctgctgagcattcttcgaggcactgagcacccagcgcacacggagtttgggctgwaatgaatctgtgaggtgctttggtccattttgttgtgcatctcactgaacagaagctatttgatgagtactgatgctgctacactattaacactgaagtattatagtgttaattatattcatcatcgtgatatacaggtatacatgtcaaaaagtcaaactcctttcaagcagaaagaacagatgcttgctacatatttattcattttgatggtattattattccttcgtgaggatcaaaaatggaggcagtaagggagattaaaatttcayatcaggtgaaatgaaatgaaacactcaa

SEQ ID NO: 11055 - DNA, 482 bp, Chicken  19866894213445_2
cacccagcgcacacggagtttgggctgwaatgaatctgtgaggtgctttggtccattttgttgtgcatctcactgaacagaagctatttgatgagtactgatgctgctacactattaacactgaagtattatagtgttaattatattcatcatcgtgatatacaggtatacatgtcaaaaagtcaaactcctttcaagcagaaagaacagatgcttgctacatatttattcattttgatggtattattattccttcgtgaggatcaaaaatggaggcagtaagggagattaaaatttcayatcaggtgaaatgaaatgaaacactcaactcatttgtttttaggaactgcctttcttgatataacaatctttccatctaatccatttgtccatgttcctctgcaatcagtgactgaggtgaatgtctccatgtgcttatctgggctgggtagcaccaacctatctccaaacagctgtttaag

SEQ ID NO: 11056 - DNA, 600 bp, Chicken  19866894213450_1
cctcggcgacaagctcctgtcctcagcaggatgcaagcaaagagctgccagtgggaaactgaagtccctttgcacgccgacaccacgtgcaccatacctttgggagggagagatgtgcagcccactgagctgcagcggcaaggcggcatcggcgctgctgctggcatgcggccggctgggctgggggtgctgcaggctcagtgccggcctgctgtccactgggctcccacctgcagcgtggggcatgggcctcttgcccactgcagggccgttatcctgcaatggaagaagaagcagaaraagcgtgaggtttgttgctctcggtgcggatgcaacacaaggctgctctgcgatgtgaaaccgcggtagtcgtattttacacgcactgtggaaattagaggtttgcaccaggagaacagcctgcaattggatcttgctgaatctatgcagcctttcccggtctctaatcacaaacctgcctgtttctgcagggccggccgtggccgagtattctccatttactctcctgtaaaagcttatttgttacttcagcagaagggtgtgaggctgctccagtccccacggctgttcctgcagtgc

SEQ ID NO: 11057 - DNA, 424 bp, Chicken  19866894213452_1
cgacagctgatgtgatgcagcccgcaggctggagggaactgctgcatccagtcattaaataaagcaaaaacctcacccgccgtgttgctgtaatcccactgcattgcctatcataggagaaaggaggaaaaaattaattgctattgatttaaataaacgtgctcgcattatcgggtgttggcaacaaacagccagctgcagggaaggcacttctccacagctgtgtaagcactgaggccatgctggagcctcagcagaaatgctgccacaaatgggggtatttcagtcttttagcccaaygagaacagcgctcagtggtgtcagcagaagctctggtgcgtgcactgcttgctgctgggacactgctggcaccagaggggtcccacggcacctcttaaccaaaaaaatggatcccccattctcc

SEQ ID NO: 11058 - DNA, 600 bp, Chicken  19866894213455_1
aatgacagaaatattgacatcagccagagagagatcagatttcctgacacaggggacctgtcctgtaaactctgctgtgttgacagagcaggtcctgtgttggtgggtcctcctgggatcctggaggggcttagcactgctcctgctccatcctagtccattaacttcaatgccagcagcttacaccctacaataaaaagcgatggattctggttcaggagaaccagcttactctagccaagatagctcaattcagccaggcacctccgcggtgcaaagtaccacgaacaccacagtgcrgcccaaagttaacaaattaaaaaaaataataataaaacggctgaaatttgattaaaaatatcattgctcaattcctacagccgagccctagcttcctaataaccagaggccatggcagcaggcaccgcagcctgctgcccaccttggcgcaggaatgcgggcgccgtgatgaagtacggctgctaaggatttctgcagccttttactttctattagaaacactcgctcgaaacccagctctctgatttttggtcacagctttatgtcagaaaaggctgaataggtacttaaaatattttt

SEQ ID NO: 11059 - DNA, 600 bp, Chicken  19866894213455_2
ttcctagctagagaccttaatgcatgctatttgttctgtgcactcaccttccttgtcagtaatgcagcaaattaacagtcatacacaagtgtcctgtagccaagtttgcaccaggaaggtgctcatgttggaaggtgcaaggggggaacaggggaggttagtcctggccttcttcacgacagctttagccctagtttccccctcttcttcaagatccctgtgaaatgtggggaaaagctggatatgctccttcaacatccttccatccctccatcaagagcagggtgcctgcagcacacwgtccccaacagaggaggggacaagagcagctgatgcacccagggcaaaaacagcaactacrcacagtgttgagcagacaccaagctggcacagctgcacactactggcctccaaggtagcaaagtcaagcaaatgggctcagaaaaccccatcttctgtgtctgaatctgtatataagagggtttttttctctaccaggtttctcacttaatctatgcaaaagatgtcaaaattaaagcttggtggcaccagaaacactccagttgaggatagaacccatgttattttagcacagatttt

SEQ ID NO: 11060 - DNA, 600 bp, Chicken  19866894213455_3
atgcagcaaattaacagtcatacacaagtgtcctgtagccaagtttgcaccaggaaggtgctcatgttggaaggtgcaaggggggaacaggggaggttagtcctggccttcttcacgacagctttagccctagtttccccctcttcttcaagatccctgtgaaatgtggggaaaagctggatatgctccttcaacatccttccatccctccatcaagagcagggtgcctgcagcacacwgtccccaacagaggaggggacaagagcagctgatgcacccagggcaaaaacagcaactacrcacagtgttgagcagacaccaagctggcacagctgcacactactggcctccaaggtagcaaagtcaagcaaatgggctcagaaaaccccatcttctgtgtctgaatctgtatataagagggtttttttctctaccaggtttctcacttaatctatgcaaaagatgtcaaaattaaagcttggtggcaccagaaacactccagttgaggatagaacccatgttattttagcacagatttttgtttctgtgtggtccatgagaagcttctcactgcctgtggagtgacactacccccagagc

SEQ ID NO: 11061 - DNA, 600 bp, Chicken  19866894213470_1
taagtagggtatgttttccacactgtccatttgtaagtgaagaaagtttgagcaaagagaaggatgcccagtcactactaactcacagctttgtttctgttagtatcaagatgcccaacgacacccagatctgctttagattaataagaaccactgctaagaagcaatgttctggaattatttcctcctccctagcttgaatccccatctggcacagctgaaatgagatgggaccctcatattttgcacactactcttgcagatctctagcaagtttctaatggccatggcctcaggctrtcttctaggcctgtgaaggctcagccctcacgcatccttcagagtaaatctgcaacaaacaaacacagcgtaactaataccaagtgcaaaaaataaacagatgatacatgattaacagcacttgaggagaagggcaaagtcaaactgcttccatcttcttcatgattttagccctgtatttctttgggctggccggcaggttccagcacagcaggattccgattgcttgtttagttggagcagacaggactgagaaaattagaaaggaatgttctcccacgaaacacagcttgtcaaagg

SEQ ID NO: 11062 - DNA, 394 bp, Chicken  19866894213470_2
aagggcaaagtcaaactgcttccatcttcttcatgattttagccctgtatttctttgggctggccggcaggttccagcacagcaggattccgattgcttgtttagttggagcagacaggactgagaaaattagaaaggaatgttctcccacgaaacacagcttgtcaaaggcctcatatcttgttttgttcagcttttgcttccttcaacagcagagaagcatgtttaacagacatcaggattacaagcctgacagacgttcttgtagagctacccatcaacaaataccaacggtaactyccagcaagaagtctccgaggaggagaaaacctgatgtcgtttctaaagaggatctcaaacattttcccttccctttcaacacaaaagatacagg

SEQ ID NO: 11063 - DNA, 599 bp, Chicken  19866894213473_1
  misc_feature (1)..(136): n is any nucleotide
nnnnnnnnnnnnnnnnnnnnnnnnnnnnnnnnnnnnnnnnnnnnnnnnnnnnnnnnnnnnnnnnnnnnnnnnnnnnnnnnnnnnnnnnnnnnnnnnnnnnnnnnnnnnnnnnnnnnnnnnnnnnnnnnnnnnnnnncctatgaatgatcccctgagctgtgggtctcttcatgtaagctgtggtacttacatgcagaaatgcctgtaggatcaaggcccacatgatcagtggtggtctcaggcaaagtgaccataattctggtttctcagatatagacaagcttttttgttcttcatttytaaaatgcatcttatttcatttcctcctcactgacscygaaagctgtttcattttcatattatgtcagatctgcgcgtcttcttggagaaaagtaagagttctcaaacagggagggctcaagtttctgtttgctgattaaaactggaaaatgtcaaccttgattttagtcatttaaaaattaagttcttatgtatttctgttgttgttaaaatattctaagtatgcctccaaaatctcctaaaagtgaaattaacagctggtgctgggacttccatgccaacttttatcctcacagcaa

SEQ ID NO: 11064 - DNA, 599 bp, Chicken  19866894213473_2
  misc_feature (1)..(100): n is any nucleotide
nnnnnnnnnnnnnnnnnnnnnnnnnnnnnnnnnnnnnnnnnnnnnnnnnnnnnnnnnnnnnnnnnnnnnnnnnnnnnnnnnnnnnnnnnnnnnnnnnnnncctatgaatgatcccctgagctgtgggtctcttcatgtaagctgtggtacttacatgcagaaatgcctgtaggatcaaggcccacatgatcagtggtggtctcaggcaaagtgaccataattctggtttctcagatatagacaagcttttttgttcttcatttytaaaatgcatcttatttcatttcctcctcactgacscygaaagctgtttcattttcatattatgtcagatctgcgcgtcttcttggagaaaagtaagagttctcaaacagggagggctcaagtttctgtttgctgattaaaactggaaaatgtcaaccttgattttagtcatttaaaaattaagttcttatgtatttctgttgttgttaaaatattctaagtatgcctccaaaatctcctaaaagtgaaattaacagctggtgctgggacttccatgccaacttttatcctcacagcaatgcatattttagcccgaatttcacctcaaaatgaaa

SEQ ID NO: 11065 - DNA, 599 bp, Chicken  19866894213473_3
  misc_feature (1)..(98): n is any nucleotide
nnnnnnnnnnnnnnnnnnnnnnnnnnnnnnnnnnnnnnnnnnnnnnnnnnnnnnnnnnnnnnnnnnnnnnnnnnnnnnnnnnnnnnnnnnnnnnnnnncctatgaatgatcccctgagctgtgggtctcttcatgtaagctgtggtacttacatgcagaaatgcctgtaggatcaaggcccacatgatcagtggtggtctcaggcaaagtgaccataattctggtttctcagatatagacaagcttttttgttcttcatttytaaaatgcatcttatttcatttcctcctcactgacscygaaagctgtttcattttcatattatgtcagatctgcgcgtcttcttggagaaaagtaagagttctcaaacagggagggctcaagtttctgtttgctgattaaaactggaaaatgtcaaccttgattttagtcatttaaaaattaagttcttatgtatttctgttgttgttaaaatattctaagtatgcctccaaaatctcctaaaagtgaaattaacagctggtgctgggacttccatgccaacttttatcctcacagcaatgcatattttagcccgaatttcacctcaaaatgaaaag

SEQ ID NO: 11066 - DNA, 599 bp, Chicken  19866894213474_1
  misc_feature (1)..(110): n is any nucleotide
nnnnnnnnnnnnnnnnnnnnnnnnnnnnnnnnnnnnnnnnnnnnnnnnnnnnnnnnnnnnnnnnnnnnnnnnnnnnnnnnnnnnnnnnnnnnnnnnnnnnnnnnnnnnnnaaggtgaaactacaggagaaactgatctcactgacagtcacttgtgacagcagggatgtggactttggttttcattctgcttgtatttcttttaccctttactggaattaccccaaaggaaaatgacccattgctagttattcacgaagttacacaaagctgtaaatctgtctatcagcgcaatgagggyaaaaaaaaaaaagaagaacaggagacatgctacaaattccaggatttgatcctcttgacttttacagatgttcttacaatcttaagagggttactctggtagcacaagatagcaggtcacctttggaggctacacacacattcagcttcagagaaaaataaatcaggacagtcaaactacccaactcccttgattttgctcctgccagacagagcataatcatgtgaaggcacacctattgcaacttcctgatagtatcatgatgcaattggggttattgacggttggcaccacaratc

SEQ ID NO: 11067 - DNA, 599 bp, Chicken  19866894213474_2
  misc_feature (1)..(109): n is any nucleotide
nnnnnnnnnnnnnnnnnnnnnnnnnnnnnnnnnnnnnnnnnnnnnnnnnnnnnnnnnnnnnnnnnnnnnnnnnnnnnnnnnnnnnnnnnnnnnnnnnnnnnnnnnnnnnaaggtgaaactacaggagaaactgatctcactgacagtcacttgtgacagcagggatgtggactttggttttcattctgcttgtatttcttttaccctttactggaattaccccaaaggaaaatgacccattgctagttattcacgaagttacacaaagctgtaaatctgtctatcagcgcaatgagggayaaaaaaaaaaagaagaacaggagacatgctacaaattccaggatttgatcctcttgacttttacagatgttcttacaatcttaagagggttactctggtagcacaagatagcaggtcacctttggaggctacacacacattcagcttcagagaaaaataaatcaggacagtcaaactacccaactcccttgattttgctcctgccagacagagcataatcatgtgaaggcacacctattgcaacttcctgatagtatcatgatgcaattggggttattgacggttggcaccacaratca

SEQ ID NO: 11068 - DNA, 599 bp, Chicken  19866894213474_3
  misc_feature (1)..(108): n is any nucleotide
nnnnnnnnnnnnnnnnnnnnnnnnnnnnnnnnnnnnnnnnnnnnnnnnnnnnnnnnnnnnnnnnnnnnnnnnnnnnnnnnnnnnnnnnnnnnnnnnnnnnnnnnnnnnaaggtgaaactacaggagaaactgatctcactgacagtcacttgtgacagcagggatgtggactttggttttcattctgcttgtatttcttttaccctttactggaattaccccaaaggaaaatgacccattgctagttattcacgaagttacacaaagctgtaaatctgtctatcagcgcaatgagggaayaaaaaaaaaagaagaacaggagacatgctacaaattccaggatttgatcctcttgacttttacagatgttcttacaatcttaagagggttactctggtagcacaagatagcaggtcacctttggaggctacacacacattcagcttcagagaaaaataaatcaggacagtcaaactacccaactcccttgattttgctcctgccagacagagcataatcatgtgaaggcacacctattgcaacttcctgatagtatcatgatgcaattggggttattgacggttggcaccacaratcag

SEQ ID NO: 11069 - DNA, 579 bp, Chicken  19866894213474_4
gggaaaaaaaaaaaaagaagaacaggagacatgctacaaattccaggatttgatcctcttgacttttacagatgttcttacaatcttaagagggttactctggtagcacaagatagcaggtcacctttggaggctacacacacattcagcttcagagaaaaataaatcaggacagtcaaactacccaactcccttgattttgctcctgccagacagagcataatcatgtgaaggcacacctattgcaacttcctgatagtatcatgatgcaattggggttattgacggttggcaccacaratcagcactrtgccccactatctcaatcccatgcagatgatcaggtttaggcgtgaccaatttgaaggcaaatagtgtgcaagaagatcatttccaactggcctcatgcagctatacctcagaaagtgactccacaaaagtggtatgagggtgaggtagggaggaaagaggagtgtaatggtttatttccctttaactttccatttcatatgcattcagtgccatatctgaacatgttcagacatttcttcccctccccggctacccttcttccaaaca

SEQ ID NO: 11070 - DNA, 569 bp, Chicken  19866894213474_5
aaaaaagaagaacaggagacatgctacaaattccaggatttgatcctcttgacttttacagatgttcttacaatcttaagagggttactctggtagcacaagatagcaggtcacctttggaggctacacacacattcagcttcagagaaaaataaatcaggacagtcaaactacccaactcccttgattttgctcctgccagacagagcataatcatgtgaaggcacacctattgcaacttcctgatagtatcatgatgcaattggggttattgacggttggcaccacaratcagcactrtgccccactatctcaatcccatgcagatgatcaggtttaggcgtgaccaatttgaaggcaaatagtgtgcaagaagatcatttccaactggcctcatgcagctatacctcagaaagtgactccacaaaagtggtatgagggtgaggtagggaggaaagaggagtgtaatggtttatttccctttaactttccatttcatatgcattcagtgccatatctgaacatgttcagacatttcttcccctccccggctacccttcttccaaaca

SEQ ID NO: 11071 - DNA, 600 bp, Chicken  19866894213482_1
cccctacagaattaaggttattgtgaacagcaagacctcacaatgtcgtgtgggaaattaaatttttaaagatgaacttttgctataaattatacacccttttaatattctcttatatatcagttgctttgctaagtaatcacacaaagcctgcttaaaattattagtgatgcgtatgtggaagaagggtgggaggacagaggagagaaggaatactgcagtcacagtggtttacaactaacaaaagaatagctttaaaaaaaagaaatgaaaagaaaacccaaacccatgtggagatayagacttccaactctttgctcaatttgctcaatatttccttctcgttttcgagctgaaaaatctccgcagcattcagaaacagagggaaacaaaaaatctttcagtgcattccattactttcacatgtgagggtacttaataagcaaagtaatttgaatagtgaaaagaaacttaaatctgaaacaatacaaagtagtctttggggtatcattcaaacagcaggtaaacgtgcttgcatagacagggtagtcttatcttagcaataaatacaatgttctaaggtgaaagagacctcagaat

SEQ ID NO: 11072 - DNA, 600 bp, Chicken  19866894213490_1
ctctcctaaagctgttagcagtgcaaggcttatttccatttcttatcatcgcatcactcagccaaacagagagatgtaacagtcaaagggccaatgcctctatagcaatcacagtgcagagattctcattaagattgctgattgcatttgaaccttcagtgccacttccaccttaatgggttcccgtggtaaaccccaactctgcactgcggtcacagtctttcgtctcagggcacctgtggcccaacctgtggctgttgcagaacgtggcaaagaaggcaccaaacatctctgcttcawctctgcccatgtttggaaggtgaccattctcattcagtcatgagctgatgtcctcgctgctgctacctttgttggtcatccatttccacatcccctctctgttgtccccctcagcatgatgccgtctcaacccacactgagttttgcccacacaaactttgcacagtggggacagagtttggtacccaaaacgcgtggtgagagctggctggatgtgttggagagcacaggtgacatcccatgtgggacatctaactggagccacatgtcctgtgttcggtatcccatcggagataaaaa

SEQ ID NO: 11073 - DNA, 600 bp, Chicken  19866894213491_1
agtcatactagtatcttgcagtcaaagatgatcttagtcttttgtgaccatgtacttagccatgcttcaggaaagctctgagagcaaatacaggcacgatttttagtggtctccagctagggagatactgtggtgcaacaccattttaacttaaatagtattctgtcatgtttactatctggtattacacttatcatgcacaacctctgcagaaagtaagcttatttgagcttctttaagaactgtttaaagtgatgtttttaatatataattgcagcagtcgatatgtagatcaagttsaatattcaggtttckttactgcttgacttccatgttagcagaagaattcacttatgagttagataataacagtagaaaaatgtcaaattaaaccggtaagagggaaaactcaagcaaatccttgtgtagattagcccaagcagctcataaagggagatcagaaaagacttaagtatttttcctcttaactaatagcacttacactggtttgaaccatgctagacctttccacycacctcaaaaatctgttccagatagagccttagttttcctactaccccctctttgtcaagcaccacc

SEQ ID NO: 11074 - DNA, 600 bp, Chicken  19866894213491_2
ttgcagtcaaagatgatcttagtcttttgtgaccatgtacttagccatgcttcaggaaagctctgagagcaaatacaggcacgatttttagtggtctccagctagggagatactgtggtgcaacaccattttaacttaaatagtattctgtcatgtttactatctggtattacacttatcatgcacaacctctgcagaaagtaagcttatttgagcttctttaagaactgtttaaagtgatgtttttaatatataattgcagcagtcgatatgtagatcaagttsaatattcaggtttckttactgcttgacttccatgttagcagaagaattcacttatgagttagataataacagtagaaaaatgtcaaattaaaccggtaagagggaaaactcaagcaaatccttgtgtagattagcccaagcagctcataaagggagatcagaaaagacttaagtatttttcctcttaactaatagcacttacactggtttgaaccatgctagacctttccacycacctcaaaaatctgttccagatagagccttagttttcctactaccccctctttgtcaagcaccaccctacccttctttccc

SEQ ID NO: 11075 - DNA, 600 bp, Chicken  19866894213491_3
ctttaagaactgtttaaagtgatgtttttaatatataattgcagcagtcgatatgtagatcaagttsaatattcaggtttckttactgcttgacttccatgttagcagaagaattcacttatgagttagataataacagtagaaaaatgtcaaattaaaccggtaagagggaaaactcaagcaaatccttgtgtagattagcccaagcagctcataaagggagatcagaaaagacttaagtatttttcctcttaactaatagcacttacactggtttgaaccatgctagacctttccacycacctcaaaaatctgttccagatagagccttagttttcctactaccccctctttgtcaagcaccaccctacccttctttcccagcaggagttgtgacggacagcatttactcagctttctcagttcccctcccagcatagctgtactatttcaactatttgtccctccacccccttttatgtaagtggaaagcctgcttcactcagtctacatttcgtttaccactcaagcactggaacatacttcagtaacactattcctatccctaacttgaaggatattatgcagccttggtttagg

SEQ ID NO: 11076 - DNA, 600 bp, Chicken  19866894213493_1
aggtcctcttaaggagatttaagatgggccacataatgggaaaacacaaacaagtgaactggaggctgatttagtcataccattaatgtttctgtgtgatgtaccctcagatacaaagggaagacgtggcttaaaagaattaacagtctaaatctcacttgtactcacacagagacaattgtgctacagatcaactctgcctaatgcaaaaaacattaaatcatctagatacctgaaccctttggctccagccaagtgcaagtgttctaagacttcatcattgcatgtaagtctaattakgttaattactggctaacagagcatagtaatagacacggagatgtagccaggagagaggagaaaacctatctcctggagacaagcaatatrtcaaccactggaaaataccagctataaattcatggcagccttctgctcttttcacccaggatctgctatacagcttataaattagttcccagtctttagttttgggaaagctaagaaacaaaagggtggattctgcttagtgttgatgttacgtgtttgtgcaaggggaaaataattgcagaagtactttcctaaaacctgatcacacca

SEQ ID NO: 11077 - DNA, 600 bp, Chicken  19866894213493_2
tctgtgtgatgtaccctcagatacaaagggaagacgtggcttaaaagaattaacagtctaaatctcacttgtactcacacagagacaattgtgctacagatcaactctgcctaatgcaaaaaacattaaatcatctagatacctgaaccctttggctccagccaagtgcaagtgttctaagacttcatcattgcatgtaagtctaattakgttaattactggctaacagagcatagtaatagacacggagatgtagccaggagagaggagaaaacctatctcctggagacaagcaatatrtcaaccactggaaaataccagctataaattcatggcagccttctgctcttttcacccaggatctgctatacagcttataaattagttcccagtctttagttttgggaaagctaagaaacaaaagggtggattctgcttagtgttgatgttacgtgtttgtgcaaggggaaaataattgcagaagtactttcctaaaacctgatcacaccacggtgaatcaacaggcagttggtattatgagataaaaggatgctggttcagtctgattaatcaaacccccttatgcttgccaaagcctaa

SEQ ID NO: 11078 - DNA, 600 bp, Chicken  19866894213495_1
tgtaaagatttttaaaataatatttgtccctgagattaccttattaaacatattaaaagaataatgacaaaggcaaagtgatggcaaaagtaatctttcatgcaaaaggaggagaaatattcctttcctggaggaagtcagattactcttgccaaaactgagtgagaacagtaaggtcaaagtaccttgaacatgttcatgctaaaaggagaagaattattaagagctaggaggtacaggactatttatgagaggttgttgaggctttttattatgtcagatgtggtgctcaaatgtacrcttccagtctgcttgcttgaaagtactcccaaagagaggtgaatgccaaagccttgtagctccaggtgccccagaccactttcagctgtttccttcctgaggggcaagtgagctygtgtgaagtgggctggtccatactgctgcttttggaccaagtgaccayctcatagtcaggaactgatcattcaaactcaggccaggagccaagagcttccaggcaggaatagagaatggcccaaagtaacttttaaaatgctttcaaggagyaatgaaaacttaggaaatggaagaaagaaaact

SEQ ID NO: 11079 - DNA, 600 bp, Chicken  19866894213495_2
aatattcctttcctggaggaagtcagattactcttgccaaaactgagtgagaacagtaaggtcaaagtaccttgaacatgttcatgctaaaaggagaagaattattaagagctaggaggtacaggactatttatgagaggttgttgaggctttttattatgtcagatgtggtgctcaaatgtacrcttccagtctgcttgcttgaaagtactcccaaagagaggtgaatgccaaagccttgtagctccaggtgccccagaccactttcagctgtttccttcctgaggggcaagtgagctygtgtgaagtgggctggtccatactgctgcttttggaccaagtgaccayctcatagtcaggaactgatcattcaaactcaggccaggagccaagagcttccaggcaggaatagagaatggcccaaagtaacttttaaaatgctttcaaggagyaatgaaaacttaggaaatggaagaaagaaaactgtttgttgctttaagcctttgttctgccttctggcttaaagtgaattcataaacggagtgtttagaagtgtttgggtttccctgcaacttagattctgacagctttccatataaa

SEQ ID NO: 11080 - DNA, 600 bp, Chicken  19866894213495_3
gagaacagtaaggtcaaagtaccttgaacatgttcatgctaaaaggagaagaattattaagagctaggaggtacaggactatttatgagaggttgttgaggctttttattatgtcagatgtggtgctcaaatgtacrcttccagtctgcttgcttgaaagtactcccaaagagaggtgaatgccaaagccttgtagctccaggtgccccagaccactttcagctgtttccttcctgaggggcaagtgagctygtgtgaagtgggctggtccatactgctgcttttggaccaagtgaccayctcatagtcaggaactgatcattcaaactcaggccaggagccaagagcttccaggcaggaatagagaatggcccaaagtaacttttaaaatgctttcaaggagyaatgaaaacttaggaaatggaagaaagaaaactgtttgttgctttaagcctttgttctgccttctggcttaaagtgaattcataaacggagtgtttagaagtgtttgggtttccctgcaacttagattctgacagctttccatataaaagatttatttgtgccaaattcagatggtcaagtcagtttaataaacca

SEQ ID NO: 11081 - DNA, 600 bp, Chicken  19866894213495_4
tttattatgtcagatgtggtgctcaaatgtacrcttccagtctgcttgcttgaaagtactcccaaagagaggtgaatgccaaagccttgtagctccaggtgccccagaccactttcagctgtttccttcctgaggggcaagtgagctygtgtgaagtgggctggtccatactgctgcttttggaccaagtgaccayctcatagtcaggaactgatcattcaaactcaggccaggagccaagagcttccaggcaggaatagagaatggcccaaagtaacttttaaaatgctttcaaggagyaatgaaaacttaggaaatggaagaaagaaaactgtttgttgctttaagcctttgttctgccttctggcttaaagtgaattcataaacggagtgtttagaagtgtttgggtttccctgcaacttagattctgacagctttccatataaaagatttatttgtgccaaattcagatggtcaagtcagtttaataaaccatgtacgaaactgggcaggagataagttggaggcgttgtgaagaacacagcacaggaggtgcaaaggtgtctgttcagaaggctgtggcagggctagaataaaaa

SEQ ID NO: 11082 - DNA, 600 bp, Chicken  19866894213502_1
gcaggaaaattgaaaggctcctgagtcagatcaggacagtctacaacagagacttgggcatcagcaaagttctctttaagtcctttctgcaaaactacaattaaaaaataagtaaaggcaaagttattagcaaggaaaaactactgagaggttgccaaactaacaaatgtgtgcctagccttcacttcagcaagatacttcaaagaatacacagataccctaagaaactcttattgacttaagtgttagtgcctgcaggtgcaccatttcttgagccagagctttagagaatggcaagarcttgttcagagcattgctggttaccacactgattaggaatttcacaaagctttttacttaagaacagcacctgtgaagtaacatggacaaccttaaactacatttggcagtgtttgttttgttttgttttttttccacaaggtcagacacttatgatcatgctcaagtattacatgagaagaagtagtaagtttcagctgargtgatgatgacttttaaaatacatgaagtaaactgcctttgtctaattgtaacctgactgctgcttggaaacgcctgctcttgtagcatatgcactgc

SEQ ID NO: 11083 - DNA, 600 bp, Chicken  19866894213502_2
aagaatacacagataccctaagaaactcttattgacttaagtgttagtgcctgcaggtgcaccatttcttgagccagagctttagagaatggcaagarcttgttcagagcattgctggttaccacactgattaggaatttcacaaagctttttacttaagaacagcacctgtgaagtaacatggacaaccttaaactacatttggcagtgtttgttttgttttgttttttttccacaaggtcagacacttatgatcatgctcaagtattacatgagaagaagtagtaagtttcagctgargtgatgatgacttttaaaatacatgaagtaaactgcctttgtctaattgtaacctgactgctgcttggaaacgcctgctcttgtagcatatgcactgccgtgtttctgtccatgagaggacattctgacaagtgccactggcaatacagggcaaatagtgaacagagctgatgatcagtcccaaatctgaactttttcttttgattcatatcagcatttttaggcacataacctgcctaagcacctcaacgacggggatgattctaacttaaacaagttcagtgcttaacaagaagcttt

SEQ ID NO: 11084 - DNA, 497 bp, Chicken  19866894213503_1
ttcaggttgtttttcaggtaaagaatttgcatgaaaggaaagccacattttattcctgcatttgctaggtgatgaatgaacaagcacaaataatccaagcagttgttctccttttttttccttaacttatgtctgcaattctcacttatttcatacacttcaattagtgtgctcagaaggttttgacatggagttaccttccagctggatgaatgttttagatccgtgacaatcactgtctgaacctaagggagctgtgcttccatttgttttaaattcctgccatccatatgttataakttaaactctcttattttgtgtggggttcacagtctttgacatcagctgtctggaaggcgggtacctcatctgtgctactcatgacttccctctatcatcagtgtagtgcaagaagcaccttcagaaggtgtttcatacccagtgcatgcccaaagtcataccaggtacgtgcccaaataaatgggatgactcgggca

SEQ ID NO: 11085 - DNA, 600 bp, Chicken  19866894213504_1
ataaaacacagaacttttagaagtctcagttactcaggcatattagctagaaactttgtaggctacagttcaaggacctctgcatttcttgggaatttacaccgctcttgttcctctcacacagtcagaaattgccacacaggttctactgtactcttgacccccagagggagcggctcattcctgtggatcatgccaacagctgcttaagatgaggtttccccatcgatcacactggaatagtcacatgcacgcgtatgattgactgggttctagaagcattcacttccagtgagcatmagcgtttccaaagaaactgcagaagtttaaacacatcctcttgtttgctacccttggaatacgcgacaagtttttatcctgaagtcctaagttacaaaactgcattctagaagaaaattatttagttaagtccttccatgggttcaaagtgatatgaaaccacttcagtgtgcataatttggaaaaaatcactaaacagactcaccaaattttgtccacacagcattggcttctaaacaaacccctacagtcagttttctgcccagaccaagttttacagtagagttgcattcaattttc

SEQ ID NO: 11086 - DNA, 600 bp, Chicken  19866894213510_1
acaattcagaaccccagtaatgtagaccactactctaaactgctttttccgttgttttttatgctggtcaatgtgttttattgggcttattatttatatttttagtaggaatgggttttcgtgttctcccacttcagtgggaaaggaatcctgccaatggtcatctaggtatctaaccccagtgaatccagcatagacaaaatgttctgtgtttcctgaggtctggagcaaaagagtggatggggtatgtgagatgcaaagtcttcatgcttcagcattagcaacaatgactgtggacasttgcttgttcagccgagtggctttgctgggctcttggctggtacgggctcttcattccagcatccagcttctctggccagggatggatatgtaggactgcatgtggcagtccacagattactagaggtagcaaaattatcctgataacctgaagtggattggaacctaccttcttgttcagatctctatgaggatgtatgattatagctgttctgtgtttgccagagataacagtaacagagagactgtgactgccatctcaatagctcctctgttcaaataagtgaacccaaaggcagc

SEQ ID NO: 11087 - DNA, 599 bp, Chicken  19866894213518_1
  misc_feature (1)..(42): n is any nucleotide
nnnnnnnnnnnnnnnnnnnnnnnnnnnnnnnnnnnnnnnnnntgtggagctctgatgaagtttctctccgcatcggtaagcatgtggtttcagtaaaactgataggattaacattaaatgcacatttatgtattttgctgaaatggagattgtctgctcagcatctttcaggactgactattgagtgggagcaaaatcaagcccacagaaaacaaaacattttcactcagatatgtttttaaaattaattctgttactgtaaaatcactcactgtttttgccctataacaatcagtattytaayaaatgctgccagaaacaaacattacatagttgtatttatggcatctgtaagttagctatcaatgcttttgtctgtgcagagtttatattttccactagaaagaatagcaataaatggcttcaggcaataagatggcctagtctgarttttcttcctaattaaccttttgctgcttcaccaaatcatcaaacagtattttgttatgcasagctatttactataaataagctgctgatgtgatttatagcctaaccgaaatcatagggaaatttattgggtaagagcattaagataa

SEQ ID NO: 11088 - DNA, 599 bp, Chicken  19866894213518_2
  misc_feature (1)..(38): n is any nucleotide
nnnnnnnnnnnnnnnnnnnnnnnnnnnnnnnnnnnnnntgtggagctctgatgaagtttctctccgcatcggtaagcatgtggtttcagtaaaactgataggattaacattaaatgcacatttatgtattttgctgaaatggagattgtctgctcagcatctttcaggactgactattgagtgggagcaaaatcaagcccacagaaaacaaaacattttcactcagatatgtttttaaaattaattctgttactgtaaaatcactcactgtttttgccctataacaatcagtattytaayaaatgctgccagaaacaaacattacatagttgtatttatggcatctgtaagttagctatcaatgcttttgtctgtgcagagtttatattttccactagaaagaatagcaataaatggcttcaggcaataagatggcctagtctgarttttcttcctaattaaccttttgctgcttcaccaaatcatcaaacagtattttgttatgcasagctatttactataaataagctgctgatgtgatttatagcctaaccgaaatcatagggaaatttattgggtaagagcattaagataaaatt

SEQ ID NO: 11089 - DNA, 600 bp, Chicken  19866894213518_3
tgtctgctcagcatctttcaggactgactattgagtgggagcaaaatcaagcccacagaaaacaaaacattttcactcagatatgtttttaaaattaattctgttactgtaaaatcactcactgtttttgccctataacaatcagtattytaayaaatgctgccagaaacaaacattacatagttgtatttatggcatctgtaagttagctatcaatgcttttgtctgtgcagagtttatattttccactagaaagaatagcaataaatggcttcaggcaataagatggcctagtctgarttttcttcctaattaaccttttgctgcttcaccaaatcatcaaacagtattttgttatgcasagctatttactataaataagctgctgatgtgatttatagcctaaccgaaatcatagggaaatttattgggtaagagcattaagataaaattttcaaaacatcagaactgtttatgtgactttgtccccctgtggaaggtactttggcactgtaatcagcttggtaatctcaggtcgtgctgatactttggacaattttatctcccagatgtatttaaaaaagaataatcagacaaaac

SEQ ID NO: 11090 - DNA, 600 bp, Chicken  19866894213518_4
caaaacattttcactcagatatgtttttaaaattaattctgttactgtaaaatcactcactgtttttgccctataacaatcagtattytaayaaatgctgccagaaacaaacattacatagttgtatttatggcatctgtaagttagctatcaatgcttttgtctgtgcagagtttatattttccactagaaagaatagcaataaatggcttcaggcaataagatggcctagtctgarttttcttcctaattaaccttttgctgcttcaccaaatcatcaaacagtattttgttatgcasagctatttactataaataagctgctgatgtgatttatagcctaaccgaaatcatagggaaatttattgggtaagagcattaagataaaattttcaaaacatcagaactgtttatgtgactttgtccccctgtggaaggtactttggcactgtaatcagcttggtaatctcaggtcgtgctgatactttggacaattttatctcccagatgtatttaaaaaagaataatcagacaaaacagttgcatagtaaaatcccatatgagaaggaaggaggtagagacatataatctttaagtgaa

SEQ ID NO: 11091 - DNA, 558 bp, Chicken  19866894213518_5
atgagaaggaaggaggtagagacatataatctttaagtgaaattgtcagcattttgagtcattttaaaaccacaaaacatgaatgcatgcaattcttgccaaatttccaccgtatttcctttgattacatacatttccagcaaacaatataataatcttacatttttaaggctctgtgtacaaacagttggagagatgcaaggaatacttgtgacacagaacaaacaagggagaaagcagaaaataaagatttaataccgacttaccccacagccggtcagtatgcaagatcttatggcygaatacattgtttttattagtgtcaagtgcttgatttaaagtaagacctcgtcaccttactgagagatatttttcctggggtatatgcatgtacctatttatctattgagtgcgagtatatatatacacacacctagcagtaggcctggttagtgtcagcttgactgggagaaggatgttagtaattactatttctctaaacactactttagcatagtttagtgtatcagctggcttctgctgccagaaggacctgta

SEQ ID NO: 11092 - DNA, 599 bp, Chicken  19866894213523_1
  misc_feature (1)..(160): n is any nucleotide
nnnnnnnnnnnnnnnnnnnnnnnnnnnnnnnnnnnnnnnnnnnnnnnnnnnnnnnnnnnnnnnnnnnnnnnnnnnnnnnnnnnnnnnnnnnnnnnnnnnnnnnnnnnnnnnnnnnnnnnnnnnnnnnnnnnnnnnnnnnnnnnnnnnnnnnnnnnnnnnngcctggatctcataaaacagagaaggtccagggacccaaaggtgctatggctctgtgcccgggggcattgttttctctggcagtcacagagcgaaaggacagagcagtgcccaggccccacactacgaccacggcctgcyctgaggaacagcggcctctggtcatggaaagcataggagaaaatggccctgaaagcctccctccccatctgagatccagccaaaagcagtggatgaacagcagtttcaacactgcattctgctcccagaggagaggtctgcatggcctcatgttgcctgtgcaggctgctgacggggcgggagctgcagccatgttggcgctgagggagcagggcgtcctcaygccatttcactcagcactgatggaaggtgctgcctcttgtcctagaggcccaccacccctttcagagaatcactgg

SEQ ID NO: 11093 - DNA, 600 bp, Chicken  19866894213523_2
ggcattgttttctctggcagtcacagagcgaaaggacagagcagtgcccaggccccacactacgaccacggcctgcyctgaggaacagcggcctctggtcatggaaagcataggagaaaatggccctgaaagcctccctccccatctgagatccagccaaaagcagtggatgaacagcagtttcaacactgcattctgctcccagaggagaggtctgcatggcctcatgttgcctgtgcaggctgctgacggggcgggagctgcagccatgttggcgctgagggagcagggcgtcctcaygccatttcactcagcactgatggaaggtgctgcctcttgtcctagaggcccaccacccctttcagagaatcactggcactgtttctaagtcatttccctggcgcaaatgtgacaaacagatcgaaaagcagaacttgtctttcctgcacattgctgctgctgccaggcccttgggaatgagcagaaggtgacctgtcagctctgcacatctatgctgagccccagggtagaatcttcttaacattattccagaaactgtgaggaaaagaagaaaatacatacatatacatacacacctat

SEQ ID NO: 11094 - DNA, 600 bp, Chicken  19866894213524_1
aaattcttccttcttcctggagtctcagatccagaagtctcaccttgacctgcaggcttccccccccacccacctaccataggggtcctatgaggatgacaaactgagttagagagcttgggagctatctctgccaaagagtacaccatattgtatgtgtggcactgtggcagatagcttgtcatagcatcttggattctgctgacaaagccctcatgacaaaccagttaagctccgcaaacagcagcacttcagagacagactcctccccagccagaacttgttgataccagcatcatkgcagaacattgcagctccagttcaagtcatctggatacacatgccagcttctaaccataggtcattcaaagactttagaagggacccagatgcagtaataaagtgccatgttctaccactttcccctcacactgcatctttacatccaaacaggccagtccccacatttagtcaagaattactggacttcagtcaagaaagattggaccaccacagctttggaacagagtagcagtatggaaacactgcttcgactttacacaaagaaaaggaaaaaaaagatccagtaagatgcttact

SEQ ID NO: 11095 - DNA, 600 bp, Chicken  19866894213529_1
ccaagtaaatttggagtcaaggctggaaatgtccctctgagaaatgccgctggaggcagacagaagcacagagatacgtcagcgtcactggtggggtttggaggctgcagcagaatttctctcctctccttcctacccttatctctaaagctcttcatgttgtgtaaagcctgggaccatgtgaatcctagagcagaaaatgaatagggagcattgccagcaacaagattttaataaagatccacatgcacacatcttggagagggaagggagaagtctctgggagtctgccagcacacrgggcagctttccttgagatccctggcaggatgctgaacgtctccctttgccagcatcatcactgctggagggcagggatcacacttctctccgcctcgcttctgggaggtttcttcccaagggcagtggggaagatgaagaaggagaactgaytgttcatgttggttcacacaaagctgctcaaagccactgtccaggctggagggaatgagactgccaagctctcactaagcactgagctgagttcgaggttatggtgcttcgagcaggacattaattaacaacagaaaccagaaaggc

SEQ ID NO: 11096 - DNA, 600 bp, Chicken  19866894213529_2
ttcatgttgtgtaaagcctgggaccatgtgaatcctagagcagaaaatgaatagggagcattgccagcaacaagattttaataaagatccacatgcacacatcttggagagggaagggagaagtctctgggagtctgccagcacacrgggcagctttccttgagatccctggcaggatgctgaacgtctccctttgccagcatcatcactgctggagggcagggatcacacttctctccgcctcgcttctgggaggtttcttcccaagggcagtggggaagatgaagaaggagaactgaytgttcatgttggttcacacaaagctgctcaaagccactgtccaggctggagggaatgagactgccaagctctcactaagcactgagctgagttcgaggttatggtgcttcgagcaggacattaattaacaacagaaaccagaaaggctactgtggtgctgcagagcataccacaagcctctaagtaagcccattccagccatgcatacagagttactcacaagcccaagcaggacttaagccagtccactacaaggaagagaaacctttaagaagaaaactggcaattgctactaattca

SEQ ID NO: 11097 - DNA, 600 bp, Chicken  19866894213529_3
gtccaggctggagggaatgagactgccaagctctcactaagcactgagctgagttcgaggttatggtgcttcgagcaggacattaattaacaacagaaaccagaaaggctactgtggtgctgcagagcataccacaagcctctaagtaagcccattccagccatgcatacagagttactcacaagcccaagcaggacttaagccagtccactacaaggaagagaaacctttaagaagaaaactggcaattgctactaattcattagatgagcctctttgagacgcaggtgttaggggatyaaaaatatcatttttggaatagaaatcaactcagtgcctgccctcagcttccacctctgtgctttattttccttcctgcagctccaggccccctgaaccttgctggagatgctgcctatttttaccctgccttggcacttatgttatcgttcatgtcagaatgaggccaggcattaaatatatcttcccaccaaaactccccagattttgttaatttaggcattctagtgtgatgatgcctaccacactcagaggaacactcaaaaccgagtgtcgcagccccgtgctgagacctgactc

SEQ ID NO: 11098 - DNA, 600 bp, Chicken  19866894213529_4
ctgttacaatatcatagttacagctataagaaggtcagcaattcctaaaatctcagccattttgtgggatggaaaggagaatttccatcctccagccttccaggctgccccacagcccaactgtgtatgcccaaatcctgtgggaagacagatctctgggaggcactgacccctcccaggtgtgagaagggcctttgctttttgcttccgcaatgccaaaccttttcattgcagcagtccctaaaagcagcccagcagttcactgtgaggcggccattttctgtgtcactgaagctacaygaagcaaagtccgctttcatttttcagctttgactcaaacgaaatgtttgtggactgaaccccagccaagagctttgctctgccagcctccagcaggaccctgttctctgttttttatttgacttcccaagtacctcctcactccattgcaaagataaaagcaaagccagagaccaggctccrgtggaaacttggttcactggtctccacaggaagtcagacgtgtgatgaggagcagcagcggagcactgtggattgcaggtgatgctgctgccctgcagacacttccctgccccttct

SEQ ID NO: 11099 - DNA, 600 bp, Chicken  19866894213529_5
gagaagggcctttgctttttgcttccgcaatgccaaaccttttcattgcagcagtccctaaaagcagcccagcagttcactgtgaggcggccattttctgtgtcactgaagctacaygaagcaaagtccgctttcatttttcagctttgactcaaacgaaatgtttgtggactgaaccccagccaagagctttgctctgccagcctccagcaggaccctgttctctgttttttatttgacttcccaagtacctcctcactccattgcaaagataaaagcaaagccagagaccaggctccrgtggaaacttggttcactggtctccacaggaagtcagacgtgtgatgaggagcagcagcggagcactgtggattgcaggtgatgctgctgccctgcagacacttccctgccccttctgcagttccccccctgcagccaaccctgcagctcactgccctctgcccacagctccccacctgggggtccggcgctgcaggcgctgcatggcacagggtcctcctgctggagtgagttaaatgagccagcccacacagacagccccaggatacccagattacagtcatttgttctttttataat

SEQ ID NO: 11100 - DNA, 600 bp, Chicken  19866894213530_1
cacaagaatcacaattttgaactgtgagaacacacactaaatgatgttcgagactggtttctgtgttaaggtcttttttctgctatagtgccacagagtttctgcttcaactccttgtggcttcggttgcctaaaaatcattcttttggaacttgaagttagaattattgcaagcaattgttattgttccccaaaggcttcttgaacgtaatgctgcttagcctccaaaaagatccatgtcacatgcactacttaaatcactcagtctcagtacaggcctgccccccagtttatgtaggrtgcattattagaaggggaagctgaaagcaatgacgagcaaatggtaccacaaacgttactgcttctgcctttggttccactccttgcccatattagagaaccagtctgtggcaacatacaggctgctgtgtggtttgccctttctgctctaatttgccattataactcagcatgtcatctgccatacgtttagtatgtcgccagcctctgcccaatttggctttccttaccaatgatactttcttatttgcttctgctttgctccttactcctacttctaacttcctgccatccaaatgc

SEQ ID NO: 11101 - DNA, 600 bp, Chicken  19866894213530_2
acaagaatcacaattttgaactgtgagaacacacactaaatgatgttcgagactggtttctgtgttaaggtcttttttctgctatagtgccacagagtttctgcttcaactccttgtggcttcggttgcctaaaaatcattcttttggaacttgaagttagaattattgcaagcaattgttattgttccccaaaggcttcttgaacgtaatgctgcttagcctccaaaaagatccatgtcacatgcactacttaaatcactcagtctcagtacaggcctgccccccagtttatgtaggargcattattagaaggggaagctgaaagcaatgacgagcaaatggtaccacaaacgttactgcttctgcctttggttccactccttgcccatattagagaaccagtctgtggcaacatacaggctgctgtgtggtttgccctttctgctctaatttgccattataactcagcatgtcatctgccatacgtttagtatgtcgccagcctctgcccaatttggctttccttaccaatgatactttcttatttgcttctgctttgctccttactcctacttctaacttcctgccatccaaatgca

SEQ ID NO: 11102 - DNA, 600 bp, Chicken  19866894213530_3
caagaatcacaattttgaactgtgagaacacacactaaatgatgttcgagactggtttctgtgttaaggtcttttttctgctatagtgccacagagtttctgcttcaactccttgtggcttcggttgcctaaaaatcattcttttggaacttgaagttagaattattgcaagcaattgttattgttccccaaaggcttcttgaacgtaatgctgcttagcctccaaaaagatccatgtcacatgcactacttaaatcactcagtctcagtacaggcctgccccccagtttatgtaggatrcattattagaaggggaagctgaaagcaatgacgagcaaatggtaccacaaacgttactgcttctgcctttggttccactccttgcccatattagagaaccagtctgtggcaacatacaggctgctgtgtggtttgccctttctgctctaatttgccattataactcagcatgtcatctgccatacgtttagtatgtcgccagcctctgcccaatttggctttccttaccaatgatactttcttatttgcttctgctttgctccttactcctacttctaacttcctgccatccaaatgcat

SEQ ID NO: 11103 - DNA, 600 bp, Chicken  19866894213530_4
aagaatcacaattttgaactgtgagaacacacactaaatgatgttcgagactggtttctgtgttaaggtcttttttctgctatagtgccacagagtttctgcttcaactccttgtggcttcggttgcctaaaaatcattcttttggaacttgaagttagaattattgcaagcaattgttattgttccccaaaggcttcttgaacgtaatgctgcttagcctccaaaaagatccatgtcacatgcactacttaaatcactcagtctcagtacaggcctgccccccagtttatgtaggatgrattattagaaggggaagctgaaagcaatgacgagcaaatggtaccacaaacgttactgcttctgcctttggttccactccttgcccatattagagaaccagtctgtggcaacatacaggctgctgtgtggtttgccctttctgctctaatttgccattataactcagcatgtcatctgccatacgtttagtatgtcgccagcctctgcccaatttggctttccttaccaatgatactttcttatttgcttctgctttgctccttactcctacttctaacttcctgccatccaaatgcatg

SEQ ID NO: 11104 - DNA, 600 bp, Chicken  19866894213535_1
atgtaataagtaaactcatttttttttcatttctaattcaagcaaagctcttactcagattaatcatggttttgacaacgtgattgacttataacaaaaacactttcaatagctttaatacctgttcaattaatgctccttattctcctttctgaatggcaccaggactgcaaaagttaaaaaaaaaaaaaaagaaaaaaaaaaaaagtctccaactgttccctccgcacagtgccgttgttttctgaccttcatctcttcttcaaaatgttgttttccctactgaatcctgaggttgaycagcaggatttgatgcagtacaaaccacgacttcctgcaaaaccttcctgttgaacgctgtgtccaacgggaagccgtggtgtgctgtgctgtgctgactggcaggcactgccttgtgggttctgaagcaaatggcattgcagagtagaatgcaaatgcaaaggtaatcaccagaccatttttttttgtcttcttccgaggcatctggggtgaacccatgtgagacaggatgccagcagtgaggaagcatcgttctttcttcgtgtgcttcgtatcttacatatgagctttgtacctaat

SEQ ID NO: 11105 - DNA, 600 bp, Chicken  19866894213540_1
ttgctttgctttgctttcttttcctttctgcactacatttaatattcatgagtatatgtgagttgggaattaggccccaaaacttagatatccacctatccttccactgaaatgattcaggtgtacatcctagctgtcagttcgtgtttgccaatccatttggataccaaaaataatagttgaacctattaagccatttcagatacatgtaaaagactagaatgctcaaagctaagtttcagcacagtacaggtgacataccctgttactgtctggttctggtaaaccttttctgtgttytgccttgcaacaacatgctgctctatcatcatgggtctggacctgggcacgctgccatgtgcttctcctttccttcaagtggctccattaatagtttctttatctatgtcagcagattacagcagagctcttaagtaaaatttgcatgaatagttctgtgttggccctcgagaatgctgagcttcatgctgggtcatcatgtgtgaccaggccactattgctcaaaaagtaagtaccaccaaagagggggctggctgccacatggcctgcttggctggcggactgcacagcagcattgct

SEQ ID NO: 11106 - DNA, 599 bp, Chicken  19866894213541_1
  misc_feature (1)..(182): n is any nucleotide
nnnnnnnnnnnnnnnnnnnnnnnnnnnnnnnnnnnnnnnnnnnnnnnnnnnnnnnnnnnnnnnnnnnnnnnnnnnnnnnnnnnnnnnnnnnnnnnnnnnnnnnnnnnnnnnnnnnnnnnnnnnnnnnnnnnnnnnnnnnnnnnnnnnnnnnnnnnnnnnnnnnnnnnnnnnnnnnnnnnnnntcggaaaacggatcagttttggggactcgtaattaacgcatccttctccagccccacgcaaccattgttaacgtttcctgtgagcttacagaaactgcaagtggcttgataccgtctkcttttactcttgcatccttctgaggccacaccacttaaaggcacagtcagaaacccatatgagtagaatggtaccacaggccttcacaagaaaggcagctggtggagcaaagcttgatgttatataaaataaagagtataaggaagtgggagacargataccaaatgccttcttcatctgtccagagaaggaaaaggacatactaacttcttagtggaatccacactattttagggagctaaaacagaagtagcctggctcagcctgttgatagaaatacgagctcttcacagccaccc

SEQ ID NO: 11107 - DNA, 599 bp, Chicken  19866894213541_2
  misc_feature (1)..(26): n is any nucleotide
nnnnnnnnnnnnnnnnnnnnnnnnnntcggaaaacggatcagttttggggactcgtaattaacgcatccttctccagccccacgcaaccattgttaacgtttcctgtgagcttacagaaactgcaagtggcttgataccgtctkcttttactcttgcatccttctgaggccacaccacttaaaggcacagtcagaaacccatatgagtagaatggtaccacaggccttcacaagaaaggcagctggtggagcaaagcttgatgttatataaaataaagagtataaggaagtgggagacargataccaaatgccttcttcatctgtccagagaaggaaaaggacatactaacttcttagtggaatccacactattttagggagctaaaacagaagtagcctggctcagcctgttgatagaaatacgagctcttcacagccacccacgtttttgtgtgacaaagggagttttcagagagggaagattttttgaattcccttcagtatgagcatcagcagtgtactttaaatttctgaattcggacttctatcaaagagaaaagtctagatgtcggatacatcagtgatagccctcagctag

SEQ ID NO: 11108 - DNA, 600 bp, Chicken  19866894213541_3
gggactcgtaattaacgcatccttctccagccccacgcaaccattgttaacgtttcctgtgagcttacagaaactgcaagtggcttgataccgtctkcttttactcttgcatccttctgaggccacaccacttaaaggcacagtcagaaacccatatgagtagaatggtaccacaggccttcacaagaaaggcagctggtggagcaaagcttgatgttatataaaataaagagtataaggaagtgggagacargataccaaatgccttcttcatctgtccagagaaggaaaaggacatartaacttcttagtggaatccacactattttagggagctaaaacagaagtagcctggctcagcctgttgatagaaatacgagctcttcacagccacccacgtttttgtgtgacaaagggagttttcagagagggaagattttttgaattcccttcagtatgagcatcagcagtgtactttaaatttctgaattcggacttctatcaaagagaaaagtctagatgtcggatacatcagtgatagccctcagctagcccagcttttttaaagattgaaagtttaaagttgggggaaaaaaaccg

SEQ ID NO: 11109 - DNA, 599 bp, Chicken  19866894213546_1
  misc_feature (1)..(1): n is any nucleotide
nccccacagtctgcttgttcagaagatactttacggtgcttcatcacttggataaatatcaggaacatcctttccaggaaaatcttgatatttagctcacggagtccatttgattgatatttatgaaaggaatcattgaaacacagaatcatagaatggcctgggatgaaaaggaccacaatgatcatggagtttcaaccctctgctatgtgcagggtcaccaaccagcagaccaggctgcccagagccacatccagcctggccttgaatgcctccagggatggggcatccacaacctcyttgggcaacctgttctagtgtgtcaccaccctgtgtgtgaaaaacttcctcctgatatcttacttaaatctcccttgtcacagtttaaaaccattccccgttgtcctatgaagaatgaaaatcccgattcgaatttaaacatcagtttaaggaaaactgagactgtcattcaactgcagctcactgatttatgaactgcacagatttcttccttgtctcagagtccagacttagaaagtacacaacaggtgaatgagacctcatgaaaaaagagaagacgctccwgtacatttttatca

SEQ ID NO: 11110 - DNA, 481 bp, Chicken  19866894213546_2
gcatccacaacctcyttgggcaacctgttctagtgtgtcaccaccctgtgtgtgaaaaacttcctcctgatatcttacttaaatctcccttgtcacagtttaaaaccattccccgttgtcctatgaagaatgaaaatcccgattcgaatttaaacatcagtttaaggaaaactgagactgtcattcaactgcagctcactgatttatgaactgcacagatttcttccttgtctcagagtccagacttagaaagtacacaacaggtgaatgagacctcatgaaaaaagagaagacgctccwgtacatttttatcacagtaatgtattacacaggaaatccaggattgttgaaatttctttgctggccttataagtaaggcaaataaagaagggagatttttaggttacagtagattgctgcttctctagaggactctgtatcaagaagtgtttgctctgctgatactaggtcgcaccattca

SEQ ID NO: 11111 - DNA, 599 bp, Chicken  19866894213548_1
  misc_feature (1)..(112): n is any nucleotide
nnnnnnnnnnnnnnnnnnnnnnnnnnnnnnnnnnnnnnnnnnnnnnnnnnnnnnnnnnnnnnnnnnnnnnnnnnnnnnnnnnnnnnnnnnnnnnnnnnnnnnnnnnnnnnnnattatttatcaatagcaagttggcccaaaattatgcaattgtggtgaattagattgtactgcctattgcacaccgtgaattcccacaaaaatatgagaattcatctgagagcagttaacaccggagttagtaaagcgctaatacaattttctttcaacctctggcacgtgatggggtataggtatctkccttttgcagtgtcatttttgtatttggctaaaaataaatatgaaaaacctaaaaatcatttttgagtctcctgctcatcgtgacagattaaacatttgaaaaaaatcaagcttgatttgaaaagtagaacacagaaattataaagtgatctttgtgtgctcactcaaagcagatgcttagtgaaacaaagcatagcatgttagacgttcatactgcaagtgcatgtcggctcctgggcagccactgtgctgagctagatgagagcacttggagctgtgacatccaatggcctaggaag

SEQ ID NO: 11112 - DNA, 600 bp, Chicken  19866894213548_2
aaacatttgaaaaaaatcaagcttgatttgaaaagtagaacacagaaattataaagtgatctttgtgtgctcactcaaagcagatgcttagtgaaacaaagcatagcatgttagacgttcatactgcaagtgcatgtcggctcctgggcagccactgtgctgagctagatgagagcacttggagctgtgacatccaatggcctaggaagtaagtacagaaattaaaatgttagaatttgaagatgaagacaaatgaggttcagttcttcagggtcaggttagggctggccacagagtggsaggttgggcagggcatggcaggaggtgggcaccgcaagaggacagcaccactcctctggctgcagcctgcacatgcagagtgtaggggcatccagctagtgaggaggtggtctgcagctgatttagggggaaatgactccttcatttgggaccatattccttttctagaattgcatgacttccattaaagtcagtggtgttgctctgttttttggtggtgtttttaggagcagcrtattctcccattgagattagaacaaatctcagcctacactgcagtggcatctcataatggaagta

SEQ ID NO: 11113 - DNA, 600 bp, Chicken  19866894213548_3
tttgaagatgaagacaaatgaggttcagttcttcagggtcaggttagggctggccacagagtggsaggttgggcagggcatggcaggaggtgggcaccgcaagaggacagcaccactcctctggctgcagcctgcacatgcagagtgtaggggcatccagctagtgaggaggtggtctgcagctgatttagggggaaatgactccttcatttgggaccatattccttttctagaattgcatgacttccattaaagtcagtggtgttgctctgttttttggtggtgtttttaggagcagcrtattctcccattgagattagaacaaatctcagcctacactgcagtggcatctcataatggaagtaaaccctgcaaagcctgacaaaattcatttagtaagcaagttccattcttcaaaaataagtaagtagcctagggagatcttaattaaaggcaatagagaatttagaattacagcatgagaagaaaaagaaaaaaaaaacttggaaaaaattctagatctgagctctgagttaacaggctgaaaaattagaatttctacgtgttatttgagtatttaaaagcaatttaagcttctaa

SEQ ID NO: 11114 - DNA, 600 bp, Chicken  19866894213553_1
caaggcctgtggctgggctggattatgggagctggagatcagcccttctgaggccctgctggggcgggggctcatggtcctaggagttgagatactgctgagcggcagcccagggaagggaactgggtcctgctagtgccctcgcagccctgctggttgttgatgcattatatcaggaccatgctgcaatatatgctctccacatcatcagatatggacaaatacaacggtgtttactcttattttaagtgtatcaaacctcttctagataagattaaatatttttttcctgcctctacyttttaaaagaaatatatatgcccttaaaagagtatagtctggaattgtaatacatatcctgagcctcaggggaatcttttacagcttagttttatgttgagtaatgctgctctaggaattaatttcttgcaaatctgatctgtcattttaagagaacctgttaatagcatgaaatgaatcatgagattccccaggtttctgaaatgatgtgttctaaaagaggtcagatcttcagatttgaccaatgacaaggtgggccccagggaaaatgactcttctggcatcattaaaacaatatgg

SEQ ID NO: 11115 - DNA, 600 bp, Chicken  19866894213554_1
actgtgagaatgaatcttaaaatgagttttttagattctctaaatactacagaaaagttgttttgcagagaacaacacgggactgctcaacctgaaattgtagtagaattcttctactgccctgagcttatatagtcaatagaatatagtagtagttttaagaaaatggtattgtagctttcttcctaaacgctgccctcttaaatagtttcattaggcttttgtgggttccaaatacttccagaagagaaaagaaagtgacaaagaatcccattcatgtatgtctcagaacttgttacwtttggattgtatacagcttgctcagaatccaggatctgtactaactgcttatatatgtrcatttaatattttaatctaccgtactaatgacatctgtgaatgattactggagaatacacagtgcaaaattattttgtaataaaaactcgagcttttcatttttgtcctcaggttgtgagcacagagatacactcctagcacagctagaattctaaactgcatgctctggtgataagcttgcaaggaactgctggagaagagtggttattatagggcttaatgttttatacagtacggaag

SEQ ID NO: 11116 - DNA, 600 bp, Chicken  19866894213554_2
gttttgcagagaacaacacgggactgctcaacctgaaattgtagtagaattcttctactgccctgagcttatatagtcaatagaatatagtagtagttttaagaaaatggtattgtagctttcttcctaaacgctgccctcttaaatagtttcattaggcttttgtgggttccaaatacttccagaagagaaaagaaagtgacaaagaatcccattcatgtatgtctcagaacttgttacwtttggattgtatacagcttgctcagaatccaggatctgtactaactgcttatatatgtrcatttaatattttaatctaccgtactaatgacatctgtgaatgattactggagaatacacagtgcaaaattattttgtaataaaaactcgagcttttcatttttgtcctcaggttgtgagcacagagatacactcctagcacagctagaattctaaactgcatgctctggtgataagcttgcaaggaactgctggagaagagtggttattatagggcttaatgttttatacagtacggaaggagattgattgaagtcttttcagctccactagtatactttctagacctaagtttacttg

SEQ ID NO: 11117 - DNA, 600 bp, Chicken  19866894213555_1
ggagttttgcaaataggtcactcattaaaagtttatatagctgaattcaggaagcctcctctaagtagaacaacggtaaagaaaaaacaaagcattttattgagccttctgggtgggcacaagcaccaggcagaatccaaagcctacataaggcattacctttcagatacttatctagcccctcaataagcagccagttattatttagccttatgtaaacagctctgtaattgtttttgtacctctttacagaagcctaaaggaggaaaacttgactacaatattaaacgaatcacattygctgttttctttttaaccaaaaagactaattgagatggaaaaaaaaaatcaaactaaaaaccagccctacaaaagaagcctctcttctcaactcctcctcttcaaaagcaaggagaccacttacaaacataaagygaagattatgtgctaatgttggcaggatttgagaccttacagcttgtgaaactatctgaatttggtctccttggctgggcagggcaagtgtattctgtaacacaccttcctttcataattgttcagatccagggatattttcagagctctctgcaactcccttcc

SEQ ID NO: 11118 - DNA, 600 bp, Chicken  19866894213555_2
tccaaagcctacataaggcattacctttcagatacttatctagcccctcaataagcagccagttattatttagccttatgtaaacagctctgtaattgtttttgtacctctttacagaagcctaaaggaggaaaacttgactacaatattaaacgaatcacattygctgttttctttttaaccaaaaagactaattgagatggaaaaaaaaaatcaaactaaaaaccagccctacaaaagaagcctctcttctcaactcctcctcttcaaaagcaaggagaccacttacaaacataaagygaagattatgtgctaatgttggcaggatttgagaccttacagcttgtgaaactatctgaatttggtctccttggctgggcagggcaagtgtattctgtaacacaccttcctttcataattgttcagatccagggatattttcagagctctctgcaactcccttcctttgtacggaaaccagcacaccagaagatgggatgcagagcagaactgggagctgggaggcactcctacatcttgcaggatggaaattaaatattaacatacatctcctactacctgcctggaattcacacagtt

SEQ ID NO: 11119 - DNA, 600 bp, Chicken  19866894213556_1
agactgtggggagctgctcaggaggctgtctggggtatttaaaagagcattataaagtggggtctaagtgtccgtcagtaataatgtctgtaagaaagggtaaaaaacaaaccctaatgggaacctctctgcacgcagtggttacagctccaggcgctaaagcatacggcaatgccaagatttgggctgcaaaacgcaccgaagtaggagtcctctccagtggaacatatgagatatggtgtcctctgctcataccttctgtacaatcgctttctctgcgaagtcccttcaactctggcmgtgatggaaatcasatggttccatcccctttgctctctggaaatgctcagcagcacccaaaggcgcccacattgagccacggcagcgctctctctttgggcttgctgcttgagaatgggacacctccatgggacactcccacgtattccagattgggtgttttgacgcttcataacttacaaagcagttacaaggaaaggtgggtaatctttttgctgaatgatgaaaacatcaaggaagccttaggatatcaggagatacgtacgtgctcaaataatggagtctgactacagctgctct

SEQ ID NO: 11120 - DNA, 600 bp, Chicken  19866894213556_2
tgctcaggaggctgtctggggtatttaaaagagcattataaagtggggtctaagtgtccgtcagtaataatgtctgtaagaaagggtaaaaaacaaaccctaatgggaacctctctgcacgcagtggttacagctccaggcgctaaagcatacggcaatgccaagatttgggctgcaaaacgcaccgaagtaggagtcctctccagtggaacatatgagatatggtgtcctctgctcataccttctgtacaatcgctttctctgcgaagtcccttcaactctggcmgtgatggaaatcasatggttccatcccctttgctctctggaaatgctcagcagcacccaaaggcgcccacattgagccacggcagcgctctctctttgggcttgctgcttgagaatgggacacctccatgggacactcccacgtattccagattgggtgttttgacgcttcataacttacaaagcagttacaaggaaaggtgggtaatctttttgctgaatgatgaaaacatcaaggaagccttaggatatcaggagatacgtacgtgctcaaataatggagtctgactacagctgctctttgacaatagtttc

SEQ ID NO: 11121 - DNA, 600 bp, Chicken  19866894213557_1
acagaaagctttgggaaggaataaaaatgatggtcgtatgccaaagcagaacacagaagttttttgcatttggaaagaatatcataaagaccatcagaaacttccttatcagccatgtgaatctgcttcaaagccattacgctttgctaattcaaggaaaagctggacactaagactttgtgaatggaatgaagctgactgaaagaagttagtgttaaagcactgaaaggcacgtttgttgtcaaccacctccaagatctgcaagaaggattcctaccatccttaagagtctctaacatraaaacatcttatgaactggcctcaagtgaggtctttaaaacaaagttttctagcctgtaatatacaacaggaccaactacatttgaagccaaaaggtatatacctttgttttcatcttggtagtgaaattgaggcagtgtcacaagcaaggctaccagcattaattaaagatcagataaaacttgtctaattggatgtgggacataatttcttctcaaaaatgtcaacttcagccattacccactgcaacattatacacaatagtctctaattctttgaggggaaaaaaaacacaacacc

SEQ ID NO: 11122 - DNA, 600 bp, Chicken  19866894213560_1
tatctaacctaaacctcccctgtctcagtttaaaaccattcccctttgtcctatcattatccagcctcgtaaacagctctcccccctcctgtttatatgctctgcctgactttgctcaaggaactgtggggaagttctggaagaagcagcaattcttacctactttctatctgctgcaaatttcttgggtggccactacttgttcattgatgaaaaagacaagcactgcatggatgcatcctcctctgaatttacatttctcatctgttattggataaacagcagagagcagtaatgcawctttcttaattagcattgccttccttttgcatgtattgctaggtattcccatctcatgcttggagtacagaatccttmtgtgtattaccttgcttaaaacactgttaggaaatactttgtgatcaaatgtctccagtgctagcatgaagtgcagaacagtgtttgcattgtggtgttcctttgcataatgtgtagcaaggtgtttgagaaaacatttccttctcatcaacaccgtagcagtagtcagtgggtaaaagcagatgccacttccatcagcaacaaatacttttttttrtcatt

SEQ ID NO: 11123 - DNA, 600 bp, Chicken  19866894213560_2
ctcccccctcctgtttatatgctctgcctgactttgctcaaggaactgtggggaagttctggaagaagcagcaattcttacctactttctatctgctgcaaatttcttgggtggccactacttgttcattgatgaaaaagacaagcactgcatggatgcatcctcctctgaatttacatttctcatctgttattggataaacagcagagagcagtaatgcawctttcttaattagcattgccttccttttgcatgtattgctaggtattcccatctcatgcttggagtacagaatccttmtgtgtattaccttgcttaaaacactgttaggaaatactttgtgatcaaatgtctccagtgctagcatgaagtgcagaacagtgtttgcattgtggtgttcctttgcataatgtgtagcaaggtgtttgagaaaacatttccttctcatcaacaccgtagcagtagtcagtgggtaaaagcagatgccacttccatcagcaacaaatacttttttttrtcattaaaggaacttagaattagagccagattgtttccacagctcttctaccttgctgtttggagggagcaaccctgcttctt

SEQ ID NO: 11124 - DNA, 534 bp, Chicken  19866894213560_3
tgcawctttcttaattagcattgccttccttttgcatgtattgctaggtattcccatctcatgcttggagtacagaatccttmtgtgtattaccttgcttaaaacactgttaggaaatactttgtgatcaaatgtctccagtgctagcatgaagtgcagaacagtgtttgcattgtggtgttcctttgcataatgtgtagcaaggtgtttgagaaaacatttccttctcatcaacaccgtagcagtagtcagtgggtaaaagcagatgccacttccatcagcaacaaatacttttttttrtcattaaaggaacttagaattagagccagattgtttccacagctcttctaccttgctgtttggagggagcaaccctgcttcttttttgagggcagaaacccttattaactccgccttgaattctaagttgttgattgagggaggagtccacttctcatactggctggggggttttacatcctttaaatgatgtctgctaacagagaacaatagagggacaatatctttccctgg

SEQ ID NO: 11125 - DNA, 600 bp, Chicken  19866894213566_1
aagaaatgaagaaaactaatacacatctaccaacagcgaaactttctataataagaaataaatactttcttagtgtatagtatgcaagtcaccagacttagtgaatagtatgcaagtcactagatttctacagcaattgttttagctgaaaaatcttgtatttgcactgttttttgtttgtttgtttgtttgtttaactctaaaggacatttctgtatgaaagctctgaaagcatttgattacaggcagtttatgaaaatggaagttttatgatcatttcagcaaaattgttgtgaatarctgcacatcagcaacrtgacaaaaaacttctcattgtacctataaggtataagatggctgctaccacaaatcaaataataaatttctagaagagtaatgcttccagggataatactggtgatactttttaagtctgtaatgctatctagataaaatgccctagatccagtaacaaataatttccattccgatctttttcttcatcaaaaatcagtcagtttcccaaagctgtaaatgaatgaaagatttatttaaaataataattattctctatttgcattctttgaaagacaaattatt

SEQ ID NO: 11126 - DNA, 600 bp, Chicken  19866894213566_2
taatacacatctaccaacagcgaaactttctataataagaaataaatactttcttagtgtatagtatgcaagtcaccagacttagtgaatagtatgcaagtcactagatttctacagcaattgttttagctgaaaaatcttgtatttgcactgttttttgtttgtttgtttgtttgtttaactctaaaggacatttctgtatgaaagctctgaaagcatttgattacaggcagtttatgaaaatggaagttttatgatcatttcagcaaaattgttgtgaatarctgcacatcagcaacrtgacaaaaaacttctcattgtacctataaggtataagatggctgctaccacaaatcaaataataaatttctagaagagtaatgcttccagggataatactggtgatactttttaagtctgtaatgctatctagataaaatgccctagatccagtaacaaataatttccattccgatctttttcttcatcaaaaatcagtcagtttcccaaagctgtaaatgaatgaaagatttatttaaaataataattattctctatttgcattctttgaaagacaaattattgtaaatgtgagaaaat

SEQ ID NO: 11127 - DNA, 382 bp, Chicken  19866894213567_1
cataatgaggtaattaaacagcaatgttcctctgaggtaagagaagggtattaagagatcccctcagacccactgaaatgtttcttcttctagatgggattagaaaatgagataaagcagtagtacaaatgctgtttgtacaattgctgtttctgaggccctctctaagatttgacccagtcagatcaatgctctggatacagaacagttcaccactctctgctttatcctagaatgactgcaggcaaacacagctgatccttaagcacaaatcagagcaccaaaacccagaacggccakcaggcaactgggatctcctgcagaaccccagtagggtcagaccagcccctgtgccaaggagagcatcaggctctcaacacaa

SEQ ID NO: 11128 - DNA, 600 bp, Chicken  19866894213569_1
attagtcaaccaatggtcaaccactggtcaatcgttggtcaattaatcaactgttgctcaaccactgatcaattattagtcaaccactggtcaatcattactcaactgttggtcaaccactggccaaccattgcccaccgggacccccaggtccttctggcagagctccttcccagcacctgagccccaacctctactggtccatgcagttgctcctccctgggcacaggaccctgcactgcccacgctgaagcccacctcacccatccctcggtggtcccctctacagctggatggcarcacagccttctgggacggcagcccctcyccccatccccagtttggcaatgcagcaccggcacgcagctcrgcacagctgcaggcacgacacgtgggggcacgacgggctcgtaaagcacggtgcagaacagaaagcatctgggcagcagtttcacaggagatctcgttacgagtcccacgctgctgctgctgctgcatgcaccgagcctcactttttccaccccacttaacaccgctgcacagaagaacaccgtcacgctcctggagctacggaggaaaggggaagggagaagcagggct

SEQ ID NO: 11129 - DNA, 588 bp, Chicken  19866894213569_2
caatcgttggtcaattaatcaactgttgctcaaccactgatcaattattagtcaaccactggtcaatcattactcaactgttggtcaaccactggccaaccattgcccaccgggacccccaggtccttctggcagagctccttcccagcacctgagccccaacctctactggtccatgcagttgctcctccctgggcacaggaccctgcactgcccacgctgaagcccacctcacccatccctcggtggtcccctctacagctggatggcarcacagccttctgggacggcagcccctcyccccatccccagtttggcaatgcagcaccggcacgcagctcrgcacagctgcaggcacgacacgtgggggcacgacgggctcgtaaagcacggtgcagaacagaaagcatctgggcagcagtttcacaggagatctcgttacgagtcccacgctgctgctgctgctgcatgcaccgagcctcactttttccaccccacttaacaccgctgcacagaagaacaccgtcacgctcctggagctacggaggaaaggggaagggagaagcagggctgcaaattccagccgtg

SEQ ID NO: 11130 - DNA, 546 bp, Chicken  19866894213569_3
aattattagtcaaccactggtcaatcattactcaactgttggtcaaccactggccaaccattgcccaccgggacccccaggtccttctggcagagctccttcccagcacctgagccccaacctctactggtccatgcagttgctcctccctgggcacaggaccctgcactgcccacgctgaagcccacctcacccatccctcggtggtcccctctacagctggatggcarcacagccttctgggacggcagcccctcyccccatccccagtttggcaatgcagcaccggcacgcagctcrgcacagctgcaggcacgacacgtgggggcacgacgggctcgtaaagcacggtgcagaacagaaagcatctgggcagcagtttcacaggagatctcgttacgagtcccacgctgctgctgctgctgcatgcaccgagcctcactttttccaccccacttaacaccgctgcacagaagaacaccgtcacgctcctggagctacggaggaaaggggaagggagaagcagggctgcaaattccagccgtg

SEQ ID NO: 11131 - DNA, 600 bp, Chicken  19866894213574_1
atatttgtgtgtgtgtgtgtgtgtgtgtgtaacttgcaaaagcacgtatgtgcttaaggtgacttctgtgctcctaaggacagtgtaaatgcactgttcatcttgctgtggaaggccttcatttcttcctgctgaatctgtattgctcagggcagtttatctcacttaggctatttcaaggtggggttagggcactccctcacccacacaatgtttagttcacattaagatgaatctgcccttaaaaagaaagtgtctgctctgacattttgtatgtttttagaacttcagaaataattwaaaaagagcaatatctaggacaaaattgtgtcattaatcaaagaattgcaggggttggaagggaactctggagattgttgagtcctgctaaagcaggttccctacagcaagtcacacaggaaagtgtccaggcagrttttgaacatctccagagaaagagactccacagcctctctgggcaacccattccaaagtgccccaaaggaaagaagctctttctcatgttcatatggaacttccggtgttccagttagtgcctgttgccccttgtcctgtcacactgggcaccaccaaatacag

SEQ ID NO: 11132 - DNA, 600 bp, Chicken  19866894213574_2
tctgtattgctcagggcagtttatctcacttaggctatttcaaggtggggttagggcactccctcacccacacaatgtttagttcacattaagatgaatctgcccttaaaaagaaagtgtctgctctgacattttgtatgtttttagaacttcagaaataattwaaaaagagcaatatctaggacaaaattgtgtcattaatcaaagaattgcaggggttggaagggaactctggagattgttgagtcctgctaaagcaggttccctacagcaagtcacacaggaaagtgtccaggcagrttttgaacatctccagagaaagagactccacagcctctctgggcaacccattccaaagtgccccaaaggaaagaagctctttctcatgttcatatggaacttccggtgttccagttagtgcctgttgccccttgtcctgtcacactgggcaccaccaaatacagcctggccccatccacttgacgcccatccattagatatttataagcattgatcagatctcccctcagtcctcttttctccaggctgaagagtcccaggtctctcagcttttccttgtgagggagatgctattttttg

SEQ ID NO: 11133 - DNA, 600 bp, Chicken  19866894213578_1
cagactgattcaggccagagaaagctgtgtcagtattctcacagatttgagagaattcagcaaaacctagaatgatgctaaataatcccacaaagtcatccagaaacaaaaactaaaaggcatgaagaggccatcagctgaagaggtgaaattttagaatactcatcttcactagagttgccagctttaaattccaccccttactcccccaacagtacagagatacactgtgaagccttctcagagaataccttctactaaggcacagaaaagctaaacaagtgattacagcctttgctyagctatccaaagcaaggatacacaaagttctgtggcaaaacaaactgtccacaaaagattcctaacattccttttccattacaataatttggtcttcaagatgttccacaacttgagctgtagctatactgcagtgcaaaccaactaccagagaaagtgtgctcctacagttaaaatgaattagctttacaactaagcagaaagggaagattgaacaaagaatgctaggtcttgctgttccatttcctctgttgaatgttttgtaaagttcatgtttcaggactttttaagccaagtaaa

SEQ ID NO: 11134 - DNA, 600 bp, Chicken  19866894213584_1
attctgaagcattacaacgaaagagtcggggtggaaaaagtttcatcttcagcaaattggcacgcatcagaggacaaagatttctatcacggattgctctgcgtggctttgtgtgcagcaacgccttaagttacagctctgccacacagctccatgaattcagcccctcctaagcccagaataactggcagtgctgcctgtcccaccggtacccatcagagatgtcaggtgctgggaaggacttcagcacgctatggatgcttgcaggccgggcacacccagcactgctctgcaagaccygctcygggcatgggttggcactaatggacctccagtggtcccttccaaccccgagtaccctatggttctgaaaaggaaaaggagcacaggaacacacacagcccctcaccgccaccaccaggcagctctaccagctgttctacacatgggctctgaaacccctccccagactgatggagcacatacttcacttctttgcttaccagaactctacagaaacagagccccatggccacagcctccctgccatggttcagcctgcatcacagcgacagcagaagcgaggactgaatgtatccc

SEQ ID NO: 11135 - DNA, 600 bp, Chicken  19866894213584_2
gaagcattacaacgaaagagtcggggtggaaaaagtttcatcttcagcaaattggcacgcatcagaggacaaagatttctatcacggattgctctgcgtggctttgtgtgcagcaacgccttaagttacagctctgccacacagctccatgaattcagcccctcctaagcccagaataactggcagtgctgcctgtcccaccggtacccatcagagatgtcaggtgctgggaaggacttcagcacgctatggatgcttgcaggccgggcacacccagcactgctctgcaagaccygctcygggcatgggttggcactaatggacctccagtggtcccttccaaccccgagtaccctatggttctgaaaaggaaaaggagcacaggaacacacacagcccctcaccgccaccaccaggcagctctaccagctgttctacacatgggctctgaaacccctccccagactgatggagcacatacttcacttctttgcttaccagaactctacagaaacagagccccatggccacagcctccctgccatggttcagcctgcatcacagcgacagcagaagcgaggactgaatgtatccctccca

SEQ ID NO: 11136 - DNA, 600 bp, Chicken  19866894213586_1
taccatatacatcttttaagaatattctaacagacagtaattttttctatttctccttcaagcagaaatgtaaagtaaaatgatacacatcatacagtctcctaaataacataaaaactgtgtggtgaacttcagtaacagttattaaaataaattaaaagaaataaggttacgtttgattctcaaaaccattgtgacatgtggaaataatccatggacttttccttaagtggcccctagtgttttacattaagcaggtgttccaacaatgtccttcccaagtttcagaattaaccccaygcaygatagaagaaaatgacagtacgatggccatctggccataatctagaaaatgtcagtactaaaaaggttaaagggttaatgttgcatactcttgtgctatatgcatgcagtgttcgtgcaaygctattcagaggctaaacctgtctccaactcattattttaaataaagcctgtagtacttgaacctgtctacttcaagccttgattaatgttgttaactgctattctcgctctctcctcgtagctgccagatggaatgctgaagattattctgcatcacttaattgaagtttataa

SEQ ID NO: 11137 - DNA, 600 bp, Chicken  19866894213586_2
atatacatcttttaagaatattctaacagacagtaattttttctatttctccttcaagcagaaatgtaaagtaaaatgatacacatcatacagtctcctaaataacataaaaactgtgtggtgaacttcagtaacagttattaaaataaattaaaagaaataaggttacgtttgattctcaaaaccattgtgacatgtggaaataatccatggacttttccttaagtggcccctagtgttttacattaagcaggtgttccaacaatgtccttcccaagtttcagaattaaccccaygcaygatagaagaaaatgacagtacgatggccatctggccataatctagaaaatgtcagtactaaaaaggttaaagggttaatgttgcatactcttgtgctatatgcatgcagtgttcgtgcaaygctattcagaggctaaacctgtctccaactcattattttaaataaagcctgtagtacttgaacctgtctacttcaagccttgattaatgttgttaactgctattctcgctctctcctcgtagctgccagatggaatgctgaagattattctgcatcacttaattgaagtttataattaa

SEQ ID NO: 11138 - DNA, 600 bp, Chicken  19866894213586_3
tgaacttcagtaacagttattaaaataaattaaaagaaataaggttacgtttgattctcaaaaccattgtgacatgtggaaataatccatggacttttccttaagtggcccctagtgttttacattaagcaggtgttccaacaatgtccttcccaagtttcagaattaaccccaygcaygatagaagaaaatgacagtacgatggccatctggccataatctagaaaatgtcagtactaaaaaggttaaagggttaatgttgcatactcttgtgctatatgcatgcagtgttcgtgcaaygctattcagaggctaaacctgtctccaactcattattttaaataaagcctgtagtacttgaacctgtctacttcaagccttgattaatgttgttaactgctattctcgctctctcctcgtagctgccagatggaatgctgaagattattctgcatcacttaattgaagtttataattaaaaaatggcgagtgctgtggactacgttttgcccctttgatccctacccagacaaacaagcttctctaatcagtaattcccccatgtcctcttttagagactgagatcatatgcctcttatg

SEQ ID NO: 11139 - DNA, 599 bp, Chicken  19866894213597_1
  misc_feature (1)..(34): n is any nucleotide
nnnnnnnnnnnnnnnnnnnnnnnnnnnnnnnnnnggttaatttttaggagtgtaactgtgcctttgggtcatttaaaggtggtgtatgggaacgagaacaaaaagtgtcatatttatctgctgtatggcttaactctgattactcgttaaccagtggtgacaaatctaaatacgttaagtacctgtgattgtacctgtgatttgaattactgcattaccattgaaatcaacaaatatatgaagaaaatattcagtgatacgttagataaaactctgttgatgacatagggccatgatatygtaagccrgttcagttgaaaggtttaacaagttctctggcttccygtgccaaggtttttacacagcagtgtgtcacagcggcgatttgagaatgagatggaatattgatgagatggataatcccatccagttgtacagtgtgcctgcttgctccctgtcagttgggtgctgccctttggcttttctttccttgggtaatgacgcacagcaggtgcctcctgaaagagaagctgtggtttgtgtgtttagattcattgctccggagggggaagccctcaggtctggttgtgtcaccgagt

SEQ ID NO: 11140 - DNA, 599 bp, Chicken  19866894213597_2
  misc_feature (1)..(26): n is any nucleotide
nnnnnnnnnnnnnnnnnnnnnnnnnnggttaatttttaggagtgtaactgtgcctttgggtcatttaaaggtggtgtatgggaacgagaacaaaaagtgtcatatttatctgctgtatggcttaactctgattactcgttaaccagtggtgacaaatctaaatacgttaagtacctgtgattgtacctgtgatttgaattactgcattaccattgaaatcaacaaatatatgaagaaaatattcagtgatacgttagataaaactctgttgatgacatagggccatgatatygtaagccrgttcagttgaaaggtttaacaagttctctggcttccygtgccaaggtttttacacagcagtgtgtcacagcggcgatttgagaatgagatggaatattgatgagatggataatcccatccagttgtacagtgtgcctgcttgctccctgtcagttgggtgctgccctttggcttttctttccttgggtaatgacgcacagcaggtgcctcctgaaagagaagctgtggtttgtgtgtttagattcattgctccggagggggaagccctcaggtctggttgtgtcaccgagtccttccca

SEQ ID NO: 11141 - DNA, 600 bp, Chicken  19866894213597_3
aggagtgtaactgtgcctttgggtcatttaaaggtggtgtatgggaacgagaacaaaaagtgtcatatttatctgctgtatggcttaactctgattactcgttaaccagtggtgacaaatctaaatacgttaagtacctgtgattgtacctgtgatttgaattactgcattaccattgaaatcaacaaatatatgaagaaaatattcagtgatacgttagataaaactctgttgatgacatagggccatgatatygtaagccrgttcagttgaaaggtttaacaagttctctggcttccygtgccaaggtttttacacagcagtgtgtcacagcggcgatttgagaatgagatggaatattgatgagatggataatcccatccagttgtacagtgtgcctgcttgctccctgtcagttgggtgctgccctttggcttttctttccttgggtaatgacgcacagcaggtgcctcctgaaagagaagctgtggtttgtgtgtttagattcattgctccggagggggaagccctcaggtctggttgtgtcaccgagtccttcccactaagaacaaagatgcagcagctgatggcaaagcctga

SEQ ID NO: 11142 - DNA, 600 bp, Chicken  19866894213603_1
taggatctcgtggtatcatacaaggtctacatcacacatttccttgcagtttctccataaacactgagagaagactgctggtgaaaataccttatctttcagtaactgaattattgaagtgtctctaacctggatcacataggctgaaaaccaagtccagtgtgaacaaacaacaaggaaagaaagcagagctgaaacacaatacaacattagaacctacccatttgctgctgattgttacatgccacattggatatagatgaagtacaaaacccacaagaaataagagctcaggctgtscagtcttcctaattatggtgcttgttagccatattcattcaaacacatccaacrtttttagccctacatttaaacctgagctacgctgaatacaacaagctgcaaataactggctccgtgtgcagttccatgtgtaccttcatttcaagagatgaatcaccttgcagcaacgtccattcatactgcacaattccacggtcgtctgaactttcgcgaccatccaaaatcacccagtcgacaggagactgcagcacaagatcttgtcctgccttgcacactggaggctcatcaaattcttct

SEQ ID NO: 11143 - DNA, 600 bp, Chicken  19866894213603_2
ccataaacactgagagaagactgctggtgaaaataccttatctttcagtaactgaattattgaagtgtctctaacctggatcacataggctgaaaaccaagtccagtgtgaacaaacaacaaggaaagaaagcagagctgaaacacaatacaacattagaacctacccatttgctgctgattgttacatgccacattggatatagatgaagtacaaaacccacaagaaataagagctcaggctgtscagtcttcctaattatggtgcttgttagccatattcattcaaacacatccaacrtttttagccctacatttaaacctgagctacgctgaatacaacaagctgcaaataactggctccgtgtgcagttccatgtgtaccttcatttcaagagatgaatcaccttgcagcaacgtccattcatactgcacaattccacggtcgtctgaactttcgcgaccatccaaaatcacccagtcgacaggagactgcagcacaagatcttgtcctgccttgcacactggaggctcatcaaattcttcttcttcaaatgaaaagaaagaaagagagaggcttggtcattcatcagagggggtt

SEQ ID NO: 11144 - DNA, 599 bp, Chicken  19866894213614_1
  misc_feature (1)..(42): n is any nucleotide
nnnnnnnnnnnnnnnnnnnnnnnnnnnnnnnnnnnnnnnnnnggaggtttcgaaatcggcactgctgagtatgaactttcagctttttccagcttggctggatacaactggtttggttttaaatgtttcagtgaattaatgagttaggtcgttaatgcaaaacactcattctgcgcagtgccaaggtccccagttagaagattaattcggtgaccttttgcaaacctcccctagaaacaaggaggagaaaaccagcccgcagcaccagcagccatccgcaccggggacacgtcggatggygcagccctgctgcgggcagctctgccgaagggtaaatgctcacttagagggaaggaaaaaaaaaaaaaagatcagcaccaaaatagaagtaaaataacagttttctcaacgctttctgtgcctgctaggcaggcagacgcgctccccaggtcagggacaaagttgatgtttctgtctcatgcggagccaagcacaatattggcacttcaaacaacagcggcttgtttttcagctgaaacactgcgggccccacttgatatcataagaaaaagcaaattaaaggaagaagaggagttgac

SEQ ID NO: 11145 - DNA, 600 bp, Chicken  19866894213631_1
tgcaagtaacatgatttttaaaagccacgattatatttttgatctatgcaaatagatattatataattatatgagctattgagaatagaataaaataaaggtattattaatttctaatacctgctctgtcttgtttccatagaacagatcaaactgaaatatcctttcagccttgacattgtaattttagcacagcatcagccagtgctgatgcttccttactatccctcgttaactaaaattctcacaagtcattcgctgtaaggaactttatatgccaaagaggcctaaaaattaagytttgcttaaacaaaacttttatgtatctatgagaacctaaattaccctcaagtttggtaggcttgactggttttaagtaccttgaatctgatgaactttttcttccatgaatggacaccagataggtaaatttgtttgagagcctcatgactcattcgcaagtcaatcccatctggagttactgtaaattgaaatgctactgcttgatgagcttctgccatttttggagagagttctgttaaaaaaaagacacaaaaaaataaattagactctgtacaaaggtactagaatctagtctgg

SEQ ID NO: 11146 - DNA, 600 bp, Chicken  19866894213631_2
tttggtaggcttgactggttttaagtaccttgaatctgatgaactttttcttccatgaatggacaccagataggtaaatttgtttgagagcctcatgactcattcgcaagtcaatcccatctggagttactgtaaattgaaatgctactgcttgatgagcttctgccatttttggagagagttctgttaaaaaaaagacacaaaaaaataaattagactctgtacaaaggtactagaatctagtctggtataaagcataacataataattccaggggagattcaggtaatacttcttctyggagagagtggtcaggcattggaacgggctgcccagagaggtggtggagtcagccatcgtggaggtgttcaagaaacatttagatgttgcactgagggacatgttttagtgaggaactattggtgataggtggacggttggactggatgatcttggaggtcttttgcaaccttggtgactgcgattctgtgataatcagcaccacttgaaccagggcagcactgacatttttctctatgtgtagaagtacaactgcttcatgccttttgcatttcttttgcaaatctcaagtttagactt

SEQ ID NO: 11147 - DNA, 599 bp, Chicken  19866894213635_1
  misc_feature (1)..(43): n is any nucleotide
nnnnnnnnnnnnnnnnnnnnnnnnnnnnnnnnnnnnnnnnnnnggcagagtggagagggacattccccctcccttgccctgacttcttaaaaagccattcaaagaagaactgcccaccagaaacggggtctgtgtggttttgctgcagacatccttcctctaaagattgctcaaattattgtagcttctggcatgattaaaattctgatgagagcagtgggctggattgtgcgtgagtttgtttgctgcagggagcgcagcagcatgcacagcttattcttaactgacagtaacagagcrggagggaatcaaaggacttcaggagacattgatcagggagacatttgagatagagaaaggtgtgggggaatgtcctcagaactgtggcattygtgcaytgtattaaccataaattacacaaagcagcttgccaagaacttctgactgcacttctcccaggtctctgcattacaattgtacctcayagcccatatagcsrtacactattccacgctcctgtttttcagcctttctgttgcytgcatcctccgcagcctaaatcctgggtcctcctgcagatcaggcaggtgtcagtgtga

SEQ ID NO: 11148 - DNA, 600 bp, Chicken  19866894213635_2
agccattcaaagaagaactgcccaccagaaacggggtctgtgtggttttgctgcagacatccttcctctaaagattgctcaaattattgtagcttctggcatgattaaaattctgatgagagcagtgggctggattgtgcgtgagtttgtttgctgcagggagcgcagcagcatgcacagcttattcttaactgacagtaacagagcrggagggaatcaaaggacttcaggagacattgatcagggagacatttgagatagagaaaggtgtgggggaatgtcctcagaactgtggcattygtgcaytgtattaaccataaattacacaaagcagcttgccaagaacttctgactgcacttctcccaggtctctgcattacaattgtacctcayagcccatatagcsrtacactattccacgctcctgtttttcagcctttctgttgcytgcatcctccgcagcctaaatcctgggtcctcctgcagatcaggcaggtgtcagtgtgagctggtgccagccacgcacactgccagaaggtaggctgcctgtagtctcaccgggtggatgtcctccctgctaacctttctgccactcggtct

SEQ ID NO: 11149 - DNA, 600 bp, Chicken  19866894213635_3
tcaaagaagaactgcccaccagaaacggggtctgtgtggttttgctgcagacatccttcctctaaagattgctcaaattattgtagcttctggcatgattaaaattctgatgagagcagtgggctggattgtgcgtgagtttgtttgctgcagggagcgcagcagcatgcacagcttattcttaactgacagtaacagagcrggagggaatcaaaggacttcaggagacattgatcagggagacatttgagatagagaaaggtgtgggggaatgtcctcagaactgtggcattygtgcaytgtattaaccataaattacacaaagcagcttgccaagaacttctgactgcacttctcccaggtctctgcattacaattgtacctcayagcccatatagcsrtacactattccacgctcctgtttttcagcctttctgttgcytgcatcctccgcagcctaaatcctgggtcctcctgcagatcaggcaggtgtcagtgtgagctggtgccagccacgcacactgccagaaggtaggctgcctgtagtctcaccgggtggatgtcctccctgctaacctttctgccactcggtctgtggct

SEQ ID NO: 11150 - DNA, 600 bp, Chicken  19866894213635_4
ttctggcatgattaaaattctgatgagagcagtgggctggattgtgcgtgagtttgtttgctgcagggagcgcagcagcatgcacagcttattcttaactgacagtaacagagcrggagggaatcaaaggacttcaggagacattgatcagggagacatttgagatagagaaaggtgtgggggaatgtcctcagaactgtggcattygtgcaytgtattaaccataaattacacaaagcagcttgccaagaacttctgactgcacttctcccaggtctctgcattacaattgtacctcayagcccatatagcsrtacactattccacgctcctgtttttcagcctttctgttgcytgcatcctccgcagcctaaatcctgggtcctcctgcagatcaggcaggtgtcagtgtgagctggtgccagccacgcacactgccagaaggtaggctgcctgtagtctcaccgggtggatgtcctccctgctaacctttctgccactcggtctgtggctttaacactgargaatctttgtccttttccataggagcaatagcacgacgcaatcaatatgatgatgatgcgatctacagcacgttcc

SEQ ID NO: 11151 - DNA, 600 bp, Chicken  19866894213635_5
aaaattctgatgagagcagtgggctggattgtgcgtgagtttgtttgctgcagggagcgcagcagcatgcacagcttattcttaactgacagtaacagagcrggagggaatcaaaggacttcaggagacattgatcagggagacatttgagatagagaaaggtgtgggggaatgtcctcagaactgtggcattygtgcaytgtattaaccataaattacacaaagcagcttgccaagaacttctgactgcacttctcccaggtctctgcattacaattgtacctcayagcccatatagcsrtacactattccacgctcctgtttttcagcctttctgttgcytgcatcctccgcagcctaaatcctgggtcctcctgcagatcaggcaggtgtcagtgtgagctggtgccagccacgcacactgccagaaggtaggctgcctgtagtctcaccgggtggatgtcctccctgctaacctttctgccactcggtctgtggctttaacactgargaatctttgtccttttccataggagcaatagcacgacgcaatcaatatgatgatgatgcgatctacagcacgttcctactcctgccgaa

SEQ ID NO: 11152 - DNA, 600 bp, Chicken  19866894213635_6
aaattctgatgagagcagtgggctggattgtgcgtgagtttgtttgctgcagggagcgcagcagcatgcacagcttattcttaactgacagtaacagagcrggagggaatcaaaggacttcaggagacattgatcagggagacatttgagatagagaaaggtgtgggggaatgtcctcagaactgtggcattygtgcaytgtattaaccataaattacacaaagcagcttgccaagaacttctgactgcacttctcccaggtctctgcattacaattgtacctcayagcccatatagcsrtacactattccacgctcctgtttttcagcctttctgttgcytgcatcctccgcagcctaaatcctgggtcctcctgcagatcaggcaggtgtcagtgtgagctggtgccagccacgcacactgccagaaggtaggctgcctgtagtctcaccgggtggatgtcctccctgctaacctttctgccactcggtctgtggctttaacactgargaatctttgtccttttccataggagcaatagcacgacgcaatcaatatgatgatgatgcgatctacagcacgttcctactcctgccgaag

SEQ ID NO: 11153 - DNA, 600 bp, Chicken  19866894213635_7
gtttgctgcagggagcgcagcagcatgcacagcttattcttaactgacagtaacagagcrggagggaatcaaaggacttcaggagacattgatcagggagacatttgagatagagaaaggtgtgggggaatgtcctcagaactgtggcattygtgcaytgtattaaccataaattacacaaagcagcttgccaagaacttctgactgcacttctcccaggtctctgcattacaattgtacctcayagcccatatagcsrtacactattccacgctcctgtttttcagcctttctgttgcytgcatcctccgcagcctaaatcctgggtcctcctgcagatcaggcaggtgtcagtgtgagctggtgccagccacgcacactgccagaaggtaggctgcctgtagtctcaccgggtggatgtcctccctgctaacctttctgccactcggtctgtggctttaacactgargaatctttgtccttttccataggagcaatagcacgacgcaatcaatatgatgatgatgcgatctacagcacgttcctactcctgccgaagccggtggaaagatttctgttgctgacagcaggtgtcagact

SEQ ID NO: 11154 - DNA, 600 bp, Chicken  19866894213635_8
taaattacacaaagcagcttgccaagaacttctgactgcacttctcccaggtctctgcattacaattgtacctcayagcccatatagcsrtacactattccacgctcctgtttttcagcctttctgttgcytgcatcctccgcagcctaaatcctgggtcctcctgcagatcaggcaggtgtcagtgtgagctggtgccagccacgcacactgccagaaggtaggctgcctgtagtctcaccgggtggatgtcctccctgctaacctttctgccactcggtctgtggctttaacactgargaatctttgtccttttccataggagcaatagcacgacgcaatcaatatgatgatgatgcgatctacagcacgttcctactcctgccgaagccggtggaaagatttctgttgctgacagcaggtgtcagactgacattcaagtcacaccatggagtcatcctgctgcagagcagcatcctggtaggaggaatcaaatgatcaaatctgatttgcaaagctgccttgcagcgtgcagcaaaagcctgaaatgtctcaatgaaagacaggacagaaaacagctatagatatagatgatcctgc

SEQ ID NO: 11155 - DNA, 600 bp, Chicken  19866894213637_1
cttctgatctgatcagcagactaatgtaatgacttgactaagaaccaggaatgtagatcttgccattatgtcagattcacttggattttaatgcaatattccctcaggaagactcatgatttaattaaaaacattatgtttcactgtccagcacagcacctgcagcatcacttagcgtgtaaatcttgattccctagagtgaattgcggctgacctttttgatttctatttagcaatcattttgcagataaaatttcaactgtttcctatttagctcataaatgcacttctgtggctccmgttcttgaaattttatgattatcaaagcagtatttcaaatttgcagtgatttctcccctcaaaatactgctgctacaacaaatacaaatagcagaaatcacagtcacctatgatttagaaagtgattcacttcaaggaatataaatgcttctgaacagagctgtatgaaacagcttgcagctgagttgaagcaatgttctcaaagaaattgttaccagtggcaatgtattctaacataaccttagatgatacagtattttctattctaagctttataatcaatagactgctttgtcccag

SEQ ID NO: 11156 - DNA, 600 bp, Chicken  19866894213641_1
ttagagaatataaacatatttatgatagcactcatcatgcagattatgtttcttacaatgtaagagttcagcattgtagttaaaagctatcacagtaactccctttcactcttctttctgccttttgtctttgctggaatgggattactcaaaagacactgacacacatccagtgagacaatccccaaaggcctcaaaaaaacaaaacgatccagttcagatgacaactgggcctttggcaaggaaaaactatcctgacaataaaaggcagtttgaccaagcttgatgttttatgaactrattctgaaggcagttgtacaaatctgcagtcccatgaatctcggtgtcccaaagagatactaataagtttatcaacaagtatttggtattatrgaaaagctctacaagaacattaacctatttgtcacttttataggaaagtaattaaaagaaattcatataacaacattaaatggtgtaaaagtgagagaaaaaggagaaatatgaagaaatgagcaaatcaagaggttcatggaaaagcagcaaataagctcagaacaaaagtgtactgagataagtyagacactaaagcaagttagg

SEQ ID NO: 11157 - DNA, 600 bp, Chicken  19866894213641_2
agtaactccctttcactcttctttctgccttttgtctttgctggaatgggattactcaaaagacactgacacacatccagtgagacaatccccaaaggcctcaaaaaaacaaaacgatccagttcagatgacaactgggcctttggcaaggaaaaactatcctgacaataaaaggcagtttgaccaagcttgatgttttatgaactrattctgaaggcagttgtacaaatctgcagtcccatgaatctcggtgtcccaaagagatactaataagtttatcaacaagtatttggtattatrgaaaagctctacaagaacattaacctatttgtcacttttataggaaagtaattaaaagaaattcatataacaacattaaatggtgtaaaagtgagagaaaaaggagaaatatgaagaaatgagcaaatcaagaggttcatggaaaagcagcaaataagctcagaacaaaagtgtactgagataagtyagacactaaagcaagttaggaaaggtaagatcaactttttttggtttgtaacttgctgcatgactttttattttctaggttcagaagattakaatatccccaggaggctggaa

SEQ ID NO: 11158 - DNA, 600 bp, Chicken  19866894213641_3
gcttgatgttttatgaactrattctgaaggcagttgtacaaatctgcagtcccatgaatctcggtgtcccaaagagatactaataagtttatcaacaagtatttggtattatrgaaaagctctacaagaacattaacctatttgtcacttttataggaaagtaattaaaagaaattcatataacaacattaaatggtgtaaaagtgagagaaaaaggagaaatatgaagaaatgagcaaatcaagaggttcatggaaaagcagcaaataagctcagaacaaaagtgtactgagataagtyagacactaaagcaagttaggaaaggtaagatcaactttttttggtttgtaacttgctgcatgactttttattttctaggttcagaagattakaatatccccaggaggctggaaatgaaggcagaggatgaatcgatgttgctggagtagaaacttgtgttgttccaggaagccctgaggccaagcactggagtggagtctggggaaaacaaaacctcagaacagyattgatctacaggagtacactcgtcatgccagcagtcattggcagcaggttcatagtgcttcctacgtggttatg

SEQ ID NO: 11159 - DNA, 531 bp, Chicken  19866894213641_4
caacaagtatttggtattatrgaaaagctctacaagaacattaacctatttgtcacttttataggaaagtaattaaaagaaattcatataacaacattaaatggtgtaaaagtgagagaaaaaggagaaatatgaagaaatgagcaaatcaagaggttcatggaaaagcagcaaataagctcagaacaaaagtgtactgagataagtyagacactaaagcaagttaggaaaggtaagatcaactttttttggtttgtaacttgctgcatgactttttattttctaggttcagaagattakaatatccccaggaggctggaaatgaaggcagaggatgaatcgatgttgctggagtagaaacttgtgttgttccaggaagccctgaggccaagcactggagtggagtctggggaaaacaaaacctcagaacagyattgatctacaggagtacactcgtcatgccagcagtcattggcagcaggttcatagtgcttcctacgtggttatgtctacagttaagggcagcagagt

SEQ ID NO: 11160 - DNA, 398 bp, Chicken  19866894213641_5
gaagaaatgagcaaatcaagaggttcatggaaaagcagcaaataagctcagaacaaaagtgtactgagataagtyagacactaaagcaagttaggaaaggtaagatcaactttttttggtttgtaacttgctgcatgactttttattttctaggttcagaagattakaatatccccaggaggctggaaatgaaggcagaggatgaatcgatgttgctggagtagaaacttgtgttgttccaggaagccctgaggccaagcactggagtggagtctggggaaaacaaaacctcagaacagyattgatctacaggagtacactcgtcatgccagcagtcattggcagcaggttcatagtgcttcctacgtggttatgtctacagttaagggcagcagagt

SEQ ID NO: 11161 - DNA, 600 bp, Chicken  19866894213643_1
actcgctacgcctcacttccccttgccccgccccgccccatctcgcctgccacgcctcacctcgctgcaccttgccccgcctcaccccaccccgcctagcctcgccccgccccgcctcgcctcgaacaaaactcgccctgtctcgccctgccctgcctcacctcccacgtctcgcctagctttgccccttcccgccacgctccacctcaccttgccttgccccacctcgcctgccacgcatcgctctgcctcaccctacctcgccccgtctctcccgcctcgcaatacatagacccaccycgccttgcccsgcctcacctggccacgcctagcctcgccccgcaccgccccgccccaccccgactagcttcccgtcgcctcgcctcgccccgcctcgtttccactcaccccgccccgcctcgcctcgcctgccacgcctttcctcgccttgcctcgccctgccacgctccaccccgcctcaccttgccccgcctcgcctcgccccacctcacttcccctcgccccaccccgctttgcctgccactactcgcctcgccccgccttgcccctcctcaccccgccatgcctagcctcgccccg

SEQ ID NO: 11162 - DNA, 592 bp, Chicken  19866894213643_2
ctcacttccccttgccccgccccgccccatctcgcctgccacgcctcacctcgctgcaccttgccccgcctcaccccaccccgcctagcctcgccccgccccgcctcgcctcgaacaaaactcgccctgtctcgccctgccctgcctcacctcccacgtctcgcctagctttgccccttcccgccacgctccacctcaccttgccttgccccacctcgcctgccacgcatcgctctgcctcaccctacctcgccccgtctctcccgcctcgcaatacatagacccaccycgccttgcccsgcctcacctggccacgcctagcctcgccccgcaccgccccgccccaccccgactagcttcccgtcgcctcgcctcgccccgcctcgtttccactcaccccgccccgcctcgcctcgcctgccacgcctttcctcgccttgcctcgccctgccacgctccaccccgcctcaccttgccccgcctcgcctcgccccacctcacttcccctcgccccaccccgctttgcctgccactactcgcctcgccccgccttgcccctcctcaccccgccatgcctagcctcgccccgcct

SEQ ID NO: 11163 - DNA, 599 bp, Chicken  19866894213667_1
  misc_feature (1)..(5): n is any nucleotide
nnnnntttacatttgaatctcaagttaggttccaccactggtacttttaatttttattagtatgcttgtcatactgttctattaacatacattttgtcatactgagaaaccatttcttatctaagaactgtagtattctacagtactcttggaaataaagggtacttcttcagcaagtatttcccagaatcacggaaccgcttgaattggaagagacctttgaagggacatttgaaatccaaatcccttgcattgaacagggacacctacagctagatcaagttactcagagccccatcyagcctgaccatgaatgtctccaggaatggggcatccaccacacctctgggcaacctgttcctrtgcctcaccacacttattgtaaaaaacttcttccttatatccagtctgaatctcctttcttctagtttggaaacatttccccttgtcccatcacaatagaccctgctaagaagtctgtccccttctttcttataagtcccctttatatactgaaaggccgctatcaggtctcaccagagccttcatttcttcaggctgcagccacagttctctcagcctgtccttgcaggggaggt

SEQ ID NO: 11164 - DNA, 600 bp, Chicken  19866894213667_2
gcttgtcatactgttctattaacatacattttgtcatactgagaaaccatttcttatctaagaactgtagtattctacagtactcttggaaataaagggtacttcttcagcaagtatttcccagaatcacggaaccgcttgaattggaagagacctttgaagggacatttgaaatccaaatcccttgcattgaacagggacacctacagctagatcaagttactcagagccccatcyagcctgaccatgaatgtctccaggaatggggcatccaccacacctctgggcaacctgttcctrtgcctcaccacacttattgtaaaaaacttcttccttatatccagtctgaatctcctttcttctagtttggaaacatttccccttgtcccatcacaatagaccctgctaagaagtctgtccccttctttcttataagtcccctttatatactgaaaggccgctatcaggtctcaccagagccttcatttcttcaggctgcagccacagttctctcagcctgtccttgcaggggaggtgttccaccccttggatcacttggccctcctctggatgcactccaacagatccatctttcttctg

SEQ ID NO: 11165 - DNA, 599 bp, Chicken  19866894213671_1
  misc_feature (1)..(89): n is any nucleotide
nnnnnnnnnnnnnnnnnnnnnnnnnnnnnnnnnnnnnnnnnnnnnnnnnnnnnnnnnnnnnnnnnnnnnnnnnnnnnnnnnnnnnnnnngggccatgtcagcatagttatcttcagcaactacaagtatgttcctgcaaggactgaaggacttgttagaaattcattcccactctctcaccattgcccagatgtcagtgaacgcagtggcattaagggccttaaggctttgcagaggagatagtgagaagttcctgagccaggagctccagtggggcaggcagggcctgcaggcggcatsatgtgtacagcagctctctctgcagaaccacttcggttctgctttggagggaaagttcaaggagaaagctgcccacctttgtgacaaccccagggtgtgatgttggggtcagacccagctgaacgctgcctgctgcaatccaatagcatagttcttgtttgcaaagcactcacatgcctgcagctggtttctgcccaagaatttgttatcctgaagtgtttgctgggtaatttggacctgattgcagtcccctcatgcagggagtgtacacagtggtcaagccatgagtatctcacttg

SEQ ID NO: 11166 - DNA, 600 bp, Chicken  19866894213674_1
cattttcctcctatatccattagcactgtttaaagtacatagatcttattctcccgtggatttgaccaatttatattctattttgcagaaagagtgtggaggctgaagacattaaattatttggcaaagaactggaagaatatttgaagaaaaatttttagcattctcttctaccctttacattcagacaaaggggtttatttgaattagagtaagatcatcggtaagagaagaactgtaaaataccttagtgcatagtacgggaatttgattgatgagatatgtggggaaaacctaccygtgcttctgtcagaagagtgtctaggaaccaggagggacatcatcaacaaaacagaagtgagctgacattgaaaagacagctgagaaggttgcagtcctccacagaaggcaaagattcctgtacagtttgggggacaacattttcattctttttaactatgctagaagttataggttttggcctaagacctaaggtgccactggccagtttttcaagagtatacacttatagatgcagaagtacttcagttcttacctcaaggtcagcggaaacaccagtggctgttagtttatcttgaa

SEQ ID NO: 11167 - DNA, 600 bp, Chicken  19866894213674_2
aagtgagctgacattgaaaagacagctgagaaggttgcagtcctccacagaaggcaaagattcctgtacagtttgggggacaacattttcattctttttaactatgctagaagttataggttttggcctaagacctaaggtgccactggccagtttttcaagagtatacacttatagatgcagaagtacttcagttcttacctcaaggtcagcggaaacaccagtggctgttagtttatcttgaatctctagacatcttctaaaaacctactcagacgttctgcgtactcatgtactcarttactaaaggaaaacagaaattcagcatccctgggcaaattaatgtaataggactgtgaaactgtggtctgcacacatgcacttattaaaaacaacttcacaacattactttaaaattatggctgtagttcagaaaagtactttaacacacgcttaaattccatttacatcgttgaaatttaaatgtgttcttaagtgctgttctctataggaaatgtcctttcagtgaaacctttcagttggagaagaaccatggacaataggagaagtaaaaatgcatctttgaaaataaaattgaca

SEQ ID NO: 11168 - DNA, 599 bp, Chicken  19866894213675_1
  misc_feature (1)..(152): n is any nucleotide
nnnnnnnnnnnnnnnnnnnnnnnnnnnnnnnnnnnnnnnnnnnnnnnnnnnnnnnnnnnnnnnnnnnnnnnnnnnnnnnnnnnnnnnnnnnnnnnnnnnnnnnnnnnnnnnnnnnnnnnnnnnnnnnnnnnnnnnnnnnnnnnnnnnnnnnntgcagaacttttattaaatggttttaacaatacatgccatacatgaaaagctggaaataaaagcagtgctggtttgccatctgtctcctaagcatgtaatagaccattcctttggctcttgacagtgagtgctgggtgatggggagaraagaggggtgaactggattaagagtggccttcaagtgaatgtggatatccctcgtgtttgttagtttaattactttttttcttttaatctctccctgctcattagactgctgctgccagcttaccatcttcagaacagaaagcatctctctttacttttgtgttcatgctatttatcctcgctttagggttatgttcacattttagggaagggaatgaatttcagtcttgagatacctgaagtttgtcctccttacgtggtcttgttgttgctaatttgagaaaagtttttactccgtt

SEQ ID NO: 11169 - DNA, 600 bp, Chicken  19866894213676_1
cagatcctggacaagctctgaaaaatgctgtgtgttttatgagcttaaggatgaaagccaaacctataaatcaaccatgtagaagatgcacttccattacttcgctctaataattaaaaaaaaaaaaaaaaaaaaaattatcaacactttaatcttcccaggtccagcacagctgtttgaatcagtttttgttggtctgatcctgctacttaaaatactacccagtgccaccaggaggtgtccgtgtgctatttactggttattttctggggcactttgattcataaattatttcgttgrggaggaggttctgtaacaacagaacagtggtagaattttatgtagaatctttatcattatgtagtgttggtgtttcactactgaacaaatgaggatgtcatggttgtgtttggagagagagcttaattccccggatgagaataattatagatgaaaaatacctagtaagtcatccatgttttctcccttacagcatgcactgttctctgaaatatactgtataatgcattgaggatatcattctgttgctagggaaatgattactgtaatgagatgttacacagtctacattttgactgc

SEQ ID NO: 11170 - DNA, 600 bp, Chicken  19866894213677_1
ctcctgcttctgctcagataagaaaatcgatccacaacaaggcaaatttagggtgggatgtgccaatgctggggggctgacaagagccaagtctgcttgtcccaaaatcctggataatctgcctttgcaacaagctctgtgctttatttggcactatggaaacatataaattatatggataaagcagtggggagcattgtgcttgcactaaagacagcatggggagaaatgaccaagtataactgtatcttcagaacagcctagttctatatccactgggaaggagctgacaggtatttwccagatacagaaatatctactagcctgaagctaagtcttgattgaaggccatatccttgcagagaagttataaagctaaatatatgattcttgggaagcaaataaatgaatgtgtgatttaggaaaaatatctgcctatagttattgtaaatgaaccaatatttacatgaattctagcagaaattcactgaatttctagaattccaggacaatattcattaaacacatcatgaataacagtgctgggatagctttctgcctcttcccaatctaagatgatcattaaaaagcattgaaggt

SEQ ID NO: 11171 - DNA, 600 bp, Chicken  19866894213680_1
ccagcacatcgttttattggtgttgccaaatatctgcagctgacttctttgcatgtttctttgtgtggtggttcagtccatcttcaagaagtagttgtgcttatctgtgaagccttattaaatgtggaagtttgtttttctgccttcccacaatggttcatacagtgccgaagcagctctgacagtggaactgcaaggacatttacaaatgctgtggctttttttgctgtggctacatctgttcctatgtgggttctgttttcttttattttggaagtgaaggaaacttcagccccttcrattttttttttcctttgcagcaaatcaagtcgggaattcataaaaataaatttgctgcgctcctgtttgtttcaaagttcagaattttttgctctgtaaatattggagatataatttgtgcaataacttggaattttaatttaatttcatattgtcacataagttatatttaaggggaagaggttttttaatttacagatcctttcccaggttgcattatctaagttgggttcatagttttggcaggttgtctgagcagtgttacaaacatgacatttggtaatatttgaggcttcttga

SEQ ID NO: 11172 - DNA, 600 bp, Chicken  19866894213681_1
ggaaagccctatttatattttaagctttacttggcataagtgactggactgaaattttgttctaatgagtttaagagaaattaatgacagatttacagtacttctgtatggtgctagtgtgaaaggctctggtctatgacagcgatctctaggcactaagaaaatataagagctttgagtcaccatggaactgtacagattataggtgtttgagcattcccttctttcactctccttctcagaagtgccctagaggcctcttgaagacatccagaatcaccgcaggctgtaagaaactgmtcctccacacctggagcaccccctggcctccttctgctctgaccatggtgccyacagggctgcttctcctatgtttcttgctcctctctcccacctgctgctgcccmgctttttcccctttcttcagtctgctctcaaagaagcacmcctggactcactcatggctcagctctggcagcagcaggtccctttggacacagctgtcatctgacataggacagctgctgcacctcaataccaaaacctggacacttaagygcagtacagaaacatagctaatctgtaacatattcaatggca

SEQ ID NO: 11173 - DNA, 600 bp, Chicken  19866894213681_2
attttgttctaatgagtttaagagaaattaatgacagatttacagtacttctgtatggtgctagtgtgaaaggctctggtctatgacagcgatctctaggcactaagaaaatataagagctttgagtcaccatggaactgtacagattataggtgtttgagcattcccttctttcactctccttctcagaagtgccctagaggcctcttgaagacatccagaatcaccgcaggctgtaagaaactgmtcctccacacctggagcaccccctggcctccttctgctctgaccatggtgccyacagggctgcttctcctatgtttcttgctcctctctcccacctgctgctgcccmgctttttcccctttcttcagtctgctctcaaagaagcacmcctggactcactcatggctcagctctggcagcagcaggtccctttggacacagctgtcatctgacataggacagctgctgcacctcaataccaaaacctggacacttaagygcagtacagaaacatagctaatctgtaacatattcaatggcaaaacaaaaagttatttcctaattgttaggtggatgatgggtggtcccttcaat

SEQ ID NO: 11174 - DNA, 600 bp, Chicken  19866894213681_3
atggtgctagtgtgaaaggctctggtctatgacagcgatctctaggcactaagaaaatataagagctttgagtcaccatggaactgtacagattataggtgtttgagcattcccttctttcactctccttctcagaagtgccctagaggcctcttgaagacatccagaatcaccgcaggctgtaagaaactgmtcctccacacctggagcaccccctggcctccttctgctctgaccatggtgccyacagggctgcttctcctatgtttcttgctcctctctcccacctgctgctgcccmgctttttcccctttcttcagtctgctctcaaagaagcacmcctggactcactcatggctcagctctggcagcagcaggtccctttggacacagctgtcatctgacataggacagctgctgcacctcaataccaaaacctggacacttaagygcagtacagaaacatagctaatctgtaacatattcaatggcaaaacaaaaagttatttcctaattgttaggtggatgatgggtggtcccttcaattaagtgactgatgaaaaactcacatgctagcaagaatgaatgagagaggcgtat

SEQ ID NO: 11175 - DNA, 600 bp, Chicken  19866894213681_4
tctaggcactaagaaaatataagagctttgagtcaccatggaactgtacagattataggtgtttgagcattcccttctttcactctccttctcagaagtgccctagaggcctcttgaagacatccagaatcaccgcaggctgtaagaaactgmtcctccacacctggagcaccccctggcctccttctgctctgaccatggtgccyacagggctgcttctcctatgtttcttgctcctctctcccacctgctgctgcccmgctttttcccctttcttcagtctgctctcaaagaagcacmcctggactcactcatggctcagctctggcagcagcaggtccctttggacacagctgtcatctgacataggacagctgctgcacctcaataccaaaacctggacacttaagygcagtacagaaacatagctaatctgtaacatattcaatggcaaaacaaaaagttatttcctaattgttaggtggatgatgggtggtcccttcaattaagtgactgatgaaaaactcacatgctagcaagaatgaatgagagaggcgtatctacccagagcagtgtaaaggtgctggatcagacgtgtta

SEQ ID NO: 11176 - DNA, 600 bp, Chicken  19866894213681_5
tcttgaagacatccagaatcaccgcaggctgtaagaaactgmtcctccacacctggagcaccccctggcctccttctgctctgaccatggtgccyacagggctgcttctcctatgtttcttgctcctctctcccacctgctgctgcccmgctttttcccctttcttcagtctgctctcaaagaagcacmcctggactcactcatggctcagctctggcagcagcaggtccctttggacacagctgtcatctgacataggacagctgctgcacctcaataccaaaacctggacacttaagygcagtacagaaacatagctaatctgtaacatattcaatggcaaaacaaaaagttatttcctaattgttaggtggatgatgggtggtcccttcaattaagtgactgatgaaaaactcacatgctagcaagaatgaatgagagaggcgtatctacccagagcagtgtaaaggtgctggatcagacgtgttagccttctgccctgctctatgttgtttactttgtcagaaattgtgtcatgkgttcaggaggtcaggatgagtcacttgggccttgtatggatcccagaactgatgaaactca

SEQ ID NO: 11177 - DNA, 600 bp, Chicken  19866894213681_6
cagctgtcatctgacataggacagctgctgcacctcaataccaaaacctggacacttaagygcagtacagaaacatagctaatctgtaacatattcaatggcaaaacaaaaagttatttcctaattgttaggtggatgatgggtggtcccttcaattaagtgactgatgaaaaactcacatgctagcaagaatgaatgagagaggcgtatctacccagagcagtgtaaaggtgctggatcagacgtgttagccttctgccctgctctatgttgtttactttgtcagaaattgtgtcatgkgttcaggaggtcaggatgagtcacttgggccttgtatggatcccagaactgatgaaactcattgggctgtatccttctccyattcatttccatagaatcaaaagaataactgtgctaagtagaaacagcactgaaatgatacaaaattgccacaattcccactgtctcacagtttttggggaacctccgcaagtgagtgccttctgcacatgtttgcagataacagatcttagaaatgtcaagtctagctggtttctgaaggcatttgttcaggattttctgatawatttttttaaagct

SEQ ID NO: 11178 - DNA, 600 bp, Chicken  19866894213681_7
atctgtaacatattcaatggcaaaacaaaaagttatttcctaattgttaggtggatgatgggtggtcccttcaattaagtgactgatgaaaaactcacatgctagcaagaatgaatgagagaggcgtatctacccagagcagtgtaaaggtgctggatcagacgtgttagccttctgccctgctctatgttgtttactttgtcagaaattgtgtcatgkgttcaggaggtcaggatgagtcacttgggccttgtatggatcccagaactgatgaaactcattgggctgtatccttctccyattcatttccatagaatcaaaagaataactgtgctaagtagaaacagcactgaaatgatacaaaattgccacaattcccactgtctcacagtttttggggaacctccgcaagtgagtgccttctgcacatgtttgcagataacagatcttagaaatgtcaagtctagctggtttctgaaggcatttgttcaggattttctgatawatttttttaaagctgttatttagacttagagagtttattcttcgatcttttcgaagaaagaagaaattcacattgctgtgaacrtctccgtgaat

SEQ ID NO: 11179 - DNA, 600 bp, Chicken  19866894213681_8
aaattgtgtcatgkgttcaggaggtcaggatgagtcacttgggccttgtatggatcccagaactgatgaaactcattgggctgtatccttctccyattcatttccatagaatcaaaagaataactgtgctaagtagaaacagcactgaaatgatacaaaattgccacaattcccactgtctcacagtttttggggaacctccgcaagtgagtgccttctgcacatgtttgcagataacagatcttagaaatgtcaagtctagctggtttctgaaggcatttgttcaggattttctgatawatttttttaaagctgttatttagacttagagagtttattcttcgatcttttcgaagaaagaagaaattcacattgctgtgaacrtctccgtgaatgaactgcagtggctgcaagcactgacttcattgctcagaggaatgatggctattgtgtatgagagagcctgctgtcttcagaaggttacagacacaaaagtaagatggacatggcagtactgcatagagagcatcaattaaaatgaaattgggagttgttaatacatctttctttcttgaaaagagggtcatgcaaggtgtgttt

SEQ ID NO: 11180 - DNA, 600 bp, Chicken  19866894213681_9
atccttctccyattcatttccatagaatcaaaagaataactgtgctaagtagaaacagcactgaaatgatacaaaattgccacaattcccactgtctcacagtttttggggaacctccgcaagtgagtgccttctgcacatgtttgcagataacagatcttagaaatgtcaagtctagctggtttctgaaggcatttgttcaggattttctgatawatttttttaaagctgttatttagacttagagagtttattcttcgatcttttcgaagaaagaagaaattcacattgctgtgaacrtctccgtgaatgaactgcagtggctgcaagcactgacttcattgctcagaggaatgatggctattgtgtatgagagagcctgctgtcttcagaaggttacagacacaaaagtaagatggacatggcagtactgcatagagagcatcaattaaaatgaaattgggagttgttaatacatctttctttcttgaaaagagggtcatgcaaggtgtgttttctgggggcataatagaccactctgtctctcatcagcaaagtttttgccaattaccctatctttaaccttccttttattatgga

SEQ ID NO: 11181 - DNA, 600 bp, Chicken  19866894213685_1
gaacaacacagagtatttctgagcactgggcttcatgtggatgctgacttaaacaaatcgggctgcacatctgaactgagaaaagcgaattgtttggggtatgaccctcacccccgtgtcaagcattccatttaactgaatgggtcatttcagtacaagggatgcctctccctcccggctttccagatggaagcgagcagaggagggatgctgggagcacagcctgccccagcccgtggcagctgctccatgctgatgtccttctccttcccagcattttgatccccacttgcaaccacwcagcagctccatggctccctgtgggctccctgcacaatgctaaccccagctccagcccgtgatgtctcacccatcaccatgctctgcaggacacagtgctgacctcatacctgttgatcatggagacgagcgcagcaaagagctcttcatagagacctgaagccatcccctccacgcactccacacctgtcatcttctgccctgcagagagaggagcaaagtcactgctcccagctcctgcctgcgcacagccacctgtgtgcccgcagcccctccagtgccccatgctttgtgtgtgtg

SEQ ID NO: 11182 - DNA, 600 bp, Chicken  19866894213686_1
gagcaagtcctgaagtgtttgtataatggtttcttgggtggactgcactcattcatccagaagagacaatttcagttcttcattaaacatatagtaaggataatttgcatgtcaacgccgttaactatttcagcagtatggaaaagaaagtcatggatctgctcaattaactgagaaatgtctcacttttctgtgcctaccgagaaagaaatatagtagaatttgaaacacattcaaggcaaatcaagacacctagacaagcacaggagtaacacaacctactgccttttcacgactcayrtgaataggacttattttttaagtgaaacttgaaagagtatggtcaacctccctctggtcaccagaccaacatctctctgactgctgccagaacggctttgctttgctagaccttccaagaagtgttcagaacacttgcggacacaaagacacacaagatggaggcagaggacctagcagctcacagctcactaccgctcctcagtgtgacagaactatttacctgcttctctcctcagagcttgtcagaccccgtttcctgaggccagttcaaatcactagcctaggagaaaactgatc

SEQ ID NO: 11183 - DNA, 600 bp, Chicken  19866894213686_2
agcaagtcctgaagtgtttgtataatggtttcttgggtggactgcactcattcatccagaagagacaatttcagttcttcattaaacatatagtaaggataatttgcatgtcaacgccgttaactatttcagcagtatggaaaagaaagtcatggatctgctcaattaactgagaaatgtctcacttttctgtgcctaccgagaaagaaatatagtagaatttgaaacacattcaaggcaaatcaagacacctagacaagcacaggagtaacacaacctactgccttttcacgactcayrtgaataggacttattttttaagtgaaacttgaaagagtatggtcaacctccctctggtcaccagaccaacatctctctgactgctgccagaacggctttgctttgctagaccttccaagaagtgttcagaacacttgcggacacaaagacacacaagatggaggcagaggacctagcagctcacagctcactaccgctcctcagtgtgacagaactatttacctgcttctctcctcagagcttgtcagaccccgtttcctgaggccagttcaaatcactagcctaggagaaaactgatcc

SEQ ID NO: 11184 - DNA, 600 bp, Chicken  19866894213691_1
cagctgagtgcctgggtacagtgccggcctcagggggtacagcagaattagagaagagccaccactggaatgcatgcaggcaggggatggtgctgctccgatgggcgctccaaggacgaagttacagcattacctgcactgcaatccaactggcgttgacggcgtgttctccaaagggaccaaaccctgaaacagaagaagagcccccggtgagcagctgagctctgcagcttgggctgcaacagccgcactctgctcctgatgtgctctgaaagcaaacccgctgcttgtaacgccccrtccctgctggggtgtattttgtccttgctggccaggttaggaacactttgttagctacagaggaggtgagcgatggcacagaatgaggatcatgattggatcttctgaccctggttgtaacagcccacaacagatgcttccacaaacacacaccagcctgcctccagcacccctcctctgcccacagcttcacctctgctgccttcagaggaaccaaaccaaacactgctgacccacctacaccgagcaccaaaggttacgacagccctataaaaacacttaactccccacatctgcatt

SEQ ID NO: 11185 - DNA, 516 bp, Chicken  19866894213692_1
ctcggcagcccgcggatggggaggtgggcgcaggcggcccgcagctgccgcaggagccctcgcagcatggccatggtcctcacctccacctgcaaagcagagaggaggcggcgctgcgggcacagccccgaccccgttgcctcacagcccggtgcagagcggccctgccatacctggtggtcctccatgggcgcgtcgtcctgcaggctccactccagccacatgcggtgcaggtgctgccgggcgctgtgcaatgagccctgctctacctaaaggatggagagcaccgggagtgcgccrcggtggtccgggtgggggacgcggggatagctgcagccttaccagctcgatgatgcgatgcaggccgctcagggcttgctgggcactgtgctgagcccaccgcagctctcccagtgaccgccgtagcgcgcggtgcttcagcttggctgagagcgaacccacgcgcaccatgcagctctgccgccgtcgccgctgctcccgtgaggtcaccccggt

SEQ ID NO: 11186 - DNA, 600 bp, Chicken  19866894213701_1
taccagcccagtgctggacgaggcacctctcccaaagacgtgctctgagcacacagcaaatccagggacccactgtagatcccagtgctgtccccagagcacggcatgaccccgaagcctccatcacacctccccacgagcaggggaaggtctcatgggctgaagccatactcatgctaagcaggctgaccacgaccaagccattgatttctgagcacttccaaagaacggacactccacagttcccccaggcaaccttttcttgaccatcctcaccataaaaaaaagctttctcttgcrtttcaagagaacatcayagaatcaaagaacagcttaggttggaagagaccttcaagatcayccagttccaaccccagtgccacagacaatttgtgcctattgcctcttggcctgtckttagacaccccaagaagatgccaagctctgttaatgcccatgtgctcctggccacccccaaagcccccagctcccaycaggtactctccaatgggcagcagcagggtgggaattgctgtgatggaagtgtatccacagccttcaggaggctctgctcactcaggacttggatctttgaccata

SEQ ID NO: 11187 - DNA, 600 bp, Chicken  19866894213701_2
acgaggcacctctcccaaagacgtgctctgagcacacagcaaatccagggacccactgtagatcccagtgctgtccccagagcacggcatgaccccgaagcctccatcacacctccccacgagcaggggaaggtctcatgggctgaagccatactcatgctaagcaggctgaccacgaccaagccattgatttctgagcacttccaaagaacggacactccacagttcccccaggcaaccttttcttgaccatcctcaccataaaaaaaagctttctcttgcrtttcaagagaacatcayagaatcaaagaacagcttaggttggaagagaccttcaagatcayccagttccaaccccagtgccacagacaatttgtgcctattgcctcttggcctgtckttagacaccccaagaagatgccaagctctgttaatgcccatgtgctcctggccacccccaaagcccccagctcccaycaggtactctccaatgggcagcagcagggtgggaattgctgtgatggaagtgtatccacagccttcaggaggctctgctcactcaggacttggatctttgaccataggagtcgtcccttgcca

SEQ ID NO: 11188 - DNA, 600 bp, Chicken  19866894213701_3
ccagggacccactgtagatcccagtgctgtccccagagcacggcatgaccccgaagcctccatcacacctccccacgagcaggggaaggtctcatgggctgaagccatactcatgctaagcaggctgaccacgaccaagccattgatttctgagcacttccaaagaacggacactccacagttcccccaggcaaccttttcttgaccatcctcaccataaaaaaaagctttctcttgcrtttcaagagaacatcayagaatcaaagaacagcttaggttggaagagaccttcaagatcayccagttccaaccccagtgccacagacaatttgtgcctattgcctcttggcctgtckttagacaccccaagaagatgccaagctctgttaatgcccatgtgctcctggccacccccaaagcccccagctcccaycaggtactctccaatgggcagcagcagggtgggaattgctgtgatggaagtgtatccacagccttcaggaggctctgctcactcaggacttggatctttgaccataggagtcgtcccttgccatgtacaaaacattatctccctccccattccatcagaagccaaca

SEQ ID NO: 11189 - DNA, 600 bp, Chicken  19866894213701_4
cctccatcacacctccccacgagcaggggaaggtctcatgggctgaagccatactcatgctaagcaggctgaccacgaccaagccattgatttctgagcacttccaaagaacggacactccacagttcccccaggcaaccttttcttgaccatcctcaccataaaaaaaagctttctcttgcrtttcaagagaacatcayagaatcaaagaacagcttaggttggaagagaccttcaagatcayccagttccaaccccagtgccacagacaatttgtgcctattgcctcttggcctgtckttagacaccccaagaagatgccaagctctgttaatgcccatgtgctcctggccacccccaaagcccccagctcccaycaggtactctccaatgggcagcagcagggtgggaattgctgtgatggaagtgtatccacagccttcaggaggctctgctcactcaggacttggatctttgaccataggagtcgtcccttgccatgtacaaaacattatctccctccccattccatcagaagccaacagtcccttgccagcaccrgggcagggtttcctcctctcatagccacatacttctgct

SEQ ID NO: 11190 - DNA, 600 bp, Chicken  19866894213701_5
accaagccattgatttctgagcacttccaaagaacggacactccacagttcccccaggcaaccttttcttgaccatcctcaccataaaaaaaagctttctcttgcrtttcaagagaacatcayagaatcaaagaacagcttaggttggaagagaccttcaagatcayccagttccaaccccagtgccacagacaatttgtgcctattgcctcttggcctgtckttagacaccccaagaagatgccaagctctgttaatgcccatgtgctcctggccacccccaaagcccccagctcccaycaggtactctccaatgggcagcagcagggtgggaattgctgtgatggaagtgtatccacagccttcaggaggctctgctcactcaggacttggatctttgaccataggagtcgtcccttgccatgtacaaaacattatctccctccccattccatcagaagccaacagtcccttgccagcaccrgggcagggtttcctcctctcatagccacatacttctgctcctctagctgtgatcaaaatgactgaacaccgggggggataaaaaagccaaagcagggcagaaatgatgcatcttga

SEQ ID NO: 11191 - DNA, 581 bp, Chicken  19866894213701_6
gccacagacaatttgtgcctattgcctcttggcctgtckttagacaccccaagaagatgccaagctctgttaatgcccatgtgctcctggccacccccaaagcccccagctcccaycaggtactctccaatgggcagcagcagggtgggaattgctgtgatggaagtgtatccacagccttcaggaggctctgctcactcaggacttggatctttgaccataggagtcgtcccttgccatgtacaaaacattatctccctccccattccatcagaagccaacagtcccttgccagcaccrgggcagggtttcctcctctcatagccacatacttctgctcctctagctgtgatcaaaatgactgaacaccgggggggataaaaaagccaaagcagggcagaaatgatgcatcttgatctataagcaggaggtggttcaaggataatccaggcatcacgtatcagctgtgtgctttggaagatgggttttttcccttttcctactttttttttttttctttttaatgagagagaaagaaaacattttaagctttgttccctttcatttatcgccaagttcag

SEQ ID NO: 11192 - DNA, 593 bp, Chicken  19866894213706_1
gaggatgggagtaaagttattagctcaattaaggagaagggtgtttgggtggagaagttatactcacagaaataaatgaagtattttacatatatatatatttaaagagaattaattctgtgggcagttgtatttgaccttctctatgccactgtaacctgtagacttctctggctatgaatggtattacaagaagttatctgcaagatataaacataagatctaccagcctttcagtgtagtatttcacaaggagatcctcaaatggatcttacagatgggaaattattattatccccrtgttttatggacaggaagggagaacacttgtggttgtagcttcctctgctgtaatctttgtccctgagacctggagtgcatggctctcctgatgcctctccccttatgagccagctgcaaggccatgaactctgctttcaaggctctgatttcaatgatgaagcattaaagaagcattttaggttccagtgatccccagtgtaatatattgctggatgcttatgaagcatttttcttatacccctgtctgttaacttttcattaattcgggaatatttcaagaaacaaaatgt

SEQ ID NO: 11193 - DNA, 600 bp, Chicken  19866894213707_1
gtgaacacagcatactgtagcattccaaccaaatgaaaaaatactgattcagatccataatataaatatctgttcttcttcccttttcatttttgtcatacacacacacacacatatatatatatatttgcactgtgatggaatattagaattgcaaaggaatagcatctcagtgccattttctgacaagaattatgtcacctgcacaccttgtaaaacatgtgaataaggtaacctggaaaccctgcaaatgctttatctgttcctacattaaaaagacattgtattaatactgttagrtaatgggctacttcaaggacaagagacagaggaaaaaaaaaaaagctgcaacagcctgcttacttctccttttcagagagcagaacatcacgatgcaacttatgaagcaaagaggaaagggtcacaaggcttcaggaagcaattgcagatgaggctgcatgtcactatgaagctccagaagagttttcagagaagcatatataatctatacagagactacgagcactatggacaaccttagaaaagtaagcaatcgagaaattctatctgcagattcacacttatctgatttctgccaca

SEQ ID NO: 11194 - DNA, 600 bp, Chicken  19866894213709_1
ttaggatctgagggcatggagtttgcagcaagaaggcatccctcacatctagggaatgtccctctcttgcccagatacccaggctagtgattcacatttcaaaggaagatgcttcccatacctctgagagcctctgctaatgcagaacaagaagtgtgaccagccacgctcccctcccaactgcaacaacggaaatgacacaaaacctgctctacctccagggccagaccaaacgctaccataaagctgaaatactaccttgcacctggccaaatcatgccccgtgaattaatacacagycaataaacaccaccactggtgaaccccagggcagacaggtctgcagttagcagggacagccaaagcacagaagcaacagagggcaaagatgttcctggggcatgccctctttgcagtctgggagagctaaacagatctcccagctttgggtggttcaccatgggccatttagccaagagaatcaggactcctggtctcatttgactgactggaaagtagggacctggaagctgctctccagactttctgacagtccaaaatacaagttgtggctggggaaattacaggacctttaaggaa

SEQ ID NO: 11195 - DNA, 600 bp, Chicken  19866894213709_2
tctcctcatcatgctggttgtgctacttggctgcttgtcaagtgcttagctacttgatcattgggcacattagaaatactacattttagatgtttagagcgaagaactaaatcaggccagaggacaaggcagaaaatgcccctttgccagcaggaatgggtttcctatccatacagagctgtacgtaggtgactcttagggtggctttttcctcactgttgataaagcatctgccacgaaggaagaatataaaagcagtaagaaacaatgaatgtccacctcccttttattttgaaatcraagcaccttcccaactgcaggtcttcttcccacctcaaattcacatttggagaagaacttcccagtatcagaactggaaaatacctcgattgcattttttagtcctagagtctggatgtgctttacaagagtccctaactttgattgaattcagaacccaaaacaraacagctctggatcatataaagaccagataaagactagcaatgaattacaaacaaactaaaatgacatcatggaagagcacatggttctgaccatcagaaatgctgaagaagcaaagcttctggacaacaaaac

SEQ ID NO: 11196 - DNA, 600 bp, Chicken  19866894213709_3
atccatacagagctgtacgtaggtgactcttagggtggctttttcctcactgttgataaagcatctgccacgaaggaagaatataaaagcagtaagaaacaatgaatgtccacctcccttttattttgaaatcraagcaccttcccaactgcaggtcttcttcccacctcaaattcacatttggagaagaacttcccagtatcagaactggaaaatacctcgattgcattttttagtcctagagtctggatgtgctttacaagagtccctaactttgattgaattcagaacccaaaacaraacagctctggatcatataaagaccagataaagactagcaatgaattacaaacaaactaaaatgacatcatggaagagcacatggttctgaccatcagaaatgctgaagaagcaaagcttctggacaacaaaaccagcacaaaatgcagaaacgtagccactggaaaaaaaaaatagattaaatttgagcaactaggccctgaagcttttgccatgtttattgtttccacctctcttctatcagatgaaacagggctggccagttcttttcctatccaagctggctttgctcgctgggct

SEQ ID NO: 11197 - DNA, 600 bp, Chicken  19866894213718_1
tactggaaggccgcaatgaggtctcctcagagccttctctaagctaaacaagtccagttccctcaacctttcctcacaggagaggtgctccagccctctgatcatcttagtggcccttctgtggacccgctacaagagctccacatccttcctgtactgggggccccaggcctggacacagtactccacagagggcctcacaagagccgagtagagggggacgatcacctccttctccttgctggccatcccttttttaatgcagcccagaacacagttggccttcccttactccctgcyagcattcaactgcaccataaacaccagaaaattttagcctaaatttaagctcttcctamcaagaatccagactgcagctgacccatacatatatccatgtggaaggtgccaakgttccttcccagcttgcacacacacacagggcagtgtgatgaacagcaagggccagtatggacactgcagctggaatatctacacatactaacacatttccctctctgcatctcaagtatccttgagaagagcagttctgtgcaattgtactacagggtgataccttaaaagcttctatgcttccca

SEQ ID NO: 11198 - DNA, 600 bp, Chicken  19866894213718_2
ccctcaacctttcctcacaggagaggtgctccagccctctgatcatcttagtggcccttctgtggacccgctacaagagctccacatccttcctgtactgggggccccaggcctggacacagtactccacagagggcctcacaagagccgagtagagggggacgatcacctccttctccttgctggccatcccttttttaatgcagcccagaacacagttggccttcccttactccctgcyagcattcaactgcaccataaacaccagaaaattttagcctaaatttaagctcttcctamcaagaatccagactgcagctgacccatacatatatccatgtggaaggtgccaakgttccttcccagcttgcacacacacacagggcagtgtgatgaacagcaagggccagtatggacactgcagctggaatatctacacatactaacacatttccctctctgcatctcaagtatccttgagaagagcagttctgtgcaattgtactacagggtgataccttaaaagcttctatgcttcccacagttgactcctcagaggtaattaatgcaggtctctccaatactcgaagaactcccacc

SEQ ID NO: 11199 - DNA, 600 bp, Chicken  19866894213718_3
cccttctgtggacccgctacaagagctccacatccttcctgtactgggggccccaggcctggacacagtactccacagagggcctcacaagagccgagtagagggggacgatcacctccttctccttgctggccatcccttttttaatgcagcccagaacacagttggccttcccttactccctgcyagcattcaactgcaccataaacaccagaaaattttagcctaaatttaagctcttcctamcaagaatccagactgcagctgacccatacatatatccatgtggaaggtgccaakgttccttcccagcttgcacacacacacagggcagtgtgatgaacagcaagggccagtatggacactgcagctggaatatctacacatactaacacatttccctctctgcatctcaagtatccttgagaagagcagttctgtgcaattgtactacagggtgataccttaaaagcttctatgcttcccacagttgactcctcagaggtaattaatgcaggtctctccaatactcgaagaactcccaccaagttcaggccacagccatacttcagcagctatcaaggactgattaatcaacag

SEQ ID NO: 11200 - DNA, 600 bp, Chicken  19866894213729_1
aagcaataaaaataatgagcatttcttacagaggaacaaaatagcagtgtgaaatgtctgataaaatgctggtctcattgaagtcaccagtagcccttccattaagtccagagcaatcagaaatttggcagactgtacaaacaacgggtttataggattcactgtatattgctttttttaatcatcataagagacaggcttcatagcttcagcagggcaaataaggatcccaaaagctgtagaaacatgaccaaccaggataatgtctttcactacaggacaggagcttgtatttgatgwagcttctgctacttttcaygctgtgcaggtattgtgtgaaagttaaatgggtgtgctagtgcataactcagtcacacattccccctactctttactcataaactttgaaatggatgatctttggaaatgtcctgcagtcaggctgtggtctgcctttttttaatggagatgcctctctttgaatatgtacaaaggagagtacaaaaatctgtgctatgcttaaggactttataatttaaacactagtgcatgttgtaaaaatttacttattgggagaaacaaaacccactttaattcagt

SEQ ID NO: 11201 - DNA, 600 bp, Chicken  19866894213729_2
catttcttacagaggaacaaaatagcagtgtgaaatgtctgataaaatgctggtctcattgaagtcaccagtagcccttccattaagtccagagcaatcagaaatttggcagactgtacaaacaacgggtttataggattcactgtatattgctttttttaatcatcataagagacaggcttcatagcttcagcagggcaaataaggatcccaaaagctgtagaaacatgaccaaccaggataatgtctttcactacaggacaggagcttgtatttgatgwagcttctgctacttttcaygctgtgcaggtattgtgtgaaagttaaatgggtgtgctagtgcataactcagtcacacattccccctactctttactcataaactttgaaatggatgatctttggaaatgtcctgcagtcaggctgtggtctgcctttttttaatggagatgcctctctttgaatatgtacaaaggagagtacaaaaatctgtgctatgcttaaggactttataatttaaacactagtgcatgttgtaaaaatttacttattgggagaaacaaaacccactttaattcagtgaggcacttaactcagttg

SEQ ID NO: 11202 - DNA, 600 bp, Chicken  19866894213731_1
aaaagacgaccagcttcaaaagcaagtttcccataaatactcaagaaagctattactcaagaacagatccttccacatttgggaatagaaaatgtgactgagtacagcaataacattttggaaaaagaacacaaatggttttgcagctgcttgggagaagaaataaagagcagatgactgcagcacaaggcattgttctccttttcctcttcctcctgtccttttcaggagaggacacgtttgctttccagtccattgttaagtaataagaagcccttataactctggcaaagaatcctktawcacataagcatatatgaatccacagatggcagcaaaaaaagtccttcccttgtaggaaaaaatgctctgtgtatgttgataaaaatggagttaatccacagcttygatgaaacagtaacaaaacagactataaagccaacacaaagggagaaaatccaaaagtgacctttcaacacctgccagcccttaagatttcatgtcagataatgacatcaaaaggtcaaccttcataaaacatgcaacacatacagagaataccaagtacacagcaaacctactgatctcgatatatatgag

SEQ ID NO: 11203 - DNA, 600 bp, Chicken  19866894213731_2
agacgaccagcttcaaaagcaagtttcccataaatactcaagaaagctattactcaagaacagatccttccacatttgggaatagaaaatgtgactgagtacagcaataacattttggaaaaagaacacaaatggttttgcagctgcttgggagaagaaataaagagcagatgactgcagcacaaggcattgttctccttttcctcttcctcctgtccttttcaggagaggacacgtttgctttccagtccattgttaagtaataagaagcccttataactctggcaaagaatcctktawcacataagcatatatgaatccacagatggcagcaaaaaaagtccttcccttgtaggaaaaaatgctctgtgtatgttgataaaaatggagttaatccacagcttygatgaaacagtaacaaaacagactataaagccaacacaaagggagaaaatccaaaagtgacctttcaacacctgccagcccttaagatttcatgtcagataatgacatcaaaaggtcaaccttcataaaacatgcaacacatacagagaataccaagtacacagcaaacctactgatctcgatatatatgaggaa

SEQ ID NO: 11204 - DNA, 562 bp, Chicken  19866894213731_3
aataacattttggaaaaagaacacaaatggttttgcagctgcttgggagaagaaataaagagcagatgactgcagcacaaggcattgttctccttttcctcttcctcctgtccttttcaggagaggacacgtttgctttccagtccattgttaagtaataagaagcccttataactctggcaaagaatcctktawcacataagcatatatgaatccacagatggcagcaaaaaaagtccttcccttgtaggaaaaaatgctctgtgtatgttgataaaaatggagttaatccacagcttygatgaaacagtaacaaaacagactataaagccaacacaaagggagaaaatccaaaagtgacctttcaacacctgccagcccttaagatttcatgtcagataatgacatcaaaaggtcaaccttcataaaacatgcaacacatacagagaataccaagtacacagcaaacctactgatctcgatatatatgaggaaataaggtataagaggcttaagcggctttcccaaaagctaaaaagatttgcattggggctggaagcag

SEQ ID NO: 11205 - DNA, 600 bp, Chicken  19866894213736_1
ggcagtcttcctatctgctacagttcctgactattagcactggaaacttattcatggcaatgtggctgtttaagacagggtctcgaatagcagatgcttctcttaccaccacaacacccccaaaccagtgagactgaagatgaggacagctggaggactcttgccacccatgcatttctgctgcaggaatggctgccaaggaaagggaggcagtggaggtggatggctgggctctggtaggtgtcgatcctggaaaatgcctatttataaataactgaacaaggcattatatccccaaaygcattgttggcagagatgcaggttgcttgyggtgcctgactgccgtctagaatgcaaggacagtctgcatttaatccttttgaaatttcacaaataagaattctttcagcatgaactgaaaccttcgaccaccacaaaacacatggtaaggttacacgtcctcacttcctccctattgccacagtatggccttcatacttgagtgactgaatcatcagattgccagtgctaacacccagcctctagcgctgttactacgcagtagggaaacagaacacatgtcggacaaaacctgacaaa

SEQ ID NO: 11206 - DNA, 600 bp, Chicken  19866894213736_2
ctattagcactggaaacttattcatggcaatgtggctgtttaagacagggtctcgaatagcagatgcttctcttaccaccacaacacccccaaaccagtgagactgaagatgaggacagctggaggactcttgccacccatgcatttctgctgcaggaatggctgccaaggaaagggaggcagtggaggtggatggctgggctctggtaggtgtcgatcctggaaaatgcctatttataaataactgaacaaggcattatatccccaaaygcattgttggcagagatgcaggttgcttgyggtgcctgactgccgtctagaatgcaaggacagtctgcatttaatccttttgaaatttcacaaataagaattctttcagcatgaactgaaaccttcgaccaccacaaaacacatggtaaggttacacgtcctcacttcctccctattgccacagtatggccttcatacttgagtgactgaatcatcagattgccagtgctaacacccagcctctagcgctgttactacgcagtagggaaacagaacacatgtcggacaaaacctgacaaagcaaaacttggatttaggtcaagcagagca

SEQ ID NO: 11207 - DNA, 599 bp, Chicken  19866894213748_1
  misc_feature (1)..(26): n is any nucleotide
nnnnnnnnnnnnnnnnnnnnnnnnnnaattgaaaagaacaccttttaacaagaataatgttatctttatacagaggcatcacatgtgcctagccactcagctgaagtacagtcccaagacgatccaaagaattaaaatccttatccagagcagagatgcctacattatcggaggggttccccacaaagatgatttagcagtggctgacatgttaaatgtgccgatattgggctcagtgccagaagtggcccatctctatagtaccaagtctggaagtaaacgaatttttgccagtgcttrtgtgccaacccctcctggagagtctgacatctacagccacgaacaggtaagcagcacgtgctctgggttgtgtcaacgtgcaggtgcctattttcacttgataggatgcaggctttgtgcaattgccacgactgtattgattagagcctaagtaggtttgattaaatcgtgtatgagattgggctctgtttggccgtatctaaccaagtaaatgcaattcacatcctagtcaggaagcagtgcaattgttctgatattcttcacgttctttcttgagaatatataaggccttttggttc

SEQ ID NO: 11208 - DNA, 600 bp, Chicken  19866894213751_1
aagaactttttttggggggggaggggaagagaagaaaaaaagcctatatgagagctaaaattgatgaaaaggattaagagttctattatacagcttaattaataatgactatgcaaaagagctaagctgcaaaatgttagcatgcatataactaggagagctcaggattacttgaagttaatggtgagcatcattaataggatgaaattaaaaaaagaaagaacaacgacatacaaacacaaaagtctcagttttagctgtacttcctgactttatttggctcatcctcagctgggaagrgatgggagctctacaggacatttacattgagatttccctgcagaaatgaataaaaggactgagaaaatagtctggcaggaagataaagcacttcagsatctgaagtaacaaacccttctcatctwggttcacttatttaccaaattggaagctggtttatcagcttgtacgtaactggaattttcaggtagaagtttttactatgacatgcttagttgagacagttttatgctgtagttgtaatagttttctgtatataaatgacagtggcaatttttctttggtgttgagagctcatag

SEQ ID NO: 11209 - DNA, 600 bp, Chicken  19866894213751_2
attaataatgactatgcaaaagagctaagctgcaaaatgttagcatgcatataactaggagagctcaggattacttgaagttaatggtgagcatcattaataggatgaaattaaaaaaagaaagaacaacgacatacaaacacaaaagtctcagttttagctgtacttcctgactttatttggctcatcctcagctgggaagrgatgggagctctacaggacatttacattgagatttccctgcagaaatgaataaaaggactgagaaaatagtctggcaggaagataaagcacttcagsatctgaagtaacaaacccttctcatctwggttcacttatttaccaaattggaagctggtttatcagcttgtacgtaactggaattttcaggtagaagtttttactatgacatgcttagttgagacagttttatgctgtagttgtaatagttttctgtatataaatgacagtggcaatttttctttggtgttgagagctcatagcatggaaagtacagaaaatatgcctttgttgacaaaacaaaggagtagcggactgccagcaagagagyactaccagcaatattttcttgctctcata

SEQ ID NO: 11210 - DNA, 600 bp, Chicken  19866894213751_3
gctgcaaaatgttagcatgcatataactaggagagctcaggattacttgaagttaatggtgagcatcattaataggatgaaattaaaaaaagaaagaacaacgacatacaaacacaaaagtctcagttttagctgtacttcctgactttatttggctcatcctcagctgggaagrgatgggagctctacaggacatttacattgagatttccctgcagaaatgaataaaaggactgagaaaatagtctggcaggaagataaagcacttcagsatctgaagtaacaaacccttctcatctwggttcacttatttaccaaattggaagctggtttatcagcttgtacgtaactggaattttcaggtagaagtttttactatgacatgcttagttgagacagttttatgctgtagttgtaatagttttctgtatataaatgacagtggcaatttttctttggtgttgagagctcatagcatggaaagtacagaaaatatgcctttgttgacaaaacaaaggagtagcggactgccagcaagagagyactaccagcaatattttcttgctctcataacatgcagatttccatgacgacataagc

SEQ ID NO: 11211 - DNA, 600 bp, Chicken  19866894213751_4
agtctggcaggaagataaagcacttcagsatctgaagtaacaaacccttctcatctwggttcacttatttaccaaattggaagctggtttatcagcttgtacgtaactggaattttcaggtagaagtttttactatgacatgcttagttgagacagttttatgctgtagttgtaatagttttctgtatataaatgacagtggcaatttttctttggtgttgagagctcatagcatggaaagtacagaaaatatgcctttgttgacaaaacaaaggagtagcggactgccagcaagagagyactaccagcaatattttcttgctctcataacatgcagatttccatgacgacataagcagtgagggaaaagtatgtgcacacccatcatgagcccagggcagcctagaactgagggactgccagaagagcctgctaggaattaacactaggcatcccagctctcccttggttttagcaagtctggaaaatccaatcrctatactaccaaaatactatatgaaaatctggttgcagccctttgactgcaagtcaggagaagcaaaatcctgtttgtttccagccttcattgcctcgctggtg

SEQ ID NO: 11212 - DNA, 600 bp, Chicken  19866894213751_5
cagtggcaatttttctttggtgttgagagctcatagcatggaaagtacagaaaatatgcctttgttgacaaaacaaaggagtagcggactgccagcaagagagyactaccagcaatattttcttgctctcataacatgcagatttccatgacgacataagcagtgagggaaaagtatgtgcacacccatcatgagcccagggcagcctagaactgagggactgccagaagagcctgctaggaattaacactaggcatcccagctctcccttggttttagcaagtctggaaaatccaatcrctatactaccaaaatactatatgaaaatctggttgcagccctttgactgcaagtcaggagaagcaaaatcctgtttgtttccagccttcattgcctcgctggtgcttgcagtagaggtgtgactgctcgctggcaggagacaagttcatcctgctggctgggctcttgtgctggggagtttcaagacgtctgctgggtgtagccaggcatgccaactgctgcttctctctgttagcgtcctctgagtgccttcaccctgcacatttgtttgctaggacacatcctgccaccataaatcag

SEQ ID NO: 11213 - DNA, 599 bp, Chicken  19866894213756_1
  misc_feature (1)..(39): n is any nucleotide
nnnnnnnnnnnnnnnnnnnnnnnnnnnnnnnnnnnnnnntagctctgcggtgggaaggaagtaaaaagactactaacacctctgttaatataatgggatatctcatttaatcacatcctatattacaaagtgcttttcaggagagtactccatattaaaattcacttctgttatacaaagattcagtgtttataaactttgtgtgtctctaatgttttggcaaatatatcccaaggtattacaaatggggataaacccacaaaactttatccaagctcatatgccacagaaaatacgaakatgcctcatatttttgcactgctacttttgtttcagtaacttccatttcagttcaagtgggtcagattttgctgctccctacaactttgttcccatgcagaatttctgaactaacatctcctcgtgacattctgccaaacgcattgccttctaggtggcaccacctcttatcttgctccaaagactgtttttcctcccatatcctcccctgacacttatggcagaaaatttagctgaaacttttcattgatttcagtttaattatccattcccttatgaaacagtgaaagacagcattt

SEQ ID NO: 11214 - DNA, 600 bp, Chicken  19866894213759_1
tgttataaattttatattaaaaatgggagctgcagaataacctgatgatacctcttacgaccttcttatgctgagaggcttgtgaaaatgatggtgaagctggaatacagtagctaaagggacaaataaggtgcaaggaggttctacatgaaagccagcaggaaagaataagaaaataaataaatatttctgtgaaagactgcattgatttgatgtgcctgtattgctgtgatcatgtaaactgtatttgtgtgttcatttagcaggtttttattgtttctttgctttccaaacacttcrcattcaatggaagtcatgtttaaagctgaagatagtttaaaagcagaagtgtatttcaagacttgagatgctattctctgtctgtttgcaatacgttactttgacaaaagaaagtcttaccaaagtattgcaaagctcatgtctgcctttgaaggacaagaataagaaagttgcaaatataagaaagccatggaaaaacttgataaagacttgctcatccrattgaaaacktacagtgctagaaatgcctaagcaaaagtatttctctaaggatgaatgtatccatcagacagttctagc

SEQ ID NO: 11215 - DNA, 501 bp, Chicken  19866894213759_2
tattgctgtgatcatgtaaactgtatttgtgtgttcatttagcaggtttttattgtttctttgctttccaaacacttcrcattcaatggaagtcatgtttaaagctgaagatagtttaaaagcagaagtgtatttcaagacttgagatgctattctctgtctgtttgcaatacgttactttgacaaaagaaagtcttaccaaagtattgcaaagctcatgtctgcctttgaaggacaagaataagaaagttgcaaatataagaaagccatggaaaaacttgataaagacttgctcatccrattgaaaacktacagtgctagaaatgcctaagcaaaagtatttctctaaggatgaatgtatccatcagacagttctagccttttaattggaggatcagaatctttgttccagagacaaaggaatttcattctattgttagaaagggaagaatttaaagagttttaattacagaactatctaaatttattctgtccattaca

SEQ ID NO: 11216 - DNA, 491 bp, Chicken  19866894213759_3
atcatgtaaactgtatttgtgtgttcatttagcaggtttttattgtttctttgctttccaaacacttcrcattcaatggaagtcatgtttaaagctgaagatagtttaaaagcagaagtgtatttcaagacttgagatgctattctctgtctgtttgcaatacgttactttgacaaaagaaagtcttaccaaagtattgcaaagctcatgtctgcctttgaaggacaagaataagaaagttgcaaatataagaaagccatggaaaaacttgataaagacttgctcatccrattgaaaacktacagtgctagaaatgcctaagcaaaagtatttctctaaggatgaatgtatccatcagacagttctagccttttaattggaggatcagaatctttgttccagagacaaaggaatttcattctattgttagaaagggaagaatttaaagagttttaattacagaactatctaaatttattctgtccattaca

SEQ ID NO: 11217 - DNA, 600 bp, Chicken  19866894213762_1
tgctattctgttgactgatgggtaattgattaactatcttttactctccatcaagtcattttgtctcctggtctccatccttcagttcctaaatccagcatccctggtcaacacaggcttgcggttagccctctcttatcagctccttcacctccagttagggttctgcaaatgtgtaagtgacaaagcttccaaataatagcactgtgcttccacctctgtcactttgagatcaggcatgcacctgcccatttctcacatgcaaggtgtgaagacacaagtagttccatttttcaccawcagaatgtaagtcctgcaaccaggacttacttaatgttgtctgttctttcttaaggattttttgttcattgtttatatgtctaacaagattgctgtgaagagttttccgtgtttctgtagcagaagggaaaaaggacatgaactggtagtgataaaatgcaacctactatctggatggagctgacaagtaataaattgcaagcagtggatgcaaacaggttgtacttgagttcacacccagataagttttgagttccatctcttagagrcatgttcaggtatttatgggcaaggactctc

SEQ ID NO: 11218 - DNA, 600 bp, Chicken  19866894213762_2
tgaagacacaagtagttccatttttcaccawcagaatgtaagtcctgcaaccaggacttacttaatgttgtctgttctttcttaaggattttttgttcattgtttatatgtctaacaagattgctgtgaagagttttccgtgtttctgtagcagaagggaaaaaggacatgaactggtagtgataaaatgcaacctactatctggatggagctgacaagtaataaattgcaagcagtggatgcaaacaggttgtacttgagttcacacccagataagttttgagttccatctcttagagrcatgttcaggtatttatgggcaaggactctccagactcctaaatcattagttkcttgagcctttcagtccatttttgactggaagaagagagaatgacaggaaaaataattacaaaaattgtacataattaccagacagcaaaaatagggcatatatctctacttctgttctttttcaggaagtcccatgggacagggctgccagtaatcactccatgctacactacacagagttatttctcctttctattgcccttactcctctctagcttacaaattcatgcaggggttttgtatctt

SEQ ID NO: 11219 - DNA, 600 bp, Chicken  19866894213762_3
ggacttacttaatgttgtctgttctttcttaaggattttttgttcattgtttatatgtctaacaagattgctgtgaagagttttccgtgtttctgtagcagaagggaaaaaggacatgaactggtagtgataaaatgcaacctactatctggatggagctgacaagtaataaattgcaagcagtggatgcaaacaggttgtacttgagttcacacccagataagttttgagttccatctcttagagrcatgttcaggtatttatgggcaaggactctccagactcctaaatcattagttkcttgagcctttcagtccatttttgactggaagaagagagaatgacaggaaaaataattacaaaaattgtacataattaccagacagcaaaaatagggcatatatctctacttctgttctttttcaggaagtcccatgggacagggctgccagtaatcactccatgctacactacacagagttatttctcctttctattgcccttactcctctctagcttacaaattcatgcaggggttttgtatcttttacagaactgtaggtatgagtgatacatgctataaagcatagtyttaatttt

SEQ ID NO: 11220 - DNA, 600 bp, Chicken  19866894213762_4
attagttkcttgagcctttcagtccatttttgactggaagaagagagaatgacaggaaaaataattacaaaaattgtacataattaccagacagcaaaaatagggcatatatctctacttctgttctttttcaggaagtcccatgggacagggctgccagtaatcactccatgctacactacacagagttatttctcctttctattgcccttactcctctctagcttacaaattcatgcaggggttttgtatcttttacagaactgtaggtatgagtgatacatgctataaagcatagtyttaattttaattagaggttatacaaaatttctttgagtgataaacaattatgtcttcccagatgagggttttcagttgcctatcagctagccctcagtcagatctgagcctactcacttaaggtactcaggctttggaaataagcaacaactagtattacaaattttcacatctgcaagtagtagccagaactgggtatgaagtgcttctttacatgaggaygtaggcagatgtctccttccagtctatgaaacaaagtttggcatgattatagcatwacaaacacacttttaaagagct

SEQ ID NO: 11221 - DNA, 600 bp, Chicken  19866894213762_5
agcttacaaattcatgcaggggttttgtatcttttacagaactgtaggtatgagtgatacatgctataaagcatagtyttaattttaattagaggttatacaaaatttctttgagtgataaacaattatgtcttcccagatgagggttttcagttgcctatcagctagccctcagtcagatctgagcctactcacttaaggtactcaggctttggaaataagcaacaactagtattacaaattttcacatctgcaagtagtagccagaactgggtatgaagtgcttctttacatgaggaygtaggcagatgtctccttccagtctatgaaacaaagtttggcatgattatagcatwacaaacacacttttaaagagctgtacctttagaatacaggacaaacttagaagtaattaatggtttatcgcatagcaatgggggttattgtagagcacgtgttccaccagaagcattcatactgaaaggtcctgaaatctcagttaatagcatacaaaaaagaaagcaaccttgaggtcagaagcaaattgctactatacatcaccaaggccagcatgtcaagtaccatatttatgtgtgaagt

SEQ ID NO: 11222 - DNA, 600 bp, Chicken  19866894213762_6
atacatgctataaagcatagtyttaattttaattagaggttatacaaaatttctttgagtgataaacaattatgtcttcccagatgagggttttcagttgcctatcagctagccctcagtcagatctgagcctactcacttaaggtactcaggctttggaaataagcaacaactagtattacaaattttcacatctgcaagtagtagccagaactgggtatgaagtgcttctttacatgaggaygtaggcagatgtctccttccagtctatgaaacaaagtttggcatgattatagcatwacaaacacacttttaaagagctgtacctttagaatacaggacaaacttagaagtaattaatggtttatcgcatagcaatgggggttattgtagagcacgtgttccaccagaagcattcatactgaaaggtcctgaaatctcagttaatagcatacaaaaaagaaagcaaccttgaggtcagaagcaaattgctactatacatcaccaaggccagcatgtcaagtaccatatttatgtgtgaagtggaaaggaattaatgaatacaagtagaattcagagagtgtatgttctctggagcaa

SEQ ID NO: 11223 - DNA, 599 bp, Chicken  19866894213765_1
  misc_feature (1)..(170): n is any nucleotide
nnnnnnnnnnnnnnnnnnnnnnnnnnnnnnnnnnnnnnnnnnnnnnnnnnnnnnnnnnnnnnnnnnnnnnnnnnnnnnnnnnnnnnnnnnnnnnnnnnnnnnnnnnnnnnnnnnnnnnnnnnnnnnnnnnnnnnnnnnnnnnnnnnnnnnnnnnnnnnnnnnnnnnnnnntgcagggatggcgctcagttcttccacagagctgtacttgatggtcagatagtataagcactttataagagtttatcttttgttgccagaaagtgagagaagcagagaaatagagacactgaagtcaagycaacatgtatcacccaaataaaacatcactggttttgttcctccactaaacaatttgccatcccattccccaaagcagaygttaagctcaaccctcctgctgtctctgagcaaytgggagagtcgaggcagggagaggagggatgcactggtggtggyagagaagcatctttgcaaaaaaatctcttccttgtatgaggggatgtgatgmcctacctagcactatgctctgcataatgcatgcctttgagatgtgtaaatgtgacgttgcttttaraagggttgctgccatttgaaacc

SEQ ID NO: 11224 - DNA, 599 bp, Chicken  19866894213765_2
  misc_feature (1)..(90): n is any nucleotide
nnnnnnnnnnnnnnnnnnnnnnnnnnnnnnnnnnnnnnnnnnnnnnnnnnnnnnnnnnnnnnnnnnnnnnnnnnnnnnnnnnnnnnnnnntgcagggatggcgctcagttcttccacagagctgtacttgatggtcagatagtataagcactttataagagtttatcttttgttgccagaaagtgagagaagcagagaaatagagacactgaagtcaagycaacatgtatcacccaaataaaacatcactggttttgttcctccactaaacaatttgccatcccattccccaaagcagaygttaagctcaaccctcctgctgtctctgagcaaytgggagagtcgaggcagggagaggagggatgcactggtggtggyagagaagcatctttgcaaaaaaatctcttccttgtatgaggggatgtgatgmcctacctagcactatgctctgcataatgcatgcctttgagatgtgtaaatgtgacgttgcttttaraagggttgctgccatttgaaaccagtgactctacatttacatgaccttgagttcctcagagacaccttaaggtactttcatgtccctcatttcgttttgaatt

SEQ ID NO: 11225 - DNA, 599 bp, Chicken  19866894213765_3
  misc_feature (1)..(56): n is any nucleotide
nnnnnnnnnnnnnnnnnnnnnnnnnnnnnnnnnnnnnnnnnnnnnnnnnnnnnnnntgcagggatggcgctcagttcttccacagagctgtacttgatggtcagatagtataagcactttataagagtttatcttttgttgccagaaagtgagagaagcagagaaatagagacactgaagtcaagycaacatgtatcacccaaataaaacatcactggttttgttcctccactaaacaatttgccatcccattccccaaagcagaygttaagctcaaccctcctgctgtctctgagcaaytgggagagtcgaggcagggagaggagggatgcactggtggtggyagagaagcatctttgcaaaaaaatctcttccttgtatgaggggatgtgatgmcctacctagcactatgctctgcataatgcatgcctttgagatgtgtaaatgtgacgttgcttttaraagggttgctgccatttgaaaccagtgactctacatttacatgaccttgagttcctcagagacaccttaaggtactttcatgtccctcatttcgttttgaattccccagactgtgattcctgagtaaagcaacgatc

SEQ ID NO: 11226 - DNA, 599 bp, Chicken  19866894213765_4
  misc_feature (1)..(12): n is any nucleotide
nnnnnnnnnnnntgcagggatggcgctcagttcttccacagagctgtacttgatggtcagatagtataagcactttataagagtttatcttttgttgccagaaagtgagagaagcagagaaatagagacactgaagtcaagycaacatgtatcacccaaataaaacatcactggttttgttcctccactaaacaatttgccatcccattccccaaagcagaygttaagctcaaccctcctgctgtctctgagcaaytgggagagtcgaggcagggagaggagggatgcactggtggtggyagagaagcatctttgcaaaaaaatctcttccttgtatgaggggatgtgatgmcctacctagcactatgctctgcataatgcatgcctttgagatgtgtaaatgtgacgttgcttttaraagggttgctgccatttgaaaccagtgactctacatttacatgaccttgagttcctcagagacaccttaaggtactttcatgtccctcatttcgttttgaattccccagactgtgattcctgagtaaagcaacgatcctgcaaatggacacaaacatgctttgtatgagcgyatctcatgt

SEQ ID NO: 11227 - DNA, 600 bp, Chicken  19866894213765_5
atggtcagatagtataagcactttataagagtttatcttttgttgccagaaagtgagagaagcagagaaatagagacactgaagtcaagycaacatgtatcacccaaataaaacatcactggttttgttcctccactaaacaatttgccatcccattccccaaagcagaygttaagctcaaccctcctgctgtctctgagcaaytgggagagtcgaggcagggagaggagggatgcactggtggtggyagagaagcatctttgcaaaaaaatctcttccttgtatgaggggatgtgatgmcctacctagcactatgctctgcataatgcatgcctttgagatgtgtaaatgtgacgttgcttttaraagggttgctgccatttgaaaccagtgactctacatttacatgaccttgagttcctcagagacaccttaaggtactttcatgtccctcatttcgttttgaattccccagactgtgattcctgagtaaagcaacgatcctgcaaatggacacaaacatgctttgtatgagcgyatctcatgttactcaaaacagctcaagtgttgaacctgagaatgagataatttcattctaga

SEQ ID NO: 11228 - DNA, 600 bp, Chicken  19866894213765_6
gaaatagagacactgaagtcaagycaacatgtatcacccaaataaaacatcactggttttgttcctccactaaacaatttgccatcccattccccaaagcagaygttaagctcaaccctcctgctgtctctgagcaaytgggagagtcgaggcagggagaggagggatgcactggtggtggyagagaagcatctttgcaaaaaaatctcttccttgtatgaggggatgtgatgmcctacctagcactatgctctgcataatgcatgcctttgagatgtgtaaatgtgacgttgcttttaraagggttgctgccatttgaaaccagtgactctacatttacatgaccttgagttcctcagagacaccttaaggtactttcatgtccctcatttcgttttgaattccccagactgtgattcctgagtaaagcaacgatcctgcaaatggacacaaacatgctttgtatgagcgyatctcatgttactcaaaacagctcaagtgttgaacctgagaatgagataatttcattctagaatgagtattttcctgcagggagctgttctacaacctgtcgcatgctctaaattaaccttaatgtta

SEQ ID NO: 11229 - DNA, 600 bp, Chicken  19866894213765_7
tggtggtggyagagaagcatctttgcaaaaaaatctcttccttgtatgaggggatgtgatgmcctacctagcactatgctctgcataatgcatgcctttgagatgtgtaaatgtgacgttgcttttaraagggttgctgccatttgaaaccagtgactctacatttacatgaccttgagttcctcagagacaccttaaggtactttcatgtccctcatttcgttttgaattccccagactgtgattcctgagtaaagcaacgatcctgcaaatggacacaaacatgctttgtatgagcgyatctcatgttactcaaaacagctcaagtgttgaacctgagaatgagataatttcattctagaatgagtattttcctgcagggagctgttctacaacctgtcgcatgctctaaattaaccttaatgttaattccagttaacttgcaagtctagatgtgcccctgttaaacatttatcaatgcttattgtacttctccttcctagaaatatgtgtgaagtatagaagagctgaaagaagtctttctaaagcaagtacaaagtctgggatacagctttaaaagtgcccagtaggctcactgta

SEQ ID NO: 11230 - DNA, 600 bp, Chicken  19866894213770_1
aaaagcgctagaggatttgggtattccttggtcttgaggttcctattttagtaagcttttaaagaaaatcattttttcacaagaatgatattttttccagcactttctgtaaaaaaaagaaataggccacttggatttatgtcagacagggaacacagaaacagagcttaaaacttcctaaatcaggcagctctgcagtgcacggcattgggacagcagctccagccatcatggtgggagcacacctcaagaagggctgccagacctgctgcccaccgcaggagatggggctgccatggrgcagaagctttggggcaggactgggagagctgagcttggctggagatgactcatcttctcctaggtattacaaatcacggacctaggaaccgtccctttctctccttgaaggtgatgaawattttgccattcacaagaactcgatacgtagctcacgcatttaacttcgaatatgtagcttcattttttttgctccacaaataatttacgctattacattttaccatttgacatcactgtggtaaagtgagcttaaaagcaaaaaatatataatcacttctaacaaagtgtttatttaca

SEQ ID NO: 11231 - DNA, 600 bp, Chicken  19866894213770_2
aataggccacttggatttatgtcagacagggaacacagaaacagagcttaaaacttcctaaatcaggcagctctgcagtgcacggcattgggacagcagctccagccatcatggtgggagcacacctcaagaagggctgccagacctgctgcccaccgcaggagatggggctgccatggrgcagaagctttggggcaggactgggagagctgagcttggctggagatgactcatcttctcctaggtattacaaatcacggacctaggaaccgtccctttctctccttgaaggtgatgaawattttgccattcacaagaactcgatacgtagctcacgcatttaacttcgaatatgtagcttcattttttttgctccacaaataatttacgctattacattttaccatttgacatcactgtggtaaagtgagcttaaaagcaaaaaatatataatcacttctaacaaagtgtttatttacacccccagagtgatagaaagtagccttaatgcaagtaaaaatcaagtctcacatattagcttatcttttttttttttttattaacaatctccgcagctataagagagaaattaattatgcc

SEQ ID NO: 11232 - DNA, 599 bp, Chicken  19866894213774_1
  misc_feature (1)..(133): n is any nucleotide
nnnnnnnnnnnnnnnnnnnnnnnnnnnnnnnnnnnnnnnnnnnnnnnnnnnnnnnnnnnnnnnnnnnnnnnnnnnnnnnnnnnnnnnnnnnnnnnnnnnnnnnnnnnnnnnnnnnnnnnnnnnnnnnnnnnnnttggtgaagttgctggggtctcttacagcttcacttatgggtattcacttgctatataaaatacctgtttcatctcgagatccacagctattcttacaaaaccttacagaagccaagaagctgagcagctctcttggctgcgttctgtatcagccatttcccccccrgatccccattcatgcctttccacaaacaccgaagaacctgcaaatgtatgacaactaagtaaataaactgcaayttaggactcgaggcggggagggatgggacctcaagctacgtttttttcccctgtttacgagaactcaaacatttcagttctgcaaggagacaaggaaagcaaagagtaaaagcaacattaccaccttgtggcagcaaggcaacacagaaatgagaagagttcagagaaattagagggaaacagactgagtgttccttttcatatcctagtgagtatatggagagc

SEQ ID NO: 11233 - DNA, 599 bp, Chicken  19866894213774_2
  misc_feature (1)..(59): n is any nucleotide
nnnnnnnnnnnnnnnnnnnnnnnnnnnnnnnnnnnnnnnnnnnnnnnnnnnnnnnnnnnttggtgaagttgctggggtctcttacagcttcacttatgggtattcacttgctatataaaatacctgtttcatctcgagatccacagctattcttacaaaaccttacagaagccaagaagctgagcagctctcttggctgcgttctgtatcagccatttcccccccrgatccccattcatgcctttccacaaacaccgaagaacctgcaaatgtatgacaactaagtaaataaactgcaayttaggactcgaggcggggagggatgggacctcaagctacgtttttttcccctgtttacgagaactcaaacatttcagttctgcaaggagacaaggaaagcaaagagtaaaagcaacattaccaccttgtggcagcaaggcaacacagaaatgagaagagttcagagaaattagagggaaacagactgagtgttccttttcatatcctagtgagtatatggagagctacatgctgccaagaagaccatcaggactgaagaaaggtgttctgtgagcagaaagaacagcatttctgcacct

SEQ ID NO: 11234 - DNA, 600 bp, Chicken  19866894213774_3
aagcaaagagtaaaagcaacattaccaccttgtggcagcaaggcaacacagaaatgagaagagttcagagaaattagagggaaacagactgagtgttccttttcatatcctagtgagtatatggagagctacatgctgccaagaagaccatcaggactgaagaaaggtgttctgtgagcagaaagaacagcatttctgcacctgccaccacttttggctctcacgggcctggcaggagcatagcagagatctgtggctgcccagcatgtgaaaccacaggtagagcactgacatctttcygagggcaataccacagccaaactcactcaccacatacaacgtggatgactgcacctcactcattaccctgtatgtaacttcctcatctcggccaagctcccctcagtctcagtctgggaaagacaactgggctcactgtgcatagcaaaagcataggcacaggggacctcggtcctcaggcatgagctggcaaaatgaaaaacaaatttcccccagacaccgtcacatgaaattccaggaaagctcatccacatttgtcattttgtgtatactgcatccaagactggaaagcaccaaaag

SEQ ID NO: 11235 - DNA, 600 bp, Chicken  19866894213789_1
tgtacagcatctagcacaatgggatttgaagcatgaggtaaacttttgtgtgctgtcacaaaaacacaagtaatttcacatttagagttccttttatttgcaaaagtgttgtgttttgaagctgtcttctctctgcagtggggaggcagagccatgcaatttttacacgctcccttgtcaaagaggagcttgtaacacataaactggaagaagctgaaatgctggaagagtttgtaagaattctgacagaaaaaatgatgtatttagaattcttcctactgtttttactggcagccaacktacgttcatttgtgaaaactctgtwttmtaaattggaakaaagctagtgattggcagagattggctgcttgcttaaaatctctgtcaatgaggaagaggccctttgatatcttatgctgagcagggatttccctattttgagagtcagaagtgtgaaacttgaaggcatggtttgtagtcaaaaaagtgtttctcacagtgtgacacgtttttatattctgtgctctaatgtgttttctgagttcctatctgtttaagagctattgctgagaagacagggttttgctgctgcagagctca

SEQ ID NO: 11236 - DNA, 600 bp, Chicken  19866894213789_2
ttgaagcatgaggtaaacttttgtgtgctgtcacaaaaacacaagtaatttcacatttagagttccttttatttgcaaaagtgttgtgttttgaagctgtcttctctctgcagtggggaggcagagccatgcaatttttacacgctcccttgtcaaagaggagcttgtaacacataaactggaagaagctgaaatgctggaagagtttgtaagaattctgacagaaaaaatgatgtatttagaattcttcctactgtttttactggcagccaacktacgttcatttgtgaaaactctgtwttmtaaattggaakaaagctagtgattggcagagattggctgcttgcttaaaatctctgtcaatgaggaagaggccctttgatatcttatgctgagcagggatttccctattttgagagtcagaagtgtgaaacttgaaggcatggtttgtagtcaaaaaagtgtttctcacagtgtgacacgtttttatattctgtgctctaatgtgttttctgagttcctatctgtttaagagctattgctgagaagacagggttttgctgctgcagagctcatgtagtggcagaagggcaaaagata

SEQ ID NO: 11237 - DNA, 600 bp, Chicken  19866894213789_3
aagcatgaggtaaacttttgtgtgctgtcacaaaaacacaagtaatttcacatttagagttccttttatttgcaaaagtgttgtgttttgaagctgtcttctctctgcagtggggaggcagagccatgcaatttttacacgctcccttgtcaaagaggagcttgtaacacataaactggaagaagctgaaatgctggaagagtttgtaagaattctgacagaaaaaatgatgtatttagaattcttcctactgtttttactggcagccaacktacgttcatttgtgaaaactctgtwttmtaaattggaakaaagctagtgattggcagagattggctgcttgcttaaaatctctgtcaatgaggaagaggccctttgatatcttatgctgagcagggatttccctattttgagagtcagaagtgtgaaacttgaaggcatggtttgtagtcaaaaaagtgtttctcacagtgtgacacgtttttatattctgtgctctaatgtgttttctgagttcctatctgtttaagagctattgctgagaagacagggttttgctgctgcagagctcatgtagtggcagaagggcaaaagatatcg

SEQ ID NO: 11238 - DNA, 600 bp, Chicken  19866894213789_4
aaacttttgtgtgctgtcacaaaaacacaagtaatttcacatttagagttccttttatttgcaaaagtgttgtgttttgaagctgtcttctctctgcagtggggaggcagagccatgcaatttttacacgctcccttgtcaaagaggagcttgtaacacataaactggaagaagctgaaatgctggaagagtttgtaagaattctgacagaaaaaatgatgtatttagaattcttcctactgtttttactggcagccaacktacgttcatttgtgaaaactctgtwttmtaaattggaakaaagctagtgattggcagagattggctgcttgcttaaaatctctgtcaatgaggaagaggccctttgatatcttatgctgagcagggatttccctattttgagagtcagaagtgtgaaacttgaaggcatggtttgtagtcaaaaaagtgtttctcacagtgtgacacgtttttatattctgtgctctaatgtgttttctgagttcctatctgtttaagagctattgctgagaagacagggttttgctgctgcagagctcatgtagtggcagaagggcaaaagatatcgtactttgcctt

SEQ ID NO: 11239 - DNA, 599 bp, Chicken  19866894213793_1
  misc_feature (1)..(79): n is any nucleotide
nnnnnnnnnnnnnnnnnnnnnnnnnnnnnnnnnnnnnnnnnnnnnnnnnnnnnnnnnnnnnnnnnnnnnnnnnnnnnnnaaacttggagctaagctttgtgaagaaatttgttatagtagctgtacttggtggtgcttaattcccagctttattaattacagaattagaaaaaactgtattgaatgatcagttcagtcttctctctgcaatacaagattgtcatcacatagctgagttctgcagtctgtcacaggcagtgtaatgtttcagatgtgctaataactgtatcatagtcatgsaattgcattagaagataagacctgggataataatttatatgttaaaaaatgcaaataactctgtcagtaaactaaaactaggaaggctatttaattctggatatatcatttactgggattttgatagaggacaaagctcttaaattatcagctattatcactaacgaggaacatggagcattcatcagcagaatatcatctagatcttctgaatattgtcacattctaggtagaacaaaacatttaccctggcaacataaaaggttcagcaggacctatcccctaagtaaaagttaatg

SEQ ID NO: 11240 - DNA, 599 bp, Chicken  19866894213798_1
  misc_feature (1)..(96): n is any nucleotide
nnnnnnnnnnnnnnnnnnnnnnnnnnnnnnnnnnnnnnnnnnnnnnnnnnnnnnnnnnnnnnnnnnnnnnnnnnnnnnnnnnnnnnnnnnnnnnnngattgcctcaaccccaaaatgcaaccccctggcacttggaaatcaagatggtcatcacatgcagtttggattttgacattcccattagaacccaaggctaccaaatctgccacatccccccatggctctgtgtgacatggtctgctttttagccccagtgtctctgagagcccagggctcccagaagcctgtcccaagactgcyagctcatataatcctactggayagtatctcaaactgcaaatagaaatcttaaagraagtacaagaagagaaacaaacttgatggcatagagggtttacttgttcttcctctctggaagtggtaaatctctgcaaatctgtgttagcacatactggggattcttactaccagttctttatgttttgttactacagagaaagtttcagttaccgggaccatctgtgaatagcttctttctcaggcattagcctctctctatrtatgacgcttagtcagcttcagtrgctgctgaagcactg

SEQ ID NO: 11241 - DNA, 599 bp, Chicken  19866894213798_2
  misc_feature (1)..(74): n is any nucleotide
nnnnnnnnnnnnnnnnnnnnnnnnnnnnnnnnnnnnnnnnnnnnnnnnnnnnnnnnnnnnnnnnnnnnnnnnnngattgcctcaaccccaaaatgcaaccccctggcacttggaaatcaagatggtcatcacatgcagtttggattttgacattcccattagaacccaaggctaccaaatctgccacatccccccatggctctgtgtgacatggtctgctttttagccccagtgtctctgagagcccagggctcccagaagcctgtcccaagactgcyagctcatataatcctactggayagtatctcaaactgcaaatagaaatcttaaagraagtacaagaagagaaacaaacttgatggcatagagggtttacttgttcttcctctctggaagtggtaaatctctgcaaatctgtgttagcacatactggggattcttactaccagttctttatgttttgttactacagagaaagtttcagttaccgggaccatctgtgaatagcttctttctcaggcattagcctctctctatrtatgacgcttagtcagcttcagtrgctgctgaagcactggtgtatgagatgtcatttgaga

SEQ ID NO: 11242 - DNA, 599 bp, Chicken  19866894213798_3
  misc_feature (1)..(41): n is any nucleotide
nnnnnnnnnnnnnnnnnnnnnnnnnnnnnnnnnnnnnnnnngattgcctcaaccccaaaatgcaaccccctggcacttggaaatcaagatggtcatcacatgcagtttggattttgacattcccattagaacccaaggctaccaaatctgccacatccccccatggctctgtgtgacatggtctgctttttagccccagtgtctctgagagcccagggctcccagaagcctgtcccaagactgcyagctcatataatcctactggayagtatctcaaactgcaaatagaaatcttaaagraagtacaagaagagaaacaaacttgatggcatagagggtttacttgttcttcctctctggaagtggtaaatctctgcaaatctgtgttagcacatactggggattcttactaccagttctttatgttttgttactacagagaaagtttcagttaccgggaccatctgtgaatagcttctttctcaggcattagcctctctctatrtatgacgcttagtcagcttcagtrgctgctgaagcactggtgtatgagatgtcatttgagacatttgaaagaacatagctttaagatgaaagtc

SEQ ID NO: 11243 - DNA, 600 bp, Chicken  19866894213798_4
tgagagcccagggctcccagaagcctgtcccaagactgcyagctcatataatcctactggayagtatctcaaactgcaaatagaaatcttaaagraagtacaagaagagaaacaaacttgatggcatagagggtttacttgttcttcctctctggaagtggtaaatctctgcaaatctgtgttagcacatactggggattcttactaccagttctttatgttttgttactacagagaaagtttcagttaccgggaccatctgtgaatagcttctttctcaggcattagcctctctctatrtatgacgcttagtcagcttcagtrgctgctgaagcactggtgtatgagatgtcatttgagacatttgaaagaacatagctttaagatgaaagtcttatttcagttaggaaaaaaaaaaacatgttatctgcacatccttcagctttactcccccaacatgtttcttttcccctatccaacaaaaatgcatctaaatgaaatgagacttaacatccttgggctccagctatttcaggtacatataactgtagtgaaaacactccaggttttacacagaaaggaacactaacgcaattaact

SEQ ID NO: 11244 - DNA, 600 bp, Chicken  19866894213798_5
ctgtcccaagactgcyagctcatataatcctactggayagtatctcaaactgcaaatagaaatcttaaagraagtacaagaagagaaacaaacttgatggcatagagggtttacttgttcttcctctctggaagtggtaaatctctgcaaatctgtgttagcacatactggggattcttactaccagttctttatgttttgttactacagagaaagtttcagttaccgggaccatctgtgaatagcttctttctcaggcattagcctctctctatrtatgacgcttagtcagcttcagtrgctgctgaagcactggtgtatgagatgtcatttgagacatttgaaagaacatagctttaagatgaaagtcttatttcagttaggaaaaaaaaaaacatgttatctgcacatccttcagctttactcccccaacatgtttcttttcccctatccaacaaaaatgcatctaaatgaaatgagacttaacatccttgggctccagctatttcaggtacatataactgtagtgaaaacactccaggttttacacagaaaggaacactaacgcaattaactttaaaatgtttgtttgaatctgaa

SEQ ID NO: 11245 - DNA, 600 bp, Chicken  19866894213798_6
aaacaaacttgatggcatagagggtttacttgttcttcctctctggaagtggtaaatctctgcaaatctgtgttagcacatactggggattcttactaccagttctttatgttttgttactacagagaaagtttcagttaccgggaccatctgtgaatagcttctttctcaggcattagcctctctctatrtatgacgcttagtcagcttcagtrgctgctgaagcactggtgtatgagatgtcatttgagacatttgaaagaacatagctttaagatgaaagtcttatttcagttaggraaaaaaaaaacatgttatctgcacatccttcagctttactcccccaacatgtttcttttcccctatccaacaaaaatgcatctaaatgaaatgagacttaacatccttgggctccagctatttcaggtacatataactgtagtgaaaacactccaggttttacacagaaaggaacactaacgcaattaactttaaaatgtttgtttgaatctgaaaataagcatctgattcatagtcactcagctgtgttgaaatactatccttagcccaactaaaaatgaagcgtaggccctgggggat

SEQ ID NO: 11246 - DNA, 600 bp, Chicken  19866894213801_1
aacgctctctgggagcatggataagggagaacaaggtgctccaaaagcaaaagctcatccttgcacagcacatcgcacaggatgggaaaggagtcacggttgtgtacttcacagtgccaacactacgcacctctgcacttttaattatttttaatgcttagaggggaaaagcctgtgccactaagccctctggtgacagctccaggatcagcagcctctgtcacagccagcagagctggcatgctttcagaaacctcggcagcattgctgtggggctctgctcagaaagcaaaccttgarggaaattggaggcttgtaagcctttgaatgggggaaaaaataaaataaaatgtatatttgaagattattcatgaggggggcagtgcaaggactcagtcttctgcctttgaagggtagcacaggaacgtggtaatcctgcacatggcaggtagatgctgcgctcataccccaaggtgcagaaaaacataggcagcatgtagcagggcttggccctgtgctcatttttggttcaaaaaatgagcagaacaagcaaagcttgccagcatctgcctacaaacacagcttgaacttgcccttagt

SEQ ID NO: 11247 - DNA, 600 bp, Chicken  19866894213801_2
ttgaagattattcatgaggggggcagtgcaaggactcagtcttctgcctttgaagggtagcacaggaacgtggtaatcctgcacatggcaggtagatgctgcgctcataccccaaggtgcagaaaaacataggcagcatgtagcagggcttggccctgtgctcatttttggttcaaaaaatgagcagaacaagcaaagcttgccagcatctgcctacaaacacagcttgaacttgcccttagtaacaagagacagtagcaccacaggctatgtccaacctacagtgtttgcagggggagratgttttaaaggagtgtatctggaagatcccagcagtgccaccagagggaaatgggaacacccaggtacagggcaaggggacagggaagccgggaacagtgctaaaaacagggagcaagagaaggaggagcagcactaagaaaggaagaggaaggaatgagagagagaaggagcatcagtgtggaccagaacatcattgagacaggctaacaaaaatgttggtgcaggattttggtggatggcagtcgggagcaggtatagagctgagtgaggtccccagcacaatgggtcctgcattgc

SEQ ID NO: 11248 - DNA, 565 bp, Chicken  19866894213802_1
tggctatgtatgcccagctactgtcctgaaagcttgctttgagaattaacacttacagaaataaaagtcataacaatggtattggtgcatgtatgtatggaattgcaacatgcttctttgccagtatgcattacatgaaggtgaaataacatcattctcaaaatttaaaaggagaacaaaaattaattaaggcaaaaagtcagtttatgaagactaatgggcctgataataaaggtcaatgtacatttaatgatccagaaaaataggttgttttgtcaatatgtaaactctaatttataytgttaattttttaacactgtaggctgcaatttacattgcttcctttttaataatattttgtctaatcctgaaatagattccttacagatcaatccacaaaatgtatatctctatcagtacttacaatggaacaaataaactagtagaagctctattttagcacaggcaaagaaatgaagatagcatccttaatatctggttctcctaagcagttaattttcttcttgtcagtatcaaggggcataattcacaatcgagtcagaat

SEQ ID NO: 11249 - DNA, 600 bp, Chicken  19866894213807_1
gtactacccctcaattctgctgggtataatagaacctgagtcatcatttctactattagtgagtatagaatttttatcctgtctaatgaaagcaacagaattgactgtctagccataaagatgtatttcaactttttttgtagcacaaagaatcatagacattaagacatcatggacatcaagagctatacttcttcctgatttgatttcatgcaatgtcatttcactgtaataatcataggaaaagactttttctgtaaataactagattgtcttacctcactgatagttcacagagtwgcagatgcagtagaacacatgcactgctaatgtatatttccagtgccaacagggaaggtggacttaaaaaaattcaggcaaagggatttggctaatgtagctgagtacttgagatttgtaagttaattaattatataaatcctaaagatcattgggaaaccaacttcacaacacatagccccttgtgccacctgttctccttacttgagccaaaacaacgaataatcatctaaatgtgtagctttaatgaaccctcactgtacaaggaactgagtgagatatatggcttcctttcttctc

SEQ ID NO: 11250 - DNA, 600 bp, Chicken  19866894213808_1
tggaaaataaacgtcaagtcaaagccaagatgtttattttaaaaacaagagacatggatctcatggcgacgttccatcgtgtctctgttcctccaataacaaatgtccaatatgaatgcagccaaatgacagcctcttcctgggacggagcagcgcgggcgaagccagattgcttcatgtgatggcttgtggagctgtgcctcatttgcttgtcctcggctcaggttttagggaagctgtctggataaccaatacaaaacggtttctctgatgtatgttaagtttacaaagggatttagraggatagagagaagaaaacgtgacagcaaatgcattcttcctttgcctttacatggttctccagagagggaggaaggacagtaactcgctgagatcgatgggagtccttccaggcatttccgtgggctttgcttaatgccttaaaagaacaaacagctgatatttaagctgattttatgttataaatgatggtgctataattcaattgcggtgagggtgtgaccggaccaaggtcagacaaggaagatgctgtctgatccaaaactgagattttgagctttatcaaatctacccataagg

SEQ ID NO: 11251 - DNA, 600 bp, Chicken  19866894213808_2
catccttcgctaagctctccccagacctctgccagctcctccctcacccaccagccacacaccctttgcaacatcaaacggagctgtcctaattactaccagcgctttgagtgcttttttttaaatgacctccaagggaaaaaataaattaggcgttcattaaaaaccgtgatctggagagcaagtagaaacaattcatttcagtttgttgaagtccctctcctgcgctgacatccttaagtcatatgcaaacgaaggttaaaatcatgctaaggagcagcgtggaattcaaaaaagcargggaaatttgacttcgaggagagatttgcaaaagtaatgctctgaaaagagttaagcctacagtcagtatttggctgcagactggcagtaagggccagagggatgttctgtacagaaatcataaatttgcttatttttccttttggagatgcattgtttcccaaagacgctctggctccagctctgatctggcgttccacattgacacttgttgaaccaacagacatactgggaagcaaggcgaggttaggctgcttctgcttcgtggcatcctcactggcagtgtcccttactccagtc

SEQ ID NO: 11252 - DNA, 599 bp, Chicken  19866894213813_1
  misc_feature (1)..(56): n is any nucleotide
nnnnnnnnnnnnnnnnnnnnnnnnnnnnnnnnnnnnnnnnnnnnnnnnnnnnnnnntggaatggacggcagaaatggtgagaggtttattctggttttgcagaagcttgaggcactctatgggtttgggactaggttgctgcctccaacagattgagcctttttattgaaagttttattatatttagttaagttatggggaaaaaaaaaaaaacccaaaaccaaaaacaaatttacaatttccactccattgttagagctggtcaggaagtgttctgtgtgaacactgatatgacagagygaaaagaagggcttggttttcacacatgaatttttttaattaaaagagaaatttaattgacagtcaagggttcatccaaaattaaagcttgtctggattttcaggtagaatgaaattcatctctgttaatatgagctggcttggcaagtttaagggcctactcttagggtgttcttatggcttcttttatgtttaggtataaaagcaatttatcttacctgtattacagcaggatgaattggcctgtgaagtgcctgtttctttcttattttatttttttttaatagaacccaatgaat

SEQ ID NO: 11253 - DNA, 566 bp, Chicken  19866894213813_2
tcatctctgttaatatgagctggcttggcaagtttaagggcctactcttagggtgttcttatggcttcttttatgtttaggtataaaagcaatttatcttacctgtattacagcaggatgaattggcctgtgaagtgcctgtttctttcttattttatttttttttaatagaacccaatgaataagtaacctggatgaaattcttccttctttatacaactataaagtaagaggacaattgagatttttgtatttttattctgatttagcagaggaaatatttcatttgttgaacgtttyacmggatattttatcatctgatataacaccttcccatttgtttctatcctgtcttaaaatacacttaattctccaagtgcagtggatttatactgacagcactacttgggagtaggctttgagaaactgtgagtattgtcgtcgtcactccaccggtgggaactgaggaagagaagggaagcaatttgccctacattgcacagtgaatccatcttcaaagccaagattaggtctgcctgttcttaatatttccccaaatgatgctt

SEQ ID NO: 11254 - DNA, 563 bp, Chicken  19866894213813_3
tctctgttaatatgagctggcttggcaagtttaagggcctactcttagggtgttcttatggcttcttttatgtttaggtataaaagcaatttatcttacctgtattacagcaggatgaattggcctgtgaagtgcctgtttctttcttattttatttttttttaatagaacccaatgaataagtaacctggatgaaattcttccttctttatacaactataaagtaagaggacaattgagatttttgtatttttattctgatttagcagaggaaatatttcatttgttgaacgtttyacmggatattttatcatctgatataacaccttcccatttgtttctatcctgtcttaaaatacacttaattctccaagtgcagtggatttatactgacagcactacttgggagtaggctttgagaaactgtgagtattgtcgtcgtcactccaccggtgggaactgaggaagagaagggaagcaatttgccctacattgcacagtgaatccatcttcaaagccaagattaggtctgcctgttcttaatatttccccaaatgatgctt

SEQ ID NO: 11255 - DNA, 599 bp, Chicken  19866894213817_1
  misc_feature (1)..(192): n is any nucleotide
nnnnnnnnnnnnnnnnnnnnnnnnnnnnnnnnnnnnnnnnnnnnnnnnnnnnnnnnnnnnnnnnnnnnnnnnnnnnnnnnnnnnnnnnnnnnnnnnnnnnnnnnnnnnnnnnnnnnnnnnnnnnnnnnnnnnnnnnnnnnnnnnnnnnnnnnnnnnnnnnnnnnnnnnnnnnnnnnnnnnnnnnnnnnnnnntaaagttcttccaattgagcttagtgtcagcatgtgcaatggaattaaaatttactaaatcctcacttcccctgaagtcttgtgttcgaaacaaaaattgatgaagtkttgttaccattctaaccttacaccatacatgattaacacaatgataggttaatcatactcaattgcttttccttttctcagttgctgttgtatgatatttgagaaaatagaagttaatttatactctgttcctgcaattgcaaatgtaaatactcagctcagctctgttttgctctgtagagattaatacatctgtattgatctactcaaataaaaccacttgaaaccaagaccactaattagatcctaattgtgccagcaaatgtgagtttcaattacgcattctgccacaaatatgt

SEQ ID NO: 11256 - DNA, 499 bp, Chicken  19866894213821_1
gatagttagatgaatgtgttttatcaacggaatggattaggctgtttgcattttgtcactgcaatctcaatccatcctgccaataaaacatattttatcaaagctttaggccaccatgctaacagaatgtgttttgtcaacagcctaaatccatcctgtcaacaaaatccattccaaaggaaaataactcaatctcttctgtcaacattaggagcaaaaacttggttgttagtatatggaaagcaaaaacaaactccatgggtaaccatcaatattttcaggtcaaaataggaaaaatayaaaagtatccaccagcttagcatatgtaaatgaaaacaattgggaaagttaaactattcttaagcatttcctgctgtgactgggatgtgaacaagctatggaggtgtccagtctgaagcctgaggcttctgccacccagacttcggagctagatcctagaagtaatgggtaatgaatacatattaattaagaaaactca

SEQ ID NO: 11257 - DNA, 599 bp, Chicken  19866894213831_1
  misc_feature (1)..(136): n is any nucleotide
nnnnnnnnnnnnnnnnnnnnnnnnnnnnnnnnnnnnnnnnnnnnnnnnnnnnnnnnnnnnnnnnnnnnnnnnnnnnnnnnnnnnnnnnnnnnnnnnnnnnnnnnnnnnnnnnnnnnnnnnnnnnnnnnnnnnnnnntttaaacttgcatataacccgagaggtttattagtacttatagaactgagaactgacaaataggtctttcatcccactatgaagaaactttttacaacttcatattaaacttgaaggtcgttttcagaaaagactttgaaaatggaaacacaaactattggaaraaaatgaaggatctgcacaaaaaacaaacaaacaaacaaaaaacccaacaaaaccaacaaacaaaacctggttttgtataatggcttgacccttttctgttgtatttgttaagaaaaagataaatagtgtgtttttatacttacaactttgttttctacctccctactaaaccaaaattctgctttttagaatgggttgtttcattctataggctaaaccattgcttttaaagtaaaaattttatttcatagtgcttaattaaaagaggattgatccatggctgtctcatctcctgttg

SEQ ID NO: 11258 - DNA, 600 bp, Chicken  19866894213833_1
tactagattttgagtaatattcaaagaagataaatttacatttccaaatatgatttgatgcattaaaaatgtttacatttttaattgcattgataatcaactcagagaactagcagtatgtgttttctgcaattaataaaaaattagcagtgtgcttgggaagaatgaatcatagaatcacagaatcacagaatggcctgggttggaagggacctcaaggatcatgaagctccaaccccctccaccacaggcagggccaccaacctctacatttaatactagaccaggctgccaaggaamccatccaacctgtccttgaacacctctagggatggggcatccacagtctctctgggcatcctgtttcagtaccttaacacactcatagtaaaaaacttccccctgatatccaacctaaatcttccctccttcaagttaaaaccatctccccttatcctactattatctatcctttcaaagagttgactcctctcctgtttataggctccctttaggtactgaaaggctgcaatgaggtcaccccgcagccttctcttcttcaggctgaacgagcccagctccctcagcctgtcttcatag

SEQ ID NO: 11259 - DNA, 600 bp, Chicken  19866894213833_2
ttcataggagaggtcctccagccctctgatcatcttagtggccctcctctggacccgctccaagagctccctgtcttccttgtactggtggccccagatctggacacagtactccagatggggcctcacaagggccgagtagagaggtacaatcacctccctgtccctgctggccacccctcttctgatggagcctgggataccatttgctttctgagctgcaagagcacactgctgtctcatgttaagtttttcatccaccagaacacccaggtccttctctgcaggtctatgattctrtgattctgtgattctatgaatgagtaatattgagtaattacttgaatactaatattagatttgtggagataactctgaaattaataagtactttgccataaaactttcagagatgcagaaggcatcatgaacatgcaaaagatctgtaaatgtcatcttaggttgtgttgttaaataagttagcacatgtccatatcccagtgcccttgtacctgtctatatagtagacactcagagtagttcagtgaaagggattaagttagctcgcacctagtggtgtgcagaggtggtcagagtgat

SEQ ID NO: 11260 - DNA, 600 bp, Chicken  19866894213833_3
gataggtaagtaatttttcaagcctgatacaagagggattgttcctgtggtggggagatctactattacacctctgctgttcgctggagaagaaacactttaactgcttcctcctatgctatgagagggtgtcggaggacatggtcttgtcctggtcttctgaacagcttagtcactcaacctcttctggttcctggtgtagaaaccagccactcatgtccagatgctactaagtttgaggagttgcgaaattggctcatgagaagattgactgtggaagaggtctctgttgatactggmaaaggtcttctcacacgaagctgtgtttatgggacttacagctgatggaacatgacaacctgctactagagagaagaagaaggtaggatgaagatacaggaaagagagggaaggccctctgccacagctcgctgcaaagagatgcaacatcctccttgggatggtctctccccactacagcagctggtgatgacagtggtgttgtagccagcatagtcatcatcccattttctcctccatggactggcacagcccaggtggccatttcacacaggacctgacatttccccccacagctgt

SEQ ID NO: 11261 - DNA, 600 bp, Chicken  19866894213833_4
tcacacgaagctgtgtttatgggacttacagctgatggaacatgacaacctgctactagagagaagaagaaggtaggatgaagatacaggaaagagagggaaggccctctgccacagctcgctgcaaagagatgcaacatcctccttgggatggtctctccccactacagcagctggtgatgacagtggtgttgtagccagcatagtcatcatcccattttctcctccatggactggcacagcccaggtggccatttcacacaggacctgacatttccccccacagctgtcactgcacayggaccgagcaagtggcacaactaatggtccttggtctgcttgatgagggcagagtgaagaactggtccttcacaggcactcaccgggcactgatgcctcagaactgagcatactggacatacagaaggcactgctcagtagacagtgggtattgctcccacacattttctctgcaaccaaatcacattttgtggagccggatcctgtgcaactgaagatgatgttgcatggaggcttgcaacagagagagttgtaacatccaggcagtgaccattcaaaatctgttatctctggaagctc

SEQ ID NO: 11262 - DNA, 521 bp, Chicken  19866894213833_5
tggttgtatctacttactctgcatttcacactgtgattgagttaaatctgaaatattgctgcccttggctaaacactttcttccctctagcacagtaaaagtaatatttttaataatttacaattcagtgattcctgaggacttctttctttgattttaaattttctacatacatagtatttccagtgtaaattacagaagagatacaacatgtgagtgatatgaagaaaagctgatgggcaatacttctatcaaaaatgggaattgttacttccatcaagcatatttatacaacttttkcaggataaaaattgcatgttcatctaagtaaccagtatgaactcagtgaaatatgattttccttttatatatggataaatattccgttgcttttctttctgaaagtttttctcttctatagacattgtgaatctatctaattactcagtgcttcagaaaggtagatttcatacttcagaacttaagcatcaattgataagatcattataagatgtccttat

SEQ ID NO: 11263 - DNA, 600 bp, Chicken  19866894213834_1
ctgatgcctacaaattcgaggaagatgctgaaattggagaagattcaggaaaaagacaaagatatttttgatggactggaacacgcgtctcttgagaaagcaatcaagggatttagcttattttgtttattcaaagtatgtttggcagggacttgttcccttttttaaatattgggaattgcgatttgatagtcagtattcaagataacaaacaaacccaaaagctggaaaacagagctggctagatatagggtattttttcacatggtttcctagagatagcaaagtctctgcaactgrggacattcctccatctttcagttccatcccttgttttctctcctcctctcctacccaggcaagttttaaatgtttggtatgtttcagcatgtttgcccagttacaaccaaagataccagagtgaggcagtgggaaaatctcaaagatacagccagtcttaaagtgttctgacaacaagcaacggggcagagttgtgcagactgatttatgctcttacagagaagaaaacagttacgatgatgctttttgcctggagtgcagatgtgggctgtctgggcagtgcacgcacacagcctggcc

SEQ ID NO: 11264 - DNA, 599 bp, Chicken  19866894213836_1
  misc_feature (1)..(35): n is any nucleotide
nnnnnnnnnnnnnnnnnnnnnnnnnnnnnnnnnnncaaaaagcacaagatttccaaaatgtacttataaatacaaggcatgaactcacttttcttactgtaaatgctcgtacctgctgcagaactattatcaattatggtagactaatgaatttcaaggcattttagttaagacaggtcagtctcatgcaagttaatgttcccacatattagttctaatgcttgcagtaatgcgtgttaaacagccattgggatttttattaggaaaaggtggaggggattgcatttgttgtggctgaarttttgtrtatgtccgctgcttgccctttacacacatgcaagcaggtcctctttcwataagtctccacttaaacrgcctgttcacaggcaccagtatttgccagaaaagaaaaaaatcactaggatccaagtggcaggacaagggtgacatggggaagtcacgctgctgtcttccttacacmgtatctttgaccatctccaattaacaaagcaagtraaggtaacagcatagtagaactacatgggctatgtaacagcagctgctttttgacaagcttacattttgaattattcaaatat

SEQ ID NO: 11265 - DNA, 599 bp, Chicken  19866894213836_2
  misc_feature (1)..(28): n is any nucleotide
nnnnnnnnnnnnnnnnnnnnnnnnnnnncaaaaagcacaagatttccaaaatgtacttataaatacaaggcatgaactcacttttcttactgtaaatgctcgtacctgctgcagaactattatcaattatggtagactaatgaatttcaaggcattttagttaagacaggtcagtctcatgcaagttaatgttcccacatattagttctaatgcttgcagtaatgcgtgttaaacagccattgggatttttattaggaaaaggtggaggggattgcatttgttgtggctgaarttttgtrtatgtccgctgcttgccctttacacacatgcaagcaggtcctctttcwataagtctccacttaaacrgcctgttcacaggcaccagtatttgccagaaaagaaaaaaatcactaggatccaagtggcaggacaagggtgacatggggaagtcacgctgctgtcttccttacacmgtatctttgaccatctccaattaacaaagcaagtraaggtaacagcatagtagaactacatgggctatgtaacagcagctgctttttgacaagcttacattttgaattattcaaatattaccttg

SEQ ID NO: 11266 - DNA, 600 bp, Chicken  19866894213836_3
aaatgtacttataaatacaaggcatgaactcacttttcttactgtaaatgctcgtacctgctgcagaactattatcaattatggtagactaatgaatttcaaggcattttagttaagacaggtcagtctcatgcaagttaatgttcccacatattagttctaatgcttgcagtaatgcgtgttaaacagccattgggatttttattaggaaaaggtggaggggattgcatttgttgtggctgaarttttgtrtatgtccgctgcttgccctttacacacatgcaagcaggtcctctttcwataagtctccacttaaacrgcctgttcacaggcaccagtatttgccagaaaagaaaaaaatcactaggatccaagtggcaggacaagggtgacatggggaagtcacgctgctgtcttccttacacmgtatctttgaccatctccaattaacaaagcaagtraaggtaacagcatagtagaactacatgggctatgtaacagcagctgctttttgacaagcttacattttgaattattcaaatattaccttgtattttaattcattaaaagaacattaaaaagcaaatttattttttaaaa

SEQ ID NO: 11267 - DNA, 600 bp, Chicken  19866894213836_4
aggcatgaactcacttttcttactgtaaatgctcgtacctgctgcagaactattatcaattatggtagactaatgaatttcaaggcattttagttaagacaggtcagtctcatgcaagttaatgttcccacatattagttctaatgcttgcagtaatgcgtgttaaacagccattgggatttttattaggaaaaggtggaggggattgcatttgttgtggctgaarttttgtrtatgtccgctgcttgccctttacacacatgcaagcaggtcctctttcwataagtctccacttaaacrgcctgttcacaggcaccagtatttgccagaaaagaaaaaaatcactaggatccaagtggcaggacaagggtgacatggggaagtcacgctgctgtcttccttacacmgtatctttgaccatctccaattaacaaagcaagtraaggtaacagcatagtagaactacatgggctatgtaacagcagctgctttttgacaagcttacattttgaattattcaaatattaccttgtattttaattcattaaaagaacattaaaaagcaaatttattttttaaaattgctatttgtttcaacag

SEQ ID NO: 11268 - DNA, 600 bp, Chicken  19866894213836_5
tctcatgcaagttaatgttcccacatattagttctaatgcttgcagtaatgcgtgttaaacagccattgggatttttattaggaaaaggtggaggggattgcatttgttgtggctgaarttttgtrtatgtccgctgcttgccctttacacacatgcaagcaggtcctctttcwataagtctccacttaaacrgcctgttcacaggcaccagtatttgccagaaaagaaaaaaatcactaggatccaagtggcaggacaagggtgacatggggaagtcacgctgctgtcttccttacacmgtatctttgaccatctccaattaacaaagcaagtraaggtaacagcatagtagaactacatgggctatgtaacagcagctgctttttgacaagcttacattttgaattattcaaatattaccttgtattttaattcattaaaagaacattaaaaagcaaatttattttttaaaattgctatttgtttcaacagaattgaaaagtgtgttttgcctagtcttgacttaatttaaggagcactaatttcattttaatttgcaccatcttacctcaatcaatttattggcatgctcacggaaa

SEQ ID NO: 11269 - DNA, 600 bp, Chicken  19866894213836_6
aatgcttgcagtaatgcgtgttaaacagccattgggatttttattaggaaaaggtggaggggattgcatttgttgtggctgaarttttgtrtatgtccgctgcttgccctttacacacatgcaagcaggtcctctttcwataagtctccacttaaacrgcctgttcacaggcaccagtatttgccagaaaagaaaaaaatcactaggatccaagtggcaggacaagggtgacatggggaagtcacgctgctgtcttccttacacmgtatctttgaccatctccaattaacaaagcaagtraaggtaacagcatagtagaactacatgggctatgtaacagcagctgctttttgacaagcttacattttgaattattcaaatattaccttgtattttaattcattaaaagaacattaaaaagcaaatttattttttaaaattgctatttgtttcaacagaattgaaaagtgtgttttgcctagtcttgacttaatttaaggagcactaatttcattttaatttgcaccatcttacctcaatcaatttattggcatgctcacggaaaacctgggcatattccttaacttctttctcgttccc

SEQ ID NO: 11270 - DNA, 600 bp, Chicken  19866894213838_1
catccatgctcttctgtatccctgagttagctagtatgaagcagcacacatctcagtaagcccttgaatcaaccatggcatagctgcctggcatacttgagtttgtaagaatgttggtacgtatttttataataaaaacatcacatatagagccatgagattttcatcaccatgctgtaattgcagtcaaaagcattagtattttatttaaagaaaaaaaactataggtaggtgtctatacaacactaggaactttaaacaaaaaagaaaaaaagaaaaaagactttctgtgtacttttraaaactggtgaggccttgaaacctttaaaaagaagagcccacattaactgatcttcaggttagactttgaaagcagcttgaaagatatgtaagctcaccaagccacttggaaaatcagtgccttagtattttatgcatgcaggcggcagaccacagcctgagtaccaagcaatttgcacctctcttttgggcttctagcccttgcctttctatcttcgtccctggcagtcatcttggctgtttgagcagaattacctagtgttcccacttctcctcccacagtcctgccatgcctcctgg

SEQ ID NO: 11271 - DNA, 600 bp, Chicken  19866894213840_1
tacattagcaccatcatgtggtataacactgagctgtgcaatacaaaataagctacagccatacagggctgaaactttctgactgtattctgggttgggtcagagtgcaagaagctgtaactgataaagtggtaggatagtcacaccgttcaagactaaaacatgattactcttgtcaggaaatgttaaccacagcaaaacatttctctgacataaatccacaacctaattcaggcattctgggtgggctcagcaagcctagagggagcagtagagttttcttctatggtaacacaccakcaacttgtccgaaatactaagctgccctttgttttgctgttcttgtgttgaaaacaaataaaatcaagaggattagttattcccgttcatgcagactgtcaactcagcagatgacagaataataaatagcaggtttttcagaacttatttctgtaaaatcatgccaaatgggtgcaagaagtgaggctacatttagcatgcccctgtgygctgttgtcacccttaccatgaacatgatccacactcagtgccatactactacctggcactctgttgtctgccaggagtttatgtgctttc

SEQ ID NO: 11272 - DNA, 600 bp, Chicken  19866894213840_2
gacataaatccacaacctaattcaggcattctgggtgggctcagcaagcctagagggagcagtagagttttcttctatggtaacacaccakcaacttgtccgaaatactaagctgccctttgttttgctgttcttgtgttgaaaacaaataaaatcaagaggattagttattcccgttcatgcagactgtcaactcagcagatgacagaataataaatagcaggtttttcagaacttatttctgtaaaatcatgccaaatgggtgcaagaagtgaggctacatttagcatgcccctgtgygctgttgtcacccttaccatgaacatgatccacactcagtgccatactactacctggcactctgttgtctgccaggagtttatgtgctttcagggttttcctagagaggattcgggcaactgtttcctggatgctttgcctagaagcattttgtctgctatgccagagaacaggaatcttggagaaccagcagatccattcaaaggaactgctgaactcacgctctcttgttgctgcagtctagcagagaggccaatttcctatgggtttcactccaggcctcaggctggctggatagga

SEQ ID NO: 11273 - DNA, 592 bp, Chicken  19866894213847_1
tttattttgtggatagatcttagaaaaaataataatcttttgacacagttgcacaccatctaaaaacaacttgtctttcagcagtagtcagtgaacatgcgttgaatggagttcttgtgtttatatagcccaggaatgttcactgcattgcatttacacacactcacttgcgcaaagccttgacaggccgacttttgttatgcaggcagtgggaacaaagtttctctgctctgatcttgcacagctcagagctagcagacagagatgtgtttcaatcagatttgagctaggatatttttwaaaaaatgaactgggaaaattagggtatttttttgtagcaccacaatttaactgtagttcatgtgggagracgtaactctaacttaaaaatcatttggaagtcagtgtgcagatgctttttgctcataggaaaacaacctcagtctgaacttacaacaaccttagtccaatatatgtgcatttgtgtgtgtatatttaattttctgtattcatccaatagtataaaataaaaaggaaatgtaaaatcttccccaggcgtgtgaaggtcccccactccggttatggaaaacta

SEQ ID NO: 11274 - DNA, 522 bp, Chicken  19866894213847_2
ttgtctttcagcagtagtcagtgaacatgcgttgaatggagttcttgtgtttatatagcccaggaatgttcactgcattgcatttacacacactcacttgcgcaaagccttgacaggccgacttttgttatgcaggcagtgggaacaaagtttctctgctctgatcttgcacagctcagagctagcagacagagatgtgtttcaatcagatttgagctaggatatttttwaaaaaatgaactgggaaaattagggtatttttttgtagcaccacaatttaactgtagttcatgtgggagracgtaactctaacttaaaaatcatttggaagtcagtgtgcagatgctttttgctcataggaaaacaacctcagtctgaacttacaacaaccttagtccaatatatgtgcatttgtgtgtgtatatttaattttctgtattcatccaatagtataaaataaaaaggaaatgtaaaatcttccccaggcgtgtgaaggtcccccactccggttatggaaaacta

SEQ ID NO: 11275 - DNA, 600 bp, Chicken  19866894213852_1
ataccatgttaccaggggtccccaaaataggaacacatggtaagctctccacctctgtgccaggctcctgcaggctgccttgatcccagcacaaagcttcagctcagggacctccagatgcccagagcaggagggacaggcagaccaagtcagcccatgcagtgttttactttttgtagctgcaaataaactatttgagttatttattcttgtcagcccacattgaacaatgtaggaaaacaggaaacaaactgaatattctatttcagggttctaattaggaggaattagagcagcaayaagaaatgcacaaagctaatcctggagcagaggcaaattcagtcttcaccrgccgagaatctgctgtgcgaactggaaatggcaggatgttatgggacataatgactgaccccttcaygtgaaaactttacccaaaagcagcaatagagactttgttctcaaaggttttctgccaactttttttgaggccatggtaaataggaacacagcgatttgcatctcaaaccagaacaagaacacaaaagaattgtgagcgcagtaagagtgttctccaagatgcaacccaaatttaatgtttgg

SEQ ID NO: 11276 - DNA, 600 bp, Chicken  19866894213852_2
cctctgtgccaggctcctgcaggctgccttgatcccagcacaaagcttcagctcagggacctccagatgcccagagcaggagggacaggcagaccaagtcagcccatgcagtgttttactttttgtagctgcaaataaactatttgagttatttattcttgtcagcccacattgaacaatgtaggaaaacaggaaacaaactgaatattctatttcagggttctaattaggaggaattagagcagcaayaagaaatgcacaaagctaatcctggagcagaggcaaattcagtcttcaccrgccgagaatctgctgtgcgaactggaaatggcaggatgttatgggacataatgactgaccccttcaygtgaaaactttacccaaaagcagcaatagagactttgttctcaaaggttttctgccaactttttttgaggccatggtaaataggaacacagcgatttgcatctcaaaccagaacaagaacacaaaagaattgtgagcgcagtaagagtgttctccaagatgcaacccaaatttaatgtttggataaaagatctgtaccaagggcacagaggaactgtgagagaaacttaaggc

SEQ ID NO: 11277 - DNA, 600 bp, Chicken  19866894213852_3
tgcccagagcaggagggacaggcagaccaagtcagcccatgcagtgttttactttttgtagctgcaaataaactatttgagttatttattcttgtcagcccacattgaacaatgtaggaaaacaggaaacaaactgaatattctatttcagggttctaattaggaggaattagagcagcaayaagaaatgcacaaagctaatcctggagcagaggcaaattcagtcttcaccrgccgagaatctgctgtgcgaactggaaatggcaggatgttatgggacataatgactgaccccttcaygtgaaaactttacccaaaagcagcaatagagactttgttctcaaaggttttctgccaactttttttgaggccatggtaaataggaacacagcgatttgcatctcaaaccagaacaagaacacaaaagaattgtgagcgcagtaagagtgttctccaagatgcaacccaaatttaatgtttggataaaagatctgtaccaagggcacagaggaactgtgagagaaacttaaggccaacaggagcagggagcaatcacccccatgtkctcagctctggtggggctgtacatcagtgctgtgt

SEQ ID NO: 11278 - DNA, 567 bp, Chicken  19866894213852_4
aggatgttatgggacataatgactgaccccttcaygtgaaaactttacccaaaagcagcaatagagactttgttctcaaaggttttctgccaactttttttgaggccatggtaaataggaacacagcgatttgcatctcaaaccagaacaagaacacaaaagaattgtgagcgcagtaagagtgttctccaagatgcaacccaaatttaatgtttggataaaagatctgtaccaagggcacagaggaactgtgagagaaacttaaggccaacaggagcagggagcaatcacccccatgtkctcagctctggtggggctgtacatcagtgctgtgttcacctcttggcccctcactgcaagaaagacactgaggccgtggagtgtgtccagagaagggcacggagctgtgcggggtgtggggcacagtgtgatgggaagctgctgagggaacgggatgggtcagtgtggagaagaggagctcaggggagacctcattgcatcgagttgagctggtgaaggttcacgttggttattagaaaaaatttcttcccagaaagagcagtgagg

SEQ ID NO: 11279 - DNA, 600 bp, Chicken  19866894213855_1
taagaggggatgtggggagcacatgaggggggtgacagggagggaaggttgtgcaggcagagctgttcatgccacctcactccacctctccccaggttggtatcggccaactttcttccaggatatttctcccacgtcttcattgatgagtgtggccacgcagtagagccagagagtgttgtggcaatcgctggtgagtggcccctggctgcctctctgggtcagcattgctgctcagtgctccctgctaagctctctctgcccagggctgctgaccaccatggacccagacaccaaccscaacgggggacagctggtgctggcaggggatccccagcagctgggtcctgtcctgaggtcgccactggctgcgcagcatggcttgggtgagtgagggcagggctgggggtggcacagtgcctgcacagcatcrcrggagccatgggtctgactgcatgcaggcacctcrctgttggagcgcctgatgctgcacaaygcactgtatgccaagtcagatgagggctacaacccrcagttcgtcaccaagctgctctggaactacaggtgggaacagggccacgcagctcagtgcagggcacg

SEQ ID NO: 11280 - DNA, 600 bp, Chicken  19866894213855_2
acgtcttcattgatgagtgtggccacgcagtagagccagagagtgttgtggcaatcgctggtgagtggcccctggctgcctctctgggtcagcattgctgctcagtgctccctgctaagctctctctgcccagggctgctgaccaccatggacccagacaccaaccscaacgggggacagctggtgctggcaggggatccccagcagctgggtcctgtcctgaggtcgccactggctgcgcagcatggcttgggtgagtgagggcagggctgggggtggcacagtgcctgcacagcatcrcrggagccatgggtctgactgcatgcaggcacctcrctgttggagcgcctgatgctgcacaaygcactgtatgccaagtcagatgagggctacaacccrcagttcgtcaccaagctgctctggaactacaggtgggaacagggccacgcagctcagtgcagggcacgtggtgccaccccactcctgatgggtgccgtggccctggggatggggcagacccacagccctgggtgcctgttgcccgaggagagcatcaggcccttcctgcacactgtcctgcctccgccaggtcccacaagg

SEQ ID NO: 11281 - DNA, 600 bp, Chicken  19866894213855_3
gtcttcattgatgagtgtggccacgcagtagagccagagagtgttgtggcaatcgctggtgagtggcccctggctgcctctctgggtcagcattgctgctcagtgctccctgctaagctctctctgcccagggctgctgaccaccatggacccagacaccaaccscaacgggggacagctggtgctggcaggggatccccagcagctgggtcctgtcctgaggtcgccactggctgcgcagcatggcttgggtgagtgagggcagggctgggggtggcacagtgcctgcacagcatcrcrggagccatgggtctgactgcatgcaggcacctcrctgttggagcgcctgatgctgcacaaygcactgtatgccaagtcagatgagggctacaacccrcagttcgtcaccaagctgctctggaactacaggtgggaacagggccacgcagctcagtgcagggcacgtggtgccaccccactcctgatgggtgccgtggccctggggatggggcagacccacagccctgggtgcctgttgcccgaggagagcatcaggcccttcctgcacactgtcctgcctccgccaggtcccacaaggcc

SEQ ID NO: 11282 - DNA, 600 bp, Chicken  19866894213855_4
cagagagtgttgtggcaatcgctggtgagtggcccctggctgcctctctgggtcagcattgctgctcagtgctccctgctaagctctctctgcccagggctgctgaccaccatggacccagacaccaaccscaacgggggacagctggtgctggcaggggatccccagcagctgggtcctgtcctgaggtcgccactggctgcgcagcatggcttgggtgagtgagggcagggctgggggtggcacagtgcctgcacagcatcrcrggagccatgggtctgactgcatgcaggcacctcrctgttggagcgcctgatgctgcacaaygcactgtatgccaagtcagatgagggctacaacccrcagttcgtcaccaagctgctctggaactacaggtgggaacagggccacgcagctcagtgcagggcacgtggtgccaccccactcctgatgggtgccgtggccctggggatggggcagacccacagccctgggtgcctgttgcccgaggagagcatcaggcccttcctgcacactgtcctgcctccgccaggtcccacaaggccatcctcaaggtccccaacgagctcttctatgaca

SEQ ID NO: 11283 - DNA, 600 bp, Chicken  19866894213855_5
agtggcccctggctgcctctctgggtcagcattgctgctcagtgctccctgctaagctctctctgcccagggctgctgaccaccatggacccagacaccaaccscaacgggggacagctggtgctggcaggggatccccagcagctgggtcctgtcctgaggtcgccactggctgcgcagcatggcttgggtgagtgagggcagggctgggggtggcacagtgcctgcacagcatcrcrggagccatgggtctgactgcatgcaggcacctcrctgttggagcgcctgatgctgcacaaygcactgtatgccaagtcagatgagggctacaacccrcagttcgtcaccaagctgctctggaactacaggtgggaacagggccacgcagctcagtgcagggcacgtggtgccaccccactcctgatgggtgccgtggccctggggatggggcagacccacagccctgggtgcctgttgcccgaggagagcatcaggcccttcctgcacactgtcctgcctccgccaggtcccacaaggccatcctcaaggtccccaacgagctcttctatgacagtgagctgaaggcgtatgatggcagtg

SEQ ID NO: 11284 - DNA, 600 bp, Chicken  19866894213855_6
gctcagtgctccctgctaagctctctctgcccagggctgctgaccaccatggacccagacaccaaccscaacgggggacagctggtgctggcaggggatccccagcagctgggtcctgtcctgaggtcgccactggctgcgcagcatggcttgggtgagtgagggcagggctgggggtggcacagtgcctgcacagcatcrcrggagccatgggtctgactgcatgcaggcacctcrctgttggagcgcctgatgctgcacaaygcactgtatgccaagtcagatgagggctacaacccrcagttcgtcaccaagctgctctggaactacaggtgggaacagggccacgcagctcagtgcagggcacgtggtgccaccccactcctgatgggtgccgtggccctggggatggggcagacccacagccctgggtgcctgttgcccgaggagagcatcaggcccttcctgcacactgtcctgcctccgccaggtcccacaaggccatcctcaaggtccccaacgagctcttctatgacagtgagctgaaggcgtatgatggcagtgagcctgacgtgcgcaacttctactgcacctgggagg

SEQ ID NO: 11285 - DNA, 599 bp, Chicken  19866894213859_1
  misc_feature (1)..(146): n is any nucleotide
nnnnnnnnnnnnnnnnnnnnnnnnnnnnnnnnnnnnnnnnnnnnnnnnnnnnnnnnnnnnnnnnnnnnnnnnnnnnnnnnnnnnnnnnnnnnnnnnnnnnnnnnnnnnnnnnnnnnnnnnnnnnnnnnnnnnnnnnnnnnnnnnnntagatataaggatgttatgtgggattatgttaaaggccttgcaagaaatccaggtcctttgtgataatctaaaatactcttttgcagacttattaagacataaggtcttagagttctaagatataagagctctaaagatgtcagaagagcaaartttctagtttgagggaaacttcagtttggacctaagaattscattgggcttggatgcttcaaatctactgtttagcttctccataaaacattaatttcatttaccctagsagatgcaggaggctcaagcatctttgagctaccagggaaacctggtatgagaaaactgagaatattttctgtggaggagccttgtgttcaagaaacccaaaatgaggagaggaatgggaagaggtgagaaggagagaaaaacatatagtaaatttttaggctatgtggatttaactttgtaaatttaat

SEQ ID NO: 11286 - DNA, 599 bp, Chicken  19866894213859_2
  misc_feature (1)..(105): n is any nucleotide
nnnnnnnnnnnnnnnnnnnnnnnnnnnnnnnnnnnnnnnnnnnnnnnnnnnnnnnnnnnnnnnnnnnnnnnnnnnnnnnnnnnnnnnnnnnnnnnnnnnnnnnnntagatataaggatgttatgtgggattatgttaaaggccttgcaagaaatccaggtcctttgtgataatctaaaatactcttttgcagacttattaagacataaggtcttagagttctaagatataagagctctaaagatgtcagaagagcaaartttctagtttgagggaaacttcagtttggacctaagaattscattgggcttggatgcttcaaatctactgtttagcttctccataaaacattaatttcatttaccctagsagatgcaggaggctcaagcatctttgagctaccagggaaacctggtatgagaaaactgagaatattttctgtggaggagccttgtgttcaagaaacccaaaatgaggagaggaatgggaagaggtgagaaggagagaaaaacatatagtaaatttttaggctatgtggatttaactttgtaaatttaattttaaaagataggatgtgcttacctgaaaaaacttcaagtt

SEQ ID NO: 11287 - DNA, 599 bp, Chicken  19866894213859_3
  misc_feature (1)..(36): n is any nucleotide
nnnnnnnnnnnnnnnnnnnnnnnnnnnnnnnnnnnntagatataaggatgttatgtgggattatgttaaaggccttgcaagaaatccaggtcctttgtgataatctaaaatactcttttgcagacttattaagacataaggtcttagagttctaagatataagagctctaaagatgtcagaagagcaaartttctagtttgagggaaacttcagtttggacctaagaattscattgggcttggatgcttcaaatctactgtttagcttctccataaaacattaatttcatttaccctagsagatgcaggaggctcaagcatctttgagctaccagggaaacctggtatgagaaaactgagaatattttctgtggaggagccttgtgttcaagaaacccaaaatgaggagaggaatgggaagaggtgagaaggagagaaaaacatatagtaaatttttaggctatgtggatttaactttgtaaatttaattttaaaagataggatgtgcttacctgaaaaaacttcaagttgaactctgcttgacatgagttgcagctatctgacattgagaagggcagggccttgaagaggtgaaaaca

SEQ ID NO: 11288 - DNA, 599 bp, Chicken  19866894213865_1
  misc_feature (1)..(21): n is any nucleotide
nnnnnnnnnnnnnnnnnnnnnaatgatttgggttggaaggaacctttaaaatcatctagctccaatcccccctgctacaggcagggacacctccctctagaccaggttgctcaaagccccatccatcctgcctttgaatgcttccacggaggggcattcataaccccactgagtaacctgttccaatgtctcaccatcctcacagtaaataatttcttctttatatctagtccaaatctacctttttccagtttaaagctatttcccctcatcctgtcactacctgcccttataaaaagyccctgcccagctgtcctgtaggccctcttcaggtactggaaggccactatacggtctcctcagagccttctcttctctaggttgaacagcccctgcctgtccttgtagaataggtgctctagccctctgatcatctttgtggccctccttggaccccttgtaagaactccatgtccttctagtgctggggaccacagaactggacacaatacttcaggtgggttctcacgagagaagagcagaacagcagaatcacctcccttgatctgctggtcacacttatcttgatgcaacccaga

SEQ ID NO: 11289 - DNA, 600 bp, Chicken  19866894213871_1
caaactcaatcaaactgagtgttaatttttgaagccaaacctctacgatcatttcacttgtgatgtaaaccagatctaacctcaaaactgtcaaaggccagaagtcaatgacccaatttgaaatgccacggaacccctatcagcagccagtgcttttcccttgtgtcagtcctactcatgcaggttattcattctttgtgaaatttattatagatatcgaacacagtgtttatataaaatacagcctgactgcaactttaagaaggttttgctatagcacagtggggcaaataaattccrgagtatatgtcaggtatgaataaaacctcttgtccgggtaggaatctaactttacaatggcaaatgcttccactaagtcccagtccaacttcaattgagtgttaatagtcccatatgaaaacctttagtgagaaatttgtgcttggctaatgcaattatggagctttctctaattgctcattcacttggaatataaaatggagtaatcagagtatttttggtcctttctagtctgattattcttgagagcctagtgggacaagattttgacctagatttcttcactcacctgaaatgaac

SEQ ID NO: 11290 - DNA, 600 bp, Chicken  19866894213874_1
acctcgatctcacaggtgcctactgtcgtttcaagcgaaaacagggtggaggaaaaaggggagggtgaagccatctgccccttttagaaatgcaaattaatgcagagtactcggtatacacttttataagcggacctgtgttctaagaccaggtgtgttgatgtatgtcaaagcagggctttccatgtgctcagagggggccggaattgctgacgaagcggaagaatcccagtgtgttgcatggactgctctgtgtaatggacatcaccatcttcaatcaaacgctcctattttttctaygaaacttttgaaacctgggatttgtgggtaaatggacattcagagatagaaagaaaaggttttaaagctctgaatgaaacgtaccgtacaatacagaagtgctgtaagggtgaaaaaaagaatacagtgaataaactgtagattcaacctcaagatttcagatggataactttgtggcattatatgcaaaatatctccattaacttgggaatgtaatatgttcaatgttaaggctgtagttgatgttgtgtcttcaaagctgcttttttgtttgtttgtttgttttaagagttgtacatc

SEQ ID NO: 11291 - DNA, 600 bp, Chicken  19866894213874_2
tatatgcaaaatatctccattaacttgggaatgtaatatgttcaatgttaaggctgtagttgatgttgtgtcttcaaagctgcttttttgtttgtttgtttgttttaagagttgtacatctcagcatttttactgctatttagtcatggcacctacactttgtatgagcaaagatggaacgagcttacccttccagtttgaaattacttataatttcataggaacatacaaaggaagcgtttctaagatcacaaaagtgtgactaaaactaggattgattaaaaaaaaaagaagaaaagyaaaaaaaaaaacttcatagaatcagaaacacctgcagtgtttttagagcttctgtcagaagtgggcatatgtgtgcaggattcatatgaaaaatatttgaaatgggagcaaccaagtattgcagatagagtgtgggctttgtttttttcagctgcaaagctgaacgtgtctgaagctgatttcaaaactggaattggctgctatygagctgatgtctcatttcacaatctagtcttcgtttcaatttgtgcccatacgcccattaaagttcatgaactattagacctcaaattgtttcaa

SEQ ID NO: 11292 - DNA, 600 bp, Chicken  19866894213874_3
acttataatttcataggaacatacaaaggaagcgtttctaagatcacaaaagtgtgactaaaactaggattgattaaaaaaaaaagaagaaaagaaaaaaaaaaaacttcatagaatcagaaacacctgcagtgtttttagagcttctgtcagaagtgggcatatgtgtgcaggattcatatgaaaaatatttgaaatgggagcaaccaagtattgcagatagagtgtgggctttgtttttttcagctgcaaagctgaacgtgtctgaagctgatttcaaaactggaattggctgctatygagctgatgtctcatttcacaatctagtcttcgtttcaatttgtgcccatacgcccattaaagttcatgaactattagacctcaaattgtttcaaaattktttattttattaaaggtttacattgtcaaaagtagtaaaagagtaactatcaattccagtgctgctatactaccaggataatttgaatgggttttatttttaataccttccaatggcaaaagttttttaaagctgctttagaaataatatgaagacgacacatgatacacattgaaatgaatactgaggattttgtgttc

SEQ ID NO: 11293 - DNA, 565 bp, Chicken  19866894213874_4
aaaaaacttcatagaatcagaaacacctgcagtgtttttagagcttctgtcagaagtgggcatatgtgtgcaggattcatatgaaaaatatttgaaatgggagcaaccaagtattgcagatagagtgtgggctttgtttttttcagctgcaaagctgaacgtgtctgaagctgatttcaaaactggaattggctgctatygagctgatgtctcatttcacaatctagtcttcgtttcaatttgtgcccatacgcccattaaagttcatgaactattagacctcaaattgtttcaaaattktttattttattaaaggtttacattgtcaaaagtagtaaaagagtaactatcaattccagtgctgctatactaccaggataatttgaatgggttttatttttaataccttccaatggcaaaagttttttaaagctgctttagaaataatatgaagacgacacatgatacacattgaaatgaatactgaggattttgtgttctgttgtgtctactcactggactacccagtgtattagttaataccaagcaaaaagaggagtcacga

SEQ ID NO: 11294 - DNA, 600 bp, Chicken  19866894213875_1
catgaggattgaaatggatttctctttcttttctcagaagcagcaggggaacctggggagctgcagtgcatttcagtgccagaaaaaaatatttcgccacaaaaatatcagtccaggactgaaactgttcagctcccttatcagtgtagggctgtccaagcagaccctattgcaaatgtggattaagccatttgaagtaaacatcgtaattctataatcgcctcaaaaatatggcagctgtccaggtttttactggtaatcgtaattctctgagatgaacggtggccctgggtgttccarccgttcttcccccaccatttwtaacatatttagaaaactaggtctaaatacaatgtgggcttttttttcccaatcctttcccacacagctggtagaggagagctgccagtagcacgcgttgctttgagtgctctgtgagctttgtctcctaacgtggaagctgtgtgggtagtatttatacaccatttgttgcactcatttagaatgatgactttatttaaaaaaaaaaaaaagagttgctgttgatctgctgttctggtttaccgaaaactcatttctggagtgctgggaaggagtgca

SEQ ID NO: 11295 - DNA, 600 bp, Chicken  19866894213875_2
ctctttcttttctcagaagcagcaggggaacctggggagctgcagtgcatttcagtgccagaaaaaaatatttcgccacaaaaatatcagtccaggactgaaactgttcagctcccttatcagtgtagggctgtccaagcagaccctattgcaaatgtggattaagccatttgaagtaaacatcgtaattctataatcgcctcaaaaatatggcagctgtccaggtttttactggtaatcgtaattctctgagatgaacggtggccctgggtgttccarccgttcttcccccaccatttwtaacatatttagaaaactaggtctaaatacaatgtgggcttttttttcccaatcctttcccacacagctggtagaggagagctgccagtagcacgcgttgctttgagtgctctgtgagctttgtctcctaacgtggaagctgtgtgggtagtatttatacaccatttgttgcactcatttagaatgatgactttatttaaaaaaaaaaaaaagagttgctgttgatctgctgttctggtttaccgaaaactcatttctggagtgctgggaaggagtgcatttatttctttagatttgggg

SEQ ID NO: 11296 - DNA, 599 bp, Chicken  19866894213881_1
  misc_feature (1)..(83): n is any nucleotide
nnnnnnnnnnnnnnnnnnnnnnnnnnnnnnnnnnnnnnnnnnnnnnnnnnnnnnnnnnnnnnnnnnnnnnnnnnnnnnnnnnnaaagatagggatatttgagtgatactcaaaatgtttccatttatctgaaaaagcatgatttaaattctccttactcacaagggaaatcactttctacttcagctgactctgtggaagacaccttaagggtatacttactcaaggaaagcagcaatatgagattacagcattagatatggtattagataggccagagcaccatgaccttactgtgttytttagattggttcccagtgaattgcttcggtgtatatgaaaaactatctattttgagtgaaaagttttatgggttagtttacatcaaaatggaaaagaacagcacacagaacaggatataacgatacttaacatacaagtgagcttcactgtaaatttgtacgcaagctttctcagaataattttctttttccttttcttcttttcctttctctttcttttttcttttttttttctcttttctttttcttttcattctctttttcttctctttctcttttttattttttccctactagt

SEQ ID NO: 11297 - DNA, 600 bp, Chicken  19866894213892_1
acaggagaacagaggtcccagcatgccagatgatcctagtctagagctgagagctgtggaaccataactgtacagcactgtatcacctcgctttcaggaattctcatgttaatgtagcaacacgtttgagaactagagcaaacacctctgcctggcaacgaatagcactggggaactgccagactgcaaaagagaaattctttttttaatatgaatcacacagtgggaagagcaaaggacagagcattaatcacctaaaaatacctgaagtgacatagtaacctacattgcattaattgraattcagcttgaaaatcataccttttgaaataaagctcataagttatcaaattcagacttaaaatatcttctaagtttgacaaaagaggcagcagtagcagcagccactttctgaggtaaccctaacaggaaagactggcattccaggttcttttaggcctaagagatcagttaataacttttacagtaaagtgggtggcctagacaggagtcattctctgccttttcctgttgaaaggtcttgcagaaacatggaagatctgtgagacccaagagacaatgaataaccaggcagctttc

SEQ ID NO: 11298 - DNA, 600 bp, Chicken  19866894213892_2
tctacagtggcctattttaatatagttttgtgtacatgtacgaaagaaaacagacttgtaagtgatgagccagctgctgatctctgttacaaagctatgaacacattatggagtaactgagcttatatgtgttttgaaagagaatctctggtttagctggtgttttcgtacccaggcttattcaattgaaatgaacagaagacaaggatctctctaagctagttatctttaagtaatagtcagtgcagcaaaatattttagcctaggatgtcttgacattcctcactaccactgagtaaygcttattcatggaagtagttccatttaaggaattaagttatactgggtatattacaaatttccatttatctcggggggatttacataggctggcacaagctttcctactggactacagacaaacgttcatcatcaggtgtggagagagaaaatccaattatttcttgctgtttgttctaccttaacaatatcccactctttaacagtacttgcaacaacctcatacatagatcacttctgaagtcaacaaacacaaacgyaagagcagagtttaactccaactccagtttaggatttatc

SEQ ID NO: 11299 - DNA, 600 bp, Chicken  19866894213892_3
gcctaggatgtcttgacattcctcactaccactgagtaaygcttattcatggaagtagttccatttaaggaattaagttatactgggtatattacaaatttccatttatctcggggggatttacataggctggcacaagctttcctactggactacagacaaacgttcatcatcaggtgtggagagagaaaatccaattatttcttgctgtttgttctaccttaacaatatcccactctttaacagtacttgcaacaacctcatacatagatcacttctgaagtcaacaaacacaaacgyaagagcagagtttaactccaactccagtttaggatttatccaatcttcctctcgcctgcacatggaatagaaattcccctcactagaacagatcagagccagcaatctgtcctcattctcctgggcttgagaactcactttacacaccaccaacaatgcttcacatctctctttaccactgattctttgtatccttccaatttagtgcaacttgccttgaaatggcagctgcttcttttacctccccattttgtatctctcttagaaagagtaatttattttgagttcccatgcaggcaa

SEQ ID NO: 11300 - DNA, 599 bp, Chicken  19866894213898_1
  misc_feature (1)..(23): n is any nucleotide
nnnnnnnnnnnnnnnnnnnnnnntgttcaagggaagctggatttattcccatgagtgtagcttttgcatgttgtaggtgacacactaggaaattctttcagactgggtatgtgccaaagcagtcctgagcaaaagctgtattagggccttatataaagtgaagtcctgtccttagcctgctgaactgtggagttcattgtcatgggatgcttttgacagaaaaagtgatggggaatagggccagcactggctttgaaattcagtggttagtttgatttccagttatttgttagttttagrtggaaggaaggatcatctatagttatccatctgccagaccagtcatctctgactaaccgttattgggactggttgttaggtctgcagtacctttggtctgacccacttcaagctccatgaattactctagtcagarttcagagcatctaaataccgtaggtgccattttcgtgctttgtcctataccactgctattcgtaagcaagtcctagaagaacttactagctggtacgtatataatcatctctctttaataagttttaaatcactcttcccaattaccaaatgcctgtgagtac

SEQ ID NO: 11301 - DNA, 600 bp, Chicken  19866894213898_2
tgtattagggccttatataaagtgaagtcctgtccttagcctgctgaactgtggagttcattgtcatgggatgcttttgacagaaaaagtgatggggaatagggccagcactggctttgaaattcagtggttagtttgatttccagttatttgttagttttagrtggaaggaaggatcatctatagttatccatctgccagaccagtcatctctgactaaccgttattgggactggttgttaggtctgcagtacctttggtctgacccacttcaagctccatgaattactctagtcagarttcagagcatctaaataccgtaggtgccattttcgtgctttgtcctataccactgctattcgtaagcaagtcctagaagaacttactagctggtacgtatataatcatctctctttaataagttttaaatcactcttcccaattaccaaatgcctgtgagtacaagtgttgcaagatttcctgagtaatgcttctctgtctgttttattggctactttgtgattttgtaaaccttgagctcatctttcttcagtcttctccaaattaaggcatcaaagtcctgctggtctctcctccaaa

SEQ ID NO: 11302 - DNA, 600 bp, Chicken  19866894213911_1
gcatttcagtccaacatcccccattctcagctctgccagcctacattttctctgacaacgattctttttgatcttaaatgccttggaactgcctcattttaacctcatttagaaagtggctgggggggaaacaagcctcccaacagtatgttattgcttaacaagtgctcgtgcaggatgacttaaaccctaacaacaacccacagcaggagtgctacctgctcacagacaacggctcaatagcagtatcatacctgaccattgaactgttcattttcaagcagtgtttatttccttcaygagagaagttggatctcgttaattcacctgaatttctgttttcacaattaagcaatattaacattaaaatgaaagctttcttaatgctgccctcagcttaggaacatttcaggagaaattgtgcttttgttaaaacttgtcctgccgctcagttcccagctaagccaccagatgtgtgggacaagctgcagagaacactactgtgtgtcattaggctttgagcttcatcagaaggcgaggcccagacctgaaggcagcttagagggactctgtctcagaggtgaaaattggcccatctgc

SEQ ID NO: 11303 - DNA, 600 bp, Chicken  19866894213917_1
ttgcattgcagatgagttgtgtgctgggaatctcaagagtgctgcacaagggaaagattcgcaatgctgaacagagaggtaatatatgttggatgtgtctcacacctggcatggcattaaatactcctgtaaatgactgcagcttaatttacaaggaagtctctttgttacaagaggtcttggtccatggtgatgtgttacagatggaaaagtcacgagaagagaagcctgtatcacctctctcagccatagtgataagtaacttaaaacttattatctgtattttaaattgcagttctrcatctcagaagacaggcagcgaagaatggaggaatarcagtctttcttattgacwtactctattctttgaagaaaataacgtgtttgaagaaatgaatattaatatgttgatctcaaagcacgtcattgactsctctgtagaacttaaggtgttacatagtgctgtacaaagtgaaaattcacagtcatagggattttgaactgtgatagatcctacaggtttgataaagtgtttctggctgttgattttatattgtaaaaaaatgtttattcccaacatcccatgggttctcatagaaa

SEQ ID NO: 11304 - DNA, 600 bp, Chicken  19866894213917_2
agtgctgcacaagggaaagattcgcaatgctgaacagagaggtaatatatgttggatgtgtctcacacctggcatggcattaaatactcctgtaaatgactgcagcttaatttacaaggaagtctctttgttacaagaggtcttggtccatggtgatgtgttacagatggaaaagtcacgagaagagaagcctgtatcacctctctcagccatagtgataagtaacttaaaacttattatctgtattttaaattgcagttctrcatctcagaagacaggcagcgaagaatggaggaatarcagtctttcttattgacwtactctattctttgaagaaaataacgtgtttgaagaaatgaatattaatatgttgatctcaaagcacgtcattgactsctctgtagaacttaaggtgttacatagtgctgtacaaagtgaaaattcacagtcatagggattttgaactgtgatagatcctacaggtttgataaagtgtttctggctgttgattttatattgtaaaaaaatgtttattcccaacatcccatgggttctcatagaaaggacgagctatttatttaccataaggaaaacacctca

SEQ ID NO: 11305 - DNA, 600 bp, Chicken  19866894213917_3
gattcgcaatgctgaacagagaggtaatatatgttggatgtgtctcacacctggcatggcattaaatactcctgtaaatgactgcagcttaatttacaaggaagtctctttgttacaagaggtcttggtccatggtgatgtgttacagatggaaaagtcacgagaagagaagcctgtatcacctctctcagccatagtgataagtaacttaaaacttattatctgtattttaaattgcagttctrcatctcagaagacaggcagcgaagaatggaggaatarcagtctttcttattgacwtactctattctttgaagaaaataacgtgtttgaagaaatgaatattaatatgttgatctcaaagcacgtcattgactsctctgtagaacttaaggtgttacatagtgctgtacaaagtgaaaattcacagtcatagggattttgaactgtgatagatcctacaggtttgataaagtgtttctggctgttgattttatattgtaaaaaaatgtttattcccaacatcccatgggttctcatagaaaggacgagctatttatttaccataaggaaaacacctcagatgacttatgctgagct

SEQ ID NO: 11306 - DNA, 600 bp, Chicken  19866894213917_4
tgactgcagcttaatttacaaggaagtctctttgttacaagaggtcttggtccatggtgatgtgttacagatggaaaagtcacgagaagagaagcctgtatcacctctctcagccatagtgataagtaacttaaaacttattatctgtattttaaattgcagttctrcatctcagaagacaggcagcgaagaatggaggaatarcagtctttcttattgacwtactctattctttgaagaaaataacgtgtttgaagaaatgaatattaatatgttgatctcaaagcacgtcattgactsctctgtagaacttaaggtgttacatagtgctgtacaaagtgaaaattcacagtcatagggattttgaactgtgatagatcctacaggtttgataaagtgtttctggctgttgattttatattgtaaaaaaatgtttattcccaacatcccatgggttctcatagaaaggacgagctatttatttaccataaggaaaacacctcagatgacttatgctgagcttgttcctcttctcaggagatcagttctaaagatggatacaaagggaaacagaaatgttacagctgcatgtttctctac

SEQ ID NO: 11307 - DNA, 599 bp, Chicken  19866894213920_1
  misc_feature (1)..(110): n is any nucleotide
nnnnnnnnnnnnnnnnnnnnnnnnnnnnnnnnnnnnnnnnnnnnnnnnnnnnnnnnnnnnnnnnnnnnnnnnnnnnnnnnnnnnnnnnnnnnnnnnnnnnnnnnnnnnnnctaaggaaagcactagaagtagtgaggctcatgataaaattgtgagagcaggaaatgttgcctctcagaggagtggggaggaatctcaatgcgtatgcattcattaacttggcttttatagttagacttcttttagggtgccgcttctttcattgctgacagaattatatggactgttcacaaaccatcycctggaggaatgctgygaggtggtttagaagcataacattatttcctatttacaggttatygttgcagatctaacatgtaattaagattatttaatttttctggatgactttgtgtgagtagtctgaagctgtttccttgcttcatctatctctgtctaactatttattgtacagagtgctacaagtactagtctgtcagtagtaataatctggagcaagttggaaagatacctgcttgctaggcactgtggtatcatcggaactaatgattgtgctgctttgtctctgctgtgatagt

SEQ ID NO: 11308 - DNA, 599 bp, Chicken  19866894213920_2
  misc_feature (1)..(94): n is any nucleotide
nnnnnnnnnnnnnnnnnnnnnnnnnnnnnnnnnnnnnnnnnnnnnnnnnnnnnnnnnnnnnnnnnnnnnnnnnnnnnnnnnnnnnnnnnnnnnnctaaggaaagcactagaagtagtgaggctcatgataaaattgtgagagcaggaaatgttgcctctcagaggagtggggaggaatctcaatgcgtatgcattcattaacttggcttttatagttagacttcttttagggtgccgcttctttcattgctgacagaattatatggactgttcacaaaccatcycctggaggaatgctgygaggtggtttagaagcataacattatttcctatttacaggttatygttgcagatctaacatgtaattaagattatttaatttttctggatgactttgtgtgagtagtctgaagctgtttccttgcttcatctatctctgtctaactatttattgtacagagtgctacaagtactagtctgtcagtagtaataatctggagcaagttggaaagatacctgcttgctaggcactgtggtatcatcggaactaatgattgtgctgctttgtctctgctgtgatagtaagaacttctgtgcac

SEQ ID NO: 11309 - DNA, 599 bp, Chicken  19866894213920_3
  misc_feature (1)..(49): n is any nucleotide
nnnnnnnnnnnnnnnnnnnnnnnnnnnnnnnnnnnnnnnnnnnnnnnnnctaaggaaagcactagaagtagtgaggctcatgataaaattgtgagagcaggaaatgttgcctctcagaggagtggggaggaatctcaatgcgtatgcattcattaacttggcttttatagttagacttcttttagggtgccgcttctttcattgctgacagaattatatggactgttcacaaaccatcycctggaggaatgctgygaggtggtttagaagcataacattatttcctatttacaggttatygttgcagatctaacatgtaattaagattatttaatttttctggatgactttgtgtgagtagtctgaagctgtttccttgcttcatctatctctgtctaactatttattgtacagagtgctacaagtactagtctgtcagtagtaataatctggagcaagttggaaagatacctgcttgctaggcactgtggtatcatcggaactaatgattgtgctgctttgtctctgctgtgatagtaagaacttctgtgcacagaagattggctttgtatcttacaaggaggttctacttacatgca

SEQ ID NO: 11310 - DNA, 600 bp, Chicken  19866894213926_1
ttggtctacatgtagggtatatgagcagggaaatagcaagcttaactgctagatgggatcccctgggaaaccgtccttaagggcataggaacagaacagagctggcagctcttgaagtatacccttctgtgggtgcaagagctcgccatcctccagcagaagaaatcaagcagaggagatgggctgccagtgtggatgagaaaggatctgcagcttaaactgagggaaaagagagaaatgtacaggaaacggaagcagggttgtgtagcctgggaggaatacagggatgctgtccgcatstgtagagatagggtcaggaaagccaagggacagatggagctgaacttgacgagggatgtgaaaaataacaagaaggagttctacaggtacataggccgaaggaaacagaccaagggagagtgttcctcctctgataaatgagaactggcttcctcagacatggaaaaagctgaggtactcagcgtatatcaaagtacctgaagtacttcggcatctggatgaggagctatgagatatgggtttagtgacttgtggtagcaagggtagtgggaggatggttggactagataatcttgtaga

SEQ ID NO: 11311 - DNA, 563 bp, Chicken  19866894213934_1
tggtccttcctcacatccagcatcagcaggtacttccgcacctgggaggagggagggagggagggaggcaggtaaggattccttcaacgtgccaccccacggggatgccagccctgaggacacgcagctggggcagaactgccacagggatgccagccccagggatgtcagccctccagcccacgatgggtgagaagaacaggactcacctggtggaagatgagagcctggctgatatagccccaggtgctgctgggtgagaggtagtggagggcgaggaggaggatgaggaggaagccyaggctcgccgaggccgacacggggctgatgaggaacatcatgacgcagcagccggcgatgcccagcaggcacgtgtgccagctgaagtagcgaaaggtgggcctggagcaggaagaaagggatatttaaattagccagcatggcttatgggctccttgcagcagggaggtcagcccaaatgaagcttggcctgtggttttgtgccaattgcttcacatcagtcatgtagacggctacgggcaatccacaccaggcacaggcaa

SEQ ID NO: 11312 - DNA, 600 bp, Chicken  19866894213935_1
cgctgcgtgccctcacggggcgtcccccgaggaaacctcgggcccccagagggccctaacggggctccgtgcccggggggtgctgaggagcctttgtgaactccgggcagcttcgaatctgtagaggcttaaggctgctttggtaaggccagaaagcctgccccgagtcgttgcctcgctcaggtgacgctgggaacttctcttcccacctcccgtagcgataaatgcacggcactagcttcgtctgcaggctgattgaagcctctgtatgagcgtgctgtaagtgggaaagagggaccrgaaacaaaggtctcttctcactgggctcttcccagcaagactcagagctcttcacgtttctttccatcccagtttccccagaaaggctttgcagttttgtgcactcctctgcccagagtgggtatttttgctgcgacaaaaataaaggtgaactttaagaaaatattcatggctcaaatcaccgctccctcctgtgatgctgaaaactgcccccctttgctgccagagccgccaaccaccgccctgcacagccacacacctccagctccacaccagtggtacgtgggctcagggcctccc

SEQ ID NO: 11313 - DNA, 600 bp, Chicken  19866894213947_1
tccacaaggtgaaggaagagatcaatgagtagaagcagacattattaaagagtccgttaccatccaaaacgtatccctgactgagctgcaagttttgtggaaacatttctggaggtatccaggcgaacccgttgtctcctggatgctccagtgttgggaacatggggcaacagagctgattgagagagcagaatagccagtgagcggggatccctccttagggatagggatattgtcagcaccgttggacaaaggaacaatccctccctcgctggatgtaattcctgtcccagtggaagkataggcctccccacaggatattatgtgccagccaggcaatcactgaagcacagaatcacagaatcacagaactgtaggggttggaagggaccttcagggctcatcaagtcaaactcccatgcagagcagactccctacagcaggctgcacaggtgggcgtccaagcaggtctggaatatctccagagaaggagaatccacagcctccctgggcagcctgttccagtgctccttcactctcactgtgaagaatttcttttgtatgttggtgcagaacttcttatactccagtttatgtcgg

SEQ ID NO: 11314 - DNA, 600 bp, Chicken  19866894213948_1
tggattttgctctgaagattggcaaaggaacttatgtatgctgacctatatgacagcctggaaagcctctgcatttgagatgatgcatgagaaaagctaaggtgaagagatggcacaggagtggattttcactctgggaaaaaaaagctttgtgtataaaaaagtggaaaacgtatgtttttgagtagagaatggttgttcattttcttttcatgcttctattgggcttcagtctaattcttttgtcaaggtcagctagagtctaggaccttcattttaatgttccatgggctggtagamataaaaaagtaacaattaccattttgttcctgttgttttaaaggctcgtcttatctccagcttcatcctgtctcaatattttctacttcagtagccactttctatcacttcttaccatctcaatttgcattttgcctactgaagccaggtgattggtagaggctggaagggtgagctttctgcactttcagcatccctcactttcattgtaatactttatgtagtcctcccctactcttcccccagctgtgcagtgtcagtgaatctaaatttctgaccggtcaaaaattatttgttaac

SEQ ID NO: 11315 - DNA, 600 bp, Chicken  19866894213949_1
ccatgtcttccatttctgcttctctgctgtcaaatatcggagatttccttagttattttttttctgtgatgatgatatagcagttctggcttccaacagctttttttcgttcctctttaaaaattatatctcacagccacaaagaaactcaaaaggagcagcccttgtgaatgttctcctacactgcaattcgatggtcttttcctgcttcagatcagttgcttttttccactcctttcctgtagttgtgctctccagttagagtatggcctaaatgcttccatctacaatgcaggaccwctgcaatttctgtttaggaattgaattaaaatmattagaaattaggcattttaatacccttaatattttttatcccatctagctgtttcatatatatcatggtattcacacaacaggaggctatgagaataaatacatgaaattcattaaattccaaagcaccagaagataatggtgatgacaggcatctaacaaagattgtgatataacctcttgaaaatccaattagcacatttacaaatgattactagttataactaattaaactacagtaatcaaaatttatttgaataaattttc

SEQ ID NO: 11316 - DNA, 600 bp, Chicken  19866894213949_2
atatcggagatttccttagttattttttttctgtgatgatgatatagcagttctggcttccaacagctttttttcgttcctctttaaaaattatatctcacagccacaaagaaactcaaaaggagcagcccttgtgaatgttctcctacactgcaattcgatggtcttttcctgcttcagatcagttgcttttttccactcctttcctgtagttgtgctctccagttagagtatggcctaaatgcttccatctacaatgcaggaccwctgcaatttctgtttaggaattgaattaaaatmattagaaattaggcattttaatacccttaatattttttatcccatctagctgtttcatatatatcatggtattcacacaacaggaggctatgagaataaatacatgaaattcattaaattccaaagcaccagaagataatggtgatgacaggcatctaacaaagattgtgatataacctcttgaaaatccaattagcacatttacaaatgattactagttataactaattaaactacagtaatcaaaatttatttgaataaattttccaactttgtatttgtaacatgatagcaccccaa

SEQ ID NO: 11317 - DNA, 567 bp, Chicken  19866894213954_1
gtcacatgtgttataaagatcaccttggccgttccttttgcatctgtggctgtatccttttcaaaagcgcaaggagagactgaaataatttcctctaatagctgaagcgtcgctgcgctctccattatggagcatggctcatcttcaagtgtcaggaagtgagcgttgaatttgaaatagacatcctgtgatcagtgagttagcaggaataatctcattcagatgaacggagagaaattgctcgtgtcactcgagggcctggcagcagagcatgattctccgagcgttgcttgtatcttygtatgctgcggctggagctcttcataatgaattgtgaaacatcaaggaacttgttggagatcaaggaaagaaattacttgatctcagctgcagcactgataaagcattttacattttgtatgttgagaaccactctgatgattttagctgtctgaagttctctcagcacaaatgagcgttctgcagctcgcggatttccagggccgcctttgcacgggggaggcaccggggctgcaccacagccttatttctctaccgcagcctcaa

SEQ ID NO: 11318 - DNA, 599 bp, Chicken  19866894213973_1
  misc_feature (1)..(139): n is any nucleotide
nnnnnnnnnnnnnnnnnnnnnnnnnnnnnnnnnnnnnnnnnnnnnnnnnnnnnnnnnnnnnnnnnnnnnnnnnnnnnnnnnnnnnnnnnnnnnnnnnnnnnnnnnnnnnnnnnnnnnnnnnnnnnnnnnnnnnnnnnnnatttactgtggattcttttcctcaagcatacctaaagactaagcatatcatgaataattttgcttttgcaggaaattactttgctttcatgtgtttgatttgtaaggttttttttttagtgtgtttttattttttattttttgtttgtttgtttttaagaygatccccatcatctctgttttktcttctctcattttcaaagtcttcttagaaccgaaaatataaaagtttattgccaaggagagttttatcgaagctacctgaacatagtgactcagattaagtaaggtctcatgtgaataagattrctcacatgaataaagctaagcatatgactgaacttaaatctggaaaactatggatgaaatacaggtcctcctgagctgtgaaacctctctgtggagaaatcaagtgataacatcagtaataattgatactaaaattgcattttcatcccaaa

SEQ ID NO: 11319 - DNA, 599 bp, Chicken  19866894213973_2
  misc_feature (1)..(117): n is any nucleotide
nnnnnnnnnnnnnnnnnnnnnnnnnnnnnnnnnnnnnnnnnnnnnnnnnnnnnnnnnnnnnnnnnnnnnnnnnnnnnnnnnnnnnnnnnnnnnnnnnnnnnnnnnnnnnnnnnnnnnatttactgtggattcttttcctcaagcatacctaaagactaagcatatcatgaataattttgcttttgcaggaaattactttgctttcatgtgtttgatttgtaaggttttttttttagtgtgtttttattttttattttttgtttgtttgtttttaagaygatccccatcatctctgttttktcttctctcattttcaaagtcttcttagaaccgaaaatataaaagtttattgccaaggagagttttatcgaagctacctgaacatagtgactcagattaagtaaggtctcatgtgaataagattrctcacatgaataaagctaagcatatgactgaacttaaatctggaaaactatggatgaaatacaggtcctcctgagctgtgaaacctctctgtggagaaatcaagtgataacatcagtaataattgatactaaaattgcattttcatcccaaaggatctctaagtcatgtcatgc

SEQ ID NO: 11320 - DNA, 600 bp, Chicken  19866894213973_3
tggattcttttcctcaagcatacctaaagactaagcatatcatgaataattttgcttttgcaggaaattactttgctttcatgtgtttgatttgtaaggttttttttttagtgtgtttttattttttattttttgtttgtttgtttttaagaygatccccatcatctctgttttktcttctctcattttcaaagtcttcttagaaccgaaaatataaaagtttattgccaaggagagttttatcgaagctacctgaacatagtgactcagattaagtaaggtctcatgtgaataagattrctcacatgaataaagctaagcatatgactgaacttaaatctggaaaactatggatgaaatacaggtcctcctgagctgtgaaacctctctgtggagaaatcaagtgataacatcagtaataattgatactaaaattgcattttcatcccaaaggatctctaagtcatgtcatgcctcattctcacctggactgagtcacaggctttcatttcagcacttcccacaagcctgtgaaaagtggcttctccctgaggatacagacattttagcatttttacaagttctcatcctctgttcccc

SEQ ID NO: 11321 - DNA, 600 bp, Chicken  19866894213981_1
ttcccttattctgcattttattgtgtttttgctcaagtcactgggaattttgccagtgctcccagtgggagaattaggtctactggaaaagcattttcagatattaaagagaatttataggagtataaaaaactgcatgcatactacagatgaaacagacatcacatattagagatgacatatatgtgccaaactgcagagctatagaaaaagttaattcatgataactctctgctatctcacttatatctgtcctgtacttcactcttggacttactttaatatcccaaataattttcyatcctttggtaacttcctatgacctactgcagtatactaatgagtacctgtgctgtttttggaggttagtcatctttttaatggcaaatatgaaattcctatggaaacaattgcttgcttttcccaagtcacacatggaaaatcagtaaaattccaccctgatctgttttattttttcatatgctgctataaattccaattactaacaggtgggcatatggtcaggtgaatctcacgctatgactccagatctctagcaaaccttctgatatttgtactgatgggaatgtaacctgagtg

SEQ ID NO: 11322 - DNA, 600 bp, Chicken  19866894213986_1
gataccgtagagaactccttttcacattccagaaagaaaagggatgttaaaaacaaaatagagcaaacaaaccaagaaagcagatgtaccaccaaatgaaatgcccatatacacatcaacactcatacgcatatgaaaatttccagagtagacatgatcctagaggtatctacaggtctaaatttgttggtagcattgcaaagcatctctatttcaatacatattcttcctaactgtgtcagctactgatactcttggggaagccttaggtattttttcgtgaactatgcattctgctayttgagaaatctctctttcttcaggagggattctctgaataaaagtatgaagcttagaccagaaaagtctaggaaatataaaacaatgttaagacacgtgcaaggtcccagtacagcaaagtacctagcattaatcaatatcacctgtgcaccagaccaaactaaaacaagagcaaagaaggaggaatcagctttggagcaataaatactgtaagtcagcgtgtaatattcaactcagtatgaaaagctggggttggttttgacataacccttcacctagcaacaaagacatgcaatatat

SEQ ID NO: 11323 - DNA, 599 bp, Chicken  19866894213996_1
  misc_feature (1)..(197): n is any nucleotide
nnnnnnnnnnnnnnnnnnnnnnnnnnnnnnnnnnnnnnnnnnnnnnnnnnnnnnnnnnnnnnnnnnnnnnnnnnnnnnnnnnnnnnnnnnnnnnnnnnnnnnnnnnnnnnnnnnnnnnnnnnnnnnnnnnnnnnnnnnnnnnnnnnnnnnnnnnnnnnnnnnnnnnnnnnnnnnnnnnnnnnnnnnnnnnnnnnnnnaattacatgcatctgttagcaaccaaagcaaacatataaccctgaatgcagcaactgctatcaactgctgactacaaattattaaaacagtgctttgcacaawgtgaaagaaagcccatctccaacagatgtggtttaaggtttatttacaacgcaccatctccaataaacatcagacaaaacttctgatgaagtccagcatcttgtgggctaccatgagctgacaggtgccaggaacgtttaactaccttcagcattgcttaagaatgtatttcagctaagaagtttaccaagagctcatcaaaacactgttcattcaatagcagggttaaagatttcaatatattacataaaatcagtcctactaaaagtgagaaagagtaaaatgcaattatatgaccc

SEQ ID NO: 11324 - DNA, 600 bp, Chicken  19866894213996_2
aaaacttctgatgaagtccagcatcttgtgggctaccatgagctgacaggtgccaggaacgtttaactaccttcagcattgcttaagaatgtatttcagctaagaagtttaccaagagctcatcaaaacactgttcattcaatagcagggttaaagatttcaatatattacataaaatcagtcctactaaaagtgagaaagagtaaaatgcaattatatgaccctccacacttgtggctataacttgaactactctcttcatcatcaagaagcagaaggtgaaaacgctccagctccagrtgtctcaaagcaggcagaaagaacaggagcacataacacttccatgcagtctcaacaaagttttcatttagtattcttacttgtggtgttgttagtgttgtagtgttgctcattgtgtcctccatctgctgtgtctgtacatccagtgtttcaaactgatgttcaaatttatccattaatgcagatatctataaaaatacaaaccaaatcactgatctgcagagaacagaagagcagcacaactccaaccaataaaactttttacatatacctccacagaaagtttccatttaccttttc

SEQ ID NO: 11325 - DNA, 402 bp, Chicken  19866894214012_1
tcactttgggcctcatctaagcccattaaaatgactttctgctgtcttgagaatattttggatgaggctctgctgatgctaagcacacttggaagaggactccttcctagcagagtgcagatgagccaaggtcatgcctgcactgctctactggtgctcaaagggcagtgccaggatgggatggggccattccaggcctgaccctattgtgagtgtcctttggaagcaccaaacttgttaaccacaggagcagcaggaaaagaattctcactataaatattcacaagatcacatgcagcycagcaaatcctctctaaatgaaggaaaacaaattataagaggatgctggcctgctgattaaatcttaacccccactccctgcgatgagctgacatttgctgg

SEQ ID NO: 11326 - DNA, 600 bp, Chicken  19866894214018_1
aacacagcatcataccaggcaatctgaaaaaaacaattctgtcccagctgaaacgaagacaaccattcacacattcactcccctgcttgaacacaagcaaagtacaagcacgcaccagttgctaagccaatgcagctggctgggattttttgttgattggatttaacttctagaatttgtccattgagcattttatatgccattttctccttcaagtaggaacaaaaaaggaactcttcccactccaaattcccatcaccagtttccaaagagatcggttacagagcttgtcttcagttwgatgcaaactgtgaataactaccaaggctctgtccccatgctttctcccactgttcccaggaaggagatgccttcatggcagattttgttcctggtcccataaaactatagcattagcctagaactgaagatgtgacgtgttttgatatattgactgtccaagaacaagtatcagtttgcacccaaaagttcagtgcaactataaaagtgcaactattaaacaacaggaactgggttagcatccacaagaagaaaagaaaaaaagaaataaggatgcttttctttaaatatccagtaata

SEQ ID NO: 11327 - DNA, 533 bp, Chicken  19866894214020_1
tgggtgctgggagaagggatgaagtgaataagtcattaggtacaatatagaatttctaagtaaaacaagtcatgctaacaggtgactgagttaaacaaaagcaacacctgtatttaaagtgggagacatcattgaagaattcctgagccacacatctgaagcaggcaaactgcagcacaagattattaaatctaggacaaccaattaatgtctcaggagtgttgtgggcttgaatttgtttcccatgttcacctgcttatcagatcagtttggagggggatctctcccagtactactttrctttccatagaagcacgttggtgttacttgagccataggtagataaagctgatgttgcaaggacaggggttcagtgcacccatcaaataggaattcaaaggtcagcttaaagtaacagaatcaaatttggttaatatatgacatagtttcagcgttcacaacgtcctgcccaccagcaggaaaaccagaggctgattgtgaactgtgtgatgcttcaatcagcatccatttta

SEQ ID NO: 11328 - DNA, 600 bp, Chicken  19866894214025_1
gacacacagagagatgggcggcttttggggctgaagtggggaaaaagggcaacgctgattgggaacagcatgaaagtggtgacactgagagagaatggaagagatttgggggcagaaatggttctgatttttcccctcctcgtgagtcataaaaatagagaaaaccacctcaaaaaaaaccatcagtactgcaaagcagctcagtttgacaccaaccaaagagatttggggttaaaaagcacagaaatcagcactgtgagctgcaaggaaagtgttggggatgcctgccccaacctcagrccccccccccccccccagctgatttttggggtgaaatcaacgcgtttcggcacagttggaaagcggggacgtactctgcagtgggaggatgaccatggagggcgcccatggagtgctgtgctcttcctcctcctcctcctcttcctcctcctggggggcggtggtgggggggggggcagcagcgggggcagctggaggggtgggggtcccggagggctctcccataggggcgcgtggcgccgctgtgctgcggagggcggtcacggagccaagcccagtgagaggggtcggaggccatga

SEQ ID NO: 11329 - DNA, 599 bp, Chicken  19866894214026_1
  misc_feature (1)..(113): n is any nucleotide
nnnnnnnnnnnnnnnnnnnnnnnnnnnnnnnnnnnnnnnnnnnnnnnnnnnnnnnnnnnnnnnnnnnnnnnnnnnnnnnnnnnnnnnnnnnnnnnnnnnnnnnnnnnnnnnnnagattggcatgcacttgttgtgcactgtttccagctgaacacccaccaaggggaaagtatccacctgatggctcagaacacatttcagctgatctctggaggtatgtgggtgcttgtctggtcccctgtacgcatgggagctctactttggatctctagtgggctaggcaagacaatagaagtaatyttaaaygttctctgatctcttctagactatgaccattagttttgtgccaacagaagcaggaactgaattatctggcatggcctgaaacctgtatactcagaaggtgaccagaagccctttgccactgcactacaagttgttgccttcctcttgtcacagcatttttcatattactactcgataakctgcygtaatagcatttggattgttagtgggattgagttaattgtccttggtattcccaagcagggaggtctgcccttctttaccactccttccctatgtagtctcttctgcaa

SEQ ID NO: 11330 - DNA, 599 bp, Chicken  19866894214026_2
  misc_feature (1)..(107): n is any nucleotide
nnnnnnnnnnnnnnnnnnnnnnnnnnnnnnnnnnnnnnnnnnnnnnnnnnnnnnnnnnnnnnnnnnnnnnnnnnnnnnnnnnnnnnnnnnnnnnnnnnnnnnnnnnnagattggcatgcacttgttgtgcactgtttccagctgaacacccaccaaggggaaagtatccacctgatggctcagaacacatttcagctgatctctggaggtatgtgggtgcttgtctggtcccctgtacgcatgggagctctactttggatctctagtgggctaggcaagacaatagaagtaatyttaaaygttctctgatctcttctagactatgaccattagttttgtgccaacagaagcaggaactgaattatctggcatggcctgaaacctgtatactcagaaggtgaccagaagccctttgccactgcactacaagttgttgccttcctcttgtcacagcatttttcatattactactcgataakctgcygtaatagcatttggattgttagtgggattgagttaattgtccttggtattcccaagcagggaggtctgcccttctttaccactccttccctatgtagtctcttctgcaatgcctg

SEQ ID NO: 11331 - DNA, 600 bp, Chicken  19866894214026_3
tcagaacacatttcagctgatctctggaggtatgtgggtgcttgtctggtcccctgtacgcatgggagctctactttggatctctagtgggctaggcaagacaatagaagtaatyttaaaygttctctgatctcttctagactatgaccattagttttgtgccaacagaagcaggaactgaattatctggcatggcctgaaacctgtatactcagaaggtgaccagaagccctttgccactgcactacaagttgttgccttcctcttgtcacagcatttttcatattactactcgataakctgcygtaatagcatttggattgttagtgggattgagttaattgtccttggtattcccaagcagggaggtctgcccttctttaccactccttccctatgtagtctcttctgcaatgcctggtccttctggagagacagcagaattagggtacatgatgtccctatgcctaacggtctgcacaattctgttcctgtagattaatgggctgtctagactccagtagattaaatgtgccttggacaattctcagatgctgaagccatctggcataaattgcttgccactagattgctaacctc

SEQ ID NO: 11332 - DNA, 600 bp, Chicken  19866894214026_4
acacatttcagctgatctctggaggtatgtgggtgcttgtctggtcccctgtacgcatgggagctctactttggatctctagtgggctaggcaagacaatagaagtaatyttaaaygttctctgatctcttctagactatgaccattagttttgtgccaacagaagcaggaactgaattatctggcatggcctgaaacctgtatactcagaaggtgaccagaagccctttgccactgcactacaagttgttgccttcctcttgtcacagcatttttcatattactactcgataakctgcygtaatagcatttggattgttagtgggattgagttaattgtccttggtattcccaagcagggaggtctgcccttctttaccactccttccctatgtagtctcttctgcaatgcctggtccttctggagagacagcagaattagggtacatgatgtccctatgcctaacggtctgcacaattctgttcctgtagattaatgggctgtctagactccagtagattaaatgtgccttggacaattctcagatgctgaagccatctggcataaattgcttgccactagattgctaacctcttgga

SEQ ID NO: 11333 - DNA, 600 bp, Chicken  19866894214027_1
agctgcaccagcagctttgtcattctggtcagaggccaggatggcattctccaactggaagacaagtgttacacaagtcacttgcattgagttagacatctcgtaaatatactttcagtatggaatataagctttcacatcttaaataattttaaatggaaatctagtaagtttatgaacatcaaggatatactctaaggaacaagagcacgtatttaagttctattcttataggattatactagcagccttataaaacttaggtttatgttatcacactatctgcctgtttgatgtcaraatgatcacatacacgccaccaatttcatgtcctggtctaacagttctctggatgcccagagagcaagctgaataaaacatttcattagtgtcacatctcagctggccagtaccaacttactgattcccttagtaaggggaagatcctgatgcttagtctttcatggattcttcaggcaggattatattacattgaaagtttcatcaaggtagctggaaaatgcatgtttttcatgctctgcagcttaagttcaactatctactactacacacaccacagaatccacataggaaccaaac

SEQ ID NO: 11334 - DNA, 599 bp, Chicken  19866894214028_1
  misc_feature (1)..(88): n is any nucleotide
nnnnnnnnnnnnnnnnnnnnnnnnnnnnnnnnnnnnnnnnnnnnnnnnnnnnnnnnnnnnnnnnnnnnnnnnnnnnnnnnnnnnnnnncttttaggaaaaacagagggacgccccaattgaaggaggctgttaagagagctggaagaactcctcctcccagttaaactggtgtcactgctccgctcactgttctccatcacccactgcaggtcccaaggtgacggcgcacaaatgacgaagccagcagccctgctcccaccccgccccccacggcagctcgtctccatccatcacccagragcacatcacccgtggcaccttgacaactcgtccccgtgtccccagcccttgggatgtgggagcttcggtacctgcaggacctgggtccgctatgaaataaataacagtctcagaatttcaagtaatgtccctgctgccgcgctctgcccagcttctccctctcccaccacgttgmtctgctcctctcgcgcttggccgtggtctctgcagcagccagcagtggtttaactgggatcctgccattgggatgctcggggacgaaaggtgcgtgtctttgggggacaggtggggtgacgcc

SEQ ID NO: 11335 - DNA, 600 bp, Chicken  19866894214028_2
tgctccgctcactgttctccatcacccactgcaggtcccaaggtgacggcgcacaaatgacgaagccagcagccctgctcccaccccgccccccacggcagctcgtctccatccatcacccagragcacatcacccgtggcaccttgacaactcgtccccgtgtccccagcccttgggatgtgggagcttcggtacctgcaggacctgggtccgctatgaaataaataacagtctcagaatttcaagtaatgtccctgctgccgcgctctgcccagcttctccctctcccaccacgttgmtctgctcctctcgcgcttggccgtggtctctgcagcagccagcagtggtttaactgggatcctgccattgggatgctcggggacgaaaggtgcgtgtctttgggggacaggtggggtgacgccggctccctctggaagcacgaccagtgtctgtgttggacccagggaaaggttcccggggcgagaggaagggcccggctcggtggccctctggcacagctcttgccttccagttttcccatggggtcactgtgttcctagtgcccctggcatgttttacagcacatctgtcggaagtag

SEQ ID NO: 11336 - DNA, 576 bp, Chicken  19866894214040_1
ggtattttttccagcaggagatgatgcagtgatgcccctgtctgcctgttcctgcctgcaggctccaagtggagtctatggctttgtgtttgggaaaaacgttggcaggcttgaaagccacaaataaggtcacagcagatttccctgtgggacagcgaggctgaactgggaaatgatatgcagatgtcttccaggagaagaagaaaaaattgccttaaggatgaagtttgaatctggtgtctccatgcagggtctaggcttgggagacagtttgttctctgacctgatataatttgtctktcatgctttttctgcttttcttatttagagcgccaggcaaggccttccatgagctccactagtagagaggtgaactagatcatctcttaagatatattttaagctttgaccaatttctattgtgattatcgtatttaagattttgcagcataagcgcttaactactggtggatagaagcactgtctgtgtttagttttgttttatgtggtagtgttcttatgccacaaggaggtgatttatgaagtaagaacatttctggctgatactggcctttt

SEQ ID NO: 11337 - DNA, 600 bp, Chicken  19866894214042_1
ttgtaaagtgtagtggctcactaaagcaaaataacaaatctaatttaatctaatggcccgtaattttaaaatgtcagggttcccagtgtgtttgcttaaactacaataactgatggttgaaagaacatctgtataaacagtcgttcttgctgcaaagatttgtaacagcaatagagtaataaagccacatttaatactggtgcagctcctcggggtattgttatctcctcatcgcctcattaatatgctctgccctcattgttgagacttggttcaattagggatggcttttccataggmttgtgttccttagaaactttgccagctgataagaatgcttcctctattgttgtctggtaataataaacaaggcatgctttctgtcccctatggtcagtgtttgactttgccattccctgtagatgtgcataggctaaactgcagtaatgtctaactctgccacttttatatgtatttccctggagagttgtgttgttaagaagaagctcgccagccagaggggtttgttgcttgtgtggttgtttttttttcctctgcctccaatagatttctctgttgaaggcagcggctttaagctgg

SEQ ID NO: 11338 - DNA, 600 bp, Chicken  19866894214050_1
ttgtggctgcagatagcactgacacccggttactccaggtgtaatgccccacagcctcctgcctgcccatggagctgagcacagggcatgagctgctgcatcctcgggagcagcctgtgtgtttctgcatctaactgttctccaaaactcagcttcaggctcagaagtttgggtccttcttcttgcattcctgggtcctttttttccctccctgtaaagttcccagtgaactggaaatgtttttgtggagcagcaggctgtacagtgggaggttttggggaggacagccccagctggccytgctaatggtgctcgtcccctcggcaggtcggcgctgccatctccatgacctacatcacaagcaagcccatcgtttttgttggtactggacaaacctactgtgatctgcgtagccttaacgccaaggctgtggtcgcagcgctcatgaaggcctaaaatcaagtattgcaccaaattgctgtttgcagatgtctcagaagaatatgcttcaccctgtgactgattagtctttccagtgtagtgcaaaacagaatgaagggatgcgggtgcaagggctgtgcttcccctgcccatctgatc

SEQ ID NO: 11339 - DNA, 600 bp, Chicken  19866894214051_1
attttaaatgcattgatgatataaattaaaaatgagattcaaatactctgaaacttggggaatctggatatgctttgaaggttaatcctcctgtattttcccccagaggaaatagctaatcaattatataatagaaattttgtagaaatagaaaacctgaatgtaaatgttaatgtaaatgctaaggctatctcgtattttccattattagtcaatttccagttacttacagtactgtgtaactgatcaaatctctctatggtcatttcttacactcggctgaatggaaagttccaacaraaacagtttatccatttctaatratttcgagagtagagttttttttctattgttaattcacttccttccaaaattcaaaacctttgcacctcaaaagaatcatagaatgctttggtttggaagggactttaaagcacaccaagtcccactccatgctgttggcagggctgccccccagcagctcggctgcccagggccccatccaacctggccatgagcgcctccacggatggggcaccacagcttctctgggcagctgtgccagcacctcactgcactctgagtcaaaaatttcccckt

SEQ ID NO: 11340 - DNA, 600 bp, Chicken  19866894214051_2
aattaaaaatgagattcaaatactctgaaacttggggaatctggatatgctttgaaggttaatcctcctgtattttcccccagaggaaatagctaatcaattatataatagaaattttgtagaaatagaaaacctgaatgtaaatgttaatgtaaatgctaaggctatctcgtattttccattattagtcaatttccagttacttacagtactgtgtaactgatcaaatctctctatggtcatttcttacactcggctgaatggaaagttccaacaraaacagtttatccatttctaatratttcgagagtagagttttttttctattgttaattcacttccttccaaaattcaaaacctttgcacctcaaaagaatcatagaatgctttggtttggaagggactttaaagcacaccaagtcccactccatgctgttggcagggctgccccccagcagctcggctgcccagggccccatccaacctggccatgagcgcctccacggatggggcaccacagcttctctgggcagctgtgccagcacctcactgcactctgagtcaaaaatttccccktgacacctaatctaaatccctttt

SEQ ID NO: 11341 - DNA, 600 bp, Chicken  19866894214051_3
raaacagtttatccatttctaatratttcgagagtagagttttttttctattgttaattcacttccttccaaaattcaaaacctttgcacctcaaaagaatcatagaatgctttggtttggaagggactttaaagcacaccaagtcccactccatgctgttggcagggctgccccccagcagctcggctgcccagggccccatccaacctggccatgagcgcctccacggatggggcaccacagcttctctgggcagctgtgccagcacctcactgcactctgagtcaaaaatttccccktgacacctaatctaaatcccttttagtataaaaccatttccctttgttctatcactgtctactatcaaaaaaaaaaaaaagatctccctcctgcttataagctccctttaagtattacacaaattctagctcccatcttcaaagaatgaatttgacgtttggtagaagcaatcctggagctgaagttgcagttattattttgctagaagctaataagggggttggaaaagtgttattggctatatcaaagaacttaggtgtgtcaaaattaaaaaacaatgaaatctcaacatacagatg

SEQ ID NO: 11342 - DNA, 600 bp, Chicken  19866894214054_1
ctgaactgaaaacccatgtaatctgacataagggtcattcttttcaacacagggatatccttttctctaaggattgtacaaactgttctgttggaagacgggattttaaagtctgtgattggtatagcacaagcataaacaataaggagagctatggggctttaaaatacactaacaaaaatagatgcaaggtgttcttatgtgtcttctaccctctacgttcccactcacatgaagttcacctccactattgtagaaggacccttaattatccctggagattagatctagtctgtagargctgacaagctacaatttacatcacaaraatgagcatataattcagaggcttgattgattttttttcccctctgtgtcaggtgtcctcactcttccccattcatttggtgtggctgaactcagatgcttcaacttcaaagcagtcatgtagcatttctgaattatagtgttgcctaatttacttgagagatactggaatccaaaaatgcatgttttggcaagggttaaaccttaatctcaaaatttacatgccaattcatagtgtattttttgtgcagatttatctgagagtggcttggc

SEQ ID NO: 11343 - DNA, 600 bp, Chicken  19866894214054_2
taagggtcattcttttcaacacagggatatccttttctctaaggattgtacaaactgttctgttggaagacgggattttaaagtctgtgattggtatagcacaagcataaacaataaggagagctatggggctttaaaatacactaacaaaaatagatgcaaggtgttcttatgtgtcttctaccctctacgttcccactcacatgaagttcacctccactattgtagaaggacccttaattatccctggagattagatctagtctgtagargctgacaagctacaatttacatcacaaraatgagcatataattcagaggcttgattgattttttttcccctctgtgtcaggtgtcctcactcttccccattcatttggtgtggctgaactcagatgcttcaacttcaaagcagtcatgtagcatttctgaattatagtgttgcctaatttacttgagagatactggaatccaaaaatgcatgttttggcaagggttaaaccttaatctcaaaatttacatgccaattcatagtgtattttttgtgcagatttatctgagagtggcttggcactaaaggattttccattggcgctaaaa

SEQ ID NO: 11344 - DNA, 600 bp, Chicken  19866894214058_1
gacattaggatttggttacactcattcagaatctaattggaaaacagttctatttaaaaaaaaataaacatgcagaataatctacaagacagaagtggaaaatatggggatgtgggttttcgactgatattgaataaaccttgttatgtcagaaataacagctgccttgacctactcattgctaaacctaaagttgataaagcaggccttgaaatcaagtgtaacatgcacaatccctttcccatctgggacaataagaagaaaaagcacagacaaccacatctggtttgtacacctctyattccactgatagcaaaaatttcaactgctgagggacctattccctcgctcatgacatgctactacatagggcacatgcataatattttcttttattttttgtagtgcttattactaatgtatgtaacatgtggcagtctgttataaattcaattaaatgttaatgtaaacacctgctcagcttcatttatatactgatatactaggccaagaaattaaattgttaccttccatttcttttrtgttaatgtttcccttcaaggagaaagaaacaaggaaaagcaacctgctaaattgaca

SEQ ID NO: 11345 - DNA, 600 bp, Chicken  19866894214058_2
ggaaaatatggggatgtgggttttcgactgatattgaataaaccttgttatgtcagaaataacagctgccttgacctactcattgctaaacctaaagttgataaagcaggccttgaaatcaagtgtaacatgcacaatccctttcccatctgggacaataagaagaaaaagcacagacaaccacatctggtttgtacacctctyattccactgatagcaaaaatttcaactgctgagggacctattccctcgctcatgacatgctactacatagggcacatgcataatattttcttttaytttttgtagtgcttattactaatgtatgtaacatgtggcagtctgttataaattcaattaaatgttaatgtaaacacctgctcagcttcatttatatactgatatactaggccaagaaattaaattgttaccttccatttcttttrtgttaatgtttcccttcaaggagaaagaaacaaggaaaagcaacctgctaaattgacactagccagctacaaactactttaaattactgacatcttaaaagagaactgtataaaagcaactgagagtaaaggtgaaacaaaacatgtattatgt

SEQ ID NO: 11346 - DNA, 600 bp, Chicken  19866894214058_3
catctgggacaataagaagaaaaagcacagacaaccacatctggtttgtacacctctyattccactgatagcaaaaatttcaactgctgagggacctattccctcgctcatgacatgctactacatagggcacatgcataatattttcttttattttttgtagtgcttattactaatgtatgtaacatgtggcagtctgttataaattcaattaaatgttaatgtaaacacctgctcagcttcatttatatactgatatactaggccaagaaattaaattgttaccttccatttcttttrtgttaatgtttcccttcaaggagaaagaaacaaggaaaagcaacctgctaaattgacactagccagctacaaactactttaaattactgacatcttaaaagagaactgtataaaagcaactgagagtaaaggtgaaacaaaacatgtattatgtagcttagaagtattaatgactattaacagaataaaatataaccacaaagacaatacaacgggaagtatcacagtatgtgggaataagagtgcgaagccacttgtatgggaaggaatggccgtactcactggacatatcaaatatgt

SEQ ID NO: 11347 - DNA, 600 bp, Chicken  19866894214063_1
tggagtggatttctactggactgtagaaatacataaacagatatttcttgtaatgaaatgctctgtcctctttcccaacccaggactcaacatagtgtttatatacctggcacagcatacaaggattagaggcagaaccagatggccatactttaacttgtcttgtttatttaggtgatggatagcagagtcctgactatacctatttgtctgaccatgatcacttatgttctactttggacttctggcacacacatgcacacaaatggaagtaaaaaaaactctttttgtctttattcyttaggcttagaaagaattgcaagagattcagcctatgagcaagaaggaaaagttcagtttgtaattgatgcagtatattccatggcctacgcactacataacatgcacaaagatctctgtcctggatatattggtctgtgtccaaggatgagcacaattgatggtaaagaactacttacctatatccgagcagtaaactttaacggtaagttatatgtactccttttttttttttttcctaccttcttgttctttaaatgtttcagaagtgacaagatgtgttttcttctatatatagga

SEQ ID NO: 11348 - DNA, 600 bp, Chicken  19866894214063_2
ctcattcagtcagaactgtgagtttttccacctgctttgaaaccccaagtgtatttttcatcttaacattaagctgctcccacaggatgcagatgttaaaaataagaatccatcaatcaaaatatttcagtgaaaagctgctattatagaaacaagttgaggactcatgcagtcctactgacagattaaaatccttagatggaggttgctcctgtgtttacaagagaatgaattgaaaatatacccttttgaaaattgcatccttttgcaattactgttaacaatttctttacataatcraatagtggaattttcttttagcttacgtgtttaagtctcaattaaagggcttactagaagttacagctgcttttccttatcattgtttttcactcagtgatgtaatcagttttaacacaactgcaatatatatttttaaacaaaagtacrtaatattctgtgcagcgggggtctgcctgctggagaaatacagttactgtttcccttgctgtcaacagtagagaccaataaagaataggcttaatttatgaatgtagaattgaaaagagtagaacatacttgatggtgaaataaagttgc

SEQ ID NO: 11349 - DNA, 600 bp, Chicken  19866894214063_3
aacaagttgaggactcatgcagtcctactgacagattaaaatccttagatggaggttgctcctgtgtttacaagagaatgaattgaaaatatacccttttgaaaattgcatccttttgcaattactgttaacaatttctttacataatcraatagtggaattttcttttagcttacgtgtttaagtctcaattaaagggcttactagaagttacagctgcttttccttatcattgtttttcactcagtgatgtaatcagttttaacacaactgcaatatatatttttaaacaaaagtacrtaatattctgtgcagcgggggtctgcctgctggagaaatacagttactgtttcccttgctgtcaacagtagagaccaataaagaataggcttaatttatgaatgtagaattgaaaagagtagaacatacttgatggtgaaataaagttgctgaaaactttcatgaatttcatagctgttgtaggctatatttcccattattttacaaggaaattgaacaatgttctttactgtgttttctttctattttttcccctatgtggcagtaattcacatactaggaatgccttctaactataga

SEQ ID NO: 11350 - DNA, 600 bp, Chicken  19866894214063_4
tggagaaatacagttactgtttcccttgctgtcaacagtagagaccaataaagaataggcttaatttatgaatgtagaattgaaaagagtagaacatacttgatggtgaaataaagttgctgaaaactttcatgaatttcatagctgttgtaggctatatttcccattattttacaaggaaattgaacaatgttctttactgtgttttctttctattttttcccctatgtggcagtaattcacatactaggaatgccttctaactatagagagaatcactgtctatcacaattcactccygtgacctcagctgccagcctttttgaaaaaagcacaaggtcattttgaatttagcttccaagtggaagcatttttttgctctaggtaatgtaccagaccatttggttgatatgaatattggctgtagttcacagtttttttctaaatctttcttcttctgcaacattcataaaaagggaatccctgtctctgggaatacagaagatagaaggagttaaaataattcttcagtgatttttaagaaaacctggaacaaaatatgtagttaacaaatgggaatgttgctatgatgacagaggt

SEQ ID NO: 11351 - DNA, 600 bp, Chicken  19866894214063_5
gtggaagcatttttttgctctaggtaatgtaccagaccatttggttgatatgaatattggctgtagttcacagtttttttctaaatctttcttcttctgcaacattcataaaaagggaatccctgtctctgggaatacagaagatagaaggagttaaaataattcttcagtgatttttaagaaaacctggaacaaaatatgtagttaacaaatgggaatgttgctatgatgacagaggtaggcaacatattgtaaggtctgcagtgataattatctacatttccaacacatatgcttttrcgtctgtgttgttaaagtgtaaagaaagcgatcaattttcatttggttagcatgaaagattagcataaaaagataaggtgtacacactatataaaaccttttcctccctaaagattgttgtacttcatcaataactgtcttgatttcactggctgactattgaaacaacaaggggagatgaaagagtgggattgagcattctggacgctaatgaaaaaggatgtttttgaagtagcagtctttcagtatctaaaggcargctgtaagaaagaaggggatggactttttagcagggtctgt

SEQ ID NO: 11352 - DNA, 600 bp, Chicken  19866894214063_6
tgcagtgataattatctacatttccaacacatatgcttttrcgtctgtgttgttaaagtgtaaagaaagcgatcaattttcatttggttagcatgaaagattagcataaaaagataaggtgtacacactatataaaaccttttcctccctaaagattgttgtacttcatcaataactgtcttgatttcactggctgactattgaaacaacaaggggagatgaaagagtgggattgagcattctggacgctaatgaaaaaggatgtttttgaagtagcagtctttcagtatctaaaggcargctgtaagaaagaaggggatggactttttagcagggtctgttgcaataggacaacaggaaatagtttcagactaaaaagagtggagatttagactgaatataaggttataaggtttgttttttttttatgataaaggtagtgaagcactggaacaggttgcccagggaggtggtggatgtcccatccctggagacaatcaaggctgggctgaatgaggctctgagcaacctgatctggctgtaggtttattgcaggggagttggaccagctgacctttaagagtcccttccaagtcaaac

SEQ ID NO: 11353 - DNA, 599 bp, Chicken  19866894214065_1
  misc_feature (1)..(162): n is any nucleotide
nnnnnnnnnnnnnnnnnnnnnnnnnnnnnnnnnnnnnnnnnnnnnnnnnnnnnnnnnnnnnnnnnnnnnnnnnnnnnnnnnnnnnnnnnnnnnnnnnnnnnnnnnnnnnnnnnnnnnnnnnnnnnnnnnnnnnnnnnnnnnnnnnnnnnnnnnnnnnnnnnntccccagtgcctcactggggacatctggtggaaggaagatctcaccccttttcgttgtctgatgaggaggcagctgctgcatggatgcaagaggtctcatggcattgcaggaaagacaccttgcctataaattctacrtgcatagagaggtgctgctctggccaaaggcagcatcaccatctcctctttcttttgggttctgtcagcacctatatttctggctgggaacacagtgaatgatttcttcccattttctgtttagtcagaatgagakagagggtcatctgtgggctgagaggagatgagcatgctattgagggaaagagcaaaaaaaagatgctgtgaatgtacaccttggatggaaaccgcctatttaacaaaagggcttgcctttttgctcatgattcctgatttaaaaatcagctggagattgaata

SEQ ID NO: 11354 - DNA, 599 bp, Chicken  19866894214065_2
  misc_feature (1)..(26): n is any nucleotide
nnnnnnnnnnnnnnnnnnnnnnnnnntccccagtgcctcactggggacatctggtggaaggaagatctcaccccttttcgttgtctgatgaggaggcagctgctgcatggatgcaagaggtctcatggcattgcaggaaagacaccttgcctataaattctacrtgcatagagaggtgctgctctggccaaaggcagcatcaccatctcctctttcttttgggttctgtcagcacctatatttctggctgggaacacagtgaatgatttcttcccattttctgtttagtcagaatgagakagagggtcatctgtgggctgagaggagatgagcatgctattgagggaaagagcaaaaaaaagatgctgtgaatgtacaccttggatggaaaccgcctatttaacaaaagggcttgcctttttgctcatgattcctgatttaaaaatcagctggagattgaataccaggaaagagcacaaagaggaactcagttcatcctcctacaaatgccttattttccctgctygsttgcctaggacctgaaacagggaccagtcttcttgtagtggcttaaaatcttactcatttctcagatatca

SEQ ID NO: 11355 - DNA, 597 bp, Chicken  19866894214065_3
tgtcagcacctatatttctggctgggaacacagtgaatgatttcttcccattttctgtttagtcagaatgagakagagggtcatctgtgggctgagaggagatgagcatgctattgagggaaagagcaaaaaaaagatgctgtgaatgtacaccttggatggaaaccgcctatttaacaaaagggcttgcctttttgctcatgattcctgatttaaaaatcagctggagattgaataccaggaaagagcacaaagaggaactcagttcatcctcctacaaatgccttattttccctgctygsttgcctaggacctgaaacagggaccagtcttcttgtagtggcttaaaatcttactcatttctcagatatcacgagtcaaatgaaatgtccttgacccagcctacagtgtattagtttagcatatatgacagtgtctggactctgctatttactgcactatctattacctggaagatcccaggcacacagcaactatctccagggactgggatcctctgtttttttaagctccctcttctgcccacctttccaaaggctgtacataggtgcaggagtgaagcacaacctctaaatt

SEQ ID NO: 11356 - DNA, 595 bp, Chicken  19866894214065_4
tcagcacctatatttctggctgggaacacagtgaatgatttcttcccattttctgtttagtcagaatgagakagagggtcatctgtgggctgagaggagatgagcatgctattgagggaaagagcaaaaaaaagatgctgtgaatgtacaccttggatggaaaccgcctatttaacaaaagggcttgcctttttgctcatgattcctgatttaaaaatcagctggagattgaataccaggaaagagcacaaagaggaactcagttcatcctcctacaaatgccttattttccctgctygsttgcctaggacctgaaacagggaccagtcttcttgtagtggcttaaaatcttactcatttctcagatatcacgagtcaaatgaaatgtccttgacccagcctacagtgtattagtttagcatatatgacagtgtctggactctgctatttactgcactatctattacctggaagatcccaggcacacagcaactatctccagggactgggatcctctgtttttttaagctccctcttctgcccacctttccaaaggctgtacataggtgcaggagtgaagcacaacctctaaatt

SEQ ID NO: 11357 - DNA, 600 bp, Chicken  19866894214066_1
atccaaggtttcagcagctgcaagtctgaatccaaactctgagattcacagaatacaaacttttgcatctgctattttggcacagaaataacaaacaaaatgagtgcatgcaaagtaaaccacttcattgctgaatttgcctggatatctgaaagggcttcatgactcctacttagcactagtcagacagcacattgccacaaaatgcagtgtaattgcaactcattcagggatggaggccttcccaaagtataaactgtttaagagttctaattattcatgtttcatctgctgctcacytttttaatgataatattctccttacaacagaatgaggtagagaagaataataccaagcttaaacttcttttaatacctcccatgagcatagtatttcttagacactaccatttgttgaactacattcacaaacatcctctgaaggaccacaaggagatccacaaccacagagtgaaacacaatttaaaagcaaacgcaagcgaaaatcacagtgactcatagaattcatacagcaaaagaacatctgcatttcccattgtatggttttccattaaacaacagaacacttcagaagtttga

SEQ ID NO: 11358 - DNA, 600 bp, Chicken  19866894214069_1
atttttagaactagtgtctgtcactgtggcatcacttcctaaggggatgtgcgtgaccaggaaagcaaccagcaaaccagcacataaccctcacaaggttcccacattgcctctttaagcaggaagagaacatgatacaaacatgatgcaaattaggatctaaacagttttcctggcaggttgtcacgcaagttgccagcactgctccttgccatggacacccacagcagtcctgtgccccagacccactgctcctgacccactgcctcccggcagccctgctctcaggtaccccccagmtgcaaattcacactgggtgcgccttgaggggagaggtgacgaccccattccatgcctccccgcagtgcactgcatccccacccgcacttccctcctcctgggctccgcacaaagcccagctgcactctggccrgggaacatccgctgtggaaacctgggaggagctgacaatccccaaagattggctgcacacacggccaagcaagcactgctggctgccggcctaattcgttgcaaatgtgcttcaatgtggttccaatgtggagccccagccccgggctcagcggggctgagaagtgg

SEQ ID NO: 11359 - DNA, 600 bp, Chicken  19866894214069_2
gatacaaacatgatgcaaattaggatctaaacagttttcctggcaggttgtcacgcaagttgccagcactgctccttgccatggacacccacagcagtcctgtgccccagacccactgctcctgacccactgcctcccggcagccctgctctcaggtaccccccagmtgcaaattcacactgggtgcgccttgaggggagaggtgacgaccccattccatgcctccccgcagtgcactgcatccccacccgcacttccctcctcctgggctccgcacaaagcccagctgcactctggccrgggaacatccgctgtggaaacctgggaggagctgacaatccccaaagattggctgcacacacggccaagcaagcactgctggctgccggcctaattcgttgcaaatgtgcttcaatgtggttccaatgtggagccccagccccgggctcagcggggctgagaagtggccgagtggggctgaaccgggtgagctccacttctcctgcagatccctgcactctgtgtccctcatctatagggatgcggtcgggctttaagcccaactgtaagatctccccagacccaagcatccctttccgc

SEQ ID NO: 11360 - DNA, 600 bp, Chicken  19866894214071_1
gctaggaggactgtggagggagcatgctttttccttggggaaagagagagaccgttacgtcactatgaagcacagagggcctctgaagggaacctcacccacttgctcaaccaaaaatctgagcaggtttcagtggtcaacatctggccaagctttataaatgatctcagcgcttccattctccacatgaaactagtacgagctgagatcacatgaaaaaagtcctcctgtttggataaaaggagtcgacacctacgggcagctctccccactgctcagaggtttcctcatgttggccamaggacacttatcaccacagaagccatcctggggctgcccagtggggtgggattcagaaagcacactggttgctctccagtggggcctttccacaccctggcctgtgttgccttttctgcttcactcccagtgcactactgttgtggaatctccatccctggagatacacagaagccatatggacatggtcctgagcactctgctctgggtgtccctgctggagcagatggacccagaggttcctgccagcctcaaaacggatgtcctctcatgtaccacagttgctaaagtgactggcaa

SEQ ID NO: 11361 - DNA, 600 bp, Chicken  19866894214072_1
ctgtgtgactgttggcctgcccaggcagtgcttatgtgtgcccatccaagtgacttatacttgatgtgtggacaaccattagttttccatgcaaccttcaagccatcccaccatgtcacagtgtggccaacctcagaaaataagatgttctgggaagtgtcttgaaagggtcctgaaatctccagctggagggctaggtgagctttcaaagcaggctgaatcctgagtgatgaagtgctgtgtttttctgtcttccttgaaacactaagggtaatatagatgtagttatacagagacacrtaaactgtgcagccttttatggttatctgttataggacatggtgcaccacattcaggccaggtagaaggaaatggggctctcctgaagataataaaatttcaccacattttattgtccctggataagatgggctgcaatcccagtgtgttaaatttattaggtggacattaccttcttacagcttctttaatatcttatctttcatctgaagctggatattttcctggatgtttcatttctgtgtctttgtcagtgagctcttgatgtgctatgtaacagcatctcagwtaatgggatct

SEQ ID NO: 11362 - DNA, 600 bp, Chicken  19866894214072_2
acagagacacrtaaactgtgcagccttttatggttatctgttataggacatggtgcaccacattcaggccaggtagaaggaaatggggctctcctgaagataataaaatttcaccacattttattgtccctggataagatgggctgcaatcccagtgtgttaaatttattaggtggacattaccttcttacagcttctttaatatcttatctttcatctgaagctggatattttcctggatgtttcatttctgtgtctttgtcagtgagctcttgatgtgctatgtaacagcatctcagwtaatgggatctaattcctatatatatacttaagtaagcatatttgattttaccctttctagttttgttcagtaacaacaggtagcatcacccctgtaacccagagtcattgactcagacaagaggtttctcccccattattccatcctgatggatgtctaggaactctcacaacagccctcctgtgtcagcagcagctccctttctcatttatcccagatcccttgagctgtcagctttctatgtggggacagcttcatggcacccaacagcaggagcagtgctcaggcctagtgaagat

SEQ ID NO: 11363 - DNA, 600 bp, Chicken  19866894214072_3
tgcagccttttatggttatctgttataggacatggtgcaccacattcaggccaggtagaaggaaatggggctctcctgaagataataaaatttcaccacattttattgtccctggataagatgggctgcaatcccagtgtgttaaatttattaggtggacattaccttcttacagcttctttaatatcttatctttcatctgaagctggatattttcctggatgtttcatttctgtgtctttgtcagtgagctcttgatgtgctatgtaacagcatctcagwtaatgggatctaattccwatatatatacttaagtaagcatatttgattttaccctttctagttttgttcagtaacaacaggtagcatcacccctgtaacccagagtcattgactcagacaagaggtttctcccccattattccatcctgatggatgtctaggaactctcacaacagccctcctgtgtcagcagcagctccctttctcatttatcccagatcccttgagctgtcagctttctatgtggggacagcttcatggcacccaacagcaggagcagtgctcaggcctagtgaagatttgtctccaatctcaaca

SEQ ID NO: 11364 - DNA, 600 bp, Chicken  19866894214072_4
gcagccttttatggttatctgttataggacatggtgcaccacattcaggccaggtagaaggaaatggggctctcctgaagataataaaatttcaccacattttattgtccctggataagatgggctgcaatcccagtgtgttaaatttattaggtggacattaccttcttacagcttctttaatatcttatctttcatctgaagctggatattttcctggatgtttcatttctgtgtctttgtcagtgagctcttgatgtgctatgtaacagcatctcagwtaatgggatctaattcctwtatatatacttaagtaagcatatttgattttaccctttctagttttgttcagtaacaacaggtagcatcacccctgtaacccagagtcattgactcagacaagaggtttctcccccattattccatcctgatggatgtctaggaactctcacaacagccctcctgtgtcagcagcagctccctttctcatttatcccagatcccttgagctgtcagctttctatgtggggacagcttcatggcacccaacagcaggagcagtgctcaggcctagtgaagatttgtctccaatctcaacac

SEQ ID NO: 11365 - DNA, 600 bp, Chicken  19866894214074_1
tactgtttcttactacctggcatgtgaatttatatatttgctgacacaagggataccttgaacagatagctaaaggctaagtcttcctgtacttagatttaaagttctaccagtatcccaaagagatgttaacaatggtatgtttgatatgtgtggacttgaaaaactcatttaaagaaacctttctaaagcagcagaatgctgtcctttccttatattttagctgcatcttgttagtagatgtcagaaggtgactttcctgaggaatctgttgtctcttaagctgtggatgggctgtgraaaatgttatcatcttgtgttscagtttaaatccatctacagagttcaagcattgaatccctgagttgtacctatgtctgtgtccttgcaatttgctactacctgagcgtgcaggagctgtcaagcagaccaataaggaatacaagtcccttggactagcacaacattcagaagggtagctgggacagagctcgtggctctttatttgaggtctgctgtagaggggtgctgctgctgcaaaactgctacttgaaagatgttgcctagaggagataaagtaacaaaaaaacaaaagccatg

SEQ ID NO: 11366 - DNA, 600 bp, Chicken  19866894214074_2
tgtgaatttatatatttgctgacacaagggataccttgaacagatagctaaaggctaagtcttcctgtacttagatttaaagttctaccagtatcccaaagagatgttaacaatggtatgtttgatatgtgtggacttgaaaaactcatttaaagaaacctttctaaagcagcagaatgctgtcctttccttatattttagctgcatcttgttagtagatgtcagaaggtgactttcctgaggaatctgttgtctcttaagctgtggatgggctgtgraaaatgttatcatcttgtgttscagtttaaatccatctacagagttcaagcattgaatccctgagttgtacctatgtctgtgtccttgcaatttgctactacctgagcgtgcaggagctgtcaagcagaccaataaggaatacaagtcccttggactagcacaacattcagaagggtagctgggacagagctcgtggctctttatttgaggtctgctgtagaggggtgctgctgctgcaaaactgctacttgaaagatgttgcctagaggagataaagtaacaaaaaaacaaaagccatgtacatatacatacctacayrcg

SEQ ID NO: 11367 - DNA, 548 bp, Chicken  19866894214074_3
ttscagtttaaatccatctacagagttcaagcattgaatccctgagttgtacctatgtctgtgtccttgcaatttgctactacctgagcgtgcaggagctgtcaagcagaccaataaggaatacaagtcccttggactagcacaacattcagaagggtagctgggacagagctcgtggctctttatttgaggtctgctgtagaggggtgctgctgctgcaaaactgctacttgaaagatgttgcctagaggagataaagtaacaaaaaaacaaaagccatgtacatatacatacctacayrcgtgtcctctgtcrtgcaggatcagcagtctgccctgatgtttgtccggaagtggaatgtacttaacttaaatcttttactcagtgaaggccagatctgacttttcctccacagcttactataggaataaaaatctatcaggaataccaggatatgtgaagagaagacatcagaatgccatatatatcatacttttattcttattatccttgctgctgttttctgttctcatttgcttctcaatctg

SEQ ID NO: 11368 - DNA, 547 bp, Chicken  19866894214074_4
tscagtttaaatccatctacagagttcaagcattgaatccctgagttgtacctatgtctgtgtccttgcaatttgctactacctgagcgtgcaggagctgtcaagcagaccaataaggaatacaagtcccttggactagcacaacattcagaagggtagctgggacagagctcgtggctctttatttgaggtctgctgtagaggggtgctgctgctgcaaaactgctacttgaaagatgttgcctagaggagataaagtaacaaaaaaacaaaagccatgtacatatacatacctacayrcgtgtcctctgtcrtgcaggatcagcagtctgccctgatgtttgtccggaagtggaatgtacttaacttaaatcttttactcagtgaaggccagatctgacttttcctccacagcttactataggaataaaaatctatcaggaataccaggatatgtgaagagaagacatcagaatgccatatatatcatacttttattcttattatccttgctgctgttttctgttctcatttgcttctcaatctg

SEQ ID NO: 11369 - DNA, 533 bp, Chicken  19866894214074_5
atctacagagttcaagcattgaatccctgagttgtacctatgtctgtgtccttgcaatttgctactacctgagcgtgcaggagctgtcaagcagaccaataaggaatacaagtcccttggactagcacaacattcagaagggtagctgggacagagctcgtggctctttatttgaggtctgctgtagaggggtgctgctgctgcaaaactgctacttgaaagatgttgcctagaggagataaagtaacaaaaaaacaaaagccatgtacatatacatacctacayrcgtgtcctctgtcrtgcaggatcagcagtctgccctgatgtttgtccggaagtggaatgtacttaacttaaatcttttactcagtgaaggccagatctgacttttcctccacagcttactataggaataaaaatctatcaggaataccaggatatgtgaagagaagacatcagaatgccatatatatcatacttttattcttattatccttgctgctgttttctgttctcatttgcttctcaatctg

SEQ ID NO: 11370 - DNA, 600 bp, Chicken  19866894214077_1
atggcttttcagcctttctccagagttgcctggtttttgtgttgtgcgtgctgacgggttttccacctttatgcaaagttgaccaaaggtggtattgtacggactgtaacttctgagctaagtgaaccatggggataggcagggtctgggaaaaccccctagaagggcagtgccatccatgcaggtattctgtgccatgcagagccagcaccactcccgccccactgcatccatcctccgctgcaccacctctcgccgctctcttcccctctccttccctcgtgggctccatttccgagyaccacacccggggagagctttctgtccttgacagcggaacaaatgctttttcacgyggccatcgctcctctgcccattgtcctcctcccggcctccgcctccaccgccaccgtggaaaatccctgcggggaaccaccgcctcccggccccaaacccctccgggcacggctgccagaccctgtgtgcactgagatctcctggctctgcagcagctgagcaggaggagggagactggagtgttgtctttgctattgaaagctcagggaagtgtttgggatgaaaaatttggaaagaggagat

SEQ ID NO: 11371 - DNA, 600 bp, Chicken  19866894214077_2
ggttttccacctttatgcaaagttgaccaaaggtggtattgtacggactgtaacttctgagctaagtgaaccatggggataggcagggtctgggaaaaccccctagaagggcagtgccatccatgcaggtattctgtgccatgcagagccagcaccactcccgccccactgcatccatcctccgctgcaccacctctcgccgctctcttcccctctccttccctcgtgggctccatttccgagyaccacacccggggagagctttctgtccttgacagcggaacaaatgctttttcacgyggccatcgctcctctgcccattgtcctcctcccggcctccgcctccaccgccaccgtggaaaatccctgcggggaaccaccgcctcccggccccaaacccctccgggcacggctgccagaccctgtgtgcactgagatctcctggctctgcagcagctgagcaggaggagggagactggagtgttgtctttgctattgaaagctcagggaagtgtttgggatgaaaaatttggaaagaggagatagatagcttgacaatagtgctcagacacagcaattttttattaaagagaggcaggg

SEQ ID NO: 11372 - DNA, 600 bp, Chicken  19866894214096_1
gaaagcatcacgtgcctacagccagcagaaaaagaaatattcgctgatgggtgcaaaggcaacaggaaaaagatatgaagagaaggattggagggtgacagtaatcctaacaagtaactgcacactctttggcaaattattttttccccagggcttcacaaggtcattgctgatacgcttctgtcagggtctcacttcctccctagcccagtgaagccatggtggtgaagaatatcagtataacttcaatgcatttttatcagacacttaggtgtgtgtaagcaagagctgccaggcacmccagcttgcagtgccaggggagaaacccatacctgggaggaagctctgcccactacagagcccacacagattgcataacaaggtgcttccttgcccacaccaccaccacaaacacaagctgcctgcatataggaagraaagtatatayagttttctttaaatccaccatccattccacctctccctcactgcaagcagtgaaaactgcttctgtccaactgtcacgtgagatttgagcagatatgacaagaaaggcggctttgtgcaactccctgccattcccccagctacgatgcacag

SEQ ID NO: 11373 - DNA, 562 bp, Chicken  19866894214096_2
tattttttccccagggcttcacaaggtcattgctgatacgcttctgtcagggtctcacttcctccctagcccagtgaagccatggtggtgaagaatatcagtataacttcaatgcatttttatcagacacttaggtgtgtgtaagcaagagctgccaggcacmccagcttgcagtgccaggggagaaacccatacctgggaggaagctctgcccactacagagcccacacagattgcataacaaggtgcttccttgcccacaccaccaccacaaacacaagctgcctgcatataggaagraaagtatatayagttttctttaaatccaccatccattccacctctccctcactgcaagcagtgaaaactgcttctgtccaactgtcacgtgagatttgagcagatatgacaagaaaggcggctttgtgcaactccctgccattcccccagctacgatgcacagggaacgcaggctgaacgtgatgaggcagacaaagcaaaccagcaacacaaccaacggtgtacacactgaccgcgttacccaccaccactggccaccccc

SEQ ID NO: 11374 - DNA, 551 bp, Chicken  19866894214096_3
cagggcttcacaaggtcattgctgatacgcttctgtcagggtctcacttcctccctagcccagtgaagccatggtggtgaagaatatcagtataacttcaatgcatttttatcagacacttaggtgtgtgtaagcaagagctgccaggcacmccagcttgcagtgccaggggagaaacccatacctgggaggaagctctgcccactacagagcccacacagattgcataacaaggtgcttccttgcccacaccaccaccacaaacacaagctgcctgcatataggaagraaagtatatayagttttctttaaatccaccatccattccacctctccctcactgcaagcagtgaaaactgcttctgtccaactgtcacgtgagatttgagcagatatgacaagaaaggcggctttgtgcaactccctgccattcccccagctacgatgcacagggaacgcaggctgaacgtgatgaggcagacaaagcaaaccagcaacacaaccaacggtgtacacactgaccgcgttacccaccaccactggccaccccc

SEQ ID NO: 11375 - DNA, 600 bp, Chicken  19866894214115_1
acaggttctcagaaaacagcacagaagtgaggagcagctccagaagataaagatgaaaagatacctgatcttgagaatcaggctcccctttgctggaatcagaatttgtgtcatcatcttcatcagaactgttcactatatcttcgtcatccgactgaagatctcctattaccatgccaggatgatcatggtgctcttctaaggatctaaaattaaaatatatacagttgataaagataccacattctgttgaggtaaagacccttctgctttaccccacagctactggtgtgcttggtrtcagaagcactgagtgcagtagcacttcatctgaagacaattatgacaatggtagcattttccacaraggaccccaactctgcaatgctttatctaagttggcatttgtgcagtactcactgatggcagccaaaagccacaggaactgtggagtatttatgttatttttgtccttcagagtttacttgacagcaaatctaataactattctttttgctacaaccatctgtagtgtaacgtttgtaccatgtgccagaaggataaggaaccagcatagtagttttgcctccctctctcaaa

SEQ ID NO: 11376 - DNA, 600 bp, Chicken  19866894214115_2
atcttgagaatcaggctcccctttgctggaatcagaatttgtgtcatcatcttcatcagaactgttcactatatcttcgtcatccgactgaagatctcctattaccatgccaggatgatcatggtgctcttctaaggatctaaaattaaaatatatacagttgataaagataccacattctgttgaggtaaagacccttctgctttaccccacagctactggtgtgcttggtrtcagaagcactgagtgcagtagcacttcatctgaagacaattatgacaatggtagcattttccacaraggaccccaactctgcaatgctttatctaagttggcatttgtgcagtactcactgatggcagccaaaagccacaggaactgtggagtatttatgttatttttgtccttcagagtttacttgacagcaaatctaataactattctttttgctacaaccatctgtagtgtaacgtttgtaccatgtgccagaaggataaggaaccagcatagtagttttgcctccctctctcaaaacaaagggacttatccagatgcaattctcccattggagccttctgtcggaattctagatgcatgtat

SEQ ID NO: 11377 - DNA, 600 bp, Chicken  19866894214122_1
agtttctgcagcacagggatgcagacgtatcccggcaaacacagcccactctccttcatggcgggacgcagctcagggatggacggctgttgtttattcctggttttagctgagtttcagagatggcctctgtagtcttggtagcatcctgcctccacaaatgacctttatacccagggagactcctggatgtgtcgatgggaatgacattcattcagctctgctacaccagaggactattattagtcactgtaacatacggaggtagggaagtgtatccattctgcacgtaaaagcagyataggacaatctggtgctgctggaaggttgatgatctgctttgtgagagtgaagcgtgtggctgaagataagacaaggttaagagagtttattatatgtgttttttgcttgcaactctttattttttcagcaagttgtggattttcaaagtcatcttgacttttgcttcctacccaacttcttcatgttaggagaatgtgatggagtttatgtaattcctcgtcttggaggaatctgagcaaacaaacccagcagctgttcctcacgtgaaagcgaactgaggacagaaaggagcttttc

SEQ ID NO: 11378 - DNA, 599 bp, Chicken  19866894214140_1
  misc_feature (1)..(129): n is any nucleotide
nnnnnnnnnnnnnnnnnnnnnnnnnnnnnnnnnnnnnnnnnnnnnnnnnnnnnnnnnnnnnnnnnnnnnnnnnnnnnnnnnnnnnnnnnnnnnnnnnnnnnnnnnnnnnnnnnnnnnnnnnnnnnnnnnaatgcagagttgctcacatttttcttccacattggttcctgtaactttcccttccacactctgttctcagcacccctttgcccccgccctgcctgcttagtagttactaatgagaatggagcagctagcatttatttttaggattgcagttattacatttaatctcctccytttccctatttgttccactcctactctttgcctttgaagaagaaatttccctctcatttccctggaaccccttattactgtggaggtagtaggatcccctcactcccaaggcagctgctgctggggttggcagaactgcagatgcatgggggctggtacagagtgagcatattgcctcattttcccccatgaaaattgggaggaggcttcaactaagcaccagcgtagtgctgctggcgttttgggacttctcccagtacctgcctgacactgccaagcaggtgcctatgcagttgggc

SEQ ID NO: 11379 - DNA, 600 bp, Chicken  19866894214144_1
ggaagcaatctgagttagaaatgacactcgctgccaatggaacaaaacccacgaggagcagagctcctactgccagcagccaggtgaaggagctggggagtggggagcagagatgggatcctatatcacaaagcagaactgacctgaggagcatttataaatcataaactgtttcttatcttttcccccggatcccaccagctttacctgtagcacagccagtccccgcctgcctgccccccatgtgtggggctggggcacgtgggtgagcccccgctgggtgctgcccaaagccagcartgtgtattgctcccacaccatggagtcagcatagagttyccatgactcggtttgaggtcctgctcctttatacacactgcacagagaaggaatgttttggctgtgcattgggtgctgtttgtaggcaaaacaccagggagagttctgagtgctctgcctcactccaatcagctacagcctgccaggcactgaagaaatgtttttatgctacagacagcatttgatggaagcacttaattttgaactttaggagtattacagatggcaggttgtaaatctgagagagaataaatagagaac

SEQ ID NO: 11380 - DNA, 600 bp, Chicken  19866894214144_2
gaacaaaacccacgaggagcagagctcctactgccagcagccaggtgaaggagctggggagtggggagcagagatgggatcctatatcacaaagcagaactgacctgaggagcatttataaatcataaactgtttcttatcttttcccccggatcccaccagctttacctgtagcacagccagtccccgcctgcctgccccccatgtgtggggctggggcacgtgggtgagcccccgctgggtgctgcccaaagccagcartgtgtattgctcccacaccatggagtcagcatagagttyccatgactcggtttgaggtcctgctcctttatacacactgcacagagaaggaatgttttggctgtgcattgggtgctgtttgtaggcaaaacaccagggagagttctgagtgctctgcctcactccaatcagctacagcctgccaggcactgaagaaatgtttttatgctacagacagcatttgatggaagcacttaattttgaactttaggagtattacagatggcaggttgtaaatctgagagagaataaatagagaacccatgtggggagtttgctggtggagcgcaggctgcagca

SEQ ID NO: 11381 - DNA, 600 bp, Chicken  19866894214144_3
actgcacagagaaggaatgttttggctgtgcattgggtgctgtttgtaggcaaaacaccagggagagttctgagtgctctgcctcactccaatcagctacagcctgccaggcactgaagaaatgtttttatgctacagacagcatttgatggaagcacttaattttgaactttaggagtattacagatggcaggttgtaaatctgagagagaataaatagagaacccatgtggggagtttgctggtggagcgcaggctgcagcagtatgaggatgcgccaggtctgggctcagggaagcwtttgtgtcagcagcactgctctgctggrctggagcrggatttccttggggaagaacagaaaaaaactgcattttcaagaatgtgtgagggtaaaagcgtgttttgtctctgagagaaccatcttatccaagaaatactttgttgaagagaaatcgtgttgcagctgttcttcagtgatttcccctcatgtgagtgggagcaatcaggacctcacagtccattccctcacacactacttaattgtgaatggaaggtgtggagataacggaaggatggctgcagttaaaggtgcaatctgtc

SEQ ID NO: 11382 - DNA, 600 bp, Chicken  19866894214144_4
tgcattgggtgctgtttgtaggcaaaacaccagggagagttctgagtgctctgcctcactccaatcagctacagcctgccaggcactgaagaaatgtttttatgctacagacagcatttgatggaagcacttaattttgaactttaggagtattacagatggcaggttgtaaatctgagagagaataaatagagaacccatgtggggagtttgctggtggagcgcaggctgcagcagtatgaggatgcgccaggtctgggctcagggaagcwtttgtgtcagcagcactgctctgctggrctggagcrggatttccttggggaagaacagaaaaaaactgcattttcaagaatgtgtgagggtaaaagcgtgttttgtctctgagagaaccatcttatccaagaaatactttgttgaagagaaatcgtgttgcagctgttcttcagtgatttcccctcatgtgagtgggagcaatcaggacctcacagtccattccctcacacactacttaattgtgaatggaaggtgtggagataacggaaggatggctgcagttaaaggtgcaatctgtccaagcagcacagggttgttctgcccttc

SEQ ID NO: 11383 - DNA, 600 bp, Chicken  19866894214144_5
gtgctgtttgtaggcaaaacaccagggagagttctgagtgctctgcctcactccaatcagctacagcctgccaggcactgaagaaatgtttttatgctacagacagcatttgatggaagcacttaattttgaactttaggagtattacagatggcaggttgtaaatctgagagagaataaatagagaacccatgtggggagtttgctggtggagcgcaggctgcagcagtatgaggatgcgccaggtctgggctcagggaagcwtttgtgtcagcagcactgctctgctggrctggagcrggatttccttggggaagaacagaaaaaaactgcattttcaagaatgtgtgagggtaaaagcgtgttttgtctctgagagaaccatcttatccaagaaatactttgttgaagagaaatcgtgttgcagctgttcttcagtgatttcccctcatgtgagtgggagcaatcaggacctcacagtccattccctcacacactacttaattgtgaatggaaggtgtggagataacggaaggatggctgcagttaaaggtgcaatctgtccaagcagcacagggttgttctgcccttcctgggccg

SEQ ID NO: 11384 - DNA, 600 bp, Chicken  19866894214145_1
acctgcaaagattatagccatttcataaaaaccaatatcagaggaagaagtttattggcaaggaccactgaaattcatttcatgcttcaaaagtttgtgattggtctggtaagaaaaaagcctcaattgttggaaatcattttttctttcaaaccagcaaacacccaagactgagctatgtcaactgtacgctgcactttctactcaactgcaatggagactattccatagctgtccttgtaaaacccactgtgcttactattcatgaactgctggagagagatacgtaaaaggcagggyaccaatacattatgcctgctgctctgcagagttgtgacactctgaaaccagactttgggaaagtcagttgaacactcagcataatgctgcacacttgcatggggaatattcataaagggagtgctatggggctatgtggaagttgactctagatcaaaaccagaaagtgtgccctgcttgattctctrcagagaagtgaatgaattgagtcaaattccttttgatagcatttgtcttaaactggttgcatgctgtcctgyttttttctggattcctctccaaattgccaagaaacttctc

SEQ ID NO: 11385 - DNA, 600 bp, Chicken  19866894214145_2
acgctgcactttctactcaactgcaatggagactattccatagctgtccttgtaaaacccactgtgcttactattcatgaactgctggagagagatacgtaaaaggcagggyaccaatacattatgcctgctgctctgcagagttgtgacactctgaaaccagactttgggaaagtcagttgaacactcagcataatgctgcacacttgcatggggaatattcataaagggagtgctatggggctatgtggaagttgactctagatcaaaaccagaaagtgtgccctgcttgattctctrcagagaagtgaatgaattgagtcaaattccttttgatagcatttgtcttaaactggttgcatgctgtcctgyttttttctggattcctctccaaattgccaagaaacttctcaggccagtccaggtctccccttcgcactcctcaccggatctcaaaatacactgaaggttttaaatcatcattcagtgtcctggtctaataaccctgcaacaaatgtttactctctaattggatcaagccttgtatctaccctggttgtcccattctgaagattcycttctagattttttttaattttc

SEQ ID NO: 11386 - DNA, 600 bp, Chicken  19866894214145_3
attcatgaactgctggagagagatacgtaaaaggcagggyaccaatacattatgcctgctgctctgcagagttgtgacactctgaaaccagactttgggaaagtcagttgaacactcagcataatgctgcacacttgcatggggaatattcataaagggagtgctatggggctatgtggaagttgactctagatcaaaaccagaaagtgtgccctgcttgattctctrcagagaagtgaatgaattgagtcaaattccttttgatagcatttgtcttaaactggttgcatgctgtcctgyttttttctggattcctctccaaattgccaagaaacttctcaggccagtccaggtctccccttcgcactcctcaccggatctcaaaatacactgaaggttttaaatcatcattcagtgtcctggtctaataaccctgcaacaaatgtttactctctaattggatcaagccttgtatctaccctggttgtcccattctgaagattcycttctagattttttttaattttccatgaatttgagtgctcmgacaaatctgtcttcagcaattacagggtctcgatctccagcagatatcctctc

SEQ ID NO: 11387 - DNA, 600 bp, Chicken  19866894214145_4
agtgtgccctgcttgattctctrcagagaagtgaatgaattgagtcaaattccttttgatagcatttgtcttaaactggttgcatgctgtcctgyttttttctggattcctctccaaattgccaagaaacttctcaggccagtccaggtctccccttcgcactcctcaccggatctcaaaatacactgaaggttttaaatcatcattcagtgtcctggtctaataaccctgcaacaaatgtttactctctaattggatcaagccttgtatctaccctggttgtcccattctgaagattcycttctagattttttttaattttccatgaatttgagtgctcmgacaaatctgtcttcagcaattacagggtctcgatctccagcagatatcctctcagtcatctgcagtgtagaagtaccagtggagccttgggtctcaccagatgacagaagcagcagggactgagccttggcgttcccaaatctggagctcagctcccacttgggccagttgcctttttccagaagaatggaccctgggtccacagtcgcactgagataggaaaggtctgggctaatctcagtccccaggtgagcactt

SEQ ID NO: 11388 - DNA, 597 bp, Chicken  19866894214145_5
gagtcaaattccttttgatagcatttgtcttaaactggttgcatgctgtcctgyttttttctggattcctctccaaattgccaagaaacttctcaggccagtccaggtctccccttcgcactcctcaccggatctcaaaatacactgaaggttttaaatcatcattcagtgtcctggtctaataaccctgcaacaaatgtttactctctaattggatcaagccttgtatctaccctggttgtcccattctgaagattcycttctagattttttttaattttccatgaatttgagtgctcmgacaaatctgtcttcagcaattacagggtctcgatctccagcagatatcctctcagtcatctgcagtgtagaagtaccagtggagccttgggtctcaccagatgacagaagcagcagggactgagccttggcgttcccaaatctggagctcagctcccacttgggccagttgcctttttccagaagaatggaccctgggtccacagtcgcactgagataggaaaggtctgggctaatctcagtccccaggtgagcacttaacagcattagcagacaactggggttggggcagaccct

SEQ ID NO: 11389 - DNA, 599 bp, Chicken  19866894214146_1
  misc_feature (1)..(122): n is any nucleotide
nnnnnnnnnnnnnnnnnnnnnnnnnnnnnnnnnnnnnnnnnnnnnnnnnnnnnnnnnnnnnnnnnnnnnnnnnnnnnnnnnnnnnnnnnnnnnnnnnnnnnnnnnnnnnnnnnnnnnnnnnntgagcagagtgacatttcttttcctccttcctaagtggaagctgccttgttcctcctccaccacctccaaaaaaatacaaccaactcaagtcccaggacaaactgcatactcagaatgacccatttaaggtccagtattttacagctcagctgggctagaaagggtcactgagcaacrtgctggaaatggaagatttctaatggggcacagtcgagctttcagttcagaggtatcataccttaatacaataccgtttggtactttctagaggtttctgcaacagtagaagttatgtttctgagttctatatagctagagatttgaaaactaaagggaaattccccttttaagtgagtagacattgttatgaggagacaaaaaatctacaaatgcccttcataatttgtgtttagagaagtaagaatggtgcacagccacaggaaatatctgctgttcctcttgagggtatgtgcacg

SEQ ID NO: 11390 - DNA, 600 bp, Chicken  19866894214148_1
atgtgctgcagcgagtccacatatgaccacagagagaaggcatgcaactcttctgctacatttggcccagttagtgctgccagttttggggatgtgttgaggctgcttaggattccccaggataacggctgtttcatctgtttccacagtgaaaactcttcggtttggctttatgtgagaacagtcactctccccccagcaggcatggcgctaccctctctgggaaaacaagcaattagcccgtttctgtgcaacaaaagaagataaaacaatgtaaagcttcctctgtttattgttacrggcacaagttagcaactaaggaatgtaagcagtacacagcattctgaacagctgatcacaccgtgactcacccactacacatccgtatctccgtgcctgcattcctgacctactttgggaattcaggcagcgttaccaacacgagattttcctcttcagaaggagcatctcacagctattccacagctcctggctgggatccactacacaggtttagtatgccaaaggtaacattggaggtaacagcaattcacatggactcccatgttttctgtttgtgtcccagcagacagccgtact

SEQ ID NO: 11391 - DNA, 600 bp, Chicken  19866894214150_1
ttaattctatatcatactcacatcagccacatttcttgctcctctggtttagcttaaactagcagcttggacgtagggacacaggacactgatactgaacatgagatatgtcctagtcctgcctatagaattaatcaagtgcaagtatagtttcatactaacaaagtcttcaaaggactaccaaattattctgaatagatagagtgaagaaattttggtttagtctagttgaaaaatcaaacattttgatcagggaatttaaactaataaaacatagactccccgttttgtaagaataargtatgagaaggggtttagaatatgattttgtagtctccactcttttcaggcatgttrcaatttctgtatggttaataagattggaaaatgctgccatttctgaggcagatctggaagtgaagtactcaacttctctactgtctgtaaatattatttttcttctgctgaggaaaagtgaaagtatatgtgatacctgctgagtggctaggtaccatctattctttttcctagtatccacagaaagatccagcccttcatatctcttctactgataacaaacatgattgaggtcttctggag

SEQ ID NO: 11392 - DNA, 600 bp, Chicken  19866894214150_2
actagcagcttggacgtagggacacaggacactgatactgaacatgagatatgtcctagtcctgcctatagaattaatcaagtgcaagtatagtttcatactaacaaagtcttcaaaggactaccaaattattctgaatagatagagtgaagaaattttggtttagtctagttgaaaaatcaaacattttgatcagggaatttaaactaataaaacatagactccccgttttgtaagaataargtatgagaaggggtttagaatatgattttgtagtctccactcttttcaggcatgttrcaatttctgtatggttaataagattggaaaatgctgccatttctgaggcagatctggaagtgaagtactcaacttctctactgtctgtaaatattatttttcttctgctgaggaaaagtgaaagtatatgtgatacctgctgagtggctaggtaccatctattctttttcctagtatccacagaaagatccagcccttcatatctcttctactgataacaaacatgattgaggtcttctggaggagttcaggtttattaaaatctcatggaaatgatacttttatatacaattccttatg

SEQ ID NO: 11393 - DNA, 600 bp, Chicken  19866894214152_1
accacatccaaacggcttttaaacacatccagggatggtgactcaaccacctccctggggagcctattccagtgcttaaccaccctttctgtaaagaagttttcctgatatccaacctaaacttaccctggcgcaacttgagggccatttcccctcgtcctgtcaccagtgagaagagaccaaccccccactctcaatgtaagcacctttcagatactggaagagagcaataaggtctccactcagcctgctcttccccagactaaacagccccagttccttcagtctctccttgaaggrcatactctccaagcccttcacaarccttgttgcccttctttggacctgctccagcacctctagataaaataaaattaatttataaaaagactaagcctaaatcaataattagaggaataataatgaaaaccttgagataacagaacagagttacactgtgtacacgtgataaaatagagtatctgtgctccaagcatcctcagctcagacatgctgagatgggcttaaatgccyggagaaagcttgtctgsttttctcattctcagtcattctaaagaaaactgtttcctttcccagcac

SEQ ID NO: 11394 - DNA, 600 bp, Chicken  19866894214152_2
acatccagggatggtgactcaaccacctccctggggagcctattccagtgcttaaccaccctttctgtaaagaagttttcctgatatccaacctaaacttaccctggcgcaacttgagggccatttcccctcgtcctgtcaccagtgagaagagaccaaccccccactctcaatgtaagcacctttcagatactggaagagagcaataaggtctccactcagcctgctcttccccagactaaacagccccagttccttcagtctctccttgaaggrcatactctccaagcccttcacaarccttgttgcccttctttggacctgctccagcacctctagataaaataaaattaatttataaaaagactaagcctaaatcaataattagaggaataataatgaaaaccttgagataacagaacagagttacactgtgtacacgtgataaaatagagtatctgtgctccaagcatcctcagctcagacatgctgagatgggcttaaatgccyggagaaagcttgtctgsttttctcattctcagtcattctaaagaaaactgtttcctttcccagcacagaaaaagtttgtcctacctcaat

SEQ ID NO: 11395 - DNA, 600 bp, Chicken  19866894214152_3
gtctccactcagcctgctcttccccagactaaacagccccagttccttcagtctctccttgaaggrcatactctccaagcccttcacaarccttgttgcccttctttggacctgctccagcacctctagataaaataaaattaatttataaaaagactaagcctaaatcaataattagaggaataataatgaaaaccttgagataacagaacagagttacactgtgtacacgtgataaaatagagtatctgtgctccaagcatcctcagctcagacatgctgagatgggcttaaatgccyggagaaagcttgtctgsttttctcattctcagtcattctaaagaaaactgtttcctttcccagcacagaaaaagtttgtcctacctcaattactgttcaaccasccttcagagtctgctgagaggagtaacactgcctgcatcacagatggagaaagacaaacccattctttgctgrcctgaccgcaactatgagaactgtgagagaagcagtgcatgtaaggaggagaccagcaagtcaaagaaaatatttcctagaccttctgttcattcacaactagctactaatcccattgaaaat

SEQ ID NO: 11396 - DNA, 600 bp, Chicken  19866894214152_4
tcttccccagactaaacagccccagttccttcagtctctccttgaaggrcatactctccaagcccttcacaarccttgttgcccttctttggacctgctccagcacctctagataaaataaaattaatttataaaaagactaagcctaaatcaataattagaggaataataatgaaaaccttgagataacagaacagagttacactgtgtacacgtgataaaatagagtatctgtgctccaagcatcctcagctcagacatgctgagatgggcttaaatgccyggagaaagcttgtctgsttttctcattctcagtcattctaaagaaaactgtttcctttcccagcacagaaaaagtttgtcctacctcaattactgttcaaccasccttcagagtctgctgagaggagtaacactgcctgcatcacagatggagaaagacaaacccattctttgctgrcctgaccgcaactatgagaactgtgagagaagcagtgcatgtaaggaggagaccagcaagtcaaagaaaatatttcctagaccttctgttcattcacaactagctactaatcccattgaaaatggagttactttcacctg

SEQ ID NO: 11397 - DNA, 600 bp, Chicken  19866894214152_5
tttggacctgctccagcacctctagataaaataaaattaatttataaaaagactaagcctaaatcaataattagaggaataataatgaaaaccttgagataacagaacagagttacactgtgtacacgtgataaaatagagtatctgtgctccaagcatcctcagctcagacatgctgagatgggcttaaatgccyggagaaagcttgtctgsttttctcattctcagtcattctaaagaaaactgtttcctttcccagcacagaaaaagtttgtcctacctcaattactgttcaaccasccttcagagtctgctgagaggagtaacactgcctgcatcacagatggagaaagacaaacccattctttgctgrcctgaccgcaactatgagaactgtgagagaagcagtgcatgtaaggaggagaccagcaagtcaaagaaaatatttcctagaccttctgttcattcacaactagctactaatcccattgaaaatggagttactttcacctgggaacactttagggactctgatacaattgcactggccaaaatccagtggaaacaattcaagttgatttaataataataaggatactg

SEQ ID NO: 11398 - DNA, 600 bp, Chicken  19866894214152_6
gaggaataataatgaaaaccttgagataacagaacagagttacactgtgtacacgtgataaaatagagtatctgtgctccaagcatcctcagctcagacatgctgagatgggcttaaatgccyggagaaagcttgtctgsttttctcattctcagtcattctaaagaaaactgtttcctttcccagcacagaaaaagtttgtcctacctcaattactgttcaaccasccttcagagtctgctgagaggagtaacactgcctgcatcacagatggagaaagacaaacccattctttgctgrcctgaccgcaactatgagaactgtgagagaagcagtgcatgtaaggaggagaccagcaagtcaaagaaaatatttcctagaccttctgttcattcacaactagctactaatcccattgaaaatggagttactttcacctgggaacactttagggactctgatacaattgcactggccaaaatccagtggaaacaattcaagttgatttaataataataaggatactggaaaaaaatacctaaaaaaaaaaccaacaacaacaamaaaaaaacccaacatagcaagccctagaggaccttt

SEQ ID NO: 11399 - DNA, 600 bp, Chicken  19866894214152_7
tcacagatggagaaagacaaacccattctttgctgrcctgaccgcaactatgagaactgtgagagaagcagtgcatgtaaggaggagaccagcaagtcaaagaaaatatttcctagaccttctgttcattcacaactagctactaatcccattgaaaatggagttactttcacctgggaacactttagggactctgatacaattgcactggccaaaatccagtggaaacaattcaagttgatttaataataataaggatactggaaaaaaatacctaaaaaaaaaaccaacaacaacaamaaaaaaacccaacatagcaagccctagaggacctttttacttttcccagaaatgagtccaaaaacaatgtttcccagatcatcagcaatctttsctttagatattccacagggcttacaggactcagttgagtctgggtcgaggatgggcaacaaagagctactgatgatgtgagaaactcctgggaatggggagtcccaactgaattacaagaggacatcttctgttttttttcccaatgccttgtgacatttagtcatctctgaggtgcaatgtgttcagataataaaagaggaaagc

SEQ ID NO: 11400 - DNA, 600 bp, Chicken  19866894214152_8
ggagaaagacaaacccattctttgctgrcctgaccgcaactatgagaactgtgagagaagcagtgcatgtaaggaggagaccagcaagtcaaagaaaatatttcctagaccttctgttcattcacaactagctactaatcccattgaaaatggagttactttcacctgggaacactttagggactctgatacaattgcactggccaaaatccagtggaaacaattcaagttgatttaataataataaggatactggaaaaaaatacctaaaaaaaaaaccaacaacaacaamaaaaaaamccaacatagcaagccctagaggacctttttacttttcccagaaatgagtccaaaaacaatgtttcccagatcatcagcaatctttsctttagatattccacagggcttacaggactcagttgagtctgggtcgaggatgggcaacaaagagctactgatgatgtgagaaactcctgggaatggggagtcccaactgaattacaagaggacatcttctgttttttttcccaatgccttgtgacatttagtcatctctgaggtgcaatgtgttcagataataaaagaggaaagcagtccaca

SEQ ID NO: 11401 - DNA, 600 bp, Chicken  19866894214152_9
agtcaaagaaaatatttcctagaccttctgttcattcacaactagctactaatcccattgaaaatggagttactttcacctgggaacactttagggactctgatacaattgcactggccaaaatccagtggaaacaattcaagttgatttaataataataaggatactggaaaaaaatacctaaaaaaaaaaccaacaacaacaamaaaaaaacccaacatagcaagccctagaggacctttttacttttcccagaaatgagtccaaaaacaatgtttcccagatcatcagcaatctttsctttagatattccacagggcttacaggactcagttgagtctgggtcgaggatgggcaacaaagagctactgatgatgtgagaaactcctgggaatggggagtcccaactgaattacaagaggacatcttctgttttttttcccaatgccttgtgacatttagtcatctctgaggtgcaatgtgttcagataataaaagaggaaagcagtccacactaaacctgttctaacataagcatatgtgaatgtggcttaaatggatgtgcttcaacaccaatcacaacagaaagtctagcagtgg

SEQ ID NO: 11402 - DNA, 600 bp, Chicken  19866894214157_1
tgtcagagcctttgaaaggcagcaaaagcgttggggtgaaatccaccaccaagaaacgctgcttacaaaggcgggttacccatatcaacatcgagcagcgtttcagtttcccagcatttctgtgagcacgacaaactgtgcggctgccacacgggagcaggcagggaaccacgctgcggttgatggaagcagccgggatctttttggtcctgcatccggcaccaaaggtgggcacctttcatgtaggcctcgactgtaaagcttcgaatttggccagggacggggagttctgcctcgagraggagcaaacacgttctaactgtggagctctgcttctctgtgagaggaagagaacggctgacaattcagcaagtgcagcaatttcccttcattagcaggacgccaggatgtgttaaaaagcacgaaaggacaaagctgctctcccccaggatgtgttgcccggcgcatggcgggtgatgtttgcttacccatccaaaccatcgcaccacttcatcacttatttttgatgcgatcttagatcacgtgcaaattctccttgtgattcctttctatttgatatataaaatagaaattcaagtg

SEQ ID NO: 11403 - DNA, 599 bp, Chicken  19866894214160_1
  misc_feature (1)..(81): n is any nucleotide
nnnnnnnnnnnnnnnnnnnnnnnnnnnnnnnnnnnnnnnnnnnnnnnnnnnnnnnnnnnnnnnnnnnnnnnnnnnnnnnnntctaacagagcaatttcagctgtggcattagccgatttcgctgatggcttattcatgtgggaggactctgtgcttcattggacaagtaccgagttagagaaggatcctggcccagcagacattagttaccatgttctaaaaagtcatgtgaaaatgaagacaagcaaataaacgtatgatcctttttctttttttttgtctagacctgcggtatcacaygcttcaaattaaatggcagccatgtcttaaagtcctctgcaagaagttccagttgacagagacaacctacaaaaccaaaactttcaaactctagaaaaaacaaagactgcgggagagaggaggtgctggaactgccagcagtgtttctagctctgtggataaatatttgttcaggccccccaggcaccaaatcacagaatataggttctatatgacctttgagactcggcactggagcagaaaaccgtgatggttgtgtgccctggcacgtccaggcctctaaacatagagtactgcct

SEQ ID NO: 11404 - DNA, 600 bp, Chicken  19866894214171_1
gagcaaaaatattgtgagctctttgctggtgcccatgtggatagaagccatccctgaagagacatatattgcaattggcaagatataaatcacctattatataaatatagaggtgtttgtgtgtcagatgttggcaagtggtttgtgggaaaaactactgcgttggatgctgaaagtgtctttcagatctgccactcctgacttcttcctttcttgctgttattgtgccttctagaccccttgtcattggggccgtatacaaatttctgtccaggtgttgcacagaagtgccttgagagwaaaagaggatttcctgctgtgctctgagttagaacaacaccgttcagggtttgtttcagggtttgtgcattgttggggttttttgttttgttttgttttccccaatagctctcttcattcaccaaagtcagtcagcacttgtttatacgtacaggagctttgttctctaccagcactgcagtttgaaatggccttgctgtaaccttgaagcgcagtagttatctttttcaaaacctcagctccacattgctgctccttggcctactgcttgtcatttcacagaatcacaggggttgtaag

SEQ ID NO: 11405 - DNA, 600 bp, Chicken  19866894214172_1
aaaaaaaaaaactgattcggaaacagttgtggaacttctgtcaactctgaccacaccttaaaaggaatagaacattagaaagatcgtcacccttccaaggcatttttttgttgactccatggctttccagttgcacaggtgctgcatgcagagcaggaactgatgacttgtggctaggcaaatggagatttctcctgtttagattgtcctaaactactgcaagtaccatgtcacattcagagcttcctttaacactggggtcagaaactatgacaatttttgtgtaaatagatcggattwaaagtttaaaattaatactgtaaatatgcaacttgatatgggaacgttttccttcattctgtaggacgttacctgttacacctaggtgagcaaatgcgacacacctcttggtatctgtctgtccttgtcatgctgtaacagccagctggaataagcaggtcattgaaaatttcacagaaagctcctaacttaacaacgctaggcggcttgtggtcatgtaaatgaggcatttgaagatcattctctagcactgctttcctagtacacaggacaaaaccgcaccctttacttggcactgta

SEQ ID NO: 11406 - DNA, 600 bp, Chicken  19866894214176_1
agttcttacctttcaggaggcatgcataccacatttgaattttgtttaacatgttaagaagagttgtattgatgaatgacaaattcattaagcctttaactttcctattgcaccaatcaagttttttaccactttgattcactctattgtttgttgtacattaggtgcaatctcaattaaaaggcagctctgtaaaatctgtttcattgtactccctttatactttaagacctgctccctttatattttgaaatagaaaaaatgtaccctgtcccactgaaatgttgatatgcaaaatarttttgctcccttgttaaatgtttgaaagaatatctgaatttcttaacttagtctatcctttagggcttaacattaataaccactgtatcaagatgcatcataactctgtcctaaacaagtttttttgcccccttcttgatgcttgtaaaaagacaaattgttataataaaagaaattttaatgatggagtaggagaactagattttctagaactagatcctcagtgtcatctgtaacacaaaagcagcttgaactcagtcatttcttcagtatattctacaactcctattagaagtgttt

SEQ ID NO: 11407 - DNA, 600 bp, Chicken  19866894214179_1
gtgaatatattttaaaatacagataacagttgctacactgggtaagaatggctgtatttggtgttcactaagaggacttttaggtcagtaatggacttgtagaaaaagagtagtagtgacactggatttgagagaagagcctcatgttgggatgctttcccagttttgggaatcctgggcttccgaagtcagcatttgcttctggaacatggttacactgaagtttctgctgacatatgctctgtcacccagcatcccttacatgcatttttgtgtatttaacatcaaaaaaataatgtwacttcttggatttatttctttgtttagctgcctagtgtgggtactacattaaaagctacatgaaggcatatcgggtgctgttactccttcctatttgatgctttgtatattttgaaacttagagataatctcaaggctgcagtttggtcatgtattagctctatttattattcttattgaaccctgaaatctggcttttatctcaacctgataaataatggaacctttggctgtgagagtgaggataaatacataaataaagaagagctgttaatgaaaaagtacctggtcaacagaggt

SEQ ID NO: 11408 - DNA, 600 bp, Chicken  19866894214184_1
attcccaaaagacactgagagaaaggagcagcagggtatgggatagccctgcctcagcgcagtgcaatcctaggtttgaattgttgccttcttgaacgctgagctgtgtttgaaatcacgcagtcccacccaaatgatgtgttagccagcccttaccatggctgcaagcttacagagtgacttctgaagtattccagcgctcgagcacagcattgcgttcagtgcaatgctcagaggtaccgccctgctcgctgcagggtgttggtgcacctggcattgccacgccaggccgtatggggraaaacacagctcagttcttgttcataagttatagttctgtgggtttttcccccttccccagaacccttgatcttgaagatggtgagtagccagcctaagtacgatctaatacgggaggttggtcgtggcagttatggtgtggtgtacgaagcagtcgtcaggaagacctctgcacgggtggcagtgaaaaagattcggtgccatgctccagagaacgtggaactagctctgcgtgagttctgggcacttagcagtatcaagagccagcatcccaacgtcattcacctggaggagtgcatc

SEQ ID NO: 11409 - DNA, 600 bp, Chicken  19866894214184_2
tgaacaatcacctgcgtcttttaatttgaagccatgccactctaaaggctccaggacttgctttgctaagttgggggatgtcttgaggcagagctatgaagaatttcttaatgtcagatgcctttggaaggggaagaggctgtcttgatatagtaagccaacgtttgaagaagtagtaagcaattaagagagctcaatgagctggtttaatttcttgtttgggtaaataacgtcaaagagaagtaaatgtatggtatgcagaggaatagaagagtaaatactgctattccttatgtgggrctgttgaaaactgagttgcctagaagttggaaggcaagtatttctgagcaatacgtagctctggaaggacctgaaagctcatggggagcttgctaggagtctgccccagctattaatcatcccctggcagacatttgtctctctgatgttaaaaagtcagcggcctgctaaacatttgctgtgttatccctgatcagcttctatcatttcagtttttattgttgtcattcttgcatggctgacattgaaccttttgttagtgagcactcatttgccaacacttcacggctgttctgatcc

SEQ ID NO: 11410 - DNA, 600 bp, Chicken  19866894214184_3
tgaggcagagctatgaagaatttcttaatgtcagatgcctttggaaggggaagaggctgtcttgatatagtaagccaacgtttgaagaagtagtaagcaattaagagagctcaatgagctggtttaatttcttgtttgggtaaataacgtcaaagagaagtaaatgtatggtatgcagaggaatagaagagtaaatactgctattccttatgtgggrctgttgaaaactgagttgcctagaagttggaaggcaagtatttctgagcaatacgtagctctggaaggacctgaaagctcatrgggagcttgctaggagtctgccccagctattaatcatcccctggcagacatttgtctctctgatgttaaaaagtcagcggcctgctaaacatttgctgtgttatccctgatcagcttctatcatttcagtttttattgttgtcattcttgcatggctgacattgaaccttttgttagtgagcactcatttgccaacacttcacggctgttctgatcccgttgtgctgggtactctgtgagcctgagaaaggattcttgcctttgtcaacttgctatagctcagtcattgtcactggcacg

SEQ ID NO: 11411 - DNA, 600 bp, Chicken  19866894214184_4
tctatcatttcagtttttattgttgtcattcttgcatggctgacattgaaccttttgttagtgagcactcatttgccaacacttcacggctgttctgatcccgttgtgctgggtactctgtgagcctgagaaaggattcttgcctttgtcaacttgctatagctcagtcattgtcactggcacgttgccacgaagggattatggtaaaataatactcatcagctcatatggggaaaaagtagtaccttatcttgtaagtggagctataagatactgcgtcagacttgcaggcagctgcayagggagcagtttgggggaaaaaaagaggggtgtgagggaggctgcagggtgggactgtgagtgagaaagagcttccaggtcactgcagcgccaggttttgcaagcagtgcagygagcagaccttgcccgtgtttggggcacaaatgctgcaagttgttttcctgctccaaagagcagagaagagcaaagggcagagctgaatgcagagatcgctttatgatagcgtacgctgaaagagagaaacccagatctcccttggcttgccctctcttctgcccactccaggtgatattacattgc

SEQ ID NO: 11412 - DNA, 600 bp, Chicken  19866894214184_5
tactctgtgagcctgagaaaggattcttgcctttgtcaacttgctatagctcagtcattgtcactggcacgttgccacgaagggattatggtaaaataatactcatcagctcatatggggaaaaagtagtaccttatcttgtaagtggagctataagatactgcgtcagacttgcaggcagctgcayagggagcagtttgggggaaaaaaagaggggtgtgagggaggctgcagggtgggactgtgagtgagaaagagcttccaggtcactgcagcgccaggttttgcaagcagtgcagygagcagaccttgcccgtgtttggggcacaaatgctgcaagttgttttcctgctccaaagagcagagaagagcaaagggcagagctgaatgcagagatcgctttatgatagcgtacgctgaaagagagaaacccagatctcccttggcttgccctctcttctgcccactccaggtgatattacattgccaagctgaactggtgcrgtgtgaggaggcctgggaagggctgytggtgtttcctgcagtgcttcagggcaggtgctgtaactgctgtcagctgagccaggcttgtatagtgag

SEQ ID NO: 11413 - DNA, 600 bp, Chicken  19866894214184_6
aaaaaaagaggggtgtgagggaggctgcagggtgggactgtgagtgagaaagagcttccaggtcactgcagcgccaggttttgcaagcagtgcagygagcagaccttgcccgtgtttggggcacaaatgctgcaagttgttttcctgctccaaagagcagagaagagcaaagggcagagctgaatgcagagatcgctttatgatagcgtacgctgaaagagagaaacccagatctcccttggcttgccctctcttctgcccactccaggtgatattacattgccaagctgaactggtgcrgtgtgaggaggcctgggaagggctgytggtgtttcctgcagtgcttcagggcaggtgctgtaactgctgtcagctgagccaggcttgtatagtgagctctgagctggcgtggcttccttgtgctgcagtcccagatctggaggtgaattctgtcatcctgatgttctgaactgagacccaagtagagctccagtgaggctgagtggagggaagagctgygtgttggagttgctccctcctgtgctgcggttcccatctcgctgttattggctgtaaaccccgaataaacagttaaagttc

SEQ ID NO: 11414 - DNA, 600 bp, Chicken  19866894214184_7
gcagggtgggactgtgagtgagaaagagcttccaggtcactgcagcgccaggttttgcaagcagtgcagygagcagaccttgcccgtgtttggggcacaaatgctgcaagttgttttcctgctccaaagagcagagaagagcaaagggcagagctgaatgcagagatcgctttatgatagcgtacgctgaaagagagaaacccagatctcccttggcttgccctctcttctgcccactccaggtgatattacattgccaagctgaactggtgcrgtgtgaggaggcctgggaagggctgytggtgtttcctgcagtgcttcagggcaggtgctgtaactgctgtcagctgagccaggcttgtatagtgagctctgagctggcgtggcttccttgtgctgcagtcccagatctggaggtgaattctgtcatcctgatgttctgaactgagacccaagtagagctccagtgaggctgagtggagggaagagctgygtgttggagttgctccctcctgtgctgcggttcccatctcgctgttattggctgtaaaccccgaataaacagttaaagttctaacacagaattgctcttaagttggt

SEQ ID NO: 11415 - DNA, 600 bp, Chicken  19866894214184_8
agagaaacccagatctcccttggcttgccctctcttctgcccactccaggtgatattacattgccaagctgaactggtgcrgtgtgaggaggcctgggaagggctgytggtgtttcctgcagtgcttcagggcaggtgctgtaactgctgtcagctgagccaggcttgtatagtgagctctgagctggcgtggcttccttgtgctgcagtcccagatctggaggtgaattctgtcatcctgatgttctgaactgagacccaagtagagctccagtgaggctgagtggagggaagagctgygtgttggagttgctccctcctgtgctgcggttcccatctcgctgttattggctgtaaaccccgaataaacagttaaagttctaacacagaattgctcttaagttggtttgagtactaactgtgctcacaattaaatgtagttacaatttgttactaattttgctcttggatggggaaaaaaaccccattttttacaaagcattttaaaatgtctctctatgtattaatagctgtattaacttttgaaggcctgtagaggctgcatctgctttagtaaaccttggtttactgctaacagaa

SEQ ID NO: 11416 - DNA, 599 bp, Chicken  19866894214186_1
  misc_feature (1)..(147): n is any nucleotide
nnnnnnnnnnnnnnnnnnnnnnnnnnnnnnnnnnnnnnnnnnnnnnnnnnnnnnnnnnnnnnnnnnnnnnnnnnnnnnnnnnnnnnnnnnnnnnnnnnnnnnnnnnnnnnnnnnnnnnnnnnnnnnnnnnnnnnnnnnnnnnnnnnnaatcctttccttcctgataaatagtaaggatctcacgtgttaagccaacacagtagtggtacttttcttaggaaacttaaattttcaaatccaaggtcattttaaaacttagtatttcaatcctctctgaacaaatcagcatattattttggrgaatgctttatttttgaatgccagaaaacttgcactgacaatactaaaatggtctttaattgtcctcacattttataaataattgttttagtaactgccaggaagagtaagtctttcttccactccctttactgatgtgttttagctatcttgttttagacacgaaatcgttttgaaggaacaaggtcagaggtagaggaactcatgaacaagatcagaagaaatcctcaggaacataaaagagcaaatcataacacaatggaaggttatctctatgtacaggaaaaaagtaagatata

SEQ ID NO: 11417 - DNA, 599 bp, Chicken  19866894214192_1
  misc_feature (1)..(19): n is any nucleotide
nnnnnnnnnnnnnnnnnnngcttccagcttcccagtcagctgctatttgccaaatcagggtttatatgcacagtccaaaaaaagtgctttgctttgttgctgtgggtcacagtttcttttctatcaaaagatttaaatctctcagatctagaaaaattctgatttctgtggcatctcagtggttgctcagatacccattcaccccacacattccttgtaactaaaaatgcattttggaggctgctgtcctctgcacagtggagttgctgttccctgtcctgcactgtttggagctgctgmacaggtggttgaaagaataatggtattaatcttaccctgtgcagaagcctgcgaaacaatgagcactgctcaggcagaacaagccaggacctctcttcccaaatacaggtccaaatttagcaggcttcaagaggagttgggatgccactgctgcaagtgaagaagggcagtgaagatggtgaagggtctggagcacaagtcttatgaggagtgtctgagggaactgggattgtttattctggagaagaggatgctcaggggagacattattgctccctacaactacctgaaagaaagtt

SEQ ID NO: 11418 - DNA, 410 bp, Chicken  19866894214200_1
agcctctgtgtttgaaacaataaacagctaaccaggccttgagtttatgtaactgtctgctctcaaaacaagcaatatgagggctgctctgaaagtaatgcgccttattttatgtcagcccatgatgttggtgttatgtcagtagaggttgaaccttcctgcaaacactgttatgttttgttgtcacatgacagatggcagcagaggggcagtctgacagaatggtatctggatatagaagtgcatatgaagcaaaggtgcatcactgaattcctccacatgaaaaaaaattgcacccaytgacattcattgatgcttgctgaacatttttggagaccaaacagtgaatatgagcacagtggaggcagtggggtggttgtacttcagtaatggctctatcatagcaactg

SEQ ID NO: 11419 - DNA, 600 bp, Chicken  19866894214207_1
atacaccaacaaccaacataatactgagtcatagtggacagcaaaaggaggccattagaattaaaggcaattagaaaaaaaccttgacctctatgcactctggaaattttatttaacatcacgactttccacttttagaagcctggaaatcattgattaaccacagggcatccccgagcagaagccaaacgtctcacaccacggactgagaaaagaaaaaccagtgatgtgaatgggtgcacagagcaagtcagctcagaagcaggattacagtcatgacctgcacctaccttgtggtamcacatcacacttcctctctccattttagttcagcttctcagctctcctacaacagcagtcycctgtctactttcataagacagatcctcactcaaaaaccctttcagtacaaaacacgaggtcgccttcccacacaacrcagcacagcctcttgaatccaactcaccctgcaagcaatctccccctgcttaggagtggcacagggatttgggccagattcctcccactcttggggagactcccagcccacatcccagctccgttctcaagcaggttccttggaaggagcagagtcagagg

SEQ ID NO: 11420 - DNA, 600 bp, Chicken  19866894214207_2
taaaggcaattagaaaaaaaccttgacctctatgcactctggaaattttatttaacatcacgactttccacttttagaagcctggaaatcattgattaaccacagggcatccccgagcagaagccaaacgtctcacaccacggactgagaaaagaaaaaccagtgatgtgaatgggtgcacagagcaagtcagctcagaagcaggattacagtcatgacctgcacctaccttgtggtamcacatcacacttcctctctccattttagttcagcttctcagctctcctacaacagcagtcycctgtctactttcataagacagatcctcactcaaaaaccctttcagtacaaaacacgaggtcgccttcccacacaacrcagcacagcctcttgaatccaactcaccctgcaagcaatctccccctgcttaggagtggcacagggatttgggccagattcctcccactcttggggagactcccagcccacatcccagctccgttctcaagcaggttccttggaaggagcagagtcagaggtgagtagcaagaaggctagttacctgatgaagacatgcctgggcaaaagcagaaccaggac

SEQ ID NO: 11421 - DNA, 600 bp, Chicken  19866894214207_3
agcctggaaatcattgattaaccacagggcatccccgagcagaagccaaacgtctcacaccacggactgagaaaagaaaaaccagtgatgtgaatgggtgcacagagcaagtcagctcagaagcaggattacagtcatgacctgcacctaccttgtggtamcacatcacacttcctctctccattttagttcagcttctcagctctcctacaacagcagtcycctgtctactttcataagacagatcctcactcaaaaaccctttcagtacaaaacacgaggtcgccttcccacacaacrcagcacagcctcttgaatccaactcaccctgcaagcaatctccccctgcttaggagtggcacagggatttgggccagattcctcccactcttggggagactcccagcccacatcccagctccgttctcaagcaggttccttggaaggagcagagtcagaggtgagtagcaagaaggctagttacctgatgaagacatgcctgggcaaaagcagaaccaggactgtttgccttcgatgcaaggttcatgatcaaactagtttcttggcaactgaaagcacctcccggtcccccaggccagt

SEQ ID NO: 11422 - DNA, 600 bp, Chicken  19866894214212_1
cacatccccctttatggcatcttcatagtcaattcattagtttgcttctgttgaacataaggcctgagttcttaattagaatgctgttaccctttatgtgatggaagggtggctatatcatgaggtttgtgacagcagaatatggcatcaattctgtgtttgattttggagaactggcactgctgtaattctgcaagcaattctcatattaattctggctgctttctatggacggatacacttccaaggctctgcataaaacaaagttcatttaacttgattagagtaatccatgcagtkatgatagaaaatgcatgttcccctgaatctagagtggatgatggaaactagaagtggtaagaaatcttgggwtggggctggctaatcgtttcaggtagaagggaggcagagcaagctttcggtgatcagttgtgatcgatttctcaccagycctttttccagaatctagtcttactgttgtcagaatgctctgtctaacagtcttaaagtgttctctgaagagrttctttaacaagcctaggacgcttctgaaaggtaaaattaaaggaacaaaacaaaaatgcaacagtgactacaacc

SEQ ID NO: 11423 - DNA, 600 bp, Chicken  19866894214212_2
taattagaatgctgttaccctttatgtgatggaagggtggctatatcatgaggtttgtgacagcagaatatggcatcaattctgtgtttgattttggagaactggcactgctgtaattctgcaagcaattctcatattaattctggctgctttctatggacggatacacttccaaggctctgcataaaacaaagttcatttaacttgattagagtaatccatgcagtkatgatagaaaatgcatgttcccctgaatctagagtggatgatggaaactagaagtggtaagaaatcttgggwtggggctggctaatcgtttcaggtagaagggaggcagagcaagctttcggtgatcagttgtgatcgatttctcaccagycctttttccagaatctagtcttactgttgtcagaatgctctgtctaacagtcttaaagtgttctctgaagagrttctttaacaagcctaggacgcttctgaaaggtaaaattaaaggaacaaaacaaaaatgcaacagtgactacaaccaaaacctcatgtacttaaacaagtgaacaacattaactatatccaagttgagagcctgacttggccttaata

SEQ ID NO: 11424 - DNA, 600 bp, Chicken  19866894214212_3
ttctgtgtttgattttggagaactggcactgctgtaattctgcaagcaattctcatattaattctggctgctttctatggacggatacacttccaaggctctgcataaaacaaagttcatttaacttgattagagtaatccatgcagtkatgatagaaaatgcatgttcccctgaatctagagtggatgatggaaactagaagtggtaagaaatcttgggwtggggctggctaatcgtttcaggtagaagggaggcagagcaagctttcggtgatcagttgtgatcgatttctcaccagycctttttccagaatctagtcttactgttgtcagaatgctctgtctaacagtcttaaagtgttctctgaagagrttctttaacaagcctaggacgcttctgaaaggtaaaattaaaggaacaaaacaaaaatgcaacagtgactacaaccaaaacctcatgtacttaaacaagtgaacaacattaactatatccaagttgagagcctgacttggccttaatactggcagggcaatattcagactctttagaaaatttaaagtgccagaagcttctatgctattcgaaaagaattggaatga

SEQ ID NO: 11425 - DNA, 600 bp, Chicken  19866894214212_4
tctatggacggatacacttccaaggctctgcataaaacaaagttcatttaacttgattagagtaatccatgcagtkatgatagaaaatgcatgttcccctgaatctagagtggatgatggaaactagaagtggtaagaaatcttgggwtggggctggctaatcgtttcaggtagaagggaggcagagcaagctttcggtgatcagttgtgatcgatttctcaccagycctttttccagaatctagtcttactgttgtcagaatgctctgtctaacagtcttaaagtgttctctgaagagrttctttaacaagcctaggacgcttctgaaaggtaaaattaaaggaacaaaacaaaaatgcaacagtgactacaaccaaaacctcatgtacttaaacaagtgaacaacattaactatatccaagttgagagcctgacttggccttaatactggcagggcaatattcagactctttagaaaatttaaagtgccagaagcttctatgctattcgaaaagaattggaatgactgaattgttgctcttctttctccttttcatttgataattctggaatctctttctagtggaaaagccctatgc

SEQ ID NO: 11426 - DNA, 600 bp, Chicken  19866894214215_1
gctaccattttatgtaaaaacattcatgttttttttctcttatatgtaaaggagcaaaacttccacctattattttcccagctggaagttaatccacattaaattttgctgcagtgctgaagacttttgaaaagcttcacagataattgaattgcagctttgatatgtgggaaccgtcagtaggaaaaagagcatcatcctctgtttgtcagaaacatttttaaaatggtaagatgaatgctgagaaaagaacagatgagcctgctcaacaatcctggctgcattactttccccagcagmtttactaactgygctgtaattttgtatggttatttccaagccttagaagttaggggatgggctaacttcaagccagcggtgctgcaaataccagccaaacccaagtaaccctattctccatgagcacaacaagtctgctcctctctttgtggagctgtcatctcttggccttcccactcagctgcttccagtgacaacacatttcatggcacccttccactgctgcaggacctctaaggcagctgcccacctgctgggtcgcacacagattactctgggaaattcttaccatacttagta

SEQ ID NO: 11427 - DNA, 600 bp, Chicken  19866894214215_2
tgtaaaaacattcatgttttttttctcttatatgtaaaggagcaaaacttccacctattattttcccagctggaagttaatccacattaaattttgctgcagtgctgaagacttttgaaaagcttcacagataattgaattgcagctttgatatgtgggaaccgtcagtaggaaaaagagcatcatcctctgtttgtcagaaacatttttaaaatggtaagatgaatgctgagaaaagaacagatgagcctgctcaacaatcctggctgcattactttccccagcagmtttactaactgygctgtaattttgtatggttatttccaagccttagaagttaggggatgggctaacttcaagccagcggtgctgcaaataccagccaaacccaagtaaccctattctccatgagcacaacaagtctgctcctctctttgtggagctgtcatctcttggccttcccactcagctgcttccagtgacaacacatttcatggcacccttccactgctgcaggacctctaaggcagctgcccacctgctgggtcgcacacagattactctgggaaattcttaccatacttagtatgtgcagcagct

SEQ ID NO: 11428 - DNA, 599 bp, Chicken  19866894214218_1
  misc_feature (1)..(89): n is any nucleotide
nnnnnnnnnnnnnnnnnnnnnnnnnnnnnnnnnnnnnnnnnnnnnnnnnnnnnnnnnnnnnnnnnnnnnnnnnnnnnnnnnnnnnnnnntttaaaaggaatacataatatcaagcatctggtttttaaacccagatttctgcagggttctgtgggaacggaagggcccactttcccacttctttctctcaccagcttctcactttccccaccactctagtgttgccaggaggctgggacttgttcccaggacatctgctacgctgctgagacagtaacctggagagggatggggatgtcrgaactgtcttctgcccatccttgttaaggccagtattgcctgttcccatacagcaccctgcctcatctaaggacacagcaggtctacactactccacatgcgcactgttatggcttagtttcaagacagaaatgagaggtatgagaaagggtaggagtgcagctcaccttgctcctgacctctctgctgagctgaggaggggacagctcaaggaaggggaggagcaggggtagaaccacgaaagggggaggctgcttgctgtgctggaagcactgtgaagtgtgtaaggtgactatgac

SEQ ID NO: 11429 - DNA, 599 bp, Chicken  19866894214228_1
  misc_feature (1)..(102): n is any nucleotide
nnnnnnnnnnnnnnnnnnnnnnnnnnnnnnnnnnnnnnnnnnnnnnnnnnnnnnnnnnnnnnnnnnnnnnnnnnnnnnnnnnnnnnnnnnnnnnnnnnnnnncaaggcttcagttagattgacattcatgagcagaaggtatacatttcaccttcaccatgccctcccgaaagtcagcatgatgttgtgccatatacctaatttatctctcatcccatgacagtaaaactacacaaggatgtctctagcgttatccggggtgacaagcagattaattttttctgtcactattttcatcaygctgcttatcactatgcagacactttgtccatgaaaatctcctgacctgtttgataaccttctgcagaacgttaaccaaacaccagctgaaggggtattttagagcacagtttkctgctatccttcatctcaacttgctaataacttcattgtatcaaatgacagacacccatgccaagatgtagagaaggtattgctcactggtagcatgttgatttttaagcagggaaactttgtgtctgytaactcattccctaacacctayrctgcggttgccaatgggaataaataaatttgtt

SEQ ID NO: 11430 - DNA, 600 bp, Chicken  19866894214228_2
tagattgacattcatgagcagaaggtatacatttcaccttcaccatgccctcccgaaagtcagcatgatgttgtgccatatacctaatttatctctcatcccatgacagtaaaactacacaaggatgtctctagcgttatccggggtgacaagcagattaattttttctgtcactattttcatcaygctgcttatcactatgcagacactttgtccatgaaaatctcctgacctgtttgataaccttctgcagaacgttaaccaaacaccagctgaaggggtattttagagcacagtttkctgctatccttcatctcaacttgctaataacttcattgtatcaaatgacagacacccatgccaagatgtagagaaggtattgctcactggtagcatgttgatttttaagcagggaaactttgtgtctgytaactcattccctaacacctayrctgcggttgccaatgggaataaataaatttgtttttcatcctcagaacctgattgtgagaggcaggacacgatcctacttcctctgaagtcagagggacagtgctttattgactttctgggcgctccttttctcccaaaagcagaaat

SEQ ID NO: 11431 - DNA, 600 bp, Chicken  19866894214228_3
tctagcgttatccggggtgacaagcagattaattttttctgtcactattttcatcaygctgcttatcactatgcagacactttgtccatgaaaatctcctgacctgtttgataaccttctgcagaacgttaaccaaacaccagctgaaggggtattttagagcacagtttkctgctatccttcatctcaacttgctaataacttcattgtatcaaatgacagacacccatgccaagatgtagagaaggtattgctcactggtagcatgttgatttttaagcagggaaactttgtgtctgytaactcattccctaacacctayrctgcggttgccaatgggaataaataaatttgtttttcatcctcagaacctgattgtgagaggcaggacacgatcctacttcctctgaagtcagagggacagtgctttattgactttctgggcgctccttttctcccaaaagcagaaatgtattcacatatgtcgaaccattcttgtgacacatctggagtgattttgaaaactgtctctcctttctgctatgtcacagcacctgtatagagctttgaaattttgaaattagatgttcagagaaggga

SEQ ID NO: 11432 - DNA, 600 bp, Chicken  19866894214228_4
agcagattaattttttctgtcactattttcatcaygctgcttatcactatgcagacactttgtccatgaaaatctcctgacctgtttgataaccttctgcagaacgttaaccaaacaccagctgaaggggtattttagagcacagtttkctgctatccttcatctcaacttgctaataacttcattgtatcaaatgacagacacccatgccaagatgtagagaaggtattgctcactggtagcatgttgatttttaagcagggaaactttgtgtctgytaactcattccctaacacctayrctgcggttgccaatgggaataaataaatttgtttttcatcctcagaacctgattgtgagaggcaggacacgatcctacttcctctgaagtcagagggacagtgctttattgactttctgggcgctccttttctcccaaaagcagaaatgtattcacatatgtcgaaccattcttgtgacacatctggagtgattttgaaaactgtctctcctttctgctatgtcacagcacctgtatagagctttgaaattttgaaattagatgttcagagaagggaaaatgagcaatgtaagtaagtt

SEQ ID NO: 11433 - DNA, 600 bp, Chicken  19866894214228_5
gcagattaattttttctgtcactattttcatcaygctgcttatcactatgcagacactttgtccatgaaaatctcctgacctgtttgataaccttctgcagaacgttaaccaaacaccagctgaaggggtattttagagcacagtttkctgctatccttcatctcaacttgctaataacttcattgtatcaaatgacagacacccatgccaagatgtagagaaggtattgctcactggtagcatgttgatttttaagcagggaaactttgtgtctgytaactcattccctaacacctayrctgcggttgccaatgggaataaataaatttgtttttcatcctcagaacctgattgtgagaggcaggacacgatcctacttcctctgaagtcagagggacagtgctttattgactttctgggcgctccttttctcccaaaagcagaaatgtattcacatatgtcgaaccattcttgtgacacatctggagtgattttgaaaactgtctctcctttctgctatgtcacagcacctgtatagagctttgaaattttgaaattagatgttcagagaagggaaaatgagcaatgtaagtaagttg

SEQ ID NO: 11434 - DNA, 600 bp, Chicken  19866894214239_1
ggagctctgcaagaggctattgatcagaagctccagagtaactattatctgccatgattccactacaagcatttgtggttggagactgcaggctccccttctgtttgttgtaatgtaagacaaaaagcatttttttgaagtacttcagagtttacttatgcataagtacattactcgtatacttctacagtgttcataaataatagatgtatggcagtaacagctagacaacagctgtacaacagttgttaaactcctgcagaacccagaggcaagggcaagaaccagaggagccagcaytgcgcagccccaggcttttgaccccctaaagtcaattttgacactggtctcgttttctctcaccaatgcactccaaaagtaagggcaggcagtgcacatccttgagtcwcttaaagaaccagagatttcattccattcaatagactgaagcytgcttgatcactatttaacaggcagcagtgactccataccagattctatcagttcccacataccgaaccaaaagtcaagttgcttttttttcttcaaatatctgtcaggaactgctgttttaacaccatccagtcagcatggacaaca

SEQ ID NO: 11435 - DNA, 600 bp, Chicken  19866894214239_2
gtaatgtaagacaaaaagcatttttttgaagtacttcagagtttacttatgcataagtacattactcgtatacttctacagtgttcataaataatagatgtatggcagtaacagctagacaacagctgtacaacagttgttaaactcctgcagaacccagaggcaagggcaagaaccagaggagccagcaytgcgcagccccaggcttttgaccccctaaagtcaattttgacactggtctcgttttctctcaccaatgcactccaaaagtaagggcaggcagtgcacatccttgagtcwcttaaagaaccagagatttcattccattcaatagactgaagcytgcttgatcactatttaacaggcagcagtgactccataccagattctatcagttcccacataccgaaccaaaagtcaagttgcttttttttcttcaaatatctgtcaggaactgctgttttaacaccatccagtcagcatggacaacaccatcagtccctggacaattgacaccacagtaatggatgcagccacaatcttgcccatagatactcttggcaatcctcttgataatcaatcccaatgtgacatcactgg

SEQ ID NO: 11436 - DNA, 600 bp, Chicken  19866894214239_3
tacttatgcataagtacattactcgtatacttctacagtgttcataaataatagatgtatggcagtaacagctagacaacagctgtacaacagttgttaaactcctgcagaacccagaggcaagggcaagaaccagaggagccagcaytgcgcagccccaggcttttgaccccctaaagtcaattttgacactggtctcgttttctctcaccaatgcactccaaaagtaagggcaggcagtgcacatccttgagtcwcttaaagaaccagagatttcattccattcaatagactgaagcytgcttgatcactatttaacaggcagcagtgactccataccagattctatcagttcccacataccgaaccaaaagtcaagttgcttttttttcttcaaatatctgtcaggaactgctgttttaacaccatccagtcagcatggacaacaccatcagtccctggacaattgacaccacagtaatggatgcagccacaatcttgcccatagatactcttggcaatcctcttgataatcaatcccaatgtgacatcactggcacatgaggcaatcactggatgtgtgcatgtatgtgttcactg

SEQ ID NO: 11437 - DNA, 600 bp, Chicken  19866894214239_4
ggctacttcaaaaatgcatgacaaggcagagaaaggcactggtccatagacagaaagcactgccttcagacaggccttggagaaagcacttggtttgcatccaggactgctgtgattgctctgatgacggaagctgagcaaagcaagcaggtaatgcaaccgtccccctaccaaaatgtactcaaagaagcaaatcgtgctgtaaaaaaacctaacatgaaaaacaagaagttctgtctgttcttttgagtcatctgatttctccaacttaatcacatatgtttatattaattagtagtrgggaagaaatactatgggaaagatacctggacagagtgttactatcagcatatgttaatcaccaaatgaacaagtcctgctctgtatgctgtgtgcattttcagggaggatgcaagcagtgcgttgaagcaacagttgcaaatgatgtaagaaataattgaccacaccgcattctgctatgatggcagacttgattctccactacctggcatgcagtgtctmtttgcattttggtgccaggagtgcaacatgggtgcaactcaatattataagcttgcttacagagatggtagttaggga

SEQ ID NO: 11438 - DNA, 562 bp, Chicken  19866894214239_5
aacaagaagttctgtctgttcttttgagtcatctgatttctccaacttaatcacatatgtttatattaattagtagtrgggaagaaatactatgggaaagatacctggacagagtgttactatcagcatatgttaatcaccaaatgaacaagtcctgctctgtatgctgtgtgcattttcagggaggatgcaagcagtgcgttgaagcaacagttgcaaatgatgtaagaaataattgaccacaccgcattctgctatgatggcagacttgattctccactacctggcatgcagtgtctmtttgcattttggtgccaggagtgcaacatgggtgcaactcaatattataagcttgcttacagagatggtagttagggatgagctgtaaaggaacctgttgtacacagaaacatgtacttgtgagttacatctcctgccaagagtgcttgacactgtgggatgagagacctgacactaatacaacacagcatccagcaaaagctaaaatacacgactttctgttgtattcccatgtgttaatgcttctaagaccaaagaactg

SEQ ID NO: 11439 - DNA, 600 bp, Chicken  19866894214243_1
ataaaagcgatgttttctcttgtaagccaaaattgcattcagtctgacttcccagacaccccacctgtgaatgccgctttctcagaagcattgctgatgtagaactcacgtctggaactgcacatgctcatagcctggggacaggttgccaaaagagactgctaagaagtgcttgcaaacttcaaagttcaaaagtggattttggtactgttttctttgtaaccctttcctcctttggaatgatatgctttatttgccaagatattttcaagtgcaaaggttttttggatttggataaakactatttcactttactgctggtctttcagatgatcagttatgctgtgggtttccaggatccttggggaatgtttcatctttctaatatgtagcatcagcttcctctggcaccacggctaccagattcaccccgcatttccgtttagagttacaggagataatgacctctcttttcctagtaactactttctgttcttttaatatggactactgagacttctactactcatgagggtttaagtgagaacattcatgaccttctgagaacagctatgctttttccaactatttagaaccatt

SEQ ID NO: 11440 - DNA, 600 bp, Chicken  19866894214245_1
atcaacatgaaaacctcccctgtgctgccctacccacccaccagctcggcctcccacccatgacagccccttcactttcccaaacaggcaacagatttcaatttagctttgagtgagggaagctcaattgggttattaaatttcacacactaattgacacgcctgccgtaaaatataacttgcacaaacacaatttatactaatgacacaggcgggggggatgcttgctgcttccaatgcctctccagttcctctctccgacagctcccatgggaacagggcttaattgcccctccagcrcagggcagtgagcagggcgggaggttaaagagagctgaatatggccccactgatgggatgcttcctgctcctgcacagaggggtgggcagcaatggggcacgtgggttttggtgcccagctcccccaggcacgctgcaatgccgtgtcataaatccttaatggcaatggattaacctcgggccgggtccccgggcacgagttaagcgctgatgttttgcagccaggctccttgcagagctgctggagagctttgtttcctggtggccgacaggacagcagtttccaataggtgtttgcat

SEQ ID NO: 11441 - DNA, 600 bp, Chicken  19866894214245_2
gtgagcagggcgggaggttaaagagagctgaatatggccccactgatgggatgcttcctgctcctgcacagaggggtgggcagcaatggggcacgtgggttttggtgcccagctcccccaggcacgctgcaatgccgtgtcataaatccttaatggcaatggattaacctcgggccgggtccccgggcacgagttaagcgctgatgttttgcagccaggctccttgcagagctgctggagagctttgtttcctggtggccgacaggacagcagtttccaataggtgtttgcatggtttcytcatccacccatttttagaggaaaatactgccttgaccagatgctcactgcaggttccctcctggccacactgctgcagagctcagggcacaaggctcagggcacattttacctccaatttgcccttgtgacaactcattgaataggaagttattacagcaaagccacattccagtatgcaatagtactgcagagctgatgtcagactggtgatgggagaatcatggctgggcagtggtaatgtttgcatgtagggagaacggacatcaccattccatgtcttgcatgtccccttttttg

SEQ ID NO: 11442 - DNA, 599 bp, Chicken  19866894214254_1
  misc_feature (1)..(23): n is any nucleotide
nnnnnnnnnnnnnnnnnnnnnnnagcctggtcccacctcttggcctccacacttcagatgctgataagcattgatcagatccccccactcagccttctcttttccaggctgaacagctcagggctctcagcctttccccatcaggcgatgctccaggccccctccatctctgcagccctctgctgggctctccacagcagttccctgtctgcctggaactggggagcccagcactgggcccagtgctccagatgtggctttaccagggcagagcagagggcaggacggcatccctcaccytactgccacrctctgtgcaatgaatcccagggtcccactggccttttgggccatcagggcacactgctggctcatggtcaactgctggtcaaccagaacacgcaggtccttcaccacagagctcctttctagcagctcagcccctaacctgtactgatatctcgttattcctccccagccataggactccacacttgcccttgctgaacctcatcaggttcctctctccccagccgtcatcctggccaggttttgctgaatagcagcacaggcacactgctgtgctttctgccacttac

SEQ ID NO: 11443 - DNA, 599 bp, Chicken  19866894214254_2
  misc_feature (1)..(13): n is any nucleotide
nnnnnnnnnnnnnagcctggtcccacctcttggcctccacacttcagatgctgataagcattgatcagatccccccactcagccttctcttttccaggctgaacagctcagggctctcagcctttccccatcaggcgatgctccaggccccctccatctctgcagccctctgctgggctctccacagcagttccctgtctgcctggaactggggagcccagcactgggcccagtgctccagatgtggctttaccagggcagagcagagggcaggacggcatccctcaccytactgccacrctctgtgcaatgaatcccagggtcccactggccttttgggccatcagggcacactgctggctcatggtcaactgctggtcaaccagaacacgcaggtccttcaccacagagctcctttctagcagctcagcccctaacctgtactgatatctcgttattcctccccagccataggactccacacttgcccttgctgaacctcatcaggttcctctctccccagccgtcatcctggccaggttttgctgaatagcagcacaggcacactgctgtgctttctgccacttacacgtgtgtgg

SEQ ID NO: 11444 - DNA, 600 bp, Chicken  19866894214257_1
taagtctgcctaagaaggaggaaggggaagaaggaggaatctcataccagcttcagccccgaggcctggaggcagggccactccgaaacctcatgtcagtcagagagaagcaccttccatagtcaagaagagtggctcattctgtagtgagcaggttagtctgcctttgctgagaaattcacacatcagtgtcatccatacactgcaatgaataaatacaacgtgaaaattaacatttaatctcatccaagtagtgttaaaacaaccaacccatcatgacaacaaaccaacctaatatcrggcacagctatgctgtactaattgggatccagtacatttcagcactttactcacaagaaatatttctgttactatatactctcattacaaggtgttaaaatcggtggacaaatatactgttcctttttaatgtattacatgactgtgctacagtgagtgcttcttgtctcaataaaaagtgaaccaatttctcacaagcattggtgccattgatttgcacagaggtttccattcactgccactgacatgctgacaggatggagagcttcgatgcatgttgtggaactctgttataaacaa

SEQ ID NO: 11445 - DNA, 600 bp, Chicken  19866894214263_1
agttcttgtgcctcgtaatctctggttttgagatgggaaccaactggggagcttctgtaaagagctcgctgaagtaccccagtgagctacagcggcttgtaagggaaaatctaggttatgcttagggataggtgagaagagacaaaaaatgaaagtaattgccatctcagcaaggtttctttactaggatagagaggaaaaatagcaataattttgttttgaagagggatgaatagtagaagtgcaggagtaattacgcggaggaatagaacagtttgcacactgtgtaccagctttcayaaggtgaaggagatgcactgctgaaatgggtagatggcagatggagaagtggggaagaaaaggacaacgtgaggaagctgtgctgcatcgctgtgtgctgtgagctgggctctgtcactgctgggagagcacaccgggccaggtgtcaccgtcacctgcactgctgaggatgctctcccagtgcttggcagtcagcactgtgtgattcctggtatcttttcctttttcatagagtcatagaatcacagaatggcctgggttgcaaaggcccacaatgcycatccagttccamccccctgc

SEQ ID NO: 11446 - DNA, 600 bp, Chicken  19866894214263_2
acactgtgtaccagctttcayaaggtgaaggagatgcactgctgaaatgggtagatggcagatggagaagtggggaagaaaaggacaacgtgaggaagctgtgctgcatcgctgtgtgctgtgagctgggctctgtcactgctgggagagcacaccgggccaggtgtcaccgtcacctgcactgctgaggatgctctcccagtgcttggcagtcagcactgtgtgattcctggtatcttttcctttttcatagagtcatagaatcacagaatggcctgggttgcaaaggcccacaatgcycatccagttccamccccctgctatgtgcagggtcgccaaccagcagcccaggctgcccagagccacatccagcctggccttgaatgcctgcagggatggggcatccacagcctccttgggcaacctgttcagtgcgtcaccaccctctgsrkgaaaarcttcctcctcatatccaacctaaacctcccctgtctcagtttaaaaccattcccccttgtcctatctcstttttggagattgttaccttttttcctccttttgggccgtgctgctggatgtctcactaggctcacatacaca

SEQ ID NO: 11447 - DNA, 600 bp, Chicken  19866894214263_3
gctttcayaaggtgaaggagatgcactgctgaaatgggtagatggcagatggagaagtggggaagaaaaggacaacgtgaggaagctgtgctgcatcgctgtgtgctgtgagctgggctctgtcactgctgggagagcacaccgggccaggtgtcaccgtcacctgcactgctgaggatgctctcccagtgcttggcagtcagcactgtgtgattcctggtatcttttcctttttcatagagtcatagaatcacagaatggcctgggttgcaaaggcccacaatgcycatccagttccamccccctgctatgtgcagggtcgccaaccagcagcccaggctgcccagagccacatccagcctggccttgaatgcctgcagggatggggcatccacagcctccttgggcaacctgttcagtgcgtcaccaccctctgsrkgaaaarcttcctcctcatatccaacctaaacctcccctgtctcagtttaaaaccattcccccttgtcctatctcstttttggagattgttaccttttttcctccttttgggccgtgctgctggatgtctcactaggctcacatacacatgactcatcgctg

SEQ ID NO: 11448 - DNA, 600 bp, Chicken  19866894214263_4
cacaccgggccaggtgtcaccgtcacctgcactgctgaggatgctctcccagtgcttggcagtcagcactgtgtgattcctggtatcttttcctttttcatagagtcatagaatcacagaatggcctgggttgcaaaggcccacaatgcycatccagttccamccccctgctatgtgcagggtcgccaaccagcagcccaggctgcccagagccacatccagcctggccttgaatgcctgcagggatggggcatccacagcctccttgggcaacctgttcagtgcgtcaccaccctctgsrkgaaaarcttcctcctcatatccaacctaaacctcccctgtctcagtttaaaaccattcccccttgtcctatctcstttttggagattgttaccttttttcctccttttgggccgtgctgctggatgtctcactaggctcacatacacatgactcatcgctgctctcagcacttccttccagctcttggaaaaccacttagtaacttttcactttcctgatgacgtggtttttccattgcagcctacttagaacttcgctccggcgtctgtacgctgttttctgagattccacatatat

SEQ ID NO: 11449 - DNA, 600 bp, Chicken  19866894214263_5
acaccgggccaggtgtcaccgtcacctgcactgctgaggatgctctcccagtgcttggcagtcagcactgtgtgattcctggtatcttttcctttttcatagagtcatagaatcacagaatggcctgggttgcaaaggcccacaatgcycatccagttccamccccctgctatgtgcagggtcgccaaccagcagcccaggctgcccagagccacatccagcctggccttgaatgcctgcagggatggggcatccacagcctccttgggcaacctgttcagtgcgtcaccaccctctgsrkgaaaarcttcctcctcatatccaacctaaacctcccctgtctcagtttaaaaccattcccccttgtcctatctcstttttggagattgttaccttttttcctccttttgggccgtgctgctggatgtctcactaggctcacatacacatgactcatcgctgctctcagcacttccttccagctcttggaaaaccacttagtaacttttcactttcctgatgacgtggtttttccattgcagcctacttagaacttcgctccggcgtctgtacgctgttttctgagattccacatatata

SEQ ID NO: 11450 - DNA, 600 bp, Chicken  19866894214263_6
caccgggccaggtgtcaccgtcacctgcactgctgaggatgctctcccagtgcttggcagtcagcactgtgtgattcctggtatcttttcctttttcatagagtcatagaatcacagaatggcctgggttgcaaaggcccacaatgcycatccagttccamccccctgctatgtgcagggtcgccaaccagcagcccaggctgcccagagccacatccagcctggccttgaatgcctgcagggatggggcatccacagcctccttgggcaacctgttcagtgcgtcaccaccctctgsrkgaaaarcttcctcctcatatccaacctaaacctcccctgtctcagtttaaaaccattcccccttgtcctatctcstttttggagattgttaccttttttcctccttttgggccgtgctgctggatgtctcactaggctcacatacacatgactcatcgctgctctcagcacttccttccagctcttggaaaaccacttagtaacttttcactttcctgatgacgtggtttttccattgcagcctacttagaacttcgctccggcgtctgtacgctgttttctgagattccacatatatat

SEQ ID NO: 11451 - DNA, 600 bp, Chicken  19866894214263_7
gccaggtgtcaccgtcacctgcactgctgaggatgctctcccagtgcttggcagtcagcactgtgtgattcctggtatcttttcctttttcatagagtcatagaatcacagaatggcctgggttgcaaaggcccacaatgcycatccagttccamccccctgctatgtgcagggtcgccaaccagcagcccaggctgcccagagccacatccagcctggccttgaatgcctgcagggatggggcatccacagcctccttgggcaacctgttcagtgcgtcaccaccctctgsrkgaaaarcttcctcctcatatccaacctaaacctcccctgtctcagtttaaaaccattcccccttgtcctatctcstttttggagattgttaccttttttcctccttttgggccgtgctgctggatgtctcactaggctcacatacacatgactcatcgctgctctcagcacttccttccagctcttggaaaaccacttagtaacttttcactttcctgatgacgtggtttttccattgcagcctacttagaacttcgctccggcgtctgtacgctgttttctgagattccacatatatatgatatt

SEQ ID NO: 11452 - DNA, 600 bp, Chicken  19866894214263_8
tcctggtatcttttcctttttcatagagtcatagaatcacagaatggcctgggttgcaaaggcccacaatgcycatccagttccamccccctgctatgtgcagggtcgccaaccagcagcccaggctgcccagagccacatccagcctggccttgaatgcctgcagggatggggcatccacagcctccttgggcaacctgttcagtgcgtcaccaccctctgsrkgaaaarcttcctcctcatatccaacctaaacctcccctgtctcagtttaaaaccattcccccttgtcctatctcstttttggagattgttaccttttttcctccttttgggccgtgctgctggatgtctcactaggctcacatacacatgactcatcgctgctctcagcacttccttccagctcttggaaaaccacttagtaacttttcactttcctgatgacgtggtttttccattgcagcctacttagaacttcgctccggcgtctgtacgctgttttctgagattccacatatatatgatattcaaatgcatgaataaaagttcttctaaacacgcacaaaaatggtaacttcacattcttccctaaaaata

SEQ ID NO: 11453 - DNA, 600 bp, Chicken  19866894214267_1
cagaggcagaggggatcaccgaaatcctggcagtgctgggagggaggctgcagggaatctcactgcagagcagtgagggctaaggcacttcaggcagtcacagatgacatgtgagtgttttctctctgtcatttgctaactgctttacctccaatgtgcttccattcctttttgtctgcagtctctgttcccgcagaagccttctatcagaatcatggcaggctgtacagcatgatgaaggggaagatgggtccctccaatctgcacatgttcacgggcacactgtgtaaggagctgcaygagcacatggcacacctgggcaccgmgggcacgggagacctcatggagctggtgaggtgaggatcctcactgcgtgtctgcagtgcatggagcagaggcggtaccagcaagcacgtggagctcaggctctcagcccttagtggtaccaacacagcccatggcctaatgcagtcagcggtgctgagggtgcacgtcccatccccgctgcagccctgggaagcatggcacgccgtggccacagctgatcaaacccaggtctgattggcctgagatgtaaagaagtgctcacggatgataaac

SEQ ID NO: 11454 - DNA, 600 bp, Chicken  19866894214267_2
ctggcagtgctgggagggaggctgcagggaatctcactgcagagcagtgagggctaaggcacttcaggcagtcacagatgacatgtgagtgttttctctctgtcatttgctaactgctttacctccaatgtgcttccattcctttttgtctgcagtctctgttcccgcagaagccttctatcagaatcatggcaggctgtacagcatgatgaaggggaagatgggtccctccaatctgcacatgttcacgggcacactgtgtaaggagctgcaygagcacatggcacacctgggcaccgmgggcacgggagacctcatggagctggtgaggtgaggatcctcactgcgtgtctgcagtgcatggagcagaggcggtaccagcaagcacgtggagctcaggctctcagcccttagtggtaccaacacagcccatggcctaatgcagtcagcggtgctgagggtgcacgtcccatccccgctgcagccctgggaagcatggcacgccgtggccacagctgatcaaacccaggtctgattggcctgagatgtaaagaagtgctcacggatgataaactgcagtatctgtaagaggcacccgtg

SEQ ID NO: 11455 - DNA, 600 bp, Chicken  19866894214267_3
aaggattttctggagcacagcagtccaggtgaaacggtctgggaaaggagcgagaagcctgcaggatgatggaggagctcaaagggcgggggtgagacaaaaggaaggcaaaaaagcattgtgcagtccagcagagctgcggccagaggagggattgctgtggggtctggttgcagaaggggctgtgcactgcccaggaggccggcatggccaacctggaagcaggtgggtgggtaatgggaacagagggacctcggtggcaccgctcatgggaccaaatgcccactgatgaaatctggstgtactcaggggcagagcctgaggtctgtgtatctcccacctctgctgagatctgtgagaagggtctggctgaggtgcaggacttcttcttgtgctagcacttctgtgctgtgtggtgcaggaggcccacctgcagctccgcgccgcgtcctgagctccacgtgctccagcagctctcctgccggtcactcacagccatcttgtccttgcaggcacatcatgtatccagcagtggtgaacactttgtttgggaaaggcgcctgcccgaccagccacagagaactcagggagtttgaagaa

SEQ ID NO: 11456 - DNA, 600 bp, Chicken  19866894214272_1
tagccagattgtttttcttctcctatctaccagcttcctgatgctacgataactgaggcagagacagaacagaagggcaaggggatgacaaaacctacatccatcccttgatgcgaaagggaacagtttaacaccatgatatttcatgtaagaaaaacaagcccactctcttagtagcggtaaccatagcagaggaacagaaacaagaagaagtgaagcccacaccacctaatcagctgttactgattggaactatctaacccaatggaacctggacaaaattcacataaccacaatackgtaaacactgccaaaccgctactgaatgcgtagaggttcaagtgatcatcttaagcacagtgccttaggactctggtagcaggtaattaatacactggtctcacgtaagaacatacagtgacacttcatctgctctaaaaagaggggacagcactggctatgaggatggactgctcctggccataggtgagaggtaatggagtctcactactgcattacatgcagtaggttgggcttcggaactaagcgctacattcattgcattctgtttacatagcgaaaggctcattaaagtaagtt

SEQ ID NO: 11457 - DNA, 600 bp, Chicken  19866894214282_1
ttcagttactttcatttcacttcattcattttgaagttaactggttatgctgggcttatgttaagtgtagaaagtgtaaattaaaagataggaagcttggagcataagcactgctgtaatgacttcattcaaagcagtgttctcaaaggaagcactgacctacttgctttaaactgggccctctttgaccatgcttaattaaagttcactttttcttttcctatttaaggaacccgctacgtgaaaaactgttgtgaatcaagatggtcaccacctagaagtctgcagcgacaacagackagtaagtagatgctcagtttcctctccttgataaatattaatgttcttggaatcagagctgttcaatggatgcacatgcatggactgattctgacagggtgccaagcagcagtcactagattttcgtcccagtgcctgaacaaaaaggggaaaaagaatcatttgaatggattaactgacaatatagtgtggagagagctaaattgcaagttctttaacactcccccattcattttaaaacaagtgttgcttttagttatttcagctgaaatctactgaaacaaatggctctggtacaga

SEQ ID NO: 11458 - DNA, 592 bp, Chicken  19866894214287_1
tatccttgctcctgagaaatttagtgtttgctgaacattatttgccctggggcactagctagtctctcattattatatagatgggtacaagtgaaggttcatacctcttcccaaaaagagctgcggctttactttcattacttcatgccaatcgacagataaggcaagtttgccactttcatgcttatccatgatggatttctaccatcgtaaaatgccccgtcaatctgacacaattaaatgttatttgtagcctgtgctctatcgaactccacatgcacaaagtcgaggcaggacaaygtatttaaccaaaagcattagagcaaaaccaaaagcactctcagtaaaacagagacatcaatggagtgagccttttcccttttgtccatcacgaattcagccgtcctctctgaggaacaaagaagtaagcaaaaatagggaactgtctgaatggaagattattttaatttatatggagagttgcaaagcaaaaaaaaaactctgaaaatccagcaaaccaacaccaaagagcacttcaacatcacattattgccaatttattaaaccaagactgcgtacaatggagaaatga

SEQ ID NO: 11459 - DNA, 600 bp, Chicken  19866894214291_1
tataaaacatacttaaacctctaaaatccattcctgtgctttgccgcatctttcgagctctctgccataaaccaaggagtacctggaatggctactgtataatccagttaaacacttgaaaaacaaagcacctcataaagcataggtatttcaagtagcttaaaggtaatacaaaatgtgaaagctgatgcattctacaaagttatttagtgaaggccattatagaagttcatcaagatttcacgtgaacaaatgaagatacttatcacagagtattaatgatcccaaagggcacagaaycacatagattgcatgtaggcagggacaaggtgcagtgacattgtgttcttttcatagaagcaatgagctaagtactgtttatttacttactgtgttatattcatttgtgatcatgttgtatacacacacatttatgtagttgtatatgcatacctataaaactttgatagtacacagatctatatataaacttttwaattgtatatataattccatataaggatatcacttttatttgttatatttgtttcatgtagcgacaggataagctgtattggttttaaactaaaagagagtaag

SEQ ID NO: 11460 - DNA, 600 bp, Chicken  19866894214291_2
acaaagttatttagtgaaggccattatagaagttcatcaagatttcacgtgaacaaatgaagatacttatcacagagtattaatgatcccaaagggcacagaaycacatagattgcatgtaggcagggacaaggtgcagtgacattgtgttcttttcatagaagcaatgagctaagtactgtttatttacttactgtgttatattcatttgtgatcatgttgtatacacacacatttatgtagttgtatatgcatacctataaaactttgatagtacacagatctatatataaacttttwaattgtatatataattccatataaggatatcacttttatttgttatatttgtttcatgtagcgacaggataagctgtattggttttaaactaaaagagagtaagtttakattagccattaggaagaaactctactcagaggctgccccatccctggcagggcccaagactgggcyggatgggctgtgggcagcctgctctggtgggaggcgtccctgcccatggcacggcttgcaactgggtaggctttgaggtcccttccaacccaagccattctgtgacttgtatcaagtccaaaggt

SEQ ID NO: 11461 - DNA, 600 bp, Chicken  19866894214291_3
agattgcatgtaggcagggacaaggtgcagtgacattgtgttcttttcatagaagcaatgagctaagtactgtttatttacttactgtgttatattcatttgtgatcatgttgtatacacacacatttatgtagttgtatatgcatacctataaaactttgatagtacacagatctatatataaacttttwaattgtatatataattccatataaggatatcacttttatttgttatatttgtttcatgtagcgacaggataagctgtattggttttaaactaaaagagagtaagtttakattagccattaggaagaaactctactcagaggctgccccatccctggcagggcccaagactgggcyggatgggctgtgggcagcctgctctggtgggaggcgtccctgcccatggcacggcttgcaactgggtaggctttgaggtcccttccaacccaagccattctgtgacttgtatcaagtccaaaggtactttgatattgttactattcagtctttgtgcattttacaagtttgttcctaatttttctaatcggacactttaacatgcttaaggaatcagggagattctaataagaa

SEQ ID NO: 11462 - DNA, 600 bp, Chicken  19866894214291_4
gtactgtttatttacttactgtgttatattcatttgtgatcatgttgtatacacacacatttatgtagttgtatatgcatacctataaaactttgatagtacacagatctatatataaacttttwaattgtatatataattccatataaggatatcacttttatttgttatatttgtttcatgtagcgacaggataagctgtattggttttaaactaaaagagagtaagtttakattagccattaggaagaaactctactcagaggctgccccatccctggcagggcccaagactgggcyggatgggctgtgggcagcctgctctggtgggaggcgtccctgcccatggcacggcttgcaactgggtaggctttgaggtcccttccaacccaagccattctgtgacttgtatcaagtccaaaggtactttgatattgttactattcagtctttgtgcattttacaagtttgttcctaatttttctaatcggacactttaacatgcttaaggaatcagggagattctaataagaaaactggaagccactattcctagcgtttcttctcagccacaagaaaaaaaaaaaactttcacttccc

SEQ ID NO: 11463 - DNA, 599 bp, Chicken  19866894214296_1
  misc_feature (1)..(167): n is any nucleotide
nnnnnnnnnnnnnnnnnnnnnnnnnnnnnnnnnnnnnnnnnnnnnnnnnnnnnnnnnnnnnnnnnnnnnnnnnnnnnnnnnnnnnnnnnnnnnnnnnnnnnnnnnnnnnnnnnnnnnnnnnnnnnnnnnnnnnnnnnnnnnnnnnnnnnnnnnnnnnnnnnnnnnnnttgctgtaatatttttattcatggattgagaactatctgactggcagagctcagagggttgtcagcagcacaaagtctgcttggaggcctataactagcagtgttccccaggagttggtgctgggtctgaackcatgcaacatctttgtcagtgacctggataaagggatagagtccaccctcagcaagtttgttgatgattcaaggctgggagaagtggctgtcgcaccagaaggctgtgctgccattcagtgagactggggcaggatggagaattgggtggagaggaacttgatttggtttaacatgtrcaagactagagtcctacargtttggggttgacctgctgcagrggagctcagcagagaagggcatacatgtcttaatggacagcatgttggccatgagccagcagtgtgcctttgtggccaa

SEQ ID NO: 11464 - DNA, 600 bp, Chicken  19866894214296_2
tttttattcatggattgagaactatctgactggcagagctcagagggttgtcagcagcacaaagtctgcttggaggcctataactagcagtgttccccaggagttggtgctgggtctgaackcatgcaacatctttgtcagtgacctggataaagggatagagtccaccctcagcaagtttgttgatgattcaaggctgggagaagtggctgtcgcaccagaaggctgtgctgccattcagtgagactggggcaggatggagaattgggtggagaggaacttgatttggtttaacatgtrcaagactagagtcctacargtttggggttgacctgctgcagrggagctcagcagagaagggcatacatgtcttaatggacagcatgttggccatgagccagcagtgtgcctttgtggccaagaaggccagtggtatcctggagtgcattaaaaagagtcaaggtcaagggaggtgatcctccccctctactctgccctgctgaggccacatctggaatcctcagttcaaaaaagatggggatcatctagagagagctcagtagatcagtagatgcccacaaagatgataaatggcctgga

SEQ ID NO: 11465 - DNA, 600 bp, Chicken  19866894214296_3
aactatctgactggcagagctcagagggttgtcagcagcacaaagtctgcttggaggcctataactagcagtgttccccaggagttggtgctgggtctgaackcatgcaacatctttgtcagtgacctggataaagggatagagtccaccctcagcaagtttgttgatgattcaaggctgggagaagtggctgtcgcaccagaaggctgtgctgccattcagtgagactggggcaggatggagaattgggtggagaggaacttgatttggtttaacatgtrcaagactagagtcctacargtttggggttgacctgctgcagrggagctcagcagagaagggcatacatgtcttaatggacagcatgttggccatgagccagcagtgtgcctttgtggccaagaaggccagtggtatcctggagtgcattaaaaagagtcaaggtcaagggaggtgatcctccccctctactctgccctgctgaggccacatctggaatcctcagttcaaaaaagatggggatcatctagagagagctcagtagatcagtagatgcccacaaagatgataaatggcctggagcatttcccttacaaggaa

SEQ ID NO: 11466 - DNA, 600 bp, Chicken  19866894214296_4
gagggttgtcagcagcacaaagtctgcttggaggcctataactagcagtgttccccaggagttggtgctgggtctgaackcatgcaacatctttgtcagtgacctggataaagggatagagtccaccctcagcaagtttgttgatgattcaaggctgggagaagtggctgtcgcaccagaaggctgtgctgccattcagtgagactggggcaggatggagaattgggtggagaggaacttgatttggtttaacatgtrcaagactagagtcctacargtttggggttgacctgctgcagrggagctcagcagagaagggcatacatgtcttaatggacagcatgttggccatgagccagcagtgtgcctttgtggccaagaaggccagtggtatcctggagtgcattaaaaagagtcaaggtcaagggaggtgatcctccccctctactctgccctgctgaggccacatctggaatcctcagttcaaaaaagatggggatcatctagagagagctcagtagatcagtagatgcccacaaagatgataaatggcctggagcatttcccttacaaggaaaggctgggagacctgagtctgtt

SEQ ID NO: 11467 - DNA, 599 bp, Chicken  19866894214301_1
  misc_feature (1)..(58): n is any nucleotide
nnnnnnnnnnnnnnnnnnnnnnnnnnnnnnnnnnnnnnnnnnnnnnnnnnnnnnnnnncccacaggctttgcaggcaccttttacactgcattattagatgtgcaggtacaatggggagtaaaagaggctttgtcctcccttggccacaccagagctttgcatcagcgatggcaaaagcactccagtaaatcattcctcctccatccacctcccccaccccctcaggccagcaatgagattgcttttccaccaaattgtataatattttcctgctaagggatgtcaaatcctctctctarcactcaggtttccagacaawagaaaaaggtggttacccattggccacagcgcggtgctgccctgccaggaacagggctgattctgctggtggttgtggctgattattttactttattttattttattatattttattgttaaggctttgtcttaatgtcagtgggaacggtgccttcagacacagttaggcgttgtagtttttactctgtgaactgttacgtatccccatctggttaagggcagcaagcgtcggcacagcaataaggacaaatattttgctgaggccccaggagtgaat

SEQ ID NO: 11468 - DNA, 599 bp, Chicken  19866894214301_2
  misc_feature (1)..(38): n is any nucleotide
nnnnnnnnnnnnnnnnnnnnnnnnnnnnnnnnnnnnnncccacaggctttgcaggcaccttttacactgcattattagatgtgcaggtacaatggggagtaaaagaggctttgtcctcccttggccacaccagagctttgcatcagcgatggcaaaagcactccagtaaatcattcctcctccatccacctcccccaccccctcaggccagcaatgagattgcttttccaccaaattgtataatattttcctgctaagggatgtcaaatcctctctctarcactcaggtttccagacaawagaaaaaggtggttacccattggccacagcgcggtgctgccctgccaggaacagggctgattctgctggtggttgtggctgattattttactttattttattttattatattttattgttaaggctttgtcttaatgtcagtgggaacggtgccttcagacacagttaggcgttgtagtttttactctgtgaactgttacgtatccccatctggttaagggcagcaagcgtcggcacagcaataaggacaaatattttgctgaggccccaggagtgaattctcttttcaaattaaaagt

SEQ ID NO: 11469 - DNA, 482 bp, Chicken  19866894214301_3
aatgtcagtgggaacggtgccttcagacacagttaggcgttgtagtttttactctgtgaactgttacgtatccccatctggttaagggcagcaagcgtcggcacagcaataaggacaaatattttgctgaggccccaggagtgaattctcttttcaaattaaaagtgcaaatctggtgctgagaatactgagtcagcactgatggtttagatctaggaattgcatctaatatgctttcccagatatcttccaacatacacaaatatgaaatgcctttttcgagtggagctcaatagttawagcagtgctttgcttgccatataaagtaactgtgagaataagagctgggaagtctcttaccagacctaacacccatctgctttgctgtatttgtttatgtgtccacacaaaggatacgatcagactttctttcttttgctgaacatctattggtttccacagcaactgcgtcatgaaggaag

SEQ ID NO: 11470 - DNA, 600 bp, Chicken  19866894214302_1
tgtaatgcactagttctagacatggaaactaaaggagtgaaagattcaaacagcttcttcatcctgtttctgagtggtcctaggagctgcttgatcccaccacagaccaagattctgttctccagaatgagttatcttttcatcttgagagagttatgttggacttctacagcaaggtgctgtactttctatggtgtcacatatacagacaaaagatggtgaaaaaaattctctcactcacaaaatcttaagtgcaagaaactttaggaaatttcagaaggacttgtactctcctcttcytagtcattggcaaggcaataaaataatacaactactacctcaaagactaagagagaacatgtctgaagtcaagccattgatgtgtctsagtgctaaggggcaggaagagagaagatcactggttcctgaacctgctgcttttcttcctttccactaaaaaaaaawaarwtcttgcagtggacagaatttcctgttaaaattcctgttccctgttaaaattaggctgaagaaacactggcatcacctaccagtgcagtacattgacttaagcttcatagcttgaaatgagytgtcttgtaa

SEQ ID NO: 11471 - DNA, 600 bp, Chicken  19866894214302_2
gcttgatcccaccacagaccaagattctgttctccagaatgagttatcttttcatcttgagagagttatgttggacttctacagcaaggtgctgtactttctatggtgtcacatatacagacaaaagatggtgaaaaaaattctctcactcacaaaatcttaagtgcaagaaactttaggaaatttcagaaggacttgtactctcctcttcytagtcattggcaaggcaataaaataatacaactactacctcaaagactaagagagaacatgtctgaagtcaagccattgatgtgtctsagtgctaaggggcaggaagagagaagatcactggttcctgaacctgctgcttttcttcctttccactaaaaaaaaawaarwtcttgcagtggacagaatttcctgttaaaattcctgttccctgttaaaattaggctgaagaaacactggcatcacctaccagtgcagtacattgacttaagcttcatagcttgaaatgagytgtcttgtaactgggactatccttgtactgtctgaaagggactacctatgctgggaatggttcctctgtagtctgtgttactctaaatgtttgcagct

SEQ ID NO: 11472 - DNA, 600 bp, Chicken  19866894214302_3
tgttggacttctacagcaaggtgctgtactttctatggtgtcacatatacagacaaaagatggtgaaaaaaattctctcactcacaaaatcttaagtgcaagaaactttaggaaatttcagaaggacttgtactctcctcttcytagtcattggcaaggcaataaaataatacaactactacctcaaagactaagagagaacatgtctgaagtcaagccattgatgtgtctsagtgctaaggggcaggaagagagaagatcactggttcctgaacctgctgcttttcttcctttccactsaaaaaaaawaarwtcttgcagtggacagaatttcctgttaaaattcctgttccctgttaaaattaggctgaagaaacactggcatcacctaccagtgcagtacattgacttaagcttcatagcttgaaatgagytgtcttgtaactgggactatccttgtactgtctgaaagggactacctatgctgggaatggttcctctgtagtctgtgttactctaaatgtttgcagcttgactgtcttgcctttcttcacaaggctacagtcctatatgtcttctgagaatgcataaaaacatcac

SEQ ID NO: 11473 - DNA, 600 bp, Chicken  19866894214302_4
tctacagcaaggtgctgtactttctatggtgtcacatatacagacaaaagatggtgaaaaaaattctctcactcacaaaatcttaagtgcaagaaactttaggaaatttcagaaggacttgtactctcctcttcytagtcattggcaaggcaataaaataatacaactactacctcaaagactaagagagaacatgtctgaagtcaagccattgatgtgtctsagtgctaaggggcaggaagagagaagatcactggttcctgaacctgctgcttttcttcctttccactaaaaaaaaawaarwtcttgcagtggacagaatttcctgttaaaattcctgttccctgttaaaattaggctgaagaaacactggcatcacctaccagtgcagtacattgacttaagcttcatagcttgaaatgagytgtcttgtaactgggactatccttgtactgtctgaaagggactacctatgctgggaatggttcctctgtagtctgtgttactctaaatgtttgcagcttgactgtcttgcctttcttcacaaggctacagtcctatatgtcttctgagaatgcataaaaacatcactcccataag

SEQ ID NO: 11474 - DNA, 600 bp, Chicken  19866894214302_5
acagcaaggtgctgtactttctatggtgtcacatatacagacaaaagatggtgaaaaaaattctctcactcacaaaatcttaagtgcaagaaactttaggaaatttcagaaggacttgtactctcctcttcytagtcattggcaaggcaataaaataatacaactactacctcaaagactaagagagaacatgtctgaagtcaagccattgatgtgtctsagtgctaaggggcaggaagagagaagatcactggttcctgaacctgctgcttttcttcctttccactaaaaaaaaawaarwtcttgcagtggacagaatttcctgttaaaattcctgttccctgttaaaattaggctgaagaaacactggcatcacctaccagtgcagtacattgacttaagcttcatagcttgaaatgagytgtcttgtaactgggactatccttgtactgtctgaaagggactacctatgctgggaatggttcctctgtagtctgtgttactctaaatgtttgcagcttgactgtcttgcctttcttcacaaggctacagtcctatatgtcttctgagaatgcataaaaacatcactcccataagttt

SEQ ID NO: 11475 - DNA, 600 bp, Chicken  19866894214302_6
cagcaaggtgctgtactttctatggtgtcacatatacagacaaaagatggtgaaaaaaattctctcactcacaaaatcttaagtgcaagaaactttaggaaatttcagaaggacttgtactctcctcttcytagtcattggcaaggcaataaaataatacaactactacctcaaagactaagagagaacatgtctgaagtcaagccattgatgtgtctsagtgctaaggggcaggaagagagaagatcactggttcctgaacctgctgcttttcttcctttccactaaaaaaaaawaarwtcttgcagtggacagaatttcctgttaaaattcctgttccctgttaaaattaggctgaagaaacactggcatcacctaccagtgcagtacattgacttaagcttcatagcttgaaatgagytgtcttgtaactgggactatccttgtactgtctgaaagggactacctatgctgggaatggttcctctgtagtctgtgttactctaaatgtttgcagcttgactgtcttgcctttcttcacaaggctacagtcctatatgtcttctgagaatgcataaaaacatcactcccataagttta

SEQ ID NO: 11476 - DNA, 496 bp, Chicken  19866894214302_7
ctcctcttcytagtcattggcaaggcaataaaataatacaactactacctcaaagactaagagagaacatgtctgaagtcaagccattgatgtgtctsagtgctaaggggcaggaagagagaagatcactggttcctgaacctgctgcttttcttcctttccactaaaaaaaaawaarwtcttgcagtggacagaatttcctgttaaaattcctgttccctgttaaaattaggctgaagaaacactggcatcacctaccagtgcagtacattgacttaagcttcatagcttgaaatgagytgtcttgtaactgggactatccttgtactgtctgaaagggactacctatgctgggaatggttcctctgtagtctgtgttactctaaatgtttgcagcttgactgtcttgcctttcttcacaaggctacagtcctatatgtcttctgagaatgcataaaaacatcactcccataagtttaaagcatcagccttttgg

SEQ ID NO: 11477 - DNA, 600 bp, Chicken  19866894214321_1
agcccatgggctgcatgcagcctggcatagattgcagtgtggcccaccccatcatggcgaccagtctgcattgccaagtggcccagcccagcctcaggcacacactcattgctaagcaacaaccaaacattgatgagctattaccacagtttcagctgaaatcaaagcaggaggagggtgccatggagtgctgactcaagttatgtcaaacaattttatgcatttggatacgttggctaaatgcagtcctgtgaacagtgaaaactatgcatctgtgctgtttagattaagaaaattgaraaaagttacaaaattgctgaaaaaaatcaatttatactgtgacttcattttcagtgaaaataaatacattagctgcaaacgttcaaatgaattgcatggagctgcaattggatattcaactaaaactttggtcatttctctttaccaggctgttataagatctcccttagcagagaaagatagtctcacttcatgattggccttgttccagtcatcacttttcagcagtactcacatttgtgaacaaatattgtcaaggataaagtacaggaagagtaaaatttcgtcaaaaatctctga

SEQ ID NO: 11478 - DNA, 600 bp, Chicken  19866894214321_2
ggccttgttccagtcatcacttttcagcagtactcacatttgtgaacaaatattgtcaaggataaagtacaggaagagtaaaatttcgtcaaaaatctctgacgaacatcttgagagctcactgagaatggcaacaactgagccagactgttgtgttagtctcagaaaaacaggttcaagtatctcactagttttatgtttttgttgctctcttacatatatatataaacagttaaaataagctttgttacttacatatgttaactatattatatattttacatgggctgctctgaaagyagtgcctcctatttcattatcttgccccacagtgtcagaggcagctgctggtggtatggcagtagaggttaaaccttcccacttatactctattatatattttttttccccatgtaacagatggcagcagagtggcagtcttacaaaaatggcatgtgacatggaaggtcatgaaacaaaggtgtggaatttaattccttcatgcagaaaaattttcacctactgacattcatcgatkcttgatgaacatttacgaagaccagacagtggaagtgagcacagggaggcaataggtggtgt

SEQ ID NO: 11479 - DNA, 600 bp, Chicken  19866894214321_3
taagctttgttacttacatatgttaactatattatatattttacatgggctgctctgaaagyagtgcctcctatttcattatcttgccccacagtgtcagaggcagctgctggtggtatggcagtagaggttaaaccttcccacttatactctattatatattttttttccccatgtaacagatggcagcagagtggcagtcttacaaaaatggcatgtgacatggaaggtcatgaaacaaaggtgtggaatttaattccttcatgcagaaaaattttcacctactgacattcatcgatkcttgatgaacatttacgaagaccagacagtggaagtgagcacagggaggcaataggtggtgtgtttcagcagtggtaacagcgacagtgcatcatcacctctggtgcacattttgacaagtatggcatgcagaatcttgtttgtggctggcaaaaatgcatagctaatggtggtgactgttgaaaaatagtgttttgtagctgagaaattgctctatcaaatagcattattgtactcattctatttgttgcagtttccatggaaataaagaggaggcattactttcaccgcagcctacaa

SEQ ID NO: 11480 - DNA, 600 bp, Chicken  19866894214322_1
gctcagacttgtaagggcatgggaggacatgaacagacacagaaaaggattatttgaagtgtgaaagtctggccacaaagggataaaaccagactagaggagaaagaccagaccttgcaaggaaagagaaaaagctagatgaaagggaaaaacgctctcagactttctccatttctgtatactggtgaatgaaaccttttttggaaagtgctgtttctgctccattgcaaacttgcagtctcaggctactgaaggggaattcttaactgtgtcctgttcaggtgggctcactgcattcaygtggctagaaacagctgcaagggagaaggaagggttggcgtgcaagtgatcaaggcccaacggtttcagccacaaaggtctactcaaattctgcagcttatacctgaggaagcgccctcaggaaaggacagtattgctgaaacattggccaaaagccatgtaagatgtaagaaaatgtaagatgacaaccttgcagccccatggatcataaacgctgaacagctccagtaatctgaaaaaaaaagaaggcatgccaatctttgtatggagatcacctcaagaactctggtgatccaaacc

SEQ ID NO: 11481 - DNA, 600 bp, Chicken  19866894214324_1
gagtggtcctaggccaaaagaggtggacattcactctcattgctcttctttatcacatgtaacatcgtcaactgttcatgtgtggcctcatttaaagcactggagttaatcatagaccacatttatacattggtatatgtgcccagatgagagagaaatccaaacgtttgcaagagagtcttcatttttaatagcctcccatgtcacacagtatttataatttttaattatgtactttaaaagaaaatttttgttttctgtgtattataccaacataattaaagaaacaagtaacttttratacaatgatggttactgacgtattacctgacttgttttcccttcttttctttcacagcaactacagcgcactcctaggggtgtggatctatggtttttttgtggtgatcttgctggtactggaccttttatattactcttcaatgaactatgatatttgcaaattttacctagcacggtggggaatccagggaaagtggatgacacaaggacagagcccgatggattagttctgctcaggacccaagccaagtacagactcagcctcagccagagacacagcctcaaactcagcctcag

SEQ ID NO: 11482 - DNA, 600 bp, Chicken  19866894214324_2
atatgacagaaggaaaagatgctagccaaagcaacttggcgaagcttaagaaatgggcctacgtgaaacaaatggggttcagcaagtccaaggagctacacttgggtaggggcagtcccagacatcagtagagactgggtgaaaaacggatttagtcctgcagagaaggacttgaggctcttatggacagaaagctggacatgagcccacagtgtgcacttgcagcctggaaaggcaactgtaagtttggcttcatcaagagaagcgtggccaacagggcaagagaggtgactgtccccytctgttctgcctttgtgaggccccatctggagtactgcattcaggcctggggcacccagcacaagatatggagctgtacgagtgggtccagaggaggtcatgaagtttctcagagagatggagcacctcttttatgaagagaggctgaaggaacttggtgtgttcagcttggagaagagaaggctctggggaggacctccttgaagccctccagtaccttaagggtacctataggaaagatgcattcattttcagagaaatatagtgacaggacaagtattcactttaagctaaagagag

SEQ ID NO: 11483 - DNA, 600 bp, Chicken  19866894214333_1
tgcgatttgcccggaacaacaaagttgtctctctgtctttccttttggagccgttcctcctttcaatacatatttcagccttctcggtgccagggaagggatcacttcccaatagctaaaactcctgcctggcatggaggcggacagctctcagtgctctgctctgctaaatatttaatgcatttcataggaagggacacagtgccaagagaagagcactgtgccagagccgccggtggcctgcgcccacggagctcagctgggcagggtgtgaacagagccataacagcacctcaccaycggccacccatgggctgtgctactgttattctctgtctcacactgacacctcaagtgatgcacctgatcctgccctgacaccccaagtgatgcacctggtccctccccggcagccccacgcggggtgtttctggcagctgtcgcatagwgcatcaccttggaagagggatgctggagcctcagctgttcccagcccaccagggcagatttygtgttgtggtgaggagtagcagtcctggttrtttctttcttgtagcaacaagatgaggaggcagccttcagtggaaaggacaacgtggg

SEQ ID NO: 11484 - DNA, 600 bp, Chicken  19866894214333_2
ctcagtgctctgctctgctaaatatttaatgcatttcataggaagggacacagtgccaagagaagagcactgtgccagagccgccggtggcctgcgcccacggagctcagctgggcagggtgtgaacagagccataacagcacctcaccaycggccacccatgggctgtgctactgttattctctgtctcacactgacacctcaagtgatgcacctgatcctgccctgacaccccaagtgatgcacctggtccctccccggcagccccacgcggggtgtttctggcagctgtcgcatagwgcatcaccttggaagagggatgctggagcctcagctgttcccagcccaccagggcagatttygtgttgtggtgaggagtagcagtcctggttrtttctttcttgtagcaacaagatgaggaggcagccttcagtggaaaggacaacgtggggcacatccaaacagccccaagtttccatttgaagccaatatactgaacaatagccacaggccaagcagaaagctgctgctgctattactcagatgcctgcaggcgtgtatgactgaggatggctgcctcctcctcccattccagcacct

SEQ ID NO: 11485 - DNA, 600 bp, Chicken  19866894214333_3
aagagcactgtgccagagccgccggtggcctgcgcccacggagctcagctgggcagggtgtgaacagagccataacagcacctcaccaycggccacccatgggctgtgctactgttattctctgtctcacactgacacctcaagtgatgcacctgatcctgccctgacaccccaagtgatgcacctggtccctccccggcagccccacgcggggtgtttctggcagctgtcgcatagwgcatcaccttggaagagggatgctggagcctcagctgttcccagcccaccagggcagatttygtgttgtggtgaggagtagcagtcctggttrtttctttcttgtagcaacaagatgaggaggcagccttcagtggaaaggacaacgtggggcacatccaaacagccccaagtttccatttgaagccaatatactgaacaatagccacaggccaagcagaaagctgctgctgctattactcagatgcctgcaggcgtgtatgactgaggatggctgcctcctcctcccattccagcacctcctgcccagatacctctgctcacgcctgaaccagggctgtgtccccagagcagcctgaggac

SEQ ID NO: 11486 - DNA, 600 bp, Chicken  19866894214333_4
gcgcccacggagctcagctgggcagggtgtgaacagagccataacagcacctcaccaycggccacccatgggctgtgctactgttattctctgtctcacactgacacctcaagtgatgcacctgatcctgccctgacaccccaagtgatgcacctggtccctccccggcagccccacgcggggtgtttctggcagctgtcgcatagwgcatcaccttggaagagggatgctggagcctcagctgttcccagcccaccagggcagatttygtgttgtggtgaggagtagcagtcctggttrtttctttcttgtagcaacaagatgaggaggcagccttcagtggaaaggacaacgtggggcacatccaaacagccccaagtttccatttgaagccaatatactgaacaatagccacaggccaagcagaaagctgctgctgctattactcagatgcctgcaggcgtgtatgactgaggatggctgcctcctcctcccattccagcacctcctgcccagatacctctgctcacgcctgaaccagggctgtgtccccagagcagcctgaggacagggcacctctcaggttgtggtacttcagct

SEQ ID NO: 11487 - DNA, 599 bp, Chicken  19866894214336_1
  misc_feature (1)..(2): n is any nucleotide
nncacataccaaatagttttacagttatgggaacacattatctcagttgcgtcaacctgttttactgttgtgactgtgatggaaaagtttccttctttatctcctgcttggtacattgttattatatcactattattattgctgctacaaatagagttaacatagtagcagcaaggatttttaatcatggaaatatatgtttcctcctgtccaaaggaataaggaaagaggcaagagataaaacaaggcaaagatgaacaagattatggtgaagtgggatattatgcagttattgttttwgattcataaaaatatacrcatgaacttaaggatttgccttagatggaaaaatatttcaaaatcatacaatgtcaatggccactgattccatatatggaaaagaaaaaaaatcctggtttacttgaagagtggttgcataacattttactgggtccagttttgaggatgatactggatttttattacaattcatgtacatttcctttgtggtgcattttatatacaacatttatgaaacaaatgcatttcaaatgaacagttcctcaaattttctatatgcaatactgaaaatacaaccc

SEQ ID NO: 11488 - DNA, 600 bp, Chicken  19866894214336_2
ttacagttatgggaacacattatctcagttgcgtcaacctgttttactgttgtgactgtgatggaaaagtttccttctttatctcctgcttggtacattgttattatatcactattattattgctgctacaaatagagttaacatagtagcagcaaggatttttaatcatggaaatatatgtttcctcctgtccaaaggaataaggaaagaggcaagagataaaacaaggcaaagatgaacaagattatggtgaagtgggatattatgcagttattgttttwgattcataaaaatatacrcatgaacttaaggatttgccttagatggaaaaatatttcaaaatcatacaatgtcaatggccactgattccatatatggaaaagaaaaaaaatcctggtttacttgaagagtggttgcataacattttactgggtccagttttgaggatgatactggatttttattacaattcatgtacatttcctttgtggtgcattttatatacaacatttatgaaacaaatgcatttcaaatgaacagttcctcaaattttctatatgcaatactgaaaatacaacccatttaaaatactgataaaa

SEQ ID NO: 11489 - DNA, 600 bp, Chicken  19866894214339_1
actacccacattgtgcttctggtgttagagacatcagaaatgcctgaacttgccctactttaactttctatcattgtcctttgggcattagtgagaagaatctactgattttgtagagatacgtgtattgatcctgttgtgatactgactcactagtaaaatcctgcctacctgcataacccgtgctttctgatgctggttattggacttccttctagaccttgttctttccacttcatgtctatgaacccatcctcgaagttcatgattcagcctaaaaacgaagcaaacaaaaaaaarcccaayacaaaccaasagcatgaacagatgtttcaaacaacmgtgacagcacttcttaattatagagaacacttcaaagatgcagcagtttagtattcttctaccttrcwatctcttatttttaacatcaaaataagcaaatttaactgcaagactcaatttttgaggtttttcataaataatagaatacagtggctcagatggagtgagccaagaaagactgtggagcccaattgcctaagtatccataaagcattggaattatggatgttttaacacagcagacgtggtattttcttt

SEQ ID NO: 11490 - DNA, 600 bp, Chicken  19866894214339_2
cacattgtgcttctggtgttagagacatcagaaatgcctgaacttgccctactttaactttctatcattgtcctttgggcattagtgagaagaatctactgattttgtagagatacgtgtattgatcctgttgtgatactgactcactagtaaaatcctgcctacctgcataacccgtgctttctgatgctggttattggacttccttctagaccttgttctttccacttcatgtctatgaacccatcctcgaagttcatgattcagcctaaaaacgaagcaaacaaaaaaaagcccaayacaaaccaasagcatgaacagatgtttcaaacaacmgtgacagcacttcttaattatagagaacacttcaaagatgcagcagtttagtattcttctaccttrcwatctcttatttttaacatcaaaataagcaaatttaactgcaagactcaatttttgaggtttttcataaataatagaatacagtggctcagatggagtgagccaagaaagactgtggagcccaattgcctaagtatccataaagcattggaattatggatgttttaacacagcagacgtggtattttctttygccca

SEQ ID NO: 11491 - DNA, 600 bp, Chicken  19866894214339_3
ttctggtgttagagacatcagaaatgcctgaacttgccctactttaactttctatcattgtcctttgggcattagtgagaagaatctactgattttgtagagatacgtgtattgatcctgttgtgatactgactcactagtaaaatcctgcctacctgcataacccgtgctttctgatgctggttattggacttccttctagaccttgttctttccacttcatgtctatgaacccatcctcgaagttcatgattcagcctaaaaacgaagcaaacaaaaaaaagcccaayacaaaccaasagcatgaacagatgtttcaaacaacmgtgacagcacttcttaattatagagaacacttcaaagatgcagcagtttagtattcttctaccttrcwatctcttatttttaacatcaaaataagcaaatttaactgcaagactcaatttttgaggtttttcataaataatagaatacagtggctcagatggagtgagccaagaaagactgtggagcccaattgcctaagtatccataaagcattggaattatggatgttttaacacagcagacgtggtattttctttygcccaatgaacagta

SEQ ID NO: 11492 - DNA, 600 bp, Chicken  19866894214339_4
cctgaacttgccctactttaactttctatcattgtcctttgggcattagtgagaagaatctactgattttgtagagatacgtgtattgatcctgttgtgatactgactcactagtaaaatcctgcctacctgcataacccgtgctttctgatgctggttattggacttccttctagaccttgttctttccacttcatgtctatgaacccatcctcgaagttcatgattcagcctaaaaacgaagcaaacaaaaaaaagcccaayacaaaccaasagcatgaacagatgtttcaaacaacmgtgacagcacttcttaattatagagaacacttcaaagatgcagcagtttagtattcttctaccttrcwatctcttatttttaacatcaaaataagcaaatttaactgcaagactcaatttttgaggtttttcataaataatagaatacagtggctcagatggagtgagccaagaaagactgtggagcccaattgcctaagtatccataaagcattggaattatggatgttttaacacagcagacgtggtattttctttygcccaatgaacagtaattctgaaattactggaaaaactact

SEQ ID NO: 11493 - DNA, 600 bp, Chicken  19866894214339_5
ttttgtagagatacgtgtattgatcctgttgtgatactgactcactagtaaaatcctgcctacctgcataacccgtgctttctgatgctggttattggacttccttctagaccttgttctttccacttcatgtctatgaacccatcctcgaagttcatgattcagcctaaaaacgaagcaaacaaaaaaaagcccaayacaaaccaasagcatgaacagatgtttcaaacaacmgtgacagcacttcttaattatagagaacacttcaaagatgcagcagtttagtattcttctaccttrcwatctcttatttttaacatcaaaataagcaaatttaactgcaagactcaatttttgaggtttttcataaataatagaatacagtggctcagatggagtgagccaagaaagactgtggagcccaattgcctaagtatccataaagcattggaattatggatgttttaacacagcagacgtggtattttctttygcccaatgaacagtaattctgaaattactggaaaaactactgaaatttaaaatcaaaagactattagaccaagattagatattggttaaggaaactaaatatcacaa

SEQ ID NO: 11494 - DNA, 600 bp, Chicken  19866894214339_6
ttgtagagatacgtgtattgatcctgttgtgatactgactcactagtaaaatcctgcctacctgcataacccgtgctttctgatgctggttattggacttccttctagaccttgttctttccacttcatgtctatgaacccatcctcgaagttcatgattcagcctaaaaacgaagcaaacaaaaaaaagcccaayacaaaccaasagcatgaacagatgtttcaaacaacmgtgacagcacttcttaattatagagaacacttcaaagatgcagcagtttagtattcttctaccttrcwatctcttatttttaacatcaaaataagcaaatttaactgcaagactcaatttttgaggtttttcataaataatagaatacagtggctcagatggagtgagccaagaaagactgtggagcccaattgcctaagtatccataaagcattggaattatggatgttttaacacagcagacgtggtattttctttygcccaatgaacagtaattctgaaattactggaaaaactactgaaatttaaaatcaaaagactattagaccaagattagatattggttaaggaaactaaatatcacaaat

SEQ ID NO: 11495 - DNA, 600 bp, Chicken  19866894214339_7
ccaayacaaaccaasagcatgaacagatgtttcaaacaacmgtgacagcacttcttaattatagagaacacttcaaagatgcagcagtttagtattcttctaccttrcwatctcttatttttaacatcaaaataagcaaatttaactgcaagactcaatttttgaggtttttcataaataatagaatacagtggctcagatggagtgagccaagaaagactgtggagcccaattgcctaagtatccataaagcattggaattatggatgttttaacacagcagacgtggtattttctttygcccaatgaacagtaattctgaaattactggaaaaactactgaaatttaaaatcaaaagactattagaccaagattagatattggttaaggaaactaaatatcacaaatttaagaaagtatggacaaagcacaaaggaattaaatttagataaattaaaattttctctttggaaaaaaatggagctaagtagctcctagcaatgaataaagcagatctgcaacgataagctaagtttgcttgtatcagatgctgaagggtaggagaccatcttttacatgtatctgacagatgtgctttt

SEQ ID NO: 11496 - DNA, 556 bp, Chicken  19866894214339_8
aatcaaaagactattagaccaagattagatattggttaaggaaactaaatatcacaaatttaagaaagtatggacaaagcacaaaggaattaaatttagataaattaaaattttctctttggaaaaaaatggagctaagtagctcctagcaatgaataaagcagatctgcaacgataagctaagtttgcttgtatcagatgctgaagggtaggagaccatcttttacatgtatctgacagatgtgctttttagttggccgtgatttccatattgtaaacactttcatataagaagagatktctcttctcattaaaaacttccaggcaaaccagcaaattgttgttcagtgtttgctaagtgaccattgtgaatactgagtgaaaatcactgctaaaagcatcagaagattgaaaagatgggagtggacctcctgtctccatggtagtagacactggacagtgcagacacctgcagaggcattgctcacagactggatgaataccgtaaatgaataacagcatcccccaaagccatttgtccactcacccaacacag

SEQ ID NO: 11497 - DNA, 600 bp, Chicken  19866894214344_1
cttatccagtggagtatgaaaggatttctgtgatgttggctaacctgtactttagggagcacttgggagggaatgaaaccaaaggaggaggattacagctttgttttccttgtcaggactgacagaacttgttcctcttgtgcttgcctggttcgcaaaacctctaaatctagcaggagtgcttttatgctgtattttcatcatcagcaacaacaacaacaatctccagcttcccctgatcttacagggggtcgaaacctctctgcttttccaggctttaacctctaatgctggagaccscttcccatggcaggtaactgccacatgcagtgtgagcacctgggctttgggggcaccccctgctcccagaggccttaaggatgtaagatcyccaaggtctttcagtcagagctctttgttttgtgcaggttcaccgtgtgttacaggctgtgactttcagcgtggctgtgccctggattgcccagtgctggggggaggttttctacatgagttgctctgtataaataaacccatgacaacagtgatgaaaaatgctggcttttgctatgaaagtgcatcatctcattcttattcttaaag

SEQ ID NO: 11498 - DNA, 600 bp, Chicken  19866894214344_2
attacagctttgttttccttgtcaggactgacagaacttgttcctcttgtgcttgcctggttcgcaaaacctctaaatctagcaggagtgcttttatgctgtattttcatcatcagcaacaacaacaacaatctccagcttcccctgatcttacagggggtcgaaacctctctgcttttccaggctttaacctctaatgctggagaccscttcccatggcaggtaactgccacatgcagtgtgagcacctgggctttgggggcaccccctgctcccagaggccttaaggatgtaagatcyccaaggtctttcagtcagagctctttgttttgtgcaggttcaccgtgtgttacaggctgtgactttcagcgtggctgtgccctggattgcccagtgctggggggaggttttctacatgagttgctctgtataaataaacccatgacaacagtgatgaaaaatgctggcttttgctatgaaagtgcatcatctcattcttattcttaaagaattcctccaccaaatcatcacaaatcatcgctccttcctcagtgctgtgtgagctgccagcaatacttacttttgtagagagacaaagag

SEQ ID NO: 11499 - DNA, 506 bp, Chicken  19866894214348_1
gcaacaggaacaccgcaaataaaatttaaaaaagcactgtaccttgcatgctgagttgaatggctctacgaagatcagcttcttcatcttccatatcaatttcctgcctacttagagccagagctctttgaaaattctcctcatcttcatctaacatgcctgtcccatcaaaaggatggctaacttctattgcttggtccacatcacttctgggtagcctgtgaagttgatacatttataacattcaaaccacaatcatgcttacttctaccgtgagatttaaagtaagtagtttgtgcygatttatctctacttatttttttgaactttggcaaaaagtgacaattatgataatcagaaatatttgcttatttctatgcaaaaaaaaaagcatgaacgaactgcaagtatagctttcagctacaagaatgaaaataccaaaaccatgaacatatgcttataaattgatgagaatctactttacaggagaaacttcaaaagcagaa

SEQ ID NO: 11500 - DNA, 600 bp, Chicken  19866894214350_1
caatgatggcccaagtagcaacagacagattgcagtgagacaaattccagttagatacaaagaaaggtgaggagtgaatttcagcgtgagggtagtcaaacactggatcagaggccagctaaggagatggtagctctgtcttcaaagtacttggttcaggtgggacctgccctgctcaaccttatgtagctggccctgcattgagcagaagactggaccagacactagcagaagtcaactagcataaagcatcctgtgatcctgaagcactcctccatggagaaataaaacaagctgcawgtttgttcttcactggactgaagaactttggtttcatgatattcagggatgttaatactgtccgtcccacatgctatcccacacataactgtggtgggtcacccttgcagtctttcctcctttcaacagtttggttgacccatgagttaggtttttcaagctgttgtatccaaagtgattgttaccacttgacatcyctgcatccacaatctctgtcaagtactaattctgcatgttttcataaatgatctgtaaacaggaatcctattttctgaatgaaaatcagctactagaatacta

SEQ ID NO: 11501 - DNA, 600 bp, Chicken  19866894214350_2
gcattgagcagaagactggaccagacactagcagaagtcaactagcataaagcatcctgtgatcctgaagcactcctccatggagaaataaaacaagctgcawgtttgttcttcactggactgaagaactttggtttcatgatattcagggatgttaatactgtccgtcccacatgctatcccacacataactgtggtgggtcacccttgcagtctttcctcctttcaacagtttggttgacccatgagttaggtttttcaagctgttgtatccaaagtgattgttaccacttgacatcyctgcatccacaatctctgtcaagtactaattctgcatgttttcataaatgatctgtaaacaggaatcctattttctgaatgaaaatcagctactagaatactagcacagttaggcttttaattcgcacatacatttaatagtattaaaattagctcttagtcttcccatttatcaatttataaatagaaattggtagaaacaatgcaaacaagaacgggtgtttcattctaacttcagatttgaggctttatttagaaaatacacagagggattaattttctagcccagaattaaaaatt

SEQ ID NO: 11502 - DNA, 600 bp, Chicken  19866894214354_1
gcagcactgatgaaggaggattattttctcagtttctataggggttcttgcttctgcatcacagtacaatcccacgtactgcttttactggatcatgacatggactcttgtccatgttacaaattgcaagagtccccggcatgcttttccacagggctgctatgcatgaggacttgagggatgctgccacaaaactgtaggtccaatggaggctttggacattgtaggttggctgtgtatggtgggtcagcctttagttgctgttgtatggacagggacagggtctactatgacagtagmccagttgaggtgggagagattgtgttttggatgtgggagggaggaattagtcaactggactgacataagtggagatcagtacagygtgtacccttactgtcaggaattcttccctttcgtcatcttgtggattgctggaggctgcagcatctgttgagctgcactcaaaaggagtggactcctctttctaaagcattcacaccatcccaaatgttttgagtccttaatagccagtagtttttgagtcgtagaagccactaatcggctttggggctttttttaactgggtcacgtgrctga

SEQ ID NO: 11503 - DNA, 600 bp, Chicken  19866894214354_2
tactggatcatgacatggactcttgtccatgttacaaattgcaagagtccccggcatgcttttccacagggctgctatgcatgaggacttgagggatgctgccacaaaactgtaggtccaatggaggctttggacattgtaggttggctgtgtatggtgggtcagcctttagttgctgttgtatggacagggacagggtctactatgacagtagmccagttgaggtgggagagattgtgttttggatgtgggagggaggaattagtcaactggactgacataagtggagatcagtacagygtgtacccttactgtcaggaattcttccctttcgtcatcttgtggattgctggaggctgcagcatctgttgagctgcactcaaaaggagtggactcctctttctaaagcattcacaccatcccaaatgttttgagtccttaatagccagtagtttttgagtcgtagaagccactaatcggctttggggctttttttaactgggtcacgtgrctgagttaccaagattaaagcagcacgaggaaggaaaagaggcttaaacaactcagggtgcctggcaggtcattttaaccttttcataa

SEQ ID NO: 11504 - DNA, 600 bp, Chicken  19866894214354_3
tagmccagttgaggtgggagagattgtgttttggatgtgggagggaggaattagtcaactggactgacataagtggagatcagtacagygtgtacccttactgtcaggaattcttccctttcgtcatcttgtggattgctggaggctgcagcatctgttgagctgcactcaaaaggagtggactcctctttctaaagcattcacaccatcccaaatgttttgagtccttaatagccagtagtttttgagtcgtagaagccactaatcggctttggggctttttttaactgggtcacgtgrctgagttaccaagattaaagcagcacgaggaaggaaaagaggcttaaacaactcagggtgcctggcaggtcattttaaccttttcataatcattaaagctgcagaatcccattagctgtgagggacttgcagcccraatgagtgctgttgacacaactttatgttcacctctctcttgccccaaggaagagtccagcccaagtagttcatatgatctggtcatgtcaatggaaagatttgtctgttcccttctgtacatcagtgatgtctcttgtaccaatgagaagccatacatgggtc

SEQ ID NO: 11505 - DNA, 600 bp, Chicken  19866894214354_4
tgctggaggctgcagcatctgttgagctgcactcaaaaggagtggactcctctttctaaagcattcacaccatcccaaatgttttgagtccttaatagccagtagtttttgagtcgtagaagccactaatcggctttggggctttttttaactgggtcacgtgrctgagttaccaagattaaagcagcacgaggaaggaaaagaggcttaaacaactcagggtgcctggcaggtcattttaaccttttcataatcattaaagctgcagaatcccattagctgtgagggacttgcagcccraatgagtgctgttgacacaactttatgttcacctctctcttgccccaaggaagagtccagcccaagtagttcatatgatctggtcatgtcaatggaaagatttgtctgttcccttctgtacatcagtgatgtctcttgtaccaatgagaagccatacatgggtctctccaatgtgggggatttagctctcagtatctaaaattagtccctcttggaagatcctgcatgggccatactgtggtagatcagcctttgtccatctgtagcaatagcagagaggtataggataagaaagattat

SEQ ID NO: 11506 - DNA, 600 bp, Chicken  19866894214363_1
atacaaatccattcacttattccagagcatcatatagtgccacttagtaaattattgttcagccttgcattttttgcaagtacagtttctgtttcagtcagtattattagaaataaatattgtcttgcaaagttgattacttctaaccaacttttctgccatttatctgtagctctcacacatttgtaatattctgtaggtgcagtgagctcttagaggctaatttgttgtacccacttgttttccaaaaatcattttgttcaccctagttacaagcaaaaagggtggaatcttagcctyttcctttttgcataccatgtatygtacccttggaaagctttgtaccaaaagctagaagtccttgttgaggacaatataattaaagttgttaattgcctttttcaccttttactgtatgtgtgcctatatctgatgaattcagtccagttattgcagtagccagtggtgttactatacactttccagcagagaaaaaggcaacygagatattgctaacagacctacgcagtcacatcagctggatgttgcatggaggaaaggcctaattcaaggaattgcagcttcagaaaaacactgata

SEQ ID NO: 11507 - DNA, 600 bp, Chicken  19866894214363_2
agagcatcatatagtgccacttagtaaattattgttcagccttgcattttttgcaagtacagtttctgtttcagtcagtattattagaaataaatattgtcttgcaaagttgattacttctaaccaacttttctgccatttatctgtagctctcacacatttgtaatattctgtaggtgcagtgagctcttagaggctaatttgttgtacccacttgttttccaaaaatcattttgttcaccctagttacaagcaaaaagggtggaatcttagcctyttcctttttgcataccatgtatygtacccttggaaagctttgtaccaaaagctagaagtccttgttgaggacaatataattaaagttgttaattgcctttttcaccttttactgtatgtgtgcctatatctgatgaattcagtccagttattgcagtagccagtggtgttactatacactttccagcagagaaaaaggcaacygagatattgctaacagacctacgcagtcacatcagctggatgttgcatggaggaaaggcctaattcaaggaattgcagcttcagaaaaacactgatataaatgaattgatcagccctatt

SEQ ID NO: 11508 - DNA, 550 bp, Chicken  19866894214363_3
agtgagctcttagaggctaatttgttgtacccacttgttttccaaaaatcattttgttcaccctagttacaagcaaaaagggtggaatcttagcctyttcctttttgcataccatgtatygtacccttggaaagctttgtaccaaaagctagaagtccttgttgaggacaatataattaaagttgttaattgcctttttcaccttttactgtatgtgtgcctatatctgatgaattcagtccagttattgcagtagccagtggtgttactatacactttccagcagagaaaaaggcaacygagatattgctaacagacctacgcagtcacatcagctggatgttgcatggaggaaaggcctaattcaaggaattgcagcttcagaaaaacactgatataaatgaattgatcagccctattctaaagtcaactttaatttcctacagataggtctttttatactggcttttcttcccctcataatatagaaattactcaccaaagaggttacattttcaggcagttttatgtataaagaaagctgtcacag

SEQ ID NO: 11509 - DNA, 600 bp, Chicken  19866894214365_1
tgttctgggtaaaatttggaagcattgttctgatgacacctgtaaaacataattataactcccatagctgtttcctctcatatttagagaggaaaattctttccctctaatctcaggtgcatacctgtggaaggcttagattccttcaagcagtatcaaagtaatgataacagtgtgcagctgctgactgtcttttccttgttgttactcacccagctgtttagaggagaagaaaaagagagagaatatctctaatcagccatatggcacaaagttttatttgccatagtaagttaaaaygcatattattggtcagcatcttgaatgcaaatgttgacatagcttttcaggagtaccagctatagtgggaaagaaaatcagagatctttaattcacattatttagtattacgtacaggaatwcttattcctatctcagtggagtttccttgactggagtttgccttcgccagaggaccacatgagcgtggaacgcagatctcagcctctgctttcagtgctaaaaggtaaattaagaactgttgaggtagcagtttagctttctgcagtgtagattcagtttgcttacattgtacattac

SEQ ID NO: 11510 - DNA, 600 bp, Chicken  19866894214365_2
acctgtggaaggcttagattccttcaagcagtatcaaagtaatgataacagtgtgcagctgctgactgtcttttccttgttgttactcacccagctgtttagaggagaagaaaaagagagagaatatctctaatcagccatatggcacaaagttttatttgccatagtaagttaaaaygcatattattggtcagcatcttgaatgcaaatgttgacatagcttttcaggagtaccagctatagtgggaaagaaaatcagagatctttaattcacattatttagtattacgtacaggaatwcttattcctatctcagtggagtttccttgactggagtttgccttcgccagaggaccacatgagcgtggaacgcagatctcagcctctgctttcagtgctaaaaggtaaattaagaactgttgaggtagcagtttagctttctgcagtgtagattcagtttgcttacattgtacattacacaaattagtattctggatctgaccactgggccatgaaatccagtatgtgtctttaggaaatatcgataaatgcttttaatgcatacagacagtagtttttttggttaggagagtttgattt

SEQ ID NO: 11511 - DNA, 600 bp, Chicken  19866894214368_1
cgctcacacaggggcagaacgactgcagatcagcagagatgaagtgttatggactgactgcagccaccattcccctgagcctccttgggggaggagggggaggtgtttttagtttgcttttagctctcactgctctactctgttaatagtagacaataaattatattagtctccatatgctgagtctgttttgtccatgatggtaactttgagtgatctccctgtccttatcttatttttcccccactgttcttttgaggaggggtacagacagagtggagtggtggagctgaacttccsatcagcacagaaccaccacgtagatgtaagtgaatcttattaccmtcaaatayttggtactgcaaytcagtcataaatgcttccactactaagtgtttaagaacaaattcaccccttccagtagggaatgcctrgatacaaacccacgaacacgtaacaagagggtggggaagccttacctgagctcactttcacctccaatccactcaggcatcttgagtttggagtcgaggttatagtaagtgcctcccacctcccggacgcagatccagtgctgccgcttgagggggagcttcaagg

SEQ ID NO: 11512 - DNA, 600 bp, Chicken  19866894214368_2
gttatggactgactgcagccaccattcccctgagcctccttgggggaggagggggaggtgtttttagtttgcttttagctctcactgctctactctgttaatagtagacaataaattatattagtctccatatgctgagtctgttttgtccatgatggtaactttgagtgatctccctgtccttatcttatttttcccccactgttcttttgaggaggggtacagacagagtggagtggtggagctgaacttccsatcagcacagaaccaccacgtagatgtaagtgaatcttattaccmtcaaatayttggtactgcaaytcagtcataaatgcttccactactaagtgtttaagaacaaattcaccccttccagtagggaatgcctrgatacaaacccacgaacacgtaacaagagggtggggaagccttacctgagctcactttcacctccaatccactcaggcatcttgagtttggagtcgaggttatagtaagtgcctcccacctcccggacgcagatccagtgctgccgcttgagggggagcttcaagggaccccagcaaaggctggacggcagattcatgatgaagcccatca

SEQ ID NO: 11513 - DNA, 600 bp, Chicken  19866894214368_3
ctgactgcagccaccattcccctgagcctccttgggggaggagggggaggtgtttttagtttgcttttagctctcactgctctactctgttaatagtagacaataaattatattagtctccatatgctgagtctgttttgtccatgatggtaactttgagtgatctccctgtccttatcttatttttcccccactgttcttttgaggaggggtacagacagagtggagtggtggagctgaacttccsatcagcacagaaccaccacgtagatgtaagtgaatcttattaccmtcaaatayttggtactgcaaytcagtcataaatgcttccactactaagtgtttaagaacaaattcaccccttccagtagggaatgcctrgatacaaacccacgaacacgtaacaagagggtggggaagccttacctgagctcactttcacctccaatccactcaggcatcttgagtttggagtcgaggttatagtaagtgcctcccacctcccggacgcagatccagtgctgccgcttgagggggagcttcaagggaccccagcaaaggctggacggcagattcatgatgaagcccatcacattagac

SEQ ID NO: 11514 - DNA, 600 bp, Chicken  19866894214368_4
ccattcccctgagcctccttgggggaggagggggaggtgtttttagtttgcttttagctctcactgctctactctgttaatagtagacaataaattatattagtctccatatgctgagtctgttttgtccatgatggtaactttgagtgatctccctgtccttatcttatttttcccccactgttcttttgaggaggggtacagacagagtggagtggtggagctgaacttccsatcagcacagaaccaccacgtagatgtaagtgaatcttattaccmtcaaatayttggtactgcaaytcagtcataaatgcttccactactaagtgtttaagaacaaattcaccccttccagtagggaatgcctrgatacaaacccacgaacacgtaacaagagggtggggaagccttacctgagctcactttcacctccaatccactcaggcatcttgagtttggagtcgaggttatagtaagtgcctcccacctcccggacgcagatccagtgctgccgcttgagggggagcttcaagggaccccagcaaaggctggacggcagattcatgatgaagcccatcacattagacagggcaatgacat

SEQ ID NO: 11515 - DNA, 600 bp, Chicken  19866894214368_5
ctactctgttaatagtagacaataaattatattagtctccatatgctgagtctgttttgtccatgatggtaactttgagtgatctccctgtccttatcttatttttcccccactgttcttttgaggaggggtacagacagagtggagtggtggagctgaacttccsatcagcacagaaccaccacgtagatgtaagtgaatcttattaccmtcaaatayttggtactgcaaytcagtcataaatgcttccactactaagtgtttaagaacaaattcaccccttccagtagggaatgcctrgatacaaacccacgaacacgtaacaagagggtggggaagccttacctgagctcactttcacctccaatccactcaggcatcttgagtttggagtcgaggttatagtaagtgcctcccacctcccggacgcagatccagtgctgccgcttgagggggagcttcaagggaccccagcaaaggctggacggcagattcatgatgaagcccatcacattagacagggcaatgacattaacatccctaaaagggtgcagaaaacaaacagcaacaagattacgttctggtacttgaatgtcatct

SEQ ID NO: 11516 - DNA, 600 bp, Chicken  19866894214368_6
tacaaacccacgaacacgtaacaagagggtggggaagccttacctgagctcactttcacctccaatccactcaggcatcttgagtttggagtcgaggttatagtaagtgcctcccacctcccggacgcagatccagtgctgccgcttgagggggagcttcaagggaccccagcaaaggctggacggcagattcatgatgaagcccatcacattagacagggcaatgacattaacatccctaaaagggtgcagaaaacaaacagcaacaagattacgttctggtacttgaatgtcatctgrttcttggtttttgcttttagttttacagttggcagccatctctggaattacacaattcctgaatacctgcgcttgtcccaccaaactgcctcatatcctttggtctgaagcgctgccatgatcacgttcacatcatagttcccatttcccagcatgctcttcttgtgtggcgtcaccatggtgttgggagacagcctggaaatagaacaagagctgctctagcaggtgcttggcaaacccatattccaaaattgctgtataacttgaagcctgttttcaggggatttggttaattaaaag

SEQ ID NO: 11517 - DNA, 600 bp, Chicken  19866894214369_1
gttttgtcctgggagcttgtgctcagcttggtagcaccttctgagacaaatcaagaggaagaaaaatctgtgatcaccggaaaggaagagtttaggaccaattgaattaaaacaagggagaagcagctagtgggaaactgaattgcttctgtgctgtggggtcttcagtcttcattgactccaagaaagagctgctgtctataacaatccttggctaatttctccagtcccacagctcagcaccatttcattctggaataaccccaaggaatgattatatggccacagctgcacctggarctrgaagagggctgaaggctggggacggatgtttcatagattgaggactgtatttggaaagcacgtgtggaagcacagtgctgtttgatgatggcctttgcctgcaaccacatccatcccagtctcagaactgtctgtgctccgtggactcagtgttcctgcagcacgtaggtgttcacaacgggatgaagatcaggcttggttgctgggctgctgctttggttcccattcacagcagattcttctgtactcatcatttgggcgttattaactggaggattgatttaatgacacctctaa

SEQ ID NO: 11518 - DNA, 600 bp, Chicken  19866894214369_2
ttgtcctgggagcttgtgctcagcttggtagcaccttctgagacaaatcaagaggaagaaaaatctgtgatcaccggaaaggaagagtttaggaccaattgaattaaaacaagggagaagcagctagtgggaaactgaattgcttctgtgctgtggggtcttcagtcttcattgactccaagaaagagctgctgtctataacaatccttggctaatttctccagtcccacagctcagcaccatttcattctggaataaccccaaggaatgattatatggccacagctgcacctggarctrgaagagggctgaaggctggggacggatgtttcatagattgaggactgtatttggaaagcacgtgtggaagcacagtgctgtttgatgatggcctttgcctgcaaccacatccatcccagtctcagaactgtctgtgctccgtggactcagtgttcctgcagcacgtaggtgttcacaacgggatgaagatcaggcttggttgctgggctgctgctttggttcccattcacagcagattcttctgtactcatcatttgggcgttattaactggaggattgatttaatgacacctctaaccc

SEQ ID NO: 11519 - DNA, 535 bp, Chicken  19866894214370_1
aggaatactactactttactctctgaagccttctttaacactccacagctcatttttcatcttggattttccctgtgagagatttttctatttttaagaagcagataaaaacatttttattgtgcacgtattgatagatttacatctccatgctcctgggggctggcatgtaaaagaactgctgctgataatcaactcccttgctctgaactagaattttcattattggaatgggaatgtaagggaataagatatagatactttctacagatttctctccagcagtcccaacataaaaawawatatatatatataaataaaaatcaactgtatcttataaagaacatgaatgtgctcttttttttataatgtttaatacggaaatttgaaagcttggcttcaggtaggtgttagaaatcttatagcgcttttcaaaacaagtaaaagacaacctcagttatccaactaatgctcctgctgtccaaatatcttccagcagccactgcaatgggaaggctggagcttgaatacaagg

SEQ ID NO: 11520 - DNA, 533 bp, Chicken  19866894214370_2
gaatactactactttactctctgaagccttctttaacactccacagctcatttttcatcttggattttccctgtgagagatttttctatttttaagaagcagataaaaacatttttattgtgcacgtattgatagatttacatctccatgctcctgggggctggcatgtaaaagaactgctgctgataatcaactcccttgctctgaactagaattttcattattggaatgggaatgtaagggaataagatatagatactttctacagatttctctccagcagtcccaacataaaaawawatatatatatataaataaaaatcaactgtatcttataaagaacatgaatgtgctcttttttttataatgtttaatacggaaatttgaaagcttggcttcaggtaggtgttagaaatcttatagcgcttttcaaaacaagtaaaagacaacctcagttatccaactaatgctcctgctgtccaaatatcttccagcagccactgcaatgggaaggctggagcttgaatacaagg

SEQ ID NO: 11521 - DNA, 584 bp, Chicken  19866894214374_1
cactgctgtgtcaatccagtagcaaccccttaaacaagtggcagcctgttcagaccagaagttccgtaagtcttaccacaaacacacaaagcagagtgaagtgagcgaggctgactggtgtagctggaagccccttctgtacgcatccatcttgagctgcttcttcagccacccccactcatgtaaaacattgcaggctgcctgggctgctctgggggctttcctttgtgtcagaagctttgaagcacagctctgctggagccttctgccgctgctgaaggtgccactgcctcctgcagygtgctggctctgctggaggctgccgtcctgcagtgcgactgatcacaggctgcgtgccctgcttcagcctcagtgggtcagagcctggtttgaaatagcagtaaagctgtgctgaagccaagacaacggaatatgaactagaatggctgagacaaaattagacatcttttgtcaggtctcacaaggcactgttgtcagtatggggggaaaacaggtggctgaggatgggcttttctgccttttccccccaccccatttgttcataggggacttctaaggcaatc

SEQ ID NO: 11522 - DNA, 599 bp, Chicken  19866894214381_1
  misc_feature (1)..(71): n is any nucleotide
nnnnnnnnnnnnnnnnnnnnnnnnnnnnnnnnnnnnnnnnnnnnnnnnnnnnnnnnnnnnnnnnnnnnnnnattgcaatccctcatatggaagtatcaccatttattaccactcattcaattttaatttcacagagcatctttaaaaggtcattttaaaaatggagcattgtatccaatattactgactagttaaccaccttcaaagcaaaaaatctataaagatttgcattcaaaattattataacatataattgacttagcttaaaaaaaaagtagtttattattttcccgtttaacygacagagccatttcttttttctgttagtaaataccttgatctttaaaaccacactgtgttacagagatggtgtttgacaatgtattcactacttcacgctgcatttaccatactatcagctgtcatgtaccttaatgctttagtctctattttcttaagtactacatttatcattagaacacagagtatagaagtgatgaaatacgtccagaaaaaaaagttaaggtgaatcctagtttagaaaacaaaaacaaaaaaaaaaacatattcgaagttagcattcagagtgcccagtagtc

SEQ ID NO: 11523 - DNA, 600 bp, Chicken  19866894214393_1
cactgcaatttatcatgccagcaatgtaataaaatacagctataaaattttggattaaatgctcaaggtcagcggttgactttcaacttcccaatctcttgcttgctgctgcagctgatgctctattaagcacttacaagctctgggagaaagtttctttggagaaaagactcagttgtggggcatctccagaattaaaccttcagacgtttcattcaatttcaaaacaataaataatagataacaagagcaatgaatgctgcctggctttgggataaggtttttgcttcagaaacaccmtgktttttgttgtgtttgcaagaagtggctctctaygcctacctttgtaaaacaggcaggcrattccctaagatctatagaaaytcrgagatgtacgaacagcaccctggagatttggggagtaccacagcaggcatagcaagacaaagatgaggactgcgctgtgctccataaacactaacagctggtggtaatgtaaggcatcacttctgcccacagttctcacctccataaagccttagagaagcccagtgctactacaagaaccttgctgctatttcgtacataggttgctctgaa

SEQ ID NO: 11524 - DNA, 600 bp, Chicken  19866894214393_10
attcctatggaaactacagcagatacagagagcacaataatactatttgatagagaagagcacggggctgcctgctttgctgcactctgatccattttactgcctgtttgtgagcgacggaattgttttctgcagcctcactctgattacaaaatgcaaacacgctctgtgtacagcaaggagtgtcccccaaaaacrrgtccctgcatcaaagagcrtggcaaggaagtgagggactgcttcctgaggatgtctgcaaacaacagctgctacctgcagggcattgggcactcctcaggwgcactgccccaggctggtggcacagcacagaggactgggcaagctgctctctttgtctgctacatttcaagcagagcagaggcaccaagactttgctctgggttgtaacagggaggatcacaataaattctgaatcgagcattgcttccacttcactatcaagcatcattactttcattaacaacagcgccacagtgcattatagggaagaaaaaatacacaattttggtaacaaggaatatttccagaattgatttaatagccaagataaattctgatgatgtttcctgcaatcacaga

SEQ ID NO: 11525 - DNA, 600 bp, Chicken  19866894214393_2
tgcaatttatcatgccagcaatgtaataaaatacagctataaaattttggattaaatgctcaaggtcagcggttgactttcaacttcccaatctcttgcttgctgctgcagctgatgctctattaagcacttacaagctctgggagaaagtttctttggagaaaagactcagttgtggggcatctccagaattaaaccttcagacgtttcattcaatttcaaaacaataaataatagataacaagagcaatgaatgctgcctggctttgggataaggtttttgcttcagaaacaccmtgktttttgttgtgtttgcaagaagtggctctctaygcctacctttgtaaaacaggcaggcrattccctaagatctatagaaaytcrgagatgtacgaacagcaccctggagatttggggagtaccacagcaggcatagcaagacaaagatgaggactgcgctgtgctccataaacactaacagctggtggtaatgtaaggcatcacttctgcccacagttctcacctccataaagccttagagaagcccagtgctactacaagaaccttgctgctatttcgtacataggttgctctgaaagt

SEQ ID NO: 11526 - DNA, 600 bp, Chicken  19866894214393_3
cagctataaaattttggattaaatgctcaaggtcagcggttgactttcaacttcccaatctcttgcttgctgctgcagctgatgctctattaagcacttacaagctctgggagaaagtttctttggagaaaagactcagttgtggggcatctccagaattaaaccttcagacgtttcattcaatttcaaaacaataaataatagataacaagagcaatgaatgctgcctggctttgggataaggtttttgcttcagaaacaccmtgktttttgttgtgtttgcaagaagtggctctctaygcctacctttgtaaaacaggcaggcrattccctaagatctatagaaaytcrgagatgtacgaacagcaccctggagatttggggagtaccacagcaggcatagcaagacaaagatgaggactgcgctgtgctccataaacactaacagctggtggtaatgtaaggcatcacttctgcccacagttctcacctccataaagccttagagaagcccagtgctactacaagaaccttgctgctatttcgtacataggttgctctgaaagtaatgccccctgtttattcctatggaaactacag

SEQ ID NO: 11527 - DNA, 600 bp, Chicken  19866894214393_4
tcaaggtcagcggttgactttcaacttcccaatctcttgcttgctgctgcagctgatgctctattaagcacttacaagctctgggagaaagtttctttggagaaaagactcagttgtggggcatctccagaattaaaccttcagacgtttcattcaatttcaaaacaataaataatagataacaagagcaatgaatgctgcctggctttgggataaggtttttgcttcagaaacaccmtgktttttgttgtgtttgcaagaagtggctctctaygcctacctttgtaaaacaggcaggcrattccctaagatctatagaaaytcrgagatgtacgaacagcaccctggagatttggggagtaccacagcaggcatagcaagacaaagatgaggactgcgctgtgctccataaacactaacagctggtggtaatgtaaggcatcacttctgcccacagttctcacctccataaagccttagagaagcccagtgctactacaagaaccttgctgctatttcgtacataggttgctctgaaagtaatgccccctgtttattcctatggaaactacagcagatacagagagcacaataatacta

SEQ ID NO: 11528 - DNA, 600 bp, Chicken  19866894214393_5
aacttcccaatctcttgcttgctgctgcagctgatgctctattaagcacttacaagctctgggagaaagtttctttggagaaaagactcagttgtggggcatctccagaattaaaccttcagacgtttcattcaatttcaaaacaataaataatagataacaagagcaatgaatgctgcctggctttgggataaggtttttgcttcagaaacaccmtgktttttgttgtgtttgcaagaagtggctctctaygcctacctttgtaaaacaggcaggcrattccctaagatctatagaaaytcrgagatgtacgaacagcaccctggagatttggggagtaccacagcaggcatagcaagacaaagatgaggactgcgctgtgctccataaacactaacagctggtggtaatgtaaggcatcacttctgcccacagttctcacctccataaagccttagagaagcccagtgctactacaagaaccttgctgctatttcgtacataggttgctctgaaagtaatgccccctgtttattcctatggaaactacagcagatacagagagcacaataatactatttgatagagaagagcacgggg

SEQ ID NO: 11529 - DNA, 600 bp, Chicken  19866894214393_6
ttcccaatctcttgcttgctgctgcagctgatgctctattaagcacttacaagctctgggagaaagtttctttggagaaaagactcagttgtggggcatctccagaattaaaccttcagacgtttcattcaatttcaaaacaataaataatagataacaagagcaatgaatgctgcctggctttgggataaggtttttgcttcagaaacaccmtgktttttgttgtgtttgcaagaagtggctctctaygcctacctttgtaaaacaggcaggcrattccctaagatctatagaaaytcrgagatgtacgaacagcaccctggagatttggggagtaccacagcaggcatagcaagacaaagatgaggactgcgctgtgctccataaacactaacagctggtggtaatgtaaggcatcacttctgcccacagttctcacctccataaagccttagagaagcccagtgctactacaagaaccttgctgctatttcgtacataggttgctctgaaagtaatgccccctgtttattcctatggaaactacagcagatacagagagcacaataatactatttgatagagaagagcacggggctg

SEQ ID NO: 11530 - DNA, 600 bp, Chicken  19866894214393_7
acagttctcacctccataaagccttagagaagcccagtgctactacaagaaccttgctgctatttcgtacataggttgctctgaaagtaatgccccctgtttattcctatggaaactacagcagatacagagagcacaataatactatttgatagagaagagcacggggctgcctgctttgctgcactctgatccattttactgcctgtttgtgagcgacggaattgttttctgcagcctcactctgattacaaaatgcaaacacgctctgtgtacagcaaggagtgtcccccaaaaacrrgtccctgcatcaaagagcrtggcaaggaagtgagggactgcttcctgaggatgtctgcaaacaacagctgctacctgcagggcattgggcactcctcaggwgcactgccccaggctggtggcacagcacagaggactgggcaagctgctctctttgtctgctacatttcaagcagagcagaggcaccaagactttgctctgggttgtaacagggaggatcacaataaattctgaatcgagcattgcttccacttcactatcaagcatcattactttcattaacaacagcgccacagtgc

SEQ ID NO: 11531 - DNA, 600 bp, Chicken  19866894214393_8
cagttctcacctccataaagccttagagaagcccagtgctactacaagaaccttgctgctatttcgtacataggttgctctgaaagtaatgccccctgtttattcctatggaaactacagcagatacagagagcacaataatactatttgatagagaagagcacggggctgcctgctttgctgcactctgatccattttactgcctgtttgtgagcgacggaattgttttctgcagcctcactctgattacaaaatgcaaacacgctctgtgtacagcaaggagtgtcccccaaaaacrrgtccctgcatcaaagagcrtggcaaggaagtgagggactgcttcctgaggatgtctgcaaacaacagctgctacctgcagggcattgggcactcctcaggwgcactgccccaggctggtggcacagcacagaggactgggcaagctgctctctttgtctgctacatttcaagcagagcagaggcaccaagactttgctctgggttgtaacagggaggatcacaataaattctgaatcgagcattgcttccacttcactatcaagcatcattactttcattaacaacagcgccacagtgca

SEQ ID NO: 11532 - DNA, 600 bp, Chicken  19866894214393_9
gccttagagaagcccagtgctactacaagaaccttgctgctatttcgtacataggttgctctgaaagtaatgccccctgtttattcctatggaaactacagcagatacagagagcacaataatactatttgatagagaagagcacggggctgcctgctttgctgcactctgatccattttactgcctgtttgtgagcgacggaattgttttctgcagcctcactctgattacaaaatgcaaacacgctctgtgtacagcaaggagtgtcccccaaaaacrrgtccctgcatcaaagagcrtggcaaggaagtgagggactgcttcctgaggatgtctgcaaacaacagctgctacctgcagggcattgggcactcctcaggwgcactgccccaggctggtggcacagcacagaggactgggcaagctgctctctttgtctgctacatttcaagcagagcagaggcaccaagactttgctctgggttgtaacagggaggatcacaataaattctgaatcgagcattgcttccacttcactatcaagcatcattactttcattaacaacagcgccacagtgcattatagggaagaaaaaata

SEQ ID NO: 11533 - DNA, 600 bp, Chicken  19866894214402_1
ttaaatcccacagggataaaaccaatctgggcaggttcccacaagatgttggcatccttgatgactcttcaactggtttacttctgtccctcagacttgctttgaatccatccagcacacccctaattgatctacatcatttcaagtttcttagtcaagctctcatgcagtatcaagtactatttctcacagaagtccaagtttagtaccaaaacatttcttctctataaaaccctaatgagtgctgctggttgtattccatctccttcaattttgcttatattactcctacatcagctmttccttgaggaggtcaggacacactgccaggctgtcacaccatcactgacagagcactgtgaattcccytccctggaagcaytgaaggccaggctggataggaccttgagcaacctggtctacagggaggcgtccctgcctatagcaggggggttggaactaggtgatcttagaggtcccttctaaccctaaccattctactcttctatgattaactcagagttccctgaagttgagacatgttcctcatttagcaacagttcaggttaagcaacatttctctcccctaaaacaccacaa

SEQ ID NO: 11534 - DNA, 600 bp, Chicken  19866894214402_2
caactggtttacttctgtccctcagacttgctttgaatccatccagcacacccctaattgatctacatcatttcaagtttcttagtcaagctctcatgcagtatcaagtactatttctcacagaagtccaagtttagtaccaaaacatttcttctctataaaaccctaatgagtgctgctggttgtattccatctccttcaattttgcttatattactcctacatcagctmttccttgaggaggtcaggacacactgccaggctgtcacaccatcactgacagagcactgtgaattcccytccctggaagcaytgaaggccaggctggataggaccttgagcaacctggtctacagggaggcgtccctgcctatagcaggggggttggaactaggtgatcttagaggtcccttctaaccctaaccattctactcttctatgattaactcagagttccctgaagttgagacatgttcctcatttagcaacagttcaggttaagcaacatttctctcccctaaaacaccacaagacattacctctcaggcaccatgtctaaagccacacaagactggtgccacagcttacccatggtccatg

SEQ ID NO: 11535 - DNA, 600 bp, Chicken  19866894214402_3
tctgtccctcagacttgctttgaatccatccagcacacccctaattgatctacatcatttcaagtttcttagtcaagctctcatgcagtatcaagtactatttctcacagaagtccaagtttagtaccaaaacatttcttctctataaaaccctaatgagtgctgctggttgtattccatctccttcaattttgcttatattactcctacatcagctmttccttgaggaggtcaggacacactgccaggctgtcacaccatcactgacagagcactgtgaattcccytccctggaagcaytgaaggccaggctggataggaccttgagcaacctggtctacagggaggcgtccctgcctatagcaggggggttggaactaggtgatcttagaggtcccttctaaccctaaccattctactcttctatgattaactcagagttccctgaagttgagacatgttcctcatttagcaacagttcaggttaagcaacatttctctcccctaaaacaccacaagacattacctctcaggcaccatgtctaaagccacacaagactggtgccacagcttacccatggtccatgggaccaggctcct

SEQ ID NO: 11536 - DNA, 600 bp, Chicken  19866894214405_1
aggaggggagacagggagcgctgggtgcccactgggatgggattctggaggctcacagggaatttcaccctctcctccacagggatttggccaagaaggaccggaacggtgcatccgacccctttgtctgtgtgagctacaatggcaaaacgcaggagagcaccgtgagctcaactcagcgtatccccatccctgatgtccccatgggggtcggatgtgtgtgacatggggacaaatccatctccttcacaggtggtgaagaagtcctgctatcctcgctggaacgaagcctttgagttygagctgcccgacccccctgcagagaagctgtgtgtagaggtgtgggattgggacctcgtcagcaagaatgacttcttgggcaaggtgagcccccagaagcaccycacacggccccattactggggtgggacgtgagcctgtcccaacctcccccaggtggtggtcagcgtgcaggggctgcaggcagccgggcaccaggagggctggttcaggctgcagccggacacggccaagcccagggaggataggtgagtgctttggggtgttccagagggatgtgccgtggggcgcgtggtctgg

SEQ ID NO: 11537 - DNA, 600 bp, Chicken  19866894214405_2
aacggtgcatccgacccctttgtctgtgtgagctacaatggcaaaacgcaggagagcaccgtgagctcaactcagcgtatccccatccctgatgtccccatgggggtcggatgtgtgtgacatggggacaaatccatctccttcacaggtggtgaagaagtcctgctatcctcgctggaacgaagcctttgagttygagctgcccgacccccctgcagagaagctgtgtgtagaggtgtgggattgggacctcgtcagcaagaatgacttcttgggcaaggtgagcccccagaagcaccycacacggccccattactggggtgggacgtgagcctgtcccaacctcccccaggtggtggtcagcgtgcaggggctgcaggcagccgggcaccaggagggctggttcaggctgcagccggacacggccaagcccagggaggataggtgagtgctttggggtgttccagagggatgtgccgtggggcgcgtggtctggatctgctctccgtgttcctacaggcgccggggcagcctgggctcactgcagctgcaagtgaggctgcgggatgagacagtgctgccctcccactgctaccagcc

SEQ ID NO: 11538 - DNA, 599 bp, Chicken  19866894214413_1
  misc_feature (1)..(201): n is any nucleotide
nnnnnnnnnnnnnnnnnnnnnnnnnnnnnnnnnnnnnnnnnnnnnnnnnnnnnnnnnnnnnnnnnnnnnnnnnnnnnnnnnnnnnnnnnnnnnnnnnnnnnnnnnnnnnnnnnnnnnnnnnnnnnnnnnnnnnnnnnnnnnnnnnnnnnnnnnnnnnnnnnnnnnnnnnnnnnnnnnnnnnnnnnnnnnnnnnnnnnnnnntgttttatttgtttctaaaaaattgttgtctatttgaacaatgatcacatacccctcctccaacattactccctcgaaatcagaatatatttaaagtawtatttaataactgagggaaagtactattaatattttcttcttattaatctggagtccttaatcagcaactgtagatgcttgcatacaagtattagaatggttccactgtaaagctctgtagtttgaaatgacactcaaagtatcttaaagtcatggttaaacactcacaacatcctaacactgagaacatgataaagtatgagcaagaaaaaaagctttaaatataggttttttggccatgataaaactatatttagacaatgatagattgggcttacatcaagcacatctaagtagca

SEQ ID NO: 11539 - DNA, 600 bp, Chicken  19866894214413_2
agtactattaatattttcttcttattaatctggagtccttaatcagcaactgtagatgcttgcatacaagtattagaatggttccactgtaaagctctgtagtttgaaatgacactcaaagtatcttaaagtcatggttaaacactcacaacatcctaacactgagaacatgataaagtatgagcaagaaaaaaagctttaaatataggttttttggccatgataaaactatatttagacaatgatagattgggcttacatcaagcacatctaagtagcaaagactatcataattacttmtctgctacatgtccaattttcaagattttagtgctataagaaccaaaagatagaccagccttttcaaaatcatttggaaatctcttaccctcttagcttactctgcctccattttttttcccccttcagctatcctgttatttcattcccagaagaaaaatatttcagatgcttaaatatatgaattgaaactgttgcaaaccagattagaagggagagttgaaataatagtgaagacaaactatcagaaaaacaatatactgtcatggagaagcttacactaacaattatgacatttct

SEQ ID NO: 11540 - DNA, 600 bp, Chicken  19866894214415_1
tgtagttgggaactacttaccctccttgtctgttctattgagcactgaaacgctacggagtgtttgtgagtaatgttaaggaaaaccagatagcctccagcattccaacgtgtcacatttttcacacagagattggataatagcattatttttaattgcaggtgacagatgttgagaattgtgtgaacgcgtgagtaacacaagaatgcgaggaaggcttcctgagcatcgcccgcctttcccctgggtataagcagctcaagagatctttgcttcaattaaaactgtgttttccactgraattcctaataaccacaggtactgctctgaagcacagttgaaacaattacattactgatgttaatgcaattttctcagcctacaagaaaaaatgagaagggagaaagaaactgaatactcttaatctcaagaaagagtataattctctatatcctgtgtgtatggctgcacgtttgcttgtagttgtaaaacctgagctgatatagagaattctagaggatagtgtcttgctactttaagaatagtctgcaaattggcatatgctttgcccaagaaaaggcagaaggtctccatagccat

SEQ ID NO: 11541 - DNA, 600 bp, Chicken  19866894214415_2
tgagtcttttccgaggaacttttaaatgcgtaaagctcataagtcacctaaaaagtatgttgaattgatgccattcatgttggcaatctccatggaaccatttcaaaacccagctgaattgcctagattacccaacggcagtgtccaactgcagtgcgtgctatgtccttgtggccaaaagccattttggtgttcatggcagggcaaaaagatacccgtctctttgaagttccattaaagctcagcttttggaaattaaatgactgtttagagaaatgggcctttgtattagttctttawatgcagaatttaagtatggatgaaaacagggtctaagtttgagaataactgcctggtaatcatctctgctacacagcttggatccaagcaaatacgacctcctgcacagctgtgctatagtatcagtgatgccatagcatagtgataatccaagcttattctgctagatatgggactaacctgtcaaatcgttgatatggcaggcagggaaggttgttgtttactggagattggtccggaagtgtcatgggaacttgcaggtgttgcagacagggccagctcgaatcttcctagaggtaa

SEQ ID NO: 11542 - DNA, 600 bp, Chicken  19866894214437_1
aatcaagattcactgtttctaggtagcctgtaggcatggagaagctcctggagagcccatacaaacctgcagtgccctgcccttggtctcgatgggtagcgtgaaggcagagattgcacacacaacacacacagatgagaaaagacacagggccccaaggaaagatgcactcataagaacctgcggattaaaagaaagaaagaaaggaagaaacagttcaaacatctgttcagtgctgtgggagcccagcagttaattgggaattagagagtggaccacgggttgcaaatgcctgagggrctcagcagcgtccagaaaatgccactcatgaatctaagagttttcagaaagcagcaaacagacaatagcaagttaactctgggaaggttatccaggtccacatctgcaaagactgtccaagtactctgtataaatatcagataaagaacaaatgagtttggaaaaggaaaccagaaaaccacctagaccgaatgcctcccccagttctgttaacttcagggacatctctgtgtttgatggtaatatttggcaaaaggcttactgacattgtcagtggtgctcttacttgtgatatgaatg

SEQ ID NO: 11543 - DNA, 599 bp, Chicken  19866894214444_1
  misc_feature (1)..(19): n is any nucleotide
nnnnnnnnnnnnnnnnnnnatgcagcggtggtttgtaagcagctgggctgtgggtcagtaatcagtgctgtacagaatgaaagatttgtgctaggatctggccccatttggatggatgaagtccgctgtcgaggcaccgagtctgccctttctgactgcacacacagaggatggggtatacatgactgcacacatgattatgatgctggagttacatgtacaggtgaggtactagccactcccgacctctgcaggcagacttggggcatcaataagtagatatcgtatgtggccagttgygctgttattgctggtccctggggaatggccatggggccctgcttggtrcccagttgaggtggaggtgaggagggacatgggcatggaattgccagagggctctggaaccctacaggtgcctttgttcactccaggatttgtccgtctggttggaagggacaaccgctgctcaggacgagtggagatcaatgacggggatgggtggaaatctgtctgtgactcacactttggtgccaaagctgctgatgtggtctgcagagatcttcagtgtggcagagccctgtccgtcaccagagcaa

SEQ ID NO: 11544 - DNA, 600 bp, Chicken  19866894214444_2
tgtgggtcagtaatcagtgctgtacagaatgaaagatttgtgctaggatctggccccatttggatggatgaagtccgctgtcgaggcaccgagtctgccctttctgactgcacacacagaggatggggtatacatgactgcacacatgattatgatgctggagttacatgtacaggtgaggtactagccactcccgacctctgcaggcagacttggggcatcaataagtagatatcgtatgtggccagttgygctgttattgctggtccctggggaatggccatggggccctgcttggtrcccagttgaggtggaggtgaggagggacatgggcatggaattgccagagggctctggaaccctacaggtgcctttgttcactccaggatttgtccgtctggttggaagggacaaccgctgctcaggacgagtggagatcaatgacggggatgggtggaaatctgtctgtgactcacactttggtgccaaagctgctgatgtggtctgcagagatcttcagtgtggcagagccctgtccgtcaccagagcaagtccctctggagaagggaccggtcccatctgggacagagagctgcagtg

SEQ ID NO: 11545 - DNA, 600 bp, Chicken  19866894214447_1
cggagccgagggagggaacgccggaggaacctgcatttatgagagcagatagggaatagattgcacggcactgatttgactttgactttccctgcttgtgtgtccatgaaaataaaactccagtgaaatgggttggaagaaaagattacatgtcagaaacaggcaaagttaagaggtgataggaatgtaattacgttactgcaggcttaaagcatctgacgtgctgcaccagcacatggagcagtatctgtcctttctcacactagagggagctcttggaattttaaaagaaagaatgartctctatatgtgtatatatatatgtatgtatttagatacacacatataatgtaatacatgcatttatattttaatatgccattttcaaatctctcccaatttcctcagattcagtctggctggaaaaagtctctcctcttctctcttttatctccacagtcattaatagaaataaaatttgtattatatgttttaatcagtaaatctacttggtgagaagggatgattggcaacaaagctgaacagcatcaccaggaagattttgataagagttatgtaaatggcagcaatcacttgtgt

SEQ ID NO: 11546 - DNA, 600 bp, Chicken  19866894214447_2
ggagccgagggagggaacgccggaggaacctgcatttatgagagcagatagggaatagattgcacggcactgatttgactttgactttccctgcttgtgtgtccatgaaaataaaactccagtgaaatgggttggaagaaaagattacatgtcagaaacaggcaaagttaagaggtgataggaatgtaattacgttactgcaggcttaaagcatctgacgtgctgcaccagcacatggagcagtatctgtcctttctcacactagagggagctcttggaattttaaaagaaagaatgacrctctatatgtgtatatatatatgtatgtatttagatacacacatataatgtaatacatgcatttatattttaatatgccattttcaaatctctcccaatttcctcagattcagtctggctggaaaaagtctctcctcttctctcttttatctccacagtcattaatagaaataaaatttgtattatatgttttaatcagtaaatctacttggtgagaagggatgattggcaacaaagctgaacagcatcaccaggaagattttgataagagttatgtaaatggcagcaatcacttgtgta

SEQ ID NO: 11547 - DNA, 600 bp, Chicken  19866894214454_1
agaaatgtcccgttcccccctccccccctatgcttaggtgtgtggaatatcaccccagggttcactctgacctctcacagggactgtaactgatggacagactcgttttgtttccatcatgcttccttttattttttttccccactagctgggaaaaaaatctgcatcgcagccttgatatggagactaccaatgtagagagcattaaccaattcagattgaaaataaaaccacagacaaatttcaaaaagttccacaagtctaaaagacaactgaccaacattttataattacctttcytttctttccacttcctattttcagctgaaatatggtctatgtgaaaacagagtcccttgataaagtagggacactaatgagaacccacgtttggacttgagagccataattatacaatacttcgcaccactgccatctattttcaacataaaggcactagttatgccaggtacagcttagagctccagggagctaaggaggattttcatgaaacctagatgacagactgttaaaaataaaaataaaatagagaatagcagaaaaataaaagccctattaatattacgctttggagtacaa

SEQ ID NO: 11548 - DNA, 599 bp, Chicken  19866894214458_1
  misc_feature (1)..(56): n is any nucleotide
nnnnnnnnnnnnnnnnnnnnnnnnnnnnnnnnnnnnnnnnnnnnnnnnnnnnnnnnacttgtacttgctacagtcccaggccagtcaaatgcaaacactttatacttctcagtctaggactgcccattttagatatttaaattcctcttttctttcttgcttgtctgactagttctgtctgtttcagtggttccttctgggggaggtgagatttggacaataaaactttaagacttttcaattgcatgatgtctccaaaaggatgtgctcttactggctcccaacattttccagactccrgagaartatcctctagttcagcagcttccttytgaggttgctgctgattgaatctctggcttayactggtgtatcatttataacacttacacagcagacttgttactctataatacacactgggtattgactcaaattcagaaagattaaaaaatttattcaggtttcttttaagctgtaaaaactcattctgcatttaaattattcacctgtaaagacaacttctgtattgaagcaggccatttacctccttttacaaatttcattttgctagcttttgttggttaactttctgaatt

SEQ ID NO: 11549 - DNA, 599 bp, Chicken  19866894214458_2
  misc_feature (1)..(50): n is any nucleotide
nnnnnnnnnnnnnnnnnnnnnnnnnnnnnnnnnnnnnnnnnnnnnnnnnnacttgtacttgctacagtcccaggccagtcaaatgcaaacactttatacttctcagtctaggactgcccattttagatatttaaattcctcttttctttcttgcttgtctgactagttctgtctgtttcagtggttccttctgggggaggtgagatttggacaataaaactttaagacttttcaattgcatgatgtctccaaaaggatgtgctcttactggctcccaacattttccagactccrgagaartatcctctagttcagcagcttccttytgaggttgctgctgattgaatctctggcttayactggtgtatcatttataacacttacacagcagacttgttactctataatacacactgggtattgactcaaattcagaaagattaaaaaatttattcaggtttcttttaagctgtaaaaactcattctgcatttaaattattcacctgtaaagacaacttctgtattgaagcaggccatttacctccttttacaaatttcattttgctagcttttgttggttaactttctgaattccttga

SEQ ID NO: 11550 - DNA, 599 bp, Chicken  19866894214458_3
  misc_feature (1)..(24): n is any nucleotide
nnnnnnnnnnnnnnnnnnnnnnnnacttgtacttgctacagtcccaggccagtcaaatgcaaacactttatacttctcagtctaggactgcccattttagatatttaaattcctcttttctttcttgcttgtctgactagttctgtctgtttcagtggttccttctgggggaggtgagatttggacaataaaactttaagacttttcaattgcatgatgtctccaaaaggatgtgctcttactggctcccaacattttccagactccrgagaartatcctctagttcagcagcttccttytgaggttgctgctgattgaatctctggcttayactggtgtatcatttataacacttacacagcagacttgttactctataatacacactgggtattgactcaaattcagaaagattaaaaaatttattcaggtttcttttaagctgtaaaaactcattctgcatttaaattattcacctgtaaagacaacttctgtattgaagcaggccatttacctccttttacaaatttcattttgctagcttttgttggttaactttctgaattccttgatttataatggaaatcatcccttgaaa

SEQ ID NO: 11551 - DNA, 600 bp, Chicken  19866894214458_4
ttgctacagtcccaggccagtcaaatgcaaacactttatacttctcagtctaggactgcccattttagatatttaaattcctcttttctttcttgcttgtctgactagttctgtctgtttcagtggttccttctgggggaggtgagatttggacaataaaactttaagacttttcaattgcatgatgtctccaaaaggatgtgctcttactggctcccaacattttccagactccrgagaartatcctctagttcagcagcttccttytgaggttgctgctgattgaatctctggcttayactggtgtatcatttataacacttacacagcagacttgttactctataatacacactgggtattgactcaaattcagaaagattaaaaaatttattcaggtttcttttaagctgtaaaaactcattctgcatttaaattattcacctgtaaagacaacttctgtattgaagcaggccatttacctccttttacaaatttcattttgctagcttttgttggttaactttctgaattccttgatttataatggaaatcatcccttgaaatttatgagaaaaacagcatttcttgtatgagta

SEQ ID NO: 11552 - DNA, 600 bp, Chicken  19866894214464_1
acgcagcacagccccattccagctcccatcctgctggaagtgcaaactgcttctttcaaaagctacagtgaaaaaggccaaaaagagaaaggaacaaattgatttaaaggtggctgcagtcagacttcccagaaggcacttctgggagcaatctgctggtatgctggccagccctggccgtacggcgcgtcagctccagctcacaccacagccctgcacacactgctggtggccttccaggagagggaattcattagcttattgcatatgcattgcctaattactttgcaagaaaaaaawgaaaaaaagccccagcttcaaacttgttatttcatagcaactatggggtgctggggaaccaaacggcatcayctcctgccaaataaactacaagaaaccaaagaaaacccactttgcccagacccagcaataacacatatctacccaatctgctgttttgggagttgatcctgagctgagaaagacagtgcatgctcttgtgctcagtctcaccgtgccacagaccacccccacttaataataaataaatagtaactaattataaactacttaatgcactcctctcatttgtttcaaccc

SEQ ID NO: 11553 - DNA, 600 bp, Chicken  19866894214464_2
aaaggccaaaaagagaaaggaacaaattgatttaaaggtggctgcagtcagacttcccagaaggcacttctgggagcaatctgctggtatgctggccagccctggccgtacggcgcgtcagctccagctcacaccacagccctgcacacactgctggtggccttccaggagagggaattcattagcttattgcatatgcattgcctaattactttgcaagaaaaaaawgaaaaaaagccccagcttcaaacttgttatttcatagcaactatggggtgctggggaaccaaacggcatcayctcctgccaaataaactacaagaaaccaaagaaaacccactttgcccagacccagcaataacacatatctacccaatctgctgttttgggagttgatcctgagctgagaaagacagtgcatgctcttgtgctcagtctcaccgtgccacagaccacccccacttaataataaataaatagtaactaattataaactacttaatgcactcctctcatttgtttcaacccactaatacagaaccaccattcaggtgaagggatttgcactgccatcttgtagcacagtgccttcacaacttc

SEQ ID NO: 11554 - DNA, 600 bp, Chicken  19866894214465_1
gggctcacgatgaggaagtacaacgagctgcagcgccgcttgcgcaacttctttcccccaccacaagctgttcatgctggggcagccggtggctgacagagtcctggcgcagatggaggtgctgcgggacgatcagctgcagccgcaattccgacaacaggaggaggccttctgccagcacatctggaaagaggcgccagtgaaggtgctgctgaacagcagccaggtgacaggcagaggtgagcggtggtagcacgaggacgggtggcacgcgggggacgtgcgtggggtgacgtgtgygggcggctgtcacctctcagtgctagcacgcctggcggagacttacrtggcagccatcaccaccggctccgtgccctgcgtggagagcgcgctcacggtggtggttgaagctgagaacagcacagcggtggaggcggccgtggccgaataccggcagggcatggagcagggcctggtgctgcccacggcctcgcacgatgcgctgatggccgtgcaccgggactggaagcaacgcgccggaaccttcttcctgtcccacgcctttgccaacaccaggcagtgttaccaggcactgctgat

SEQ ID NO: 11555 - DNA, 600 bp, Chicken  19866894214465_2
cttctttcccccaccacaagctgttcatgctggggcagccggtggctgacagagtcctggcgcagatggaggtgctgcgggacgatcagctgcagccgcaattccgacaacaggaggaggccttctgccagcacatctggaaagaggcgccagtgaaggtgctgctgaacagcagccaggtgacaggcagaggtgagcggtggtagcacgaggacgggtggcacgcgggggacgtgcgtggggtgacgtgtgygggcggctgtcacctctcagtgctagcacgcctggcggagacttacrtggcagccatcaccaccggctccgtgccctgcgtggagagcgcgctcacggtggtggttgaagctgagaacagcacagcggtggaggcggccgtggccgaataccggcagggcatggagcagggcctggtgctgcccacggcctcgcacgatgcgctgatggccgtgcaccgggactggaagcaacgcgccggaaccttcttcctgtcccacgcctttgccaacaccaggcagtgttaccaggcactgctgatggtacgtcaccatcacagcgtgcggctgggggtgatttccgtgcact

SEQ ID NO: 11556 - DNA, 600 bp, Chicken  19866894214475_1
ccttgtttcctgagctttacttaactgtaacactttaagtatatctggacatttaaatgtatcttgtctaggacaaaacgttttgctctttgaaggcttaaatgcttcccagcttgagggccatggtcagtaagagaagagtgggaatctcccccatgctgtgtgctcactgtttgactttgtagaaacaccaatggccacagcagtgggaaacatcgatattccttcaaaggtcaaaagagatacaagtgctgaagcatgcaggctcccaaagcacacaaagctactcagatcacaaarcactttccccaggctttgttctgcttyaaagcatgctgaaaagagacattttgtgaccaagaacagaggttacacaagcagttccgaacttccaaccagcctacaaggacagaaggttctgctgcttctcccaccagcgcagtgtcagaaggcaccgtcactgccctaggcagcatgtttccctctttcacattactgtgtataattttcattttggctaagttactgataacaattagaaayaagtttgaagcaaaactgtggatccagcatgaaaagagcaatgggtgagcagtaaat

SEQ ID NO: 11557 - DNA, 600 bp, Chicken  19866894214475_2
taacactttaagtatatctggacatttaaatgtatcttgtctaggacaaaacgttttgctctttgaaggcttaaatgcttcccagcttgagggccatggtcagtaagagaagagtgggaatctcccccatgctgtgtgctcactgtttgactttgtagaaacaccaatggccacagcagtgggaaacatcgatattccttcaaaggtcaaaagagatacaagtgctgaagcatgcaggctcccaaagcacacaaagctactcagatcacaaarcactttccccaggctttgttctgcttyaaagcatgctgaaaagagacattttgtgaccaagaacagaggttacacaagcagttccgaacttccaaccagcctacaaggacagaaggttctgctgcttctcccaccagcgcagtgtcagaaggcaccgtcactgccctaggcagcatgtttccctctttcacattactgtgtataattttcattttggctaagttactgataacaattagaaayaagtttgaagcaaaactgtggatccagcatgaaaagagcaatgggtgagcagtaaataagtgtcatctgaactgaaaatgtctg

SEQ ID NO: 11558 - DNA, 600 bp, Chicken  19866894214475_3
tacaagtgctgaagcatgcaggctcccaaagcacacaaagctactcagatcacaaarcactttccccaggctttgttctgcttyaaagcatgctgaaaagagacattttgtgaccaagaacagaggttacacaagcagttccgaacttccaaccagcctacaaggacagaaggttctgctgcttctcccaccagcgcagtgtcagaaggcaccgtcactgccctaggcagcatgtttccctctttcacattactgtgtataattttcattttggctaagttactgataacaattagaaayaagtttgaagcaaaactgtggatccagcatgaaaagagcaatgggtgagcagtaaataagtgtcatctgaactgaaaatgtctgcctcagaacaggacyggaatacagcttccacmgacaacctggagcagaatgttttactgtaaaccccagctgtaagagacttctcttatttttgtttaagtatttttttctgtcaaataaaataaagacacttttaactaatctgtcaccacaaccatcccaacactgcaaaccacctcaaaccctgcttctgatatcacaactagccacagaaat

SEQ ID NO: 11559 - DNA, 600 bp, Chicken  19866894214475_4
gagacattttgtgaccaagaacagaggttacacaagcagttccgaacttccaaccagcctacaaggacagaaggttctgctgcttctcccaccagcgcagtgtcagaaggcaccgtcactgccctaggcagcatgtttccctctttcacattactgtgtataattttcattttggctaagttactgataacaattagaaayaagtttgaagcaaaactgtggatccagcatgaaaagagcaatgggtgagcagtaaataagtgtcatctgaactgaaaatgtctgcctcagaacaggacyggaatacagcttccacmgacaacctggagcagaatgttttactgtaaaccccagctgtaagagacttctcttatttttgtttaagtatttttttctgtcaaataaaataaagacacttttaactaatctgtcaccacaaccatcccaacactgcaaaccacctcaaaccctgcttctgatatcacaactagccacagaaattgaggagttgagccagtcctgcagaacaagccagcaaaagcaacccgtgacagcacactcacaacacgtgggtccatcaattaaaaaggaggcaactga

SEQ ID NO: 11560 - DNA, 600 bp, Chicken  19866894214475_5
agaacagaggttacacaagcagttccgaacttccaaccagcctacaaggacagaaggttctgctgcttctcccaccagcgcagtgtcagaaggcaccgtcactgccctaggcagcatgtttccctctttcacattactgtgtataattttcattttggctaagttactgataacaattagaaayaagtttgaagcaaaactgtggatccagcatgaaaagagcaatgggtgagcagtaaataagtgtcatctgaactgaaaatgtctgcctcagaacaggacyggaatacagcttccacmgacaacctggagcagaatgttttactgtaaaccccagctgtaagagacttctcttatttttgtttaagtatttttttctgtcaaataaaataaagacacttttaactaatctgtcaccacaaccatcccaacactgcaaaccacctcaaaccctgcttctgatatcacaactagccacagaaattgaggagttgagccagtcctgcagaacaagccagcaaaagcaacccgtgacagcacactcacaacacgtgggtccatcaattaaaaaggaggcaactgacctttgctaggcgcttc

SEQ ID NO: 11561 - DNA, 600 bp, Chicken  19866894214477_1
tactgaaattcctctatcaaaagagcaagcatggctacatatttttcactgttcacaggactgtgtttagtcagtataacaaactgcacaaaagtattcactacaacttgagtcagctctgcattgtgccccgtgccctggtttcaactcagactgtaccaatcatccactgattttaggttgttgctcagggactgatatgtggctgggaacaggctgggcttcttggtgtggcagagtcactgtcatgatggtgcaaagtagagggcagctgcatgcagcctgtggggcatgggttgracgtatctgccataataattcagtctaaaattgtagtaggtggctttgttcacataaatgtatgtaatttgctagtaagattaactgttactttgaatctataattacaataattactggatattagaagctaaaaatgactaagaatatatttgctgtttcaaatgaatgtagtaggtcagctcatttctcagactgacttagaattctgtgatattttacaaaattatttttgtttgctctgtatgacaaggaatatacatatccacagagaaatggagaaaatgtaaatagaaaaca

SEQ ID NO: 11562 - DNA, 600 bp, Chicken  19866894214480_1
tgcagagcgtcacatctttggtgagtacgtaagggctgtacgcagacaagaaaaaggacagcacaatatgcaagcatttctacatgctcattccactatttcagaggcctctcttttactgagtacattatgaatatgtagctaggtgtaaataaaatatgacataccgaaatctaacatataatttcccaaggagataaaagctattctgtgacgaacagctactattaaaaatgcatccagtcagcaggaagtatttgaacatagattttatgtatcgattgtggatgttttgcatgmattgctcctctttcacctcactccttagccctgtcatgtccactgtgctatgcagtgccatctaaatttttcatacgttggtagtagtggtgygttttgtaattttgggatggttacactaaagatggaagccacctaagtattttctccttcattttacaatctgttgggcaatggcgatcactgacaggttcagaaggcagtttgcagtggggatcactgggctccagttgcagaccagcaacagcaatgcgagagctgctgtggcagaattctctctcgatgtattttggcagcctc

SEQ ID NO: 11563 - DNA, 516 bp, Chicken  19866894214480_2
cactatttcagaggcctctcttttactgagtacattatgaatatgtagctaggtgtaaataaaatatgacataccgaaatctaacatataatttcccaaggagataaaagctattctgtgacgaacagctactattaaaaatgcatccagtcagcaggaagtatttgaacatagattttatgtatcgattgtggatgttttgcatgmattgctcctctttcacctcactccttagccctgtcatgtccactgtgctatgcagtgccatctaaatttttcatacgttggtagtagtggtgygttttgtaattttgggatggttacactaaagatggaagccacctaagtattttctccttcattttacaatctgttgggcaatggcgatcactgacaggttcagaaggcagtttgcagtggggatcactgggctccagttgcagaccagcaacagcaatgcgagagctgctgtggcagaattctctctcgatgtattttggcagcctcagaacagct

SEQ ID NO: 11564 - DNA, 600 bp, Chicken  19866894214484_1
caggaaataaggctttgtatgatgcgtctttccaaaacacctttttgtgaacagatgggtagcaatcgattatgtttacaattggggcactaaagaaaatgttgtcattttttcccctgctagccatttatctatttaattctttgacagcgcagaggaaatctaactaaatgttctgttttaattaaaatgaaagtaaatttattagtcagagaaattctatgttctgtttatgcttggggaaaaaagcaaacgtgtctgtttcattgtttaccaccatttagcataaggttatttctygttgcttatttggcctacagaacaaaacatactagtgaaatttttcacttttatcaattctaacraactgtagtgagctgtaaatgggacaagaagagcacatcctgagaagcattctaagagggttttgttgtttatgtttttttgtttgtttgtttattttaatctaaataaatgacagtcagtgacatttcctaaaatggagtatgtagttggctggtagaaygggagtgcttcaagtaaaacatggagaataataattagtctgtttcttgaacactatttcaactgtctcattgt

SEQ ID NO: 11565 - DNA, 600 bp, Chicken  19866894214484_2
tcgattatgtttacaattggggcactaaagaaaatgttgtcattttttcccctgctagccatttatctatttaattctttgacagcgcagaggaaatctaactaaatgttctgttttaattaaaatgaaagtaaatttattagtcagagaaattctatgttctgtttatgcttggggaaaaaagcaaacgtgtctgtttcattgtttaccaccatttagcataaggttatttctygttgcttatttggcctacagaacaaaacatactagtgaaatttttcacttttatcaattctaacraactgtagtgagctgtaaatgggacaagaagagcacatcctgagaagcattctaagagggttttgttgtttatgtttttttgtttgtttgtttattttaatctaaataaatgacagtcagtgacatttcctaaaatggagtatgtagttggctggtagaaygggagtgcttcaagtaaaacatggagaataataattagtctgtttcttgaacactatttcaactgtctcattgtctggctagatgaatataaggcagaggagcttctgcctcagtgatatcatggatatcagtggtatc

SEQ ID NO: 11566 - DNA, 600 bp, Chicken  19866894214484_3
ctgtttatgcttggggaaaaaagcaaacgtgtctgtttcattgtttaccaccatttagcataaggttatttctygttgcttatttggcctacagaacaaaacatactagtgaaatttttcacttttatcaattctaacraactgtagtgagctgtaaatgggacaagaagagcacatcctgagaagcattctaagagggttttgttgtttatgtttttttgtttgtttgtttattttaatctaaataaatgacagtcagtgacatttcctaaaatggagtatgtagttggctggtagaaygggagtgcttcaagtaaaacatggagaataataattagtctgtttcttgaacactatttcaactgtctcattgtctggctagatgaatataaggcagaggagcttctgcctcagtgatatcatggatatcagtggtatctccagtgcagtgtcaaaatcctcaggaaaatctcataatttcccacttcatagtagcacatcagagagagagacatgctagcagcaggtctggaatctcagaacaagaagtatgtttcagtgtgctgtgcctgctcagtagcccttggtagtggggattcc

SEQ ID NO: 11567 - DNA, 600 bp, Chicken  19866894214485_1
tgcaggcagctcggcagctaccatgtaattgacgggggcgacatcaacagtgggaggaaagggtacttttaagccattatatcctcttttaggcaggagagttcataattttaacttgcattatggtcatggtaaatccgaggctatcctgaggctttatctgaactacccaaccagtgaaatcatctccctccaaacatcctcctcctaacaacgacagggcaagaaattgggattaaaatatgtatattaggagactgcagatactcagcagtgccctttgagaacgtggcaacttamatcaaggaggaacttgcaaaagcatccagagatcagcagtgatattaagaggaagcgtagtgatttatactccacctctctttcacttttttttwcaagctaaagacgcttgagaactgcagggatcccaggagtcttctcccgagagaacagaccccagagcaagaggcacctctggggagcgcgcctaatgcagaaagccatgtgttactgacacagaggtgagacgagcaatctgcctggtgagacgagtagtcaggtttactggagaaagggctgtggcatccgcagttgggttcc

SEQ ID NO: 11568 - DNA, 600 bp, Chicken  19866894214485_2
ggagagttcataattttaacttgcattatggtcatggtaaatccgaggctatcctgaggctttatctgaactacccaaccagtgaaatcatctccctccaaacatcctcctcctaacaacgacagggcaagaaattgggattaaaatatgtatattaggagactgcagatactcagcagtgccctttgagaacgtggcaacttamatcaaggaggaacttgcaaaagcatccagagatcagcagtgatattaagaggaagcgtagtgatttatactccacctctctttcacttttttttwcaagctaaagacgcttgagaactgcagggatcccaggagtcttctcccgagagaacagaccccagagcaagaggcacctctggggagcgcgcctaatgcagaaagccatgtgttactgacacagaggtgagacgagcaatctgcctggtgagacgagtagtcaggtttactggagaaagggctgtggcatccgcagttgggttcccatttcagaaattaatattccattttttccctcacttgcagaacagccccccccaagcccactgccttgctgccttcaaaacgctgcggtgcagg

SEQ ID NO: 11569 - DNA, 600 bp, Chicken  19866894214487_1
atcctaaaaacatatatcctgcctaatgggactcacccatctcttctttcatgacttaggactgctccctacacgtcaacttagcattatgaagtgatgccaaaaaggaagagtgcccttgtttgaggagaaaaaaaaaaacaaaccatgcaggcccagattctggctcagcttcactgtcaccatgccagcattgttcatgatcactttgcaacctccagaagcaaaaaatgaaggagaaaacacaaaaaagctaaaaaaaaaattaagtttgcatgctttgttctaaaatggaacatwaaaattcttctacattagaactaagggaatctaggaagtgaaatttaataaatctgtacaaagcagaaccatatggacaacaaacattgtgattaacaaggtttaaattcagtacctttacggtcactgcacagacctcaattgctcaaagacaaggcatagatacgtgacagcatcctttatccactgtgaagaaaatcagcaagatggaaccatgaaacaaatttcccaagtggctaatgtaaccagacagcagctgaatattaacagcgatgacacctgccttggatgggatccccg

SEQ ID NO: 11570 - DNA, 600 bp, Chicken  19866894214488_1
ttgctttccatgcacagtagctgcttcctatctagtatttttaaaggcacttaattcaaatctatcccttgccgaggggtctcatttgttagagtttaatttcttacacatttttatgcatggtcagttatagtaaataaaacaacgctaatgccattccgtgcttttttgcacggtcaacgttattaggtgaagtcttaagattgtattcacatcttaaaagaacaattacctttaaaaaccagttctagttaacaaaaggggcagtacgatcatccagtgacaataagatcatatccygggtaaagagcctaggcagctaagctatggaaaagactcttcagacactgaacatttgattgcagcttttstaacatatgcactgtcaccttagcaatgccaattagcagaaatattkggacaaaaccyaaaagactgattcacatttgactttcattttagtccactgtatggaataaaattgcacgctggctcctgaaaaggagctaaaaaagtgcattaagacttgttagctcagaagagtgcctcttccctttactacccaacttttgcaagtaaacggcaaagtccaaacaagtt

SEQ ID NO: 11571 - DNA, 536 bp, Chicken  19866894214488_2
ccgaggggtctcatttgttagagtttaatttcttacacatttttatgcatggtcagttatagtaaataaaacaacgctaatgccattccgtgcttttttgcacggtcaacgttattaggtgaagtcttaagattgtattcacatcttaaaagaacaattacctttaaaaaccagttctagttaacaaaaggggcagtacgatcatccagtgacaataagatcatatccygggtaaagagcctaggcagctaagctatggaaaagactcttcagacactgaacatttgattgcagcttttstaacatatgcactgtcaccttagcaatgccaattagcagaaatattkggacaaaaccyaaaagactgattcacatttgactttcattttagtccactgtatggaataaaattgcacgctggctcctgaaaaggagctaaaaaagtgcattaagacttgttagctcagaagagtgcctcttccctttactacccaacttttgcaagtaaacggcaaagtccaaacaagtttggatgc

SEQ ID NO: 11572 - DNA, 489 bp, Chicken  19866894214488_3
catggtcagttatagtaaataaaacaacgctaatgccattccgtgcttttttgcacggtcaacgttattaggtgaagtcttaagattgtattcacatcttaaaagaacaattacctttaaaaaccagttctagttaacaaaaggggcagtacgatcatccagtgacaataagatcatatccygggtaaagagcctaggcagctaagctatggaaaagactcttcagacactgaacatttgattgcagcttttstaacatatgcactgtcaccttagcaatgccaattagcagaaatattkggacaaaaccyaaaagactgattcacatttgactttcattttagtccactgtatggaataaaattgcacgctggctcctgaaaaggagctaaaaaagtgcattaagacttgttagctcagaagagtgcctcttccctttactacccaacttttgcaagtaaacggcaaagtccaaacaagtttggatgc

SEQ ID NO: 11573 - DNA, 478 bp, Chicken  19866894214488_4
atagtaaataaaacaacgctaatgccattccgtgcttttttgcacggtcaacgttattaggtgaagtcttaagattgtattcacatcttaaaagaacaattacctttaaaaaccagttctagttaacaaaaggggcagtacgatcatccagtgacaataagatcatatccygggtaaagagcctaggcagctaagctatggaaaagactcttcagacactgaacatttgattgcagcttttstaacatatgcactgtcaccttagcaatgccaattagcagaaatattkggacaaaaccyaaaagactgattcacatttgactttcattttagtccactgtatggaataaaattgcacgctggctcctgaaaaggagctaaaaaagtgcattaagacttgttagctcagaagagtgcctcttccctttactacccaacttttgcaagtaaacggcaaagtccaaacaagtttggatgc

SEQ ID NO: 11574 - DNA, 600 bp, Chicken  19866894214494_1
cagttaccttgaatttacatttggattcattagagtaacttcggattcaaactcacagtaggtttagctcagttgctagactctaaaaatgggaacttaacctggtggatatgaggacaatggatgttaatacattggatgtaccgttaacttgagaattacatcaagcagagaaacaaagtgactgaaaaaaaagagctgccgtgctcagaattctctttggtcagatggcactgaggctgatgccaaaatctatacaagtactttcaatacaagtacttagcagtaaagattttttaygttcaactcattacatttgcactccaaattccactgaagttgctgagagtttcttcccaacttctgtcagctctgtttcaggttttttgtttaaaataaagacaaaatgcaacattaaagtatgtcatattaatgaatcagttactagttaacaaatataattaacaagcttcttaatggatttctcrcttattcatgcccttctacagaaggcagcactgaagttggctgagaaatggagtttgtgaaaataaaactatgctattttggtaccccatttcagcattactttaatatttc

SEQ ID NO: 11575 - DNA, 435 bp, Chicken  19866894214494_2
aaaaaaagagctgccgtgctcagaattctctttggtcagatggcactgaggctgatgccaaaatctatacaagtactttcaatacaagtacttagcagtaaagattttttaygttcaactcattacatttgcactccaaattccactgaagttgctgagagtttcttcccaacttctgtcagctctgtttcaggttttttgtttaaaataaagacaaaatgcaacattaaagtatgtcatattaatgaatcagttactagttaacaaatataattaacaagcttcttaatggatttctcrcttattcatgcccttctacagaaggcagcactgaagttggctgagaaatggagtttgtgaaaataaaactatgctattttggtaccccatttcagcattactttaatatttcatttcatctaatctatttggatt

SEQ ID NO: 11576 - DNA, 409 bp, Chicken  19866894214495_1
gcaatggctacaaaaacgaagcagagggtaaaggactacctcagcaggatgagcagctccacctgtctgggtatgaagaaagatgagctgctcacaggcctgcaagcacctttcagtcctgccaagaaaaacatggagagattgcatgctggaaagcaagtgtcagacacatttagccttgaagtttcctacccacagacaccgggatcctgtgcctttgcttcatgaatcttttcaaaacaagctttaatccagcttccagaatacattttactgtgtctgtgctgagatcagagttcygtctgcttctgaaatctctgaatctgcctgcttgcttagggaaaaaaacaaagttcctacatgcacaacgtgctcatcttatatacagcttccaaagcacttctagtgc

SEQ ID NO: 11577 - DNA, 400 bp, Chicken  19866894214496_1
gctgtgaagagagactttaatggcaaagacagatccaggattacttactggaagagatttttatcacttgatgttctcctctttgtactagtgtcaattaggaaaaaaaaaaaatcactaaaactcagggagctagttctggttagaagcaggctgaagcctgaattcagccatataaagcagcttctgtcttacaccagtggtattttccactgctaattcacactaggatagagagctagaaacaaacaaccaagtggactgctatctgtgaaagctccttcctctgcctgtaaaacrttgagtactgagatggctttgtggcagaccaattccaagcacacacagccagctcggtgagagtcatgaacatagtttatcctgccaggtagtgatctga

SEQ ID NO: 11578 - DNA, 599 bp, Chicken  19866894214499_1
  misc_feature (1)..(171): n is any nucleotide
nnnnnnnnnnnnnnnnnnnnnnnnnnnnnnnnnnnnnnnnnnnnnnnnnnnnnnnnnnnnnnnnnnnnnnnnnnnnnnnnnnnnnnnnnnnnnnnnnnnnnnnnnnnnnnnnnnnnnnnnnnnnnnnnnnnnnnnnnnnnnnnnnnnnnnnnnnnnnnnnnnnnnnnnnnnataaatgcaaagaaagccccatggaaaagttgttaactctgaaagctaataatggactaggttaaatatttaagaggaaattataggctatatcagaaatagctgaaaccaccaaaacaaagcagtagraaacattagttttctgctcggaagaagatctgcagggagcagggaagcggtcgatagatccttaaattggacgcaatagctgttcttctatcccaagttggcagctgctacatttgcagacctggttcattatttacccataatgaccatcaagctccagtcaaagtcagatcacaacaactgtcagcagctcttttaattagccttgtttgaattcagataaatatcacaatggcccagcttctgctgaaaaagcaacagaagactgcaaggagtaagctgctctgaattccaaacaa

SEQ ID NO: 11579 - DNA, 600 bp, Chicken  19866894214499_2
cctaatttatctccttctgtttgtttatcctcagggaacataatcttctgttgcatcaagcccctctcattctccctgtgtcagcagcagaataataattccctcctcctcctccacccctgcctcccacaagcacaggcaagaacgaggagtggatcaggctgtgagcatcagcactaatgcttgatgcagctattttcacaacagtggcacagagtgaaagaaagatgcgagagaggtgagcaatatgctacctgttctagagagcccagcgtgagagagagtaattgaaagcatttygcctcctagaataatatggagacagaagatggggaagagcacactttaatattctttctttagcgcttgtgttgctcttgcagttggctatattttgctagatgctgtgcaaagacaaaagccagcaccaacctctcccattccatgtggcaacccaagaggcgtaggtgtacatgcaaggacccataggggcactgagggaacatactgagggaatcatgaggatacacgtatgtgaacaacaggaacacacgtgctacagtggcacaagagcgcagagaaaaatacttaaatgtcatc

SEQ ID NO: 11580 - DNA, 599 bp, Chicken  19866894214502_1
  misc_feature (1)..(94): n is any nucleotide
nnnnnnnnnnnnnnnnnnnnnnnnnnnnnnnnnnnnnnnnnnnnnnnnnnnnnnnnnnnnnnnnnnnnnnnnnnnnnnnnnnnnnnnnnnnnnntaggctacctagctaaaataagatcaaggaaataacaagctaggtagattggtatttttcagaattactttacaaaacaactgccagcaaggaaagtgtgaaaggatggaagtagtaatattaaagaaaagaaaatcaggctaagccttgtgtgcattatgtgcgtttcacaattagtcatctactaaatagcattcatcgacttsgtacaatattttctaaaggttggtcggatttctatcagaacagatatgctccaaaagagtaatgaagaaaactacagctctgtctaaaaatataattccacttactggcacttactccatacagaattgtgtctgacaattctgttgcagtgccaacaaacaaggtaaagtcagttttttctcatatctaggaccaaatgcagtttttggtaggttacacagttgatgcattgtacacttggaaggcacatgcatgttacatttccaaagaaattcatgaatttgaataaacgaatgag

SEQ ID NO: 11581 - DNA, 600 bp, Chicken  19866894214504_1
ttaaatttagattatcgacagtagatacctagtgttgatgacctttgctacttcgtccccacttttttctttccctctttagaattccctatttgatctatcttcagagacgctgctgtacagggtctcttctcaatagaaatggcctttccatcctatgtgggagctatagcagaacattaattctattactttgttttgccaagtaaaagagtaagggatgtttctcatacacttgaaaaaacttttaagaaatagacgagcaattgaagaaaacgagcttgctgtggagaaagctgytgtatcagttaccttgggatgtgttcagagtgcaagatatcatcttcgattgtagcagctgtgatccacttaagatcaaaaaagtcagttcaagacttagttgtgagaaatacaggcaatgactgtgctactggtggtaagtaaattatgtggttactttgtcaactgtcttgcaacagcaaatagtatttagcatgggcaagttgttgctgcttcaaggctgtcccttccagtatagctgtgtcagttgtgttcttggggggaccagatggttccagttctccaggacctgtggtttgg

SEQ ID NO: 11582 - DNA, 600 bp, Chicken  19866894214509_1
agataagaaatgtaccaaattgctagcaggtatacaacagcgttgctagtggctcaataataaattaaataatacacttaacagaattgcttttcccaccaagaattactgccccatcttcacctctgatgcccatactgtaatttcttgctaattatattcaattttcatcttgatttgctgaaactgtcactgactggtttactacagattcataagaaaaaagcttccttttacttttttttttccattctgctcccattttttctgttacagcagtagttgtcatccacttggaargtttacatgtaattttcactcatgattctagaatgatgtttgcttgtacacctsaaacataagtaytgaacagaaaacttcttgtaggttgtgggtttcaacattacaacattgccttactctgaagataccacagtatgtgttttttaaaatctgtaccagttgacttttggatctgaataawtctttagaatgagtgcttccatttctctacagcaagaatgccatcacagtacctttctgaaactacccacccaattccttcccgaggaacacctgtttttgactaagtatgcattt

SEQ ID NO: 11583 - DNA, 600 bp, Chicken  19866894214509_2
caataataaattaaataatacacttaacagaattgcttttcccaccaagaattactgccccatcttcacctctgatgcccatactgtaatttcttgctaattatattcaattttcatcttgatttgctgaaactgtcactgactggtttactacagattcataagaaaaaagcttccttttacttttttttttccattctgctcccattttttctgttacagcagtagttgtcatccacttggaargtttacatgtaattttcactcatgattctagaatgatgtttgcttgtacacctsaaacataagtaytgaacagaaaacttcttgtaggttgtgggtttcaacattacaacattgccttactctgaagataccacagtatgtgttttttaaaatctgtaccagttgacttttggatctgaataawtctttagaatgagtgcttccatttctctacagcaagaatgccatcacagtacctttctgaaactacccacccaattccttcccgaggaacacctgtttttgactaagtatgcattttgccattccaagggtcatcggtgtatgtgtggtccttacatgtatctgcagtac

SEQ ID NO: 11584 - DNA, 600 bp, Chicken  19866894214509_3
aaataatacacttaacagaattgcttttcccaccaagaattactgccccatcttcacctctgatgcccatactgtaatttcttgctaattatattcaattttcatcttgatttgctgaaactgtcactgactggtttactacagattcataagaaaaaagcttccttttacttttttttttccattctgctcccattttttctgttacagcagtagttgtcatccacttggaargtttacatgtaattttcactcatgattctagaatgatgtttgcttgtacacctsaaacataagtaytgaacagaaaacttcttgtaggttgtgggtttcaacattacaacattgccttactctgaagataccacagtatgtgttttttaaaatctgtaccagttgacttttggatctgaataawtctttagaatgagtgcttccatttctctacagcaagaatgccatcacagtacctttctgaaactacccacccaattccttcccgaggaacacctgtttttgactaagtatgcattttgccattccaagggtcatcggtgtatgtgtggtccttacatgtatctgcagtacagctccatgtag

SEQ ID NO: 11585 - DNA, 600 bp, Chicken  19866894214509_4
aactgtcactgactggtttactacagattcataagaaaaaagcttccttttacttttttttttccattctgctcccattttttctgttacagcagtagttgtcatccacttggaargtttacatgtaattttcactcatgattctagaatgatgtttgcttgtacacctsaaacataagtaytgaacagaaaacttcttgtaggttgtgggtttcaacattacaacattgccttactctgaagataccacagtatgtgttttttaaaatctgtaccagttgacttttggatctgaataawtctttagaatgagtgcttccatttctctacagcaagaatgccatcacagtacctttctgaaactacccacccaattccttcccgaggaacacctgtttttgactaagtatgcattttgccattccaagggtcatcggtgtatgtgtggtccttacatgtatctgcagtacagctccatgtagaccattatgttgtaaagatgattttccatcttctaataaacagtttaggtggtgaacttttcagtactgtattagtttatcattgcttctgttattccctgaaataatatattttaat

SEQ ID NO: 11586 - DNA, 600 bp, Chicken  19866894214509_5
taacaaagtacttaaaatgctacctctccctttcactttcaaatatttctcagtccattgcttgaacaggttttgctcagcatatattccagttgaataattaggaaatttaatggaattgttacttgagttaatttgaaacatatgtaactttccactccaaatttgaatgacctgatttttcagaatatctttggaaagctgggcttctgggttcttagactatcttctaaaacaagagttggtattttccaaataaaaggaagtaatatgagcagatgaagatggtctgtgaagatragctctggtacactttgacttgatctatacatgaataagcttatcctctaaatgttagatggagttattatgatgtgatggttgctgaggtagagaaatagctgcrtaactgactagcattagctattgtaaatgctctaataaatccaagacaaatccagctgtagtgtaggagcttcttgggctacagggtacaggctgattacacaggacccatttggggaaactagcaccatttaattatttttgacccactcacaaagtggatggaagctgttcccatgaaaagagccatcacac

SEQ ID NO: 11587 - DNA, 600 bp, Chicken  19866894214509_6
aatttaatggaattgttacttgagttaatttgaaacatatgtaactttccactccaaatttgaatgacctgatttttcagaatatctttggaaagctgggcttctgggttcttagactatcttctaaaacaagagttggtattttccaaataaaaggaagtaatatgagcagatgaagatggtctgtgaagatragctctggtacactttgacttgatctatacatgaataagcttatcctctaaatgttagatggagttattatgatgtgatggttgctgaggtagagaaatagctgcrtaactgactagcattagctattgtaaatgctctaataaatccaagacaaatccagctgtagtgtaggagcttcttgggctacagggtacaggctgattacacaggacccatttggggaaactagcaccatttaattatttttgacccactcacaaagtggatggaagctgttcccatgaaaagagccatcacacagttaactgcaatgcaattatataatgtggcatgcaccccaaagttctggacaaatggagtgtaccaacagaatgaccaacagagctctctgaaaattagtaaaag

SEQ ID NO: 11588 - DNA, 600 bp, Chicken  19866894214518_1
tcaactatgcatgtgtacatctaccacaaatctttaactactgaataggtaaaataacatcttacctatgcactataaataatgctgttttccatttttaaactttgtgcacatgtattccttcaaaagtcatgctgtcataattttggacttcaatcttgaaaacatttatatatgtgctttagtttcagacacctaaatagaactggcgtaagtactattcccatataacacttggaaaaatctgtgcaggataagtcttgttgatgaatatttgaaagagtattgaaactatatttyacaaatttccatcctgcttgctttactcaatatccatgaattattatttatcagaatatatttttacatattacaccatagrtttgagaamaagcaaatacttttccaaattatcttttttattactataattacttagcaatattaatgctttcattgttgagttggagcatatgctacactttaggcatttggctaaagaaaactgcagattgtcacattttctttgtaggaactgtatttatcactcagcaaaattactattatgtatctttttctatccagaatattcagaatatt

SEQ ID NO: 11589 - DNA, 600 bp, Chicken  19866894214518_2
tgctgttttccatttttaaactttgtgcacatgtattccttcaaaagtcatgctgtcataattttggacttcaatcttgaaaacatttatatatgtgctttagtttcagacacctaaatagaactggcgtaagtactattcccatataacacttggaaaaatctgtgcaggataagtcttgttgatgaatatttgaaagagtattgaaactatatttyacaaatttccatcctgcttgctttactcaatatccatgaattattatttatcagaatatatttttacatattacaccatagrtttgagaamaagcaaatacttttccaaattatcttttttattactataattacttagcaatattaatgctttcattgttgagttggagcatatgctacactttaggcatttggctaaagaaaactgcagattgtcacattttctttgtaggaactgtatttatcactcagcaaaattactattatgtatctttttctatccagaatattcagaatattactttcagatattgaattgtccatgaatggcctaggacagaccttgctagcctatgtttactattttcatgctggcattgct

SEQ ID NO: 11590 - DNA, 600 bp, Chicken  19866894214518_3
ccatttttaaactttgtgcacatgtattccttcaaaagtcatgctgtcataattttggacttcaatcttgaaaacatttatatatgtgctttagtttcagacacctaaatagaactggcgtaagtactattcccatataacacttggaaaaatctgtgcaggataagtcttgttgatgaatatttgaaagagtattgaaactatatttyacaaatttccatcctgcttgctttactcaatatccatgaattattatttatcagaatatatttttacatattacaccatagrtttgagaamaagcaaatacttttccaaattatcttttttattactataattacttagcaatattaatgctttcattgttgagttggagcatatgctacactttaggcatttggctaaagaaaactgcagattgtcacattttctttgtaggaactgtatttatcactcagcaaaattactattatgtatctttttctatccagaatattcagaatattactttcagatattgaattgtccatgaatggcctaggacagaccttgctagcctatgtttactattttcatgctggcattgctttagttatt

SEQ ID NO: 11591 - DNA, 600 bp, Chicken  19866894214520_1
tcctattcagttagctgaatttcagttcagccatctgcctgcagcccttatgcttccctttcaagacctgcagcagccaaagatttgccttctgaattcctgtcacttatgccacccatggataggtcttagtgaaaccacctcttttcttcatgcacttttgtcacatcaatgctaccttttaaaaagttatctagttttggtagatgaagcaactttgtctgctgaccaaaaactaaactcagctgcagtactgatttccctgtagcaggaacaccttgatctgaaatctaataagayagaatgttttatttttcactcccttttgcacagtgttttccagttactcatttttacttcagagcactgttttatatttcgaaggatattcatatataattggcacaggctgcccagggaggtggtggagtsaccatccctggaggtgttaagaactgtggagatgtggcactgagagacacggtcagtgggcatggtgggtgtggttgatggttggactagatgatcttagaggtcttttacaaccttaatgattcratttggtttcatcatttctcttttatccaatttatataactg

SEQ ID NO: 11592 - DNA, 600 bp, Chicken  19866894214520_2
tgaaaccacctcttttcttcatgcacttttgtcacatcaatgctaccttttaaaaagttatctagttttggtagatgaagcaactttgtctgctgaccaaaaactaaactcagctgcagtactgatttccctgtagcaggaacaccttgatctgaaatctaataagayagaatgttttatttttcactcccttttgcacagtgttttccagttactcatttttacttcagagcactgttttatatttcgaaggatattcatatataattggcacaggctgcccagggaggtggtggagtsaccatccctggaggtgttaagaactgtggagatgtggcactgagagacacggtcagtgggcatggtgggtgtggttgatggttggactagatgatcttagaggtcttttacaaccttaatgattcratttggtttcatcatttctcttttatccaatttatataactggggttagtcacatcagaacagcactctcccagatgcaaaagcagttatattactaatctgtttgtactggtacatgttttaaccttgaccaggaatggtatgcatagatcaacactgtgccagactgcctac

SEQ ID NO: 11593 - DNA, 600 bp, Chicken  19866894214520_3
ttccctgtagcaggaacaccttgatctgaaatctaataagayagaatgttttatttttcactcccttttgcacagtgttttccagttactcatttttacttcagagcactgttttatatttcgaaggatattcatatataattggcacaggctgcccagggaggtggtggagtsaccatccctggaggtgttaagaactgtggagatgtggcactgagagacacggtcagtgggcatggtgggtgtggttgatggttggactagatgatcttagaggtcttttacaaccttaatgattcratttggtttcatcatttctcttttatccaatttatataactggggttagtcacatcagaacagcactctcccagatgcaaaagcagttatattactaatctgtttgtactggtacatgttttaaccttgaccaggaatggtatgcatagatcaacactgtgccagactgcctactaataacttaatatggatgctgaggtatagctgaagagattacagactgaaatattcttcactttttcagcttctctgtgcaacctgttccagtgccttaccaccctctgagtaaagagtttcttc

SEQ ID NO: 11594 - DNA, 600 bp, Chicken  19866894214530_1
acagatgccaaatctaaatactacaactatgagtcaatcatctcacttcataagcaagcagaccaagagcccctttgagctctcctagctcttcagctagctgcatatcaggatgagtaggaatgcttctcaaggttatttatgtttgtgcagagaccccttacacctagacatggtgatgcctttctgacacagatcctcagtaagtgatttatagttttaagctgtactactttcaattttagatcaattgtgcaaccccatcctctgtgtagcaaattgtcaacagtagccattttwaaccttgttaaagtcactgtcttcactgtttaaattactatattatatctattttatatcaataagtatcttcctgcttctcttctgattgaaatgtatactgctgtagtttccacctgtgatgatgtcactgctgcaggtccttcatctctgatggcaatattttctgatggcaggcaaccacactacttttttaagttgtaagcttttttttttttttttttttgcaaagagccatggaaactgaaaaaattgctcatgtattagactaaattcaagaaatgaagtttcagacaagaa

SEQ ID NO: 11595 - DNA, 600 bp, Chicken  19866894214531_1
ttcaaaaatcagcaaatgtcctctaatctgacatcaaaatagcttttccagctcaggaaaatggaaagttgtgattatttcccctttacttagggatacatacatatcctgtttcattaagacttattaaaactgtgcgtttattttacagcactgcaaatataagcatgtcttcggttaaacaatataaagaatactcttgagattcaactacagcaacgtcctgaaaaatatatgtcagataggaaaatattgtaataaaaatgcagaacatgttgaagactgtttccacaaatatgktattgtaaatatgctccagtraataacagctayatattcacgtactacatgttcaaaatcagagggttgggcaaggaaagatgataaaraacaaaatcaaaccaacctaaaaaaaccccaccaacagcattatccacaccacaactctaatatgttattttacaagaactcggtctttaccatggacactttkgtacaccaatacaaaatgtattgtatcatcctttcaaaaaaactcaaatagattaatttaaaagaatggcttaattgttaaagcaataccagaagggtctgaaaaat

SEQ ID NO: 11596 - DNA, 600 bp, Chicken  19866894214531_2
tctaatctgacatcaaaatagcttttccagctcaggaaaatggaaagttgtgattatttcccctttacttagggatacatacatatcctgtttcattaagacttattaaaactgtgcgtttattttacagcactgcaaatataagcatgtcttcggttaaacaatataaagaatactcttgagattcaactacagcaacgtcctgaaaaatatatgtcagataggaaaatattgtaataaaaatgcagaacatgttgaagactgtttccacaaatatgktattgtaaatatgctccagtraataacagctayatattcacgtactacatgttcaaaatcagagggttgggcaaggaaagatgataaaraacaaaatcaaaccaacctaaaaaaaccccaccaacagcattatccacaccacaactctaatatgttattttacaagaactcggtctttaccatggacactttkgtacaccaatacaaaatgtattgtatcatcctttcaaaaaaactcaaatagattaatttaaaagaatggcttaattgttaaagcaataccagaagggtctgaaaaatacaaggtctaatccgtgtaga

SEQ ID NO: 11597 - DNA, 600 bp, Chicken  19866894214531_3
tcaaaatagcttttccagctcaggaaaatggaaagttgtgattatttcccctttacttagggatacatacatatcctgtttcattaagacttattaaaactgtgcgtttattttacagcactgcaaatataagcatgtcttcggttaaacaatataaagaatactcttgagattcaactacagcaacgtcctgaaaaatatatgtcagataggaaaatattgtaataaaaatgcagaacatgttgaagactgtttccacaaatatgktattgtaaatatgctccagtraataacagctayatattcacgtactacatgttcaaaatcagagggttgggcaaggaaagatgataaaraacaaaatcaaaccaacctaaaaaaaccccaccaacagcattatccacaccacaactctaatatgttattttacaagaactcggtctttaccatggacactttkgtacaccaatacaaaatgtattgtatcatcctttcaaaaaaactcaaatagattaatttaaaagaatggcttaattgttaaagcaataccagaagggtctgaaaaatacaaggtctaatccgtgtagatacaaaattgaa

SEQ ID NO: 11598 - DNA, 600 bp, Chicken  19866894214531_4
ttagggatacatacatatcctgtttcattaagacttattaaaactgtgcgtttattttacagcactgcaaatataagcatgtcttcggttaaacaatataaagaatactcttgagattcaactacagcaacgtcctgaaaaatatatgtcagataggaaaatattgtaataaaaatgcagaacatgttgaagactgtttccacaaatatgktattgtaaatatgctccagtraataacagctayatattcacgtactacatgttcaaaatcagagggttgggcaaggaaagatgataaaraacaaaatcaaaccaacctaaaaaaaccccaccaacagcattatccacaccacaactctaatatgttattttacaagaactcggtctttaccatggacactttkgtacaccaatacaaaatgtattgtatcatcctttcaaaaaaactcaaatagattaatttaaaagaatggcttaattgttaaagcaataccagaagggtctgaaaaatacaaggtctaatccgtgtagatacaaaattgaagtaatagggcacttgagaatgcaatcaataaaacttctaaataatgcaatacgaag

SEQ ID NO: 11599 - DNA, 600 bp, Chicken  19866894214531_5
atactcttgagattcaactacagcaacgtcctgaaaaatatatgtcagataggaaaatattgtaataaaaatgcagaacatgttgaagactgtttccacaaatatgktattgtaaatatgctccagtraataacagctayatattcacgtactacatgttcaaaatcagagggttgggcaaggaaagatgataaaraacaaaatcaaaccaacctaaaaaaaccccaccaacagcattatccacaccacaactctaatatgttattttacaagaactcggtctttaccatggacactttkgtacaccaatacaaaatgtattgtatcatcctttcaaaaaaactcaaatagattaatttaaaagaatggcttaattgttaaagcaataccagaagggtctgaaaaatacaaggtctaatccgtgtagatacaaaattgaagtaatagggcacttgagaatgcaatcaataaaacttctaaataatgcaatacgaagcaagatatctgaagtctcaaaaagcaataatggaacaatgctttgctgcattcaagataacttagaattgtattgatgatggcatgccaactgggaaacgttca

SEQ ID NO: 11600 - DNA, 600 bp, Chicken  19866894214538_1
tgcattctacctcttagtataaaagtacatcatcattatttctgtgttctctaaagaaaaattgatttttttgtgcctactgtggatgctgcaatgctattttagagtaatacttttatgcctatagcagctgattgctttgaccctaaagtccttcttgcagtggtgctgacttgcagaatcacagttcattcgtatcttcttgccagagaataataatctgaatgcaaaacttgctacagcagcaatataaaaaatgaaatcagaaaaaataaaataaaataaaataataaaaatacrttaaaaaataagtaggacctgacaagttcaagctaatgtgaatggcagagtgattttatatgccacaaattttaactattacaattcatccctgagttcacatgaaaattttctctggcttccagtgatgtttcagtgataataaggacacttgaagtcaaggaattcaaataagattcttgcactatttttaattattcccatggagtgtcaaaatagtatagaatggaaccaggcaagagctacaaagagatggaagtttccgtatctctcctaatttcagttttggagatgtaacct

SEQ ID NO: 11601 - DNA, 599 bp, Chicken  19866894214541_1
  misc_feature (1)..(193): n is any nucleotide
nnnnnnnnnnnnnnnnnnnnnnnnnnnnnnnnnnnnnnnnnnnnnnnnnnnnnnnnnnnnnnnnnnnnnnnnnnnnnnnnnnnnnnnnnnnnnnnnnnnnnnnnnnnnnnnnnnnnnnnnnnnnnnnnnnnnnnnnnnnnnnnnnnnnnnnnnnnnnnnnnnnnnnnnnnnnnnnnnnnnnnnnnnnnnnnnnaacagtgaccttccagcagccctgtggccctcactgctcacctttcccttctctctggttttggcagagcttgctggcagcccatctcaggtcagtaatcctgctasgggcaggcagcagccagcctgctgctaatccaattactcagtgcaagacctgggggtacaacacttgtgaaataaggggccatttccattatttaattaccagtcactttaacctgcctgaagaatattaaaaatgccaaggtaattatgacactttagacggcaggtcagtggcgtgctccaccggccccaaggaccatcatttccttttgcacagaaatagggatccagaatctgtacaaagtgcatcagctcagcttctcccagcaggacacaggggtataaggaaggccatggtg

SEQ ID NO: 11602 - DNA, 600 bp, Chicken  19866894214541_2
caaggtaattatgacactttagacggcaggtcagtggcgtgctccaccggccccaaggaccatcatttccttttgcacagaaatagggatccagaatctgtacaaagtgcatcagctcagcttctcccagcaggacacaggggtataaggaaggccatggtgctcatgggccatgggctggatccagctaccaggtacttgcactgttagtgctttttcctcagagaagataggaattgcaacgtgcaactacagcaaccaggtgcttggtccggtgcttgcaaaccactgagcacagcratcttgagagacagcagtgttagaatgtacttccaggcagagtacattcccatttaagaagatattcttttccttttttgagagatgcaaataagactccaattgttaataagcattttattctgccagaggtggtgaggatttatgtattattaaaatggctgcatatgctgtttgcagcactgccagctcaagctttatccggtatttttccccaaacttttgctgctttgagaaaagttcttggatggatgacagtctcatctctgcatactggagctggagaacagactgtacgaa

SEQ ID NO: 11603 - DNA, 600 bp, Chicken  19866894214546_1
ttgaagcctttatcatgcaagccatgcaccctgctctgaggcccacagatgatgctttgcatgggtcagacgtggggatgatttacagctgctgcaggatggaatgccacaaagcctagagggaatagcaaacctcgctagctaggataattcatcactcctgtctctttgttagtctctaattttaaaagtcggtttccttcaagagccatcattacattttcagtcctaaaacctttcagtttctctggggaaacaaacgaggaagggaaaaaaaagaagaaaacttttcaaagctcrggaggaaataatgggtttagtctgacagtttccttgtaggagatgggttggtaaaggatttccaagaacagactcacgtcagcccgtgttttgtgtgcagcagcattcctgggaaatttacacacctgtcacctaatcgctgcttcctttgtaaaacagaaatgacaaacccaagtcatttgctcgcactgtctattttttcttttctttatcttcttgcagcaaagtgcctgacacctctttgaaaagaaatagcagatttcctccccactctgggattcagcacaggctgcactttac

SEQ ID NO: 11604 - DNA, 600 bp, Chicken  19866894214546_2
ctaatcgctgcttcctttgtaaaacagaaatgacaaacccaagtcatttgctcgcactgtctattttttcttttctttatcttcttgcagcaaagtgcctgacacctctttgaaaagaaatagcagatttcctccccactctgggattcagcacaggctgcactttacaagctgcaagcaaagcaggtttccttcgagtcgtcgtggtgtcagacgatgcaatgtattattaaagccaacttcctgaacactcaggtgccagatggccaaactatgtgtgtgcagtccaggagcagagcwaggatgggcttgcgacatgcccctggtgttgtcacaacctatctcattagcaatgtcttccgtcgctttggtttttaagcagtggaagcctgctggccatttgagtcctagcacatctaaatgctccgcaggtctccgtcagagtgcacaaacattcccatggatgctggttaattcttgcaaagctgaagtcgtccttagctgagcggtgggaatgcaactggggccggaccttaatattcgcctcctgttcctcggcaccagtcacaaagccatgagaaaacaaacaaagaagcaatg

SEQ ID NO: 11605 - DNA, 600 bp, Chicken  19866894214546_3
tgagtcctagcacatctaaatgctccgcaggtctccgtcagagtgcacaaacattcccatggatgctggttaattcttgcaaagctgaagtcgtccttagctgagcggtgggaatgcaactggggccggaccttaatattcgcctcctgttcctcggcaccagtcacaaagccatgagaaaacaaacaaagaagcaatgctcacaaagagacggcattcccaaggcctttgcaggcttctcggctagagtcagaaaatgagctttggagcagtttgtcaaacaatgaaaagagaggcaarctgaggagagaaatttcctgtatctccagagcgcagggcagttctgctagcatacatttcttaatattttcttctctgtgtgcttctcattggcacgttctatgctttaatacatttcccattgctttgcagttggggatttttgaagaccagacaacgttcaagctggcagggcaacaaggacttgaaaattatatgggatgtggcttgggcagaatttagcctgatgacattgtggctgcattgcaacagcggcctccaaatcacctacaggccagaatgcctgctgcatgcacagtt

SEQ ID NO: 11606 - DNA, 550 bp, Chicken  19866894214546_4
agacaacgttcaagctggcagggcaacaaggacttgaaaattatatgggatgtggcttgggcagaatttagcctgatgacattgtggctgcattgcaacagcggcctccaaatcacctacaggccagaatgcctgctgcatgcacagttccagagaactgtgccatggtcaacccggggacatgtggggtgggggcaggtacagctgcaatgggactgaggggagacggtcccatgggctggagttcctacactgcatgcaactgcacgagtgtaccctcaggggacgatgcaccgccayggtgggctcacaaagagcaccccagtgcttcacgttgactgagggcttcctgcattttccccaaagaaaggatggaaagatgccctccctgcgaggaagtccccagaacgctcctacaggttctctctgtatttccctcagagaagcaaaaatcaagctgagattctcatccatactgaggggtaatgagattccccatgggagggaggaataaggagaacctcagccattacacaggtcatcgcaccgg

SEQ ID NO: 11607 - DNA, 600 bp, Chicken  19866894214551_1
tgtaagaagattcattaatgaatttccttaaaggctactgaatacaagaagactcagttctgtgaattgtaggtcttgaataagatgttatgtggagattatccttttctacctgttgttcatttgtatttcagtattataatacatactatataatacagcttaattactaaataacctaccataatttgatgcatatcattagaagcctgtgtagtcttggaagtcagatatgcagcatgctttacctttgtattttaaaagaacgatagaaaatgatagaaatgatagaaagaagartgcataatttggtgaacaggtatatggaagggtcagcgatagataggaaggtgagtcagccagccggtcctgtagctgaatctagccaggacatttgctgctttgctgtgtttattaaaaaagaaaatgcttatgtaagccatattggcagagtgcttgatggcagctattgtgggtatgctggcagaagttgttgggctgtaaaaggtttttatatggggactgcaagcagcaggctggacagtggggcctcttgaagtcccctcctagccaaattgtggcatgactctgggactttgt

SEQ ID NO: 11608 - DNA, 534 bp, Chicken  19866894214556_1
gggctcgtgggcagtgcgctgcctcgcacagagctcctcaggcagacctggaagatcacagagctgtctggctcatgcagggcgctctgattcttggtctcccggagccccattcagcacccggccctcagcactgacatgaatgagggtttgttcctgcctggagcccacttacacacagctgtttcctatttccaggagctggggaaatacggcctgctctactacaatgcactgttcatgatccttcccaccctgaccattgcctacttcactggagacgcgcagaaggtaggagcmctgccccagagcacagtctgcagtgacagagcactgcctggagcagcacgttactgttctaaggcacttctctgcagctcagccttgcacagagcagcaaacgctccatgtgtgaaaccatggagtagctccctatccccaacctgcacagtgccacgtggcagcacagagggctctggggccacgtttttggggtagagaggggaaatcgcctgatagaaagtaactgcaatg

SEQ ID NO: 11609 - DNA, 600 bp, Chicken  19866894214578_1
tcacatatggtaaataagccccctcctatctggcagagaggctcgcagagacaggcacatggctgttaccctcatcttttcaaaacgttcctggtttctcagggtttcctgatctctaaactattccctgaactttcactcccagaccatgacttgcagctctgggaacactctaagcccttcatcacaataagctgttcagtttacttgatgttttttgcctgcagatctttcttcccttctttccacttagtgattgctccatggctgtatctttgtttgtcctgaaccacatttcawgacataactttaactaccctagtgaaaaaaacatttcctagagaaattatatagggaaaaaagtcctacttttctgccacctagaatataagtagtgacagaatctaaatggttctttgccattgattcaacccatacgatgttatacataacattttctctatattggaaagtggattagtttgcttcagccgtaataaaggaatttgcacaggtcaatttgtgagtacagtgcaaatgattacaaatctatatacattcccaacttcagcactcagtagagtattcagtaatgatcct

SEQ ID NO: 11610 - DNA, 600 bp, Chicken  19866894214583_1
cccaagttaaaatgacagcataaataaatcaaccagatggtttcatttcagctcaaggtttttaaaagtctattaccctcatgtatttgcagagaaaatgtctactggagacacaagatagcactcaaaatgtataagactggcagcagtgggctgatggagcttccagtttgtgatacaactgatacacaagtatttgtattagatgttagggataaagacgacacattctggtgtagtttgaaactgaaaaaaatatatagtacatattctctcaaattaaggtgcagttaaacttgytcacgaagctatatgtgcatcagacacaatcttttaaatacaaattcagaaaaaaaaaaagagagagagagatgcattttagaaattatatgcaggattgtgaacaggcttataaccaatgagataaagtatctaataggcagttcaatttatgggcctgttgtgagccaaccttatatttaatttttattgtgataagtagtgctcaagtggatgagacatctgcacatagatgaagtttaatttgggaaattaacagtgttgaagaattataatcaaaagattttctgcctgtgtgaa

SEQ ID NO: 11611 - DNA, 599 bp, Chicken  19866894214586_1
  misc_feature (1)..(101): n is any nucleotide
nnnnnnnnnnnnnnnnnnnnnnnnnnnnnnnnnnnnnnnnnnnnnnnnnnnnnnnnnnnnnnnnnnnnnnnnnnnnnnnnnnnnnnnnnnnnnnnnnnnnnctgcattctgtcttgtggcaacaaaatttaatggaacatttttgggaaggttcaatctttactgccatggcactgacaactgcctctgatatctttggccaacacaataaaaaaggaggaattacttcagaggtcagaaaagagcaaatacggttttgtgtgtatctagaagaaggtcctttttttttttttttaaggyttttttttttttttagttttctctttttttacaggcacaagaagttaaaaagaatgttgcagaagttttaagtgttggacagacacttcacgtgacggtcaagttttgtaaatggttctaaacattctggcctgtgcatttcacatttcttcagtcaccgtattgagatactgtctctaaatctcttgagagtgctgcagcttggggtcactgaagctctgctctaggcctataataagctacaaaatgacaggcacttctgggggtgagtttatgtagtatgtgctcactgctgccct

SEQ ID NO: 11612 - DNA, 599 bp, Chicken  19866894214586_2
  misc_feature (1)..(100): n is any nucleotide
nnnnnnnnnnnnnnnnnnnnnnnnnnnnnnnnnnnnnnnnnnnnnnnnnnnnnnnnnnnnnnnnnnnnnnnnnnnnnnnnnnnnnnnnnnnnnnnnnnnnctgcattctgtcttgtggcaacaaaatttaatggaacatttttgggaaggttcaatctttactgccatggcactgacaactgcctctgatatctttggccaacacaataaaaaaggaggaattacttcagaggtcagaaaagagcaaatacggttttgtgtgtatctagaagaaggtcctttttttttttttttaaggtytttttttttttttagttttctctttttttacaggcacaagaagttaaaaagaatgttgcagaagttttaagtgttggacagacacttcacgtgacggtcaagttttgtaaatggttctaaacattctggcctgtgcatttcacatttcttcagtcaccgtattgagatactgtctctaaatctcttgagagtgctgcagcttggggtcactgaagctctgctctaggcctataataagctacaaaatgacaggcacttctgggggtgagtttatgtagtatgtgctcactgctgccctg

SEQ ID NO: 11613 - DNA, 600 bp, Chicken  19866894214586_3
ttctctactgctgggctcccattataagttacaacagttttgggggtcttatgggtgtcctgttctcctgctccctgaatcacctctagtccaagtcaagacagacccagcaatttttgctgttaactgatatgtgttgcctgtatagtaaagcgtttagttccaggtttctgtaaatcaaaattcccagtgcagcctggtatagaaaaaaaatgtttttcattcaaaagaatgcctagcttttgctgtagtaaagagtggcccttttggtgaccctgttttttttttgtttttaatatragagattcttccagatggatgtttgcagtatattttgaagaatgttgtggtgaaaatgttctactgatgatgaccgtttttttgccatactgagctagaaatatgaaagtttaattcctgtcagtgaagaattgctcatagcagcrctcacaaggttatgcaagtgagtaactatttgctattgtcaataagggctttacagcctgcctctctgggaattgagaaactcgttctctctagggtgttccaacctgagcctttttataatcatttaaaagacaattcaagtgataaaatctg

SEQ ID NO: 11614 - DNA, 600 bp, Chicken  19866894214586_4
agtaaagcgtttagttccaggtttctgtaaatcaaaattcccagtgcagcctggtatagaaaaaaaatgtttttcattcaaaagaatgcctagcttttgctgtagtaaagagtggcccttttggtgaccctgttttttttttgtttttaatatragagattcttccagatggatgtttgcagtatattttgaagaatgttgtggtgaaaatgttctactgatgatgaccgtttttttgccatactgagctagaaatatgaaagtttaattcctgtcagtgaagaattgctcatagcagcrctcacaaggttatgcaagtgagtaactatttgctattgtcaataagggctttacagcctgcctctctgggaattgagaaactcgttctctctagggtgttccaacctgagcctttttataatcatttaaaagacaattcaagtgataaaatctgttatttattttggagaaaacatgttttaaagcatcaaaactgcttcattatttgaaaatatatttagaaagcatactcgctttccatagagctcagaagacaaatttcaagtaacaaaagacttcgtagcaggtggtggataaaca

SEQ ID NO: 11615 - DNA, 600 bp, Chicken  19866894214587_1
ctttcccataatggaaacccagtgctatgccatgctcatggcacactgggatattttcagcaacactgtgatgctctgctgcattttcacacatgcataagggagagtgtacattggcagtgtgcaagtggaaaagcagaacagaacaagagcaaggagctacacaaaatcctgcatgctgaattctaccaggccttgtttacgttgggatttggggcagtagcatgattgaagaagttgagtttatggctgataacacatattaacagctaggaaatattggcaactggtaagagaatwtgaggatatcaacagcaaatcaatagctggggggaagtacggacaataagatgtcctaataacaagrctagtgtaaaaatataagaaacaaatggaacctttaggatatgcatgataccaaataaggctaataaaattggtgattgtggttttggaaaatatgaaaagtttcataaatattcatttttaatagaaagaagtcagattttatattcatgtcttagtgtaatgaggaaatacttttgattttaagagtgactaggaggcatattaaacagcaactattaaagttaaacatac

SEQ ID NO: 11616 - DNA, 600 bp, Chicken  19866894214587_2
gtgatgctctgctgcattttcacacatgcataagggagagtgtacattggcagtgtgcaagtggaaaagcagaacagaacaagagcaaggagctacacaaaatcctgcatgctgaattctaccaggccttgtttacgttgggatttggggcagtagcatgattgaagaagttgagtttatggctgataacacatattaacagctaggaaatattggcaactggtaagagaatwtgaggatatcaacagcaaatcaatagctggggggaagtacggacaataagatgtcctaataacaagrctagtgtaaaaatataagaaacaaatggaacctttaggatatgcatgataccaaataaggctaataaaattggtgattgtggttttggaaaatatgaaaagtttcataaatattcatttttaatagaaagaagtcagattttatattcatgtcttagtgtaatgaggaaatacttttgattttaagagtgactaggaggcatattaaacagcaactattaaagttaaacatacttatattagcaggctatataactagctcctaagagtattaaagaaataactgaaaggctctctaaac

SEQ ID NO: 11617 - DNA, 600 bp, Chicken  19866894214591_1
catgaagtatttactcacaactgtttattatgttgtgaataatttatggtgctaaggtttgtctgtaacttgttttccaatcgttgagctaaagtccacactacatttttttttttttcatttaatagaacaactgtccacatagcagctacaaatacttaaattaaaaaaaagtttgttactgacaggtacttgcacatgaaaagcatgctatctttcccaataaaacttcacaattttgtctgcattaaaataaaccacttatttatagtaaaacaagacttgctttaaaaaaaaaaragagagagagaagaaaagaaaaagaaaggtcacataaccagatgtattttgcagtacaagagcttcatttaaatttggggctaggatattgtctgttacccgcatagtcttaacattataaatactacagacaaggatactgtaataatacacagcattggggtactaaatcacttatttgagattaagattcctaaaaatatagtccaagttgctaactaattcgaacaaaaccagcaagtgtgacagaatgccatagtgaagccccctctctcagttgatagtaaggtttctaagaag

SEQ ID NO: 11618 - DNA, 599 bp, Chicken  19866894214592_1
  misc_feature (1)..(63): n is any nucleotide
nnnnnnnnnnnnnnnnnnnnnnnnnnnnnnnnnnnnnnnnnnnnnnnnnnnnnnnnnnnnnnntagacacagacgggaaaagttattaaaagctccagcttcttttgcactgcttgctcattcccccttctgagatgctgacacctctgctttctggaaccaaggtaactgtgacatgagagagatgcatatctttgtaactgtttggttttggtgtaatttttttaataaaagccacctactattttaacaaacattttcaacctaaaataatattattctagggaggtggctattaawgatcaatgatcattatcaatcatacaatgatcaaaataatgatcaaaatatttctgctctgactctcttgaccaaatatgaccccattccagaacctttataaagataaaggaaatatatacataatatatatactatatatatatacatatatacmaatcttttcatggggtttcattctgtccagaatcaaaaatgatyggaggtttgtggtcagtggctctatggaggggccattggtggaggaaccatggtggtggccagtcatgaagtgtcccctaagtgtctgtcttgacacc

SEQ ID NO: 11619 - DNA, 600 bp, Chicken  19866894214592_2
aaccaaggtaactgtgacatgagagagatgcatatctttgtaactgtttggttttggtgtaatttttttaataaaagccacctactattttaacaaacattttcaacctaaaataatattattctagggaggtggctattaawgatcaatgatcattatcaatcatacaatgatcaaaataatgatcaaaatatttctgctctgactctcttgaccaaatatgaccccattccagaacctttataaagataaaggaaatatatacataatatatatactatatatatatacatatatacmaatcttttcatggggtttcattctgtccagaatcaaaaatgatyggaggtttgtggtcagtggctctatggaggggccattggtggaggaaccatggtggtggccagtcatgaagtgtcccctaagtgtctgtcttgacaccagcacgcttcaatgtctttatcaacaacacagatagtkggatcaagtgtgacgatgacaccaagctgagtggtgaggttgatacaaaagaaagaagggatgccatccaaaggcaccttgacaagatcaaaaagtgggttcatgagaatctaatgatat

SEQ ID NO: 11620 - DNA, 600 bp, Chicken  19866894214592_3
tgtttggttttggtgtaatttttttaataaaagccacctactattttaacaaacattttcaacctaaaataatattattctagggaggtggctattaawgatcaatgatcattatcaatcatacaatgatcaaaataatgatcaaaatatttctgctctgactctcttgaccaaatatgaccccattccagaacctttataaagataaaggaaatatatacataatatatatactatatatatatacatatatacmaatcttttcatggggtttcattctgtccagaatcaaaaatgatyggaggtttgtggtcagtggctctatggaggggccattggtggaggaaccatggtggtggccagtcatgaagtgtcccctaagtgtctgtcttgacaccagcacgcttcaatgtctttatcaacaacacagatagtkggatcaagtgtgacgatgacaccaagctgagtggtgaggttgatacaaaagaaagaagggatgccatccaaaggcaccttgacaagatcaaaaagtgggttcatgagaatctaatgatattcaacaaggccatgtgcaaggtgttgcacttgaatcatgacaat

SEQ ID NO: 11621 - DNA, 600 bp, Chicken  19866894214592_4
aatgatcaaaatatttctgctctgactctcttgaccaaatatgaccccattccagaacctttataaagataaaggaaatatatacataatatatatactatatatatatacatatatacmaatcttttcatggggtttcattctgtccagaatcaaaaatgatyggaggtttgtggtcagtggctctatggaggggccattggtggaggaaccatggtggtggccagtcatgaagtgtcccctaagtgtctgtcttgacaccagcacgcttcaatgtctttatcaacaacacagatagtkggatcaagtgtgacgatgacaccaagctgagtggtgaggttgatacaaaagaaagaagggatgccatccaaaggcaccttgacaagatcaaaaagtgggttcatgagaatctaatgatattcaacaaggccatgtgcaaggtgttgcacttgaatcatgacaatctcagatatgcatacagactaggagaagaatgcattgagagcagctctgtggagaaggacttggggattcttgtggacgaaaagcttgatgcaagccaacagcatgggcttgcagccccagaggccaactgtatcc

SEQ ID NO: 11622 - DNA, 600 bp, Chicken  19866894214594_1
ctatcaaataacgttgttatgctttttgtaaccgttgtagtttccatggaaataaatggaagcattacttccagagcgacctacgtacatacttgtatctcattgtgttgttggcaaggtggttaaatgcagcatgatttcttctgctctttcagcagtatgttattcgatgtgaatatagatctctctacagtaagccttcctttctgaaacaattttacagtggcgtggtttcagtcaagtcctcattcctgtcacctcataaggaggacttagtgaacattgtctgcaagtctaacrgtacatgaaaaataataatttttaaaggtgccaaaatgaattcaactatttatggagatgttagataatgtgagtgaaatgcatcctgatcatggctaagtcttatacgtggcttcacagacagtgccacaactgtaaaatgtgtttcttttcttcaaaaatgtggttatatttcaaagttttttttcttcatgccctttcacaaggctgaggagacgaggacagatctatagtgtcatttaggtrtgaacagaacattgttaatgaggcaaatcctgtaaaaatgtcaatccagtgctt

SEQ ID NO: 11623 - DNA, 600 bp, Chicken  19866894214594_2
cattcctgtcacctcataaggaggacttagtgaacattgtctgcaagtctaacrgtacatgaaaaataataatttttaaaggtgccaaaatgaattcaactatttatggagatgttagataatgtgagtgaaatgcatcctgatcatggctaagtcttatacgtggcttcacagacagtgccacaactgtaaaatgtgtttcttttcttcaaaaatgtggttatatttcaaagttttttttcttcatgccctttcacaaggctgaggagacgaggacagatctatagtgtcatttaggtrtgaacagaacattgttaatgaggcaaatcctgtaaaaatgtcaatccagtgcttgagcatgtagttccacaaaaatttcttctagttatagtgatcccttagattatcatgagctgccccctcctgccctgttagccatgccactacaggtgttgcttgcagtggtgttgtgaactcttgtgactgggtgcttctcctgggttaaaggttagtattcagtttcaccgttcctgtcctcttggaactctacagacagatctgcaagaagtgtgactgctatggctggaaggaatgggaaat

SEQ ID NO: 11624 - DNA, 600 bp, Chicken  19866894214599_1
cagtttttctttccaaaaaatagatttgccacctggaattctgcagaaaatgatcactacctaacaaggagcacagtgggatgtcacaaccccataattagcacatgcacacagatatccattattcataacaaatgatttctactttaaagagcagaggccagtactctctcagtcctgaaatattaacacttcagtgggttagagatatgagtgcaattcttctcctataaacaactgtaagacaaggattggacaagttctgaattttttgcttattcttttattgttcccagatgraaaattatggcccaattatttgtgtctaatttacttgcagagcaaaacttaatgaggaaaaaataccataactttccttaagcacagtgtatttcttcacctctaggaggcaatcttgaagtttgctaaaatatattcagaagcctagttcctggaattacatggcatgcatgcaatctcaagcaagcaagtccaggaaaagacccataagttgccaagactttgcacatgtgctttgcagttcgttatagcatctgtttctgtgaatgttacaaaatgtgttcacagtaagttaaaaga

SEQ ID NO: 11625 - DNA, 600 bp, Chicken  19866894214604_1
aagagggaacggttgcttttaaaagcaagtactggcattgtgttgaaaattgattcccaaagacctggaagcacataactccctccctgacagctgctctgagcactcccaaaggcggttaccagccctgcccggctccctttcctccttcccatcagctcagcccgctgtctgacataacatctgactgccagccctggtaaaacccattctgatgctgcagaactgcaagtaaactacagaacacttatatgtacattggagtccccctgcctgctaagcacacagttcaggaccatscyttctgatttctacctcatttgttctactgaagcaattctccactttaatggtggagataagacagcctttcttcctgctcccttcactaggcagatacaaagatatgcttaaagagagttaccatttctgcatgggcatccgagctgtcaccttcagcatcatctgttggaccacagaaatacaaagacgtcaatggtagcggagcaaaagcttccaaccaggggcttgtcaatgaaaacatgcagaatgaagcaccgcagggtacctcacacacagctattaggggtttgcgggtac

SEQ ID NO: 11626 - DNA, 600 bp, Chicken  19866894214604_2
gagggaacggttgcttttaaaagcaagtactggcattgtgttgaaaattgattcccaaagacctggaagcacataactccctccctgacagctgctctgagcactcccaaaggcggttaccagccctgcccggctccctttcctccttcccatcagctcagcccgctgtctgacataacatctgactgccagccctggtaaaacccattctgatgctgcagaactgcaagtaaactacagaacacttatatgtacattggagtccccctgcctgctaagcacacagttcaggaccatscyttctgatttctacctcatttgttctactgaagcaattctccactttaatggtggagataagacagcctttcttcctgctcccttcactaggcagatacaaagatatgcttaaagagagttaccatttctgcatgggcatccgagctgtcaccttcagcatcatctgttggaccacagaaatacaaagacgtcaatggtagcggagcaaaagcttccaaccaggggcttgtcaatgaaaacatgcagaatgaagcaccgcagggtacctcacacacagctattaggggtttgcgggtactg

SEQ ID NO: 11627 - DNA, 600 bp, Chicken  19866894214604_3
gtgtccgttcggacagcgggaaacgagcgcgtcccggcgaggcgcagctgcgcccgccctgagggggccgaaggggcccacggagccctcccccgccccgccgggcccgcagggagggccgtgccccgcgcaggctgcggccccgtacccgagctgaggctggagtccgacacggccacatcgacgctggtgacgtccagctgcaggctgcgctccagctcctcgatctcgcggcggatcttctcccgctccgcgttcaggttggccccggccgggccgtcccgccgggacatggcggtrccgcagcccccgggcacgacgcgagccgtgccgccgcggccccgccccctccgccagccgaccaatcaccgcggggcgcctcggtcagctgagcccagagcacgtgacatcagacagccaatgggagcacagcttcgccaggagcgcgacccgcgcgtcgcgtccgcctttaatcgctccgttacgcggatagcagcgcccggtcctacggccgcaccgcttcccgaaccccagcgggtccgctcctccgtgctgcacggccgcccattcccgcagctccggccgctgagggagtgggga

SEQ ID NO: 11628 - DNA, 599 bp, Chicken  19866894214605_1
  misc_feature (1)..(74): n is any nucleotide
nnnnnnnnnnnnnnnnnnnnnnnnnnnnnnnnnnnnnnnnnnnnnnnnnnnnnnnnnnnnnnnnnnnnnnnnnnaatattaaatttggaaattagaggtgaggacttctcttaagaaactctttgaaccaactacaaactaatttttttgagcatttcatagaataggcacctttagagacaagcttccacaggtaagccagcagagagatacacagtgatgtctgttagcttaatatacctgaatatttggccctgaataagaggaagcagtcaattcatccttgctcaaaatacctakgaaaatgcaggccttaagaaacacctgtaaaagccagcttctattttgagaagcttactagtgaaatgaagwgtgggaatttcttccagtgtttatctgagatacagcataccacaagaccactcccatggaaactataagccctgttactgactttctcttcacacctcaagaaagcaggagaccaactacatagagaacacccaaatattacagaaagcaaatgaaaagtaaagagtcagggtagttttacaaatttgccatagacagttgctagggaattatttttgtttttacct

SEQ ID NO: 11629 - DNA, 599 bp, Chicken  19866894214605_2
  misc_feature (1)..(2): n is any nucleotide
nnaatattaaatttggaaattagaggtgaggacttctcttaagaaactctttgaaccaactacaaactaatttttttgagcatttcatagaataggcacctttagagacaagcttccacaggtaagccagcagagagatacacagtgatgtctgttagcttaatatacctgaatatttggccctgaataagaggaagcagtcaattcatccttgctcaaaatacctakgaaaatgcaggccttaagaaacacctgtaaaagccagcttctattttgagaagcttactagtgaaatgaagwgtgggaatttcttccagtgtttatctgagatacagcataccacaagaccactcccatggaaactataagccctgttactgactttctcttcacacctcaagaaagcaggagaccaactacatagagaacacccaaatattacagaaagcaaatgaaaagtaaagagtcagggtagttttacaaatttgccatagacagttgctagggaattatttttgtttttacctacacaaatgcagcagtactacagagtgctatcctaagcaaacactaagtaaacttatcaacatcaactaaca

SEQ ID NO: 11630 - DNA, 600 bp, Chicken  19866894214605_3
ccaactacatagagaacacccaaatattacagaaagcaaatgaaaagtaaagagtcagggtagttttacaaatttgccatagacagttgctagggaattatttttgtttttacctacacaaatgcagcagtactacagagtgctatcctaagcaaacactaagtaaacttatcaacatcaactaacaaatacatgtgtatttacataatgagcacaaaataaagaacactagcccaaacgtttttgattaaatacacaattgtagagtgattaactcaatgtatcataaccagttattcwggaaactggatactgctacactgagtgcaacagtgtcaggtgttccttcatggcaggatactagttgcacacctggagccttgcttcagaaacagagattcaaacaaatctcctgactgccttggaaggcagcagacaaaacattattatcaaacctccgtagcaagagaaaggaaaggagcaaggaatatgaattgaggaaagtaaaaggaagaaaacaagtgaaaaacatttcatcctcactaatgagcagagtggagattaaatgcagcaaataatgaatatacaagcagttgtcag

SEQ ID NO: 11631 - DNA, 599 bp, Chicken  19866894214606_1
  misc_feature (1)..(221): n is any nucleotide
nnnnnnnnnnnnnnnnnnnnnnnnnnnnnnnnnnnnnnnnnnnnnnnnnnnnnnnnnnnnnnnnnnnnnnnnnnnnnnnnnnnnnnnnnnnnnnnnnnnnnnnnnnnnnnnnnnnnnnnnnnnnnnnnnnnnnnnnnnnnnnnnnnnnnnnnnnnnnnnnnnnnnnnnnnnnnnnnnnnnnnnnnnnnnnnnnnnnnnnnnnnnnnnnnnnnnnnnnnnnnaaaagcgttacatttccatgataatgtatagaagctatttatctctgttttcaagcttttgtgcctccaggatttttgrgaagtgacccagaaacccgtaatcaggaggaggcaaaatgttgtaacagcaaagtcactgaatacttccaatgcrggcaaataacgtctcyagttgatttcccactattagctttggtggcactasgttcatttaggasctggaaggttgtggcgttcagactgctaaatgccacgacacttagctttagaaaacaggctttacctttctggactgactccactaatgcctattgcataaaacccagcctctatctagtcatattcagctatcgttcagcttttgctccatgatgttgg

SEQ ID NO: 11632 - DNA, 599 bp, Chicken  19866894214606_2
  misc_feature (1)..(146): n is any nucleotide
nnnnnnnnnnnnnnnnnnnnnnnnnnnnnnnnnnnnnnnnnnnnnnnnnnnnnnnnnnnnnnnnnnnnnnnnnnnnnnnnnnnnnnnnnnnnnnnnnnnnnnnnnnnnnnnnnnnnnnnnnnnnnnnnnnnnnnnnnnnnnnnnnnaaaagcgttacatttccatgataatgtatagaagctatttatctctgttttcaagcttttgtgcctccaggatttttgrgaagtgacccagaaacccgtaatcaggaggaggcaaaatgttgtaacagcaaagtcactgaatacttccaatgcrggcaaataacgtctcyagttgatttcccactattagctttggtggcactasgttcatttaggasctggaaggttgtggcgttcagactgctaaatgccacgacacttagctttagaaaacaggctttacctttctggactgactccactaatgcctattgcataaaacccagcctctatctagtcatattcagctatcgttcagcttttgctccatgatgttggtagggttrggctatgatgcatactcttaacgaggaagtttatttacaaatgtcatgattcagctggggctcagcc

SEQ ID NO: 11633 - DNA, 599 bp, Chicken  19866894214606_3
  misc_feature (1)..(130): n is any nucleotide
nnnnnnnnnnnnnnnnnnnnnnnnnnnnnnnnnnnnnnnnnnnnnnnnnnnnnnnnnnnnnnnnnnnnnnnnnnnnnnnnnnnnnnnnnnnnnnnnnnnnnnnnnnnnnnnnnnnnnnnnnnnnnnnnnnaaaagcgttacatttccatgataatgtatagaagctatttatctctgttttcaagcttttgtgcctccaggatttttgrgaagtgacccagaaacccgtaatcaggaggaggcaaaatgttgtaacagcaaagtcactgaatacttccaatgcrggcaaataacgtctcyagttgatttcccactattagctttggtggcactasgttcatttaggasctggaaggttgtggcgttcagactgctaaatgccacgacacttagctttagaaaacaggctttacctttctggactgactccactaatgcctattgcataaaacccagcctctatctagtcatattcagctatcgttcagcttttgctccatgatgttggtagggttrggctatgatgcatactcttaacgaggaagtttatttacaaatgtcatgattcagctggggctcagcctagccctttctttact

SEQ ID NO: 11634 - DNA, 599 bp, Chicken  19866894214606_4
  misc_feature (1)..(95): n is any nucleotide
nnnnnnnnnnnnnnnnnnnnnnnnnnnnnnnnnnnnnnnnnnnnnnnnnnnnnnnnnnnnnnnnnnnnnnnnnnnnnnnnnnnnnnnnnnnnnnnaaaagcgttacatttccatgataatgtatagaagctatttatctctgttttcaagcttttgtgcctccaggatttttgrgaagtgacccagaaacccgtaatcaggaggaggcaaaatgttgtaacagcaaagtcactgaatacttccaatgcrggcaaataacgtctcyagttgatttcccactattagctttggtggcactasgttcatttaggasctggaaggttgtggcgttcagactgctaaatgccacgacacttagctttagaaaacaggctttacctttctggactgactccactaatgcctattgcataaaacccagcctctatctagtcatattcagctatcgttcagcttttgctccatgatgttggtagggttrggctatgatgcatactcttaacgaggaagtttatttacaaatgtcatgattcagctggggctcagcctagccctttctttactctggtttgtttcgatcgctgtgaactcagagggga

SEQ ID NO: 11635 - DNA, 599 bp, Chicken  19866894214606_5
  misc_feature (1)..(82): n is any nucleotide
nnnnnnnnnnnnnnnnnnnnnnnnnnnnnnnnnnnnnnnnnnnnnnnnnnnnnnnnnnnnnnnnnnnnnnnnnnnnnnnnnnaaaagcgttacatttccatgataatgtatagaagctatttatctctgttttcaagcttttgtgcctccaggatttttgrgaagtgacccagaaacccgtaatcaggaggaggcaaaatgttgtaacagcaaagtcactgaatacttccaatgcrggcaaataacgtctcyagttgatttcccactattagctttggtggcactasgttcatttaggasctggaaggttgtggcgttcagactgctaaatgccacgacacttagctttagaaaacaggctttacctttctggactgactccactaatgcctattgcataaaacccagcctctatctagtcatattcagctatcgttcagcttttgctccatgatgttggtagggttrggctatgatgcatactcttaacgaggaagtttatttacaaatgtcatgattcagctggggctcagcctagccctttctttactctggtttgtttcgatcgctgtgaactcagaggggaaagaatggtggga

SEQ ID NO: 11636 - DNA, 600 bp, Chicken  19866894214606_6
cccagaaacccgtaatcaggaggaggcaaaatgttgtaacagcaaagtcactgaatacttccaatgcrggcaaataacgtctcyagttgatttcccactattagctttggtggcactasgttcatttaggasctggaaggttgtggcgttcagactgctaaatgccacgacacttagctttagaaaacaggctttacctttctggactgactccactaatgcctattgcataaaacccagcctctatctagtcatattcagctatcgttcagcttttgctccatgatgttggtagggttrggctatgatgcatactcttaacgaggaagtttatttacaaatgtcatgattcagctggggctcagcctagccctttctttactctggtttgtttcgatcgctgtgaactcagaggggaaagaatggtgggagttttctccaattttcacatctccttttgaactaagaagtggggacagcgctcacaaatagaaatatcctcttaaataaaaagcggcttaaaattgcaagtcagattttggcctgtaaaatccaggacctgagaaaaccaagttactgtctcatttcttaacagtgttt

SEQ ID NO: 11637 - DNA, 600 bp, Chicken  19866894214615_1
ataagatgcatccagtatcgcaaggtcttgatcaatggggttgacatagaaacagacaatagtgatgaatacagaaaggaataaaaggaacaggagcagcgctgacaaagatagatgcactaggatgacttttggatcagaaactgtctgctgattctctttgcatttttctggatcaaaaaatgatctactgtactgtgagacagtgaagtactagcctcagtcatgaacagtgaagaaggttgaaagttaataattgcccctttcaaaaagaaagatattgggggaattcagtgatgsacatctgaagagactgaaagtgtccattttgtaagttgacttaactgcctatgaagtgtgttgattttcaggaaatggaacctatgaagctgttgtggcataatgcagaagcagttcagcaccacacagccatttgctcactctcctctggctgggattagggagagaactggaagcaaagtagaactcatgagctgagacaaaaactacttaataagatagaaaagaaaaatagaaacagaagtgtgatgataactacgtgtgtgtatatatatacatatacatatatatatatatata

SEQ ID NO: 11638 - DNA, 599 bp, Chicken  19866894214622_1
  misc_feature (1)..(144): n is any nucleotide
nnnnnnnnnnnnnnnnnnnnnnnnnnnnnnnnnnnnnnnnnnnnnnnnnnnnnnnnnnnnnnnnnnnnnnnnnnnnnnnnnnnnnnnnnnnnnnnnnnnnnnnnnnnnnnnnnnnnnnnnnnnnnnnnnnnnnnnnnnnnnnnntattgcacaattgttctgaccaactccaaattgttttatagagttatttgggtgaaagagaaatagagttcaaaataggtttacaaattctaagactaagatatctagtaatgtgaaagaaagacactgtgataccacaactattcaaagaaatayaagaaaaatgagtaagctcttacggaaaaagaacttgagggaagcagagaatgataggttaagcttagattgatagctacagattgaatgagtcaacatcatttgcaggtagaagagtaataagatttttagactaataagatgtttaacccagaagtgtcaataacagtactatttttgttcagcagatgataagtcaaatttagagatttctttttgaaaatttagttaaaggaaaagtgacctcttaggggttgttttgccagttcagtcttcatataactgcaataccttttgta

SEQ ID NO: 11639 - DNA, 600 bp, Chicken  19866894214626_1
agtaagatgtcctgtatctgtgcagcacaatgcagaatctgaagtaatctacactgccatcaacacatggcacgcaaagtcaaaagacaagagctttactcttgtgggtatgttttattgacacaggagcgctttcaaagagactaatcccataagtagagattacccccaccctctgcagaagggtttataggatcacgccgcagctctgcagcactaaaacaagtgttgaactagtccctatcaggcccagccacatgtcgtaaagagtgagacttccaaacgctcaaatggtacatygggaacctcagtggaagtgcaatctgaactgggtgtaacggcctctggctcctggaagatcccagcacaatgccctcagcctgctagcactggctggaatgacccacagctgtctgcaggctgctcgtgtgcattggggctgctgggaactgctgtccggagcagctcttatgggatgcataatgccctcctgctgggccatgtgtcaaaacaacctcatgctgtcaaagtaaactaatagatgcgccatcagatccaccagactcacgtgggatgcatataaacacgcagggcttgctt

SEQ ID NO: 11640 - DNA, 600 bp, Chicken  19866894214627_1
tccagggttcttccctatggctctgagtgactttttcttatatgctaaaattaatggggcaccagatctaggcagaaattggctcaacagccaaagagaaactaatcactatttttcaaaaagcacatttaaaaaaggatgattttgctttcaagacatgatttacagctgggtgcagtaagaaaaaagcaatactcacacaacgttactttgtctgtttttcttgaaaaggaaagtttactttgcgtacctcctgcattacaaggattcttaaagaaatgtgatgctgggatgtaattygttctgctaaatatcatccagcatacgcttaacattaaaaaattgaaaagaccaatgaaatcaatttaattaagatgcttaaaacaaagtatatgcttgtctatcttgctcttagtgagagtttaactgcttaacatgccattatcttacctcgtaatataaaagtgccaagattaccagttattcgcaaatggcaaaacatataatttgctctttatctttagtttctcacaacatgttatggcttttcttctgtatttagaagaaaaggataaaaatatatctagaaatactagattt

SEQ ID NO: 11641 - DNA, 600 bp, Chicken  19866894214630_1
aagtatccagacattcaacatccagatgacccacctcctccgtatgaggcttctgtcaatccagacagcatcctttgttccactccaggtatgtgggcagtaactaggtgattttctttttttttaagcaatctgtaataatgtattttagtagtgctggtgggagggtattttactatactatctcctgtttccacgatggaagaggtgtgagttagaagtatcatttggcttgtttgtttcttttctctgggaaatgtggatcacctaagttaaaagtggaatccatgctgcaagcarcatagctcttagaccttaccagttttacattcttaacctgatgagtgatgttgtttccatcatgctgataccttctctggccttttggagataggtctgtacagatgggtgtaaagaacagaacaaatgccaagtacaggaaatcttgtacaaaatacatccagcctcttccctactccccactcccccccacccacagccaaaaaaaaactgaccaaaaataccactttttaatgattcacccgctgcttttcagttttgcagctgcgatattagcatactgtagtcattccactttgg

SEQ ID NO: 11642 - DNA, 600 bp, Chicken  19866894214630_2
tgtcatatctgtgtgttaatacaaagccaggaaaaactcagagcttccagaaatacagagagtaaatctatttggtgatgtggaacgatacacttcaccttctaattctgcttttcttcttcttttccagatggagttctctctcagactgtgcaaagcggtcctccatccctaggaaactgtgatgcatccccacagctcacagaggggtcccttcctccctcagttggtccttctccagtggagctggaagactctgctgacagcagcacctttcttgtccctccagacacaccgctraatgaaaacacaccggcagaaactcttacaggcagccggcacagccactgttctctcaacaccattgtataaaggaatcagctgactgccagtcagaaatagttttagcaactgtttgcacagacaaacactaatccgtggttggaacttcagaaggactctccactttgtttttgaacactgcttttatgttctaggttaggattgtgcctctcgtttttggctgttgttatttgttcactaatcggtttgtcctgtaaatatggattgtataactactctttttttttttttttccat

SEQ ID NO: 11643 - DNA, 600 bp, Chicken  19866894214630_3
aggttaggattgtgcctctcgtttttggctgttgttatttgttcactaatcggtttgtcctgtaaatatggattgtataactactctttttttttttttttccattggctgtggaaaagaatgcagagaattcctttgacttctaaggagaggaaaagtatgggtagggtttttttgttttatttcttaaactgagaggaaatgaaacctacatcaggaaaagctgcttggatttggctggataccactggacccaggaaacagaccatggaagaggaaggtggggctgtcattgctcartcagttgctttctctcttgcttcagtgctacgcttggaaaagacagaggagacttaactgcagagaaagggactgggtttctgttttacagggcaggagcacggaggagctagaactcagctaaaactcatgccaccgagtgagagctgcatacgtttgtgtgttctgatcagccttgctgtttcagaacaccacagggactggaggataaatgatctacgccatacgtgacttcatctttttttggaagagtactaaaaaaccaggatttgcaatgacaattatttgttgttgttagct

SEQ ID NO: 11644 - DNA, 599 bp, Chicken  19866894214635_1
  misc_feature (1)..(149): n is any nucleotide
nnnnnnnnnnnnnnnnnnnnnnnnnnnnnnnnnnnnnnnnnnnnnnnnnnnnnnnnnnnnnnnnnnnnnnnnnnnnnnnnnnnnnnnnnnnnnnnnnnnnnnnnnnnnnnnnnnnnnnnnnnnnnnnnnnnnnnnnnnnnnnnnnnnnntgtgaacggttttggctctgtacagctctgcttagcagcaactataaacatcaatctgttatcaacattgtttttctcctagaactgaaacatagcattaaaccaggcactctgaagaaaacaattccatccctgttgaaacgaagacackgggtttgcaggattcatccctaccccttcacgtctagctctgcatatccaaccttcataaaaacatattcccaagwacactggtacatcacaaaattaacccaagaaatctatcttgaatacatcacatcaacatttctggcagcaaaaagcctaactgatgcactttaagaagtctcaaattactcagtacccatttatggtgcttactactgcttttaaaaatcaatccctaatcatgcctaagtgacacagaggaaatctgtggccacagagtctccagtggctctcccacaaagc

SEQ ID NO: 11645 - DNA, 599 bp, Chicken  19866894214635_2
  misc_feature (1)..(73): n is any nucleotide
nnnnnnnnnnnnnnnnnnnnnnnnnnnnnnnnnnnnnnnnnnnnnnnnnnnnnnnnnnnnnnnnnnnnnnnnntgtgaacggttttggctctgtacagctctgcttagcagcaactataaacatcaatctgttatcaacattgtttttctcctagaactgaaacatagcattaaaccaggcactctgaagaaaacaattccatccctgttgaaacgaagacackgggtttgcaggattcatccctaccccttcacgtctagctctgcatatccaaccttcataaaaacatattcccaagwacactggtacatcacaaaattaacccaagaaatctatcttgaatacatcacatcaacatttctggcagcaaaaagcctaactgatgcactttaagaagtctcaaattactcagtacccatttatggtgcttactactgcttttaaaaatcaatccctaatcatgcctaagtgacacagaggaaatctgtggccacagagtctccagtggctctcccacaaagccyttccaccacttccttcccttctgcctctcagctcctctgctgtgctgaaatggttgttttgtctctggctgttt

SEQ ID NO: 11646 - DNA, 600 bp, Chicken  19866894214635_3
ggtttgcaggattcatccctaccccttcacgtctagctctgcatatccaaccttcataaaaacatattcccaagwacactggtacatcacaaaattaacccaagaaatctatcttgaatacatcacatcaacatttctggcagcaaaaagcctaactgatgcactttaagaagtctcaaattactcagtacccatttatggtgcttactactgcttttaaaaatcaatccctaatcatgcctaagtgacacagaggaaatctgtggccacagagtctccagtggctctcccacaaagccyttccaccacttccttcccttctgcctctcagctcctctgctgtgctgaaatggttgttttgtctctggctgtttttcccacttgaggaaggcaaatgcagcactctaaaaaatgataaggtgaagttcagtagtgtgttgcattatgctgttgtttgtaatagaataacccctctccaaacagctttcgctagactgtacatatttctttatattttaaaattatttcctgatttaagctctatgcaccaatttgattgtaactgaatataaaataattaacatacagtaactgtcatcc

SEQ ID NO: 11647 - DNA, 600 bp, Chicken  19866894214639_1
ttcatgtggcttatttgcaagagatactgcaattgttctttgaagtcttggttgcagaaatctaggtagtcctctccttgtacttttctaggcatagtaggctttgtagaaccagtcaaagaatgattatgattagaaaggaaaaataaattgactttgtaaatgctctggaatgaaattagataaacctgttaaacattatgacctaaggccagtaaaatttccatcaattttaagatgtcctacattcaagagaaaggagtgttttgaatgtgctttatgttcctcaaagataatttrccttatggtgctgtaccatgaaagaaagacttgttcaaagggaaagtgacacatttgcttcaaaacttcacacattaacttaaaaaggttccaagaaaagactactttcaaaaggataatttacattactgaagagctgattttgagtctaccacatttggaggtggtatcagcggcatgtaaaagcttmatttaatttgttctgaagtttacaaaattttgtactgagcgtcatcagaaagtaattttcattttgtgtatgaaaattttgcatgtttagaaacaatactactgttgcta

SEQ ID NO: 11648 - DNA, 423 bp, Chicken  19866894214639_2
gttaaacattatgacctaaggccagtaaaatttccatcaattttaagatgtcctacattcaagagaaaggagtgttttgaatgtgctttatgttcctcaaagataatttrccttatggtgctgtaccatgaaagaaagacttgttcaaagggaaagtgacacatttgcttcaaaacttcacacattaacttaaaaaggttccaagaaaagactactttcaaaaggataatttacattactgaagagctgattttgagtctaccacatttggaggtggtatcagcggcatgtaaaagcttmatttaatttgttctgaagtttacaaaattttgtactgagcgtcatcagaaagtaattttcattttgtgtatgaaaattttgcatgtttagaaacaatactactgttgctatttttacgttgga

SEQ ID NO: 11649 - DNA, 600 bp, Chicken  19866894214648_1
gctacagccatactgacagatgcaaccacccagcttggagggattcaaattaaggtcaaaaagggtaatgcaacggtgaacgaatgaatgcgttgttcctggctcacagtcatgcccagatgcatgttcctcttcatttgaggataaataaaatgcatcatttgcttgtgtacgtgtgcgcacgtacacacacaagtacacagtttacaaccctggagaaggagaagaaggatacaactatcggaaccatttctctcactgcctctggagcagctttctgtattttaaactaaagaaagrggaaaggaagatgggaagggaaagattacccctttttctatttaaccttgctgggagaggaggggaagactgttcagagcctgtcagtcctgagcagcgatttggcagaacactattcatgcaatttcacatttgcaaggagcagggcttgtagtgctcgtggctggaatcgggaccaggaggggtggctttgcccccctgtccccatcattctgcagattaattagccattactcttagttccacaatgtaatttcaacccagatctgcaacggcaaactctgaacccatccgagagca

SEQ ID NO: 11650 - DNA, 600 bp, Chicken  19866894214650_1
aaaccactctggaccagttattattcactccatgcaaggtcactctgtccagagctgtaatttctcttccatatgaagaagaaacgggacctcctcaaaatcaaggactgatttaaaacctgcacagctgtacaaagttgactaatgccaagggtcttgtttctgtccatagtgccccaatggacagaaatttcaacttggacaattccccaagtactatagggaaactgctgctctttgccaggttgtaggcatataaactaaactccctcgggctagaagcacttacttatttcccartcgcccctctacacataaacgggattaggatcttgcatccacttctgctggactccagcactggctccccatgcctgctcaacacatgctggctccttaatgaagccaaaaggcagcaatttctgaatgccatggccacctgtatgtttctacagcatccacgcagggagaagcagacactccttgggatgctgcaacacattgcaggtatcagggtggcactgcagacagcttttgcttaacagcatgccaagcttgcagggctggcacttctcctgtcaggtggctcaggaaaggaac

SEQ ID NO: 11651 - DNA, 397 bp, Chicken  19866894214653_1
ggaatagtgctggaatgcaatttctcctgctcaagccaccctgtctgactcacattcccaagtatcttgtgcaaagccataaagatcggcttgtgagagcaaacagccccttctaggtcttcaacaatttctctattgcaacctggggcaatgcattacccagggatgcaccccaggagatgcttgggtttccccatccccatacatcacggaatggctttgattggaagggaccttaaagaccatccatttccaaccctctgccatgggctggttgccaaccaccaggtcaggctgccmagcatcccatccaacctggacttgaatgccttcgaggatgggtacagtacagtcatgccaaccctgctatcactgttcttctgattttgagtatttt

SEQ ID NO: 11652 - DNA, 600 bp, Chicken  19866894214658_1
tcagagggacctcctgtgttccagtttgtgcccagttcctcttgtcccagcactgggcaacaacaaactgagcctggctccatcctgtttgcaccctcccctcaggtatttatacatatcaatcaggtccccaccacagtctttccatccccaggctgaacagcccctgctctctcatcctctcctcacagcacagatgttccagcccctccatcatccttgcagcccttcattaggactctctccagtaaatccaagtctgtcttgtgctgaggagcccagaactagacacagcactcyatgtgaggcctcacaartgctgaatagaagaaaatgatcacctccctcaatctgctggcaaaattcctcccaatgcagcccagaatacctttacccttctttgcagcaaggacacactgctggctcatgttgagctcaatgtccatcagcaccccacgtccttttttgctctccagcccagtgagtcccgatgctggtgtgggtccatccctgaatcaggactctgtcagtctgtgtttcagactgcccagatccctctgggtggcagcatggccttctgggtgtatccttattgtttcc

SEQ ID NO: 11653 - DNA, 600 bp, Chicken  19866894214658_2
gttccagtttgtgcccagttcctcttgtcccagcactgggcaacaacaaactgagcctggctccatcctgtttgcaccctcccctcaggtatttatacatatcaatcaggtccccaccacagtctttccatccccaggctgaacagcccctgctctctcatcctctcctcacagcacagatgttccagcccctccatcatccttgcagcccttcattaggactctctccagtaaatccaagtctgtcttgtgctgaggagcccagaactagacacagcactcyatgtgaggcctcacaartgctgaatagaagaaaatgatcacctccctcaatctgctggcaaaattcctcccaatgcagcccagaatacctttacccttctttgcagcaaggacacactgctggctcatgttgagctcaatgtccatcagcaccccacgtccttttttgctctccagcccagtgagtcccgatgctggtgtgggtccatccctgaatcaggactctgtcagtctgtgtttcagactgcccagatccctctgggtggcagcatggccttctgggtgtatccttattgtttccagttctgtcacctctga

SEQ ID NO: 11654 - DNA, 600 bp, Chicken  19866894214665_1
gcgctcagctttcatccacaaattccattcatccatttttgattctccacactattttctaccccttcctgagatttcaagggacctcaattatttaatagaaatgagcccaagttgataacgtccagcatatgttactccacagttgttcaaaagtctgtgtggaacacgacattggctttgcctatcagcaggtgatcacaagaatagctttcttagctcagaccaaaaatgtaatcactctgtctctagctgttctctggtgtttcacagcagaatccatctttttgaacaataacygggcgtttaaaaacctgaaagaacagccatttgtctttaggtattaaaattgatcaagggattctgaacaaaatttccttagaatattcctcaatttgttgtcgtatgtgatgagaacaagataaaaaatatatttagatataactaaactacctggattcattacttgtaactacatcatatgacactgataactagtctttcaggcccagtcaaccaagttttgctacccctagattcagtgagaaatagtctctgctcagatcagctgtgtctacatgctcaatttggacaaaagat

SEQ ID NO: 11655 - DNA, 600 bp, Chicken  19866894214665_2
tttaggtattaaaattgatcaagggattctgaacaaaatttccttagaatattcctcaatttgttgtcgtatgtgatgagaacaagataaaaaatatatttagatataactaaactacctggattcattacttgtaactacatcatatgacactgataactagtctttcaggcccagtcaaccaagttttgctacccctagattcagtgagaaatagtctctgctcagatcagctgtgtctacatgctcaatttggacaaaagataagaaaaaacatgcatctagactaacaactgttayagtcttttacagtctgtgctggatcaaaaggctcatgcctcatggttagcttgatcccagaacaygatgccgtgatcttgtcatgaacatcaccacgagtgtgtcctcagccacaggcagtggccggtgacagttagcatgacttctctcattgttccacaggtttccaagctccttccaggtaactgaatgatgaaagaggaaagctcctgaacatttgctatcactttcccaagttatgtccaagcagggtgtgctttccaaagggagtagaagggaagaggatgggagccctgggga

SEQ ID NO: 11656 - DNA, 600 bp, Chicken  19866894214665_3
gtcgtatgtgatgagaacaagataaaaaatatatttagatataactaaactacctggattcattacttgtaactacatcatatgacactgataactagtctttcaggcccagtcaaccaagttttgctacccctagattcagtgagaaatagtctctgctcagatcagctgtgtctacatgctcaatttggacaaaagataagaaaaaacatgcatctagactaacaactgttayagtcttttacagtctgtgctggatcaaaaggctcatgcctcatggttagcttgatcccagaacaygatgccgtgatcttgtcatgaacatcaccacgagtgtgtcctcagccacaggcagtggccggtgacagttagcatgacttctctcattgttccacaggtttccaagctccttccaggtaactgaatgatgaaagaggaaagctcctgaacatttgctatcactttcccaagttatgtccaagcagggtgtgctttccaaagggagtagaagggaagaggatgggagccctggggataagaggaggaaaatctccccacagtaatgtgcccagggaagcagcccttgtgttgctttctcca

SEQ ID NO: 11657 - DNA, 599 bp, Chicken  19866894214666_1
  misc_feature (1)..(175): n is any nucleotide
nnnnnnnnnnnnnnnnnnnnnnnnnnnnnnnnnnnnnnnnnnnnnnnnnnnnnnnnnnnnnnnnnnnnnnnnnnnnnnnnnnnnnnnnnnnnnnnnnnnnnnnnnnnnnnnnnnnnnnnnnnnnnnnnnnnnnnnnnnnnnnnnnnnnnnnnnnnnnnnnnnnnnnnnnnnnnnnttaaactgtgccttctgtgctcgaatatagaacctgaaacagctatttaaaccataaaggaacaaaaagggacaaagttttcagcctaaagtttctgaattcagtattttctgttagaggattcsagtgaggtttggattatctaataagaattaaaaacatatagtaatcagtaactcagaagatgtggacaaggtgcacagttcaagtagataaagaatggcaccactgtgttctatgtgttgcgtagaacacaactgtaggcaaccaccagatttgttttaatgccatcttagctayggctctgtcacagccctgcagtaaaaaaataaactaaaaaactccaacaacaacaaaaaaaccagaagcttttggctgaaggacaggaagctgcacctgcaccccttagaattactataagcaa

SEQ ID NO: 11658 - DNA, 600 bp, Chicken  19866894214666_2
ttaaactgtgccttctgtgctcgaatatagaacctgaaacagctatttaaaccataaaggaacaaaaagggacaaagttttcagcctaaagtttctgaattcagtattttctgttagaggattcsagtgaggtttggattatctaataagaattaaaaacatatagtaatcagtaactcagaagatgtggacaaggtgcacagttcaagtagataaagaatggcaccactgtgttctatgtgttgcgtagaacacaactgtaggcaaccaccagatttgttttaatgccatcttagctayggctctgtcacagccctgcagtaaaaaaataaactaaaaaactccaacaacaacaaaaaaaccagaagcttttggctgaaggacaggaagctgcacctgcaccccttagaattactataagcaagcacccyactrtttttctccacagcagcttcccaggcagtctgagctgtaagcagagcacagggctacactaacagttaggtttaagagcgcaragcactctcttcctccttaccaattagtgcttcggcatgctttgtatgtatgtgcctcatatgtgcacgcaagacactgaaa

SEQ ID NO: 11659 - DNA, 600 bp, Chicken  19866894214666_3
gtttggattatctaataagaattaaaaacatatagtaatcagtaactcagaagatgtggacaaggtgcacagttcaagtagataaagaatggcaccactgtgttctatgtgttgcgtagaacacaactgtaggcaaccaccagatttgttttaatgccatcttagctayggctctgtcacagccctgcagtaaaaaaataaactaaaaaactccaacaacaacaaaaaaaccagaagcttttggctgaaggacaggaagctgcacctgcaccccttagaattactataagcaagcacccyactrtttttctccacagcagcttcccaggcagtctgagctgtaagcagagcacagggctacactaacagttaggtttaagagcgcaragcactctcttcctccttaccaattagtgcttcggcatgctttgtatgtatgtgcctcatatgtgcacgcaagacactgaaattctaggctggacggggctctgggcaacatggtctaatagcagatctggaaattggtggccctgcgtgtggcagaggggttggaacttgatgatccttggggtcccttccaacccaagccattttatgatt

SEQ ID NO: 11660 - DNA, 600 bp, Chicken  19866894214666_4
ggattatctaataagaattaaaaacatatagtaatcagtaactcagaagatgtggacaaggtgcacagttcaagtagataaagaatggcaccactgtgttctatgtgttgcgtagaacacaactgtaggcaaccaccagatttgttttaatgccatcttagctayggctctgtcacagccctgcagtaaaaaaataaactaaaaaactccaacaacaacaaaaaaaccagaagcttttggctgaaggacaggaagctgcacctgcaccccttagaattactataagcaagcacccyactrtttttctccacagcagcttcccaggcagtctgagctgtaagcagagcacagggctacactaacagttaggtttaagagcgcaragcactctcttcctccttaccaattagtgcttcggcatgctttgtatgtatgtgcctcatatgtgcacgcaagacactgaaattctaggctggacggggctctgggcaacatggtctaatagcagatctggaaattggtggccctgcgtgtggcagaggggttggaacttgatgatccttggggtcccttccaacccaagccattttatgattctat

SEQ ID NO: 11661 - DNA, 600 bp, Chicken  19866894214666_5
aatggcaccactgtgttctatgtgttgcgtagaacacaactgtaggcaaccaccagatttgttttaatgccatcttagctayggctctgtcacagccctgcagtaaaaaaataaactaaaaaactccaacaacaacaaaaaaaccagaagcttttggctgaaggacaggaagctgcacctgcaccccttagaattactataagcaagcacccyactrtttttctccacagcagcttcccaggcagtctgagctgtaagcagagcacagggctacactaacagttaggtttaagagcgcaragcactctcttcctccttaccaattagtgcttcggcatgctttgtatgtatgtgcctcatatgtgcacgcaagacactgaaattctaggctggacggggctctgggcaacatggtctaatagcagatctggaaattggtggccctgcgtgtggcagaggggttggaacttgatgatccttggggtcccttccaacccaagccattttatgattctataattctatgaaactgaacaattgtccatcttctgacacagtgagacagccactaactgcaatttcttcgcgctacaaacagtg

SEQ ID NO: 11662 - DNA, 488 bp, Chicken  19866894214670_1
gctatttcatttcattaaaactaacattttcacatcagggaaataatttatctaaggaagatgttacagtatccactacttaaaagcttggaagcttccatcaatcatatggtctaatattcttctaaaaacttagaagataaaaaagggaaagaaattttcctgtgttagagcttgccaaattgaattataattaattggaatttaacaaattaatatatacagtcttttcttccttcttagtaggaaatgatgggaaacagaattgataccctgtgacctcactcttacagtccctcragtctcaactctcttttatctgtatacatagagcagaaaataaacctttgctcccactgaattgtcctaagattatttttcatgagcaaagactgagatcgggcctcacaaacccagattgaattgtgaaataaaattggctgcttggtgtgtaactctgcatttaaagcagctgtgtttgtgtggta

SEQ ID NO: 11663 - DNA, 600 bp, Chicken  19866894214673_1
caaaatactgcctggcttgagatgccctgcttggatagctgatctcagccttccattctgtccaaccagctactcaaattttgtcaaaacctgttgattctgttacaacacgtgctgtctctgaattgcagctgattatattccaaacatttctgcacgtatgacccaaacaaacagcaaaattcaggtcttaagcaaaaaagataatggattgtgatgcccaatcatcttcacagtcttctaacacatgcactgcaacctgcctatggactgagattacaaattactatcaagcacagsgctggcaaatctaaactaacatggcaggagaacaacctgattcaacagaatcacacacatttgtaaaatccagcgacttaaaagaaaacgacgcatgcacataactggcattaattaaacaacactgttattacttacaatcaaagacttgtaaggaaggtttatttgacagaaagagggctttttttttttttttttttggctgagaaattaccattcttacttaattaacaatccagtttcttcatagcatagctgttaagctttttttcacttttattttcacctaaatggatatta

SEQ ID NO: 11664 - DNA, 600 bp, Chicken  19866894214673_2
acacatttgtaaaatccagcgacttaaaagaaaacgacgcatgcacataactggcattaattaaacaacactgttattacttacaatcaaagacttgtaaggaaggtttatttgacagaaagagggctttttttttttttttttttggctgagaaattaccattcttacttaattaacaatccagtttcttcatagcatagctgttaagctttttttcacttttattttcacctaaatggatattatatgggggaactttgtctaaacacaaaagcaattacagaagtgggtcagaaaasacagtgctgaaccgttctaataatcatgcattttaacttagtttgcagtcactgctgcaagggttctgttttgtgttgtgaaggaagaggaggtacggataggagaagaaagttaaacctgagcctgtgcacacaactaggaaagacctaccaggtttcacaaattcagggcatacttctaccacgaaggcaggtttgcttctcgcacacagagcccaaatagctgcacagagcaccttttccattctctagcttcaaactactttgtgagctgagcatgtgtggactacttgcctgtca

SEQ ID NO: 11665 - DNA, 600 bp, Chicken  19866894214673_3
atctaggatatgagcttccacaggcagactaatttgaatctatttttgtaaattatagattgtgttaaatatacatgaaggaaaatatggaacagtttgttttactgcacaacatgagttatttcacaatctaggttccctctgagaaaactctcaattttaaaatttgccaattagtggcagtgactattggtgagatctaacccaggcaaagattatttgctgaatgctgcaaagggcaaaacagtgctgcaggagaatgaagggaccgaacagcagacagtaacaaggagaagcacrgagtcacttgcccgagcttcctttcctttaagaagaactgaagattgtgtcactgctttaatacgacagtgaaactataaattcacagcagccagaattagatctttgcatgcaaagtgaaagtgaggttaattgctacagtaaagtttaggacaattattagacagagtgttaggaagagagcatgatgctcttcatcactgctcttccctctttttcaaatgaagacaatcccattcaattcatcctaataaatgaacacaaagacagtacgatttcttcctataaacatatggggat

SEQ ID NO: 11666 - DNA, 600 bp, Chicken  19866894214676_1
catactctgccctttccccacttcattctcacacccatagagaaggttcatcgttctctttgggtttgggtatttcttcagagctctcagtcaggctgttatttcctctcgcttctcacatctcccacagctgaacattttggtccatgttgatcctgcccaaaggccacttcaggccattttctcccgctcttgaaatttgcagtcatttttaccttattcttttgataacaaatggacatttggacttcaaacacagctttccaactcggatctttctcagtgaggcaatatcagcayacactgacatctatattagcagcaaggtaaactgtctttctttgaagaaatatctcctttttaaggttttcccctaaggtgacaaattttctggtagataaatacttgaagtgttttctcttagaaaaatggaaatggaaattgtttgatgttctcataaggcacaaacccacggggctgtttaggacttctcagcaaacctcctacctgtcctctaggatggtggattaatttcagactgtgagtacagctgggaagagcagtgcaggaagggccagaggctgctgcctgggttttgtg

SEQ ID NO: 11667 - DNA, 600 bp, Chicken  19866894214681_1
tctgagtccagcatgctcgctgtgtgcataaatggataaacatcagtgtacagctcttctggcctgaatgtagaaaacacccgattgtgataaatcagaaaggtccccttggttatgtaagagcaagagggaagcatctcactgaataatcctggtggattatacggtcccagtgaaagtccagtattagccagcagccaatagcctcacatctggagtcgggagctgaaagtcagacagtgggtggcactcattaaaatatagatctgctgaacagttaagacgattattggtcctgakttgcaggattagacgcatggagcagtctgtcaggctgtttcttcacttggctgcacaaaaggcttctctggggctcgggcagcaatcgattctctaagcagactgctccctaagggaggggaacacgaggcaatgggaggtgccttccctctgctcgtctgccattgtgctgccttgcgctgtttgaagctagcactgagcacataatcactcctgcagagatttacagggcttaaacactgtagatgtaacttattaacgtgatctccctgcctgatgctgtgaaatcttcgcagctgg

SEQ ID NO: 11668 - DNA, 600 bp, Chicken  19866894214681_2
ctgcacaaaaggcttctctggggctcgggcagcaatcgattctctaagcagactgctccctaagggaggggaacacgaggcaatgggaggtgccttccctctgctcgtctgccattgtgctgccttgcgctgtttgaagctagcactgagcacataatcactcctgcagagatttacagggcttaaacactgtagatgtaacttattaacgtgatctccctgcctgatgctgtgaaatcttcgcagctgggatttctaatgggtttagtggaactgcaggtgtggcagatttgcaggctygtttctttggcagcgaggtaaccaagtgagaggacaacctgtgtgtgtgggacaygctgggagtagtcagcaggagtacccaaagtagtggctaaaatgccacagccccggtggggatctcttgttttgtgtgttcctgttcctttttcacacacttgcagaagtgctcagttttgcaaggggatacttggcacatattgttaggaggaggatctgtttccactcaggaacagaaaattacacaaattatgcattttatgtgtctaaatatacaggttgaatatcctcaggtgtttatct

SEQ ID NO: 11669 - DNA, 600 bp, Chicken  19866894214681_3
ctccctaagggaggggaacacgaggcaatgggaggtgccttccctctgctcgtctgccattgtgctgccttgcgctgtttgaagctagcactgagcacataatcactcctgcagagatttacagggcttaaacactgtagatgtaacttattaacgtgatctccctgcctgatgctgtgaaatcttcgcagctgggatttctaatgggtttagtggaactgcaggtgtggcagatttgcaggctygtttctttggcagcgaggtaaccaagtgagaggacaacctgtgtgtgtgggacaygctgggagtagtcagcaggagtacccaaagtagtggctaaaatgccacagccccggtggggatctcttgttttgtgtgttcctgttcctttttcacacacttgcagaagtgctcagttttgcaaggggatacttggcacatattgttaggaggaggatctgtttccactcaggaacagaaaattacacaaattatgcattttatgtgtctaaatatacaggttgaatatcctcaggtgtttatctcccgacagtctatctcccttcatttgctgggacaacgatagaacaaatgatttac

SEQ ID NO: 11670 - DNA, 587 bp, Chicken  19866894214698_1
aaagagaacatttggcttattttactatacagtgcgtggtttactatttactctttgaataatctcactcatgtttggaaaattcctagatatttttatatactacaaatgtactggcaaatacaaaagctacttctatgcttagcttatgtcctccaggtgtttgcttattcactttgcaatgagatcccagaccatggaactggtggcggtgggtgacgggacaagtccctcttggcaggatggattgtgtgagaagctgaccagagtggcatgcattgcttttgaattctttcttgsaactttttagagctataccattaaaacaaatctctggtggtgatgggttatgtttttatgtagtgacagagggctgagagaaggatttttcacacttgatgatggaggagcccctggcaaggagagaaaagcccttggttatagatgtggataccattcagcattcatttttctgctaagaaaaaagatttgtggtgtcctcagatatttagtgtgccaaaagtgttgtaagggtagctgaggactgtgagggaatgtggtaggagcagaactggctgctctgccag

SEQ ID NO: 11671 - DNA, 599 bp, Chicken  19866894214706_1
  misc_feature (1)..(192): n is any nucleotide
nnnnnnnnnnnnnnnnnnnnnnnnnnnnnnnnnnnnnnnnnnnnnnnnnnnnnnnnnnnnnnnnnnnnnnnnnnnnnnnnnnnnnnnnnnnnnnnnnnnnnnnnnnnnnnnnnnnnnnnnnnnnnnnnnnnnnnnnnnnnnnnnnnnnnnnnnnnnnnnnnnnnnnnnnnnnnnnnnnnnnnnnnnnnnnnnttaagggagtttgttcaatgaggacggtatgcctttccttcaacaaatagtcacatctcatcaacagttccccatcctcaaacatgtataatgaacaaccaggcaacygaaaagttttcagttttataaataatayatgccttactgcaaggggtgtagtgataggataagagagaatggtttaaaactaaaagaggtatatttagatgagatataaggaatgaattctttactatgagagtgcttagataccagaacagggtgcccagaaagttgtggaggtccctctctgaagtgttcaaagtcagaacggatgcggctccaagcaacctgctctggtgggaggtgtccctgcccatggcaggggcattagaactgcatcacctttaaggtcccttccaactcaa

SEQ ID NO: 11672 - DNA, 599 bp, Chicken  19866894214706_2
  misc_feature (1)..(164): n is any nucleotide
nnnnnnnnnnnnnnnnnnnnnnnnnnnnnnnnnnnnnnnnnnnnnnnnnnnnnnnnnnnnnnnnnnnnnnnnnnnnnnnnnnnnnnnnnnnnnnnnnnnnnnnnnnnnnnnnnnnnnnnnnnnnnnnnnnnnnnnnnnnnnnnnnnnnnnnnnnnnnnnnnnnnttaagggagtttgttcaatgaggacggtatgcctttccttcaacaaatagtcacatctcatcaacagttccccatcctcaaacatgtataatgaacaaccaggcaacygaaaagttttcagttttataaataatayatgccttactgcaaggggtgtagtgataggataagagagaatggtttaaaactaaaagaggtatatttagatgagatataaggaatgaattctttactatgagagtgcttagataccagaacagggtgcccagaaagttgtggaggtccctctctgaagtgttcaaagtcagaacggatgcggctccaagcaacctgctctggtgggaggtgtccctgcccatggcaggggcattagaactgcatcacctttaaggtcccttccaactcaaaccattctatgactctgtctgtttctgc

SEQ ID NO: 11673 - DNA, 600 bp, Chicken  19866894214708_1
ttgctttccttgtgctatgtgtgcctgactgggttatctgcttcttttaattctaaggccaaaatagtatttgattgattctttggtacagttatttttccaatgactttctcaagctgtgttgctttttttcctgaagttcatgtttcagttgtgtttctaatataaaagttatcctgtgtactaattaaaattatgaagtcattacagaactcttgtgtattttcatcaaaaacgttatgctcttttgaaatgagtggatttccttgcaagtttactgtgcagtttaataaggagtaytaacatctaggtctaaaaagcacttaagctgattattacagttaaaagattcagtccctaatgcaagcatgcatgagatgttgagttcctgggaattactgtagctttgctcctattacatttcatatcaccactgagcattattttttggtttgcttagtcaaaagcagaagctactttatctcaagaagacctgggtccacggccaaggcatttaaaaagcatcagagaaaggaaagcagaactgagactggataaaggggtaagtgctctagggctcaactacagaagatcagtttc

SEQ ID NO: 11674 - DNA, 600 bp, Chicken  19866894214708_2
atctaggtctaaaaagcacttaagctgattattacagttaaaagattcagtccctaatgcaagcatgcatgagatgttgagttcctgggaattactgtagctttgctcctattacatttcatatcaccactgagcattattttttggtttgcttagtcaaaagcagaagctactttatctcaagaagacctgggtccacggccaaggcatttaaaaagcatcagagaaaggaaagcagaactgagactggataaaggggtaagtgctctagggctcaactacagaagatcagtttcagtyattttattgtgactaaaacaatattgtttgcttttgttaaaaggaacctctctgcttttaacatgcatgttgaatgataatcatttttctttaattacagcataggtatcctgttaaacttgtcatttacaggttcattcttctgttgtttaagataccttgaagtatttaagttactgttacagaaaggggcactccattatacctttacaacatttagtgactgcactatgtaaattcatgtaactactgaacagtagctttgtcattgcaccgtatttgtatttccttgtcactatt

SEQ ID NO: 11675 - DNA, 600 bp, Chicken  19866894214709_1
actacttctgacaattaaagcatgctaaaatgtagttttaaatggaacaccgccacaaacaagacagatatctgcctcaacataatcttccttaaggaaaagtacgtggtggtatttttcttttctttcttcccagtaaacaccctcccatccaggctgctcccaaagtgactaattacagatacagtacagaatgttagcagaactacatccttcctcacaaagggaaacatccaagtatgattctatgattctataacagccaccctccaccattttattctaggacctacaacctcytctaccagcagaacacacacagttcccagcaagcaaaaagatactatcagccaagaatacagaaataaatcaggtaggcacataagactgcatctcactgcgtacagtactagtgggagctcactatttcagtagcccttcccattttacagttttcttcttgaagtactactatggtatcagagtacggcaaactttttgttctgagggcacaaagaatgtaggtgggatcagcaaaaattaaaaaaattttaaatgttttatttggaagccaggatcaggtagaagaaataatttctg

SEQ ID NO: 11676 - DNA, 599 bp, Chicken  19866894214711_1
  misc_feature (1)..(76): n is any nucleotide
nnnnnnnnnnnnnnnnnnnnnnnnnnnnnnnnnnnnnnnnnnnnnnnnnnnnnnnnnnnnnnnnnnnnnnnnnnnnatgggcatgattccactgccttgcacgctgtttgcagctgatacaaaacactaccaaggcaggatggccccaggtggtaggaatgatgacacaaatggtatcccacttgctctttcttatggctcccatatgcctctttgtacacttcaagagcccagcaactgcttttcacagccaatcaaatcccccttctacttctttagtactctcctgctttttaattyctttcattttccttttcccyacaccctcatctcaacacttcataattttgacctcttcctcttaaacaggcaacgccagatcatcttttcaatctaaaatccagcttagatccctgcaaaaggccgaatgagctatgctgtcagctacaacagagtgaatctacatcacaaaacggtgttttcctgttatagctaacacacgttcacaaacagttccaaaacagtatgaaattctttagaatgtctttctcatccagcattgcctaggcttgtccctgcttagctgraaagctgacatc

SEQ ID NO: 11677 - DNA, 599 bp, Chicken  19866894214711_2
  misc_feature (1)..(56): n is any nucleotide
nnnnnnnnnnnnnnnnnnnnnnnnnnnnnnnnnnnnnnnnnnnnnnnnnnnnnnnnatgggcatgattccactgccttgcacgctgtttgcagctgatacaaaacactaccaaggcaggatggccccaggtggtaggaatgatgacacaaatggtatcccacttgctctttcttatggctcccatatgcctctttgtacacttcaagagcccagcaactgcttttcacagccaatcaaatcccccttctacttctttagtactctcctgctttttaattyctttcattttccttttcccyacaccctcatctcaacacttcataattttgacctcttcctcttaaacaggcaacgccagatcatcttttcaatctaaaatccagcttagatccctgcaaaaggccgaatgagctatgctgtcagctacaacagagtgaatctacatcacaaaacggtgttttcctgttatagctaacacacgttcacaaacagttccaaaacagtatgaaattctttagaatgtctttctcatccagcattgcctaggcttgtccctgcttagctgraaagctgacatctccaaaatgaaacacctcga

SEQ ID NO: 11678 - DNA, 600 bp, Chicken  19866894214711_3
tgctttttaattyctttcattttccttttcccyacaccctcatctcaacacttcataattttgacctcttcctcttaaacaggcaacgccagatcatcttttcaatctaaaatccagcttagatccctgcaaaaggccgaatgagctatgctgtcagctacaacagagtgaatctacatcacaaaacggtgttttcctgttatagctaacacacgttcacaaacagttccaaaacagtatgaaattctttagaatgtctttctcatccagcattgcctaggcttgtccctgcttagctgraaagctgacatctccaaaatgaaacacctcgagatgatttactctccttcataatttagtataataatgaatgtatcagcttctctgcggccctacaatcttccctctgagcagattgtgttctcccctgcagtatgatatcatgatgttttccaaasracgcactggggaactcattctatatattagttcttgcagataatagagaaagtatattctgaagattattaggacttactcagtccagtatcccaggcacaaataggtccagttgtataattaaataggccatccgagcgc

SEQ ID NO: 11679 - DNA, 600 bp, Chicken  19866894214711_4
tacaacagagtgaatctacatcacaaaacggtgttttcctgttatagctaacacacgttcacaaacagttccaaaacagtatgaaattctttagaatgtctttctcatccagcattgcctaggcttgtccctgcttagctgraaagctgacatctccaaaatgaaacacctcgagatgatttactctccttcataatttagtataataatgaatgtatcagcttctctgcggccctacaatcttccctctgagcagattgtgttctcccctgcagtatgatatcatgatgttttccaaasracgcactggggaactcattctatatattagttcttgcagataatagagaaagtatattctgaagattattaggacttactcagtccagtatcccaggcacaaataggtccagttgtataattaaataggccatccgagcgccggaaaggttgtatccagaaacacaactttctaagggctgtgaacaatgctgataaagatcaagtggctaactgtaaggaacaacctccaaattgcctccggatgaataaatcacagtgggtgatccaagcatattttcacatggatactgtctcatt

SEQ ID NO: 11680 - DNA, 600 bp, Chicken  19866894214711_5
acaacagagtgaatctacatcacaaaacggtgttttcctgttatagctaacacacgttcacaaacagttccaaaacagtatgaaattctttagaatgtctttctcatccagcattgcctaggcttgtccctgcttagctgraaagctgacatctccaaaatgaaacacctcgagatgatttactctccttcataatttagtataataatgaatgtatcagcttctctgcggccctacaatcttccctctgagcagattgtgttctcccctgcagtatgatatcatgatgttttccaaasracgcactggggaactcattctatatattagttcttgcagataatagagaaagtatattctgaagattattaggacttactcagtccagtatcccaggcacaaataggtccagttgtataattaaataggccatccgagcgccggaaaggttgtatccagaaacacaactttctaagggctgtgaacaatgctgataaagatcaagtggctaactgtaaggaacaacctccaaattgcctccggatgaataaatcacagtgggtgatccaagcatattttcacatggatactgtctcattc

SEQ ID NO: 11681 - DNA, 581 bp, Chicken  19866894214711_6
tcaaggatgagttccaattggctggacgggaatgaaaagatttgaatttcagtagggattatgtcatagttttgtgcaattattcctagctggtggaactgctgcaaaagtgaggaggcccagaaagtaggactggaaatctacaatctctagtacttggggttggccgatgagctgctcttgttatgatttactttgacgtttccaggattaatgcgaagactggaaaaatcaacagtgagaggagcttttgagcttccaggaccaataatcattgtagtaaatcgtcatctcagtgtytctgcatgagatgggctgttcttcaaagtccaagactttatttattccaaaaaacactgctaccactgtgaacacttcctatcacagtgccattgtctgttactgtagaggatctgctacaatgtttgcatgttttttttctctgctttgagaatctcacttttagaaaaaaacaaattttcaactcaagcctcacaaatcttcactttccttgatcacctccttctaattcctgcttgtagacttgcaacccttctcttctttcacctcaaactcagagc

SEQ ID NO: 11682 - DNA, 600 bp, Chicken  19866894214715_1
tgtttgatgtcttctctcttgcagagttatgcttagaagttgaggctttttaagtgattgtgtgggcttcagctaaactgtgaagaaagccttgtaaacaatgagcctttgtgacgaaggcagaatgagtgtaattatcacctgtcctattaaagatctgtccatttcttgttttcctttctgttttgtggataccaaaactaaccagacagtgctgtgcctttccaggtaacttggtgaccttaaaagcaactgcaaaatgaacagcggaggacagtgcagaagacgcattgggctctygctctgagcctccaggatttgaagatgtctgcgtgcagtgactttgtggaacacgtgtggaagcctggctcctgtaaaaactgcttcaacccaaagagttcccatcggctgcaaacatccccagacgtgggagcttgyggcgtgctcccgaatggaggtaggagcaagcccgagagcccagcgttggaagacgaaggcgtaaatacctctgtgttctccaagccaaccattgctgtgaagccaactatgatcaactcagatgtttctgacacgtgggcggatgtgaatatgaacgcagat

SEQ ID NO: 11683 - DNA, 473 bp, Chicken  19866894214715_2
cacctgtcctattaaagatctgtccatttcttgttttcctttctgttttgtggataccaaaactaaccagacagtgctgtgcctttccaggtaacttggtgaccttaaaagcaactgcaaaatgaacagcggaggacagtgcagaagacgcattgggctctygctctgagcctccaggatttgaagatgtctgcgtgcagtgactttgtggaacacgtgtggaagcctggctcctgtaaaaactgcttcaacccaaagagttcccatcggctgcaaacatccccagacgtgggagcttgyggcgtgctcccgaatggaggtaggagcaagcccgagagcccagcgttggaagacgaaggcgtaaatacctctgtgttctccaagccaaccattgctgtgaagccaactatgatcaactcagatgtttctgacacgtgggcggatgtgaatatgaacgcagatctgtcgcaggt

SEQ ID NO: 11684 - DNA, 599 bp, Chicken  19866894214717_1
  misc_feature (1)..(228): n is any nucleotide
nnnnnnnnnnnnnnnnnnnnnnnnnnnnnnnnnnnnnnnnnnnnnnnnnnnnnnnnnnnnnnnnnnnnnnnnnnnnnnnnnnnnnnnnnnnnnnnnnnnnnnnnnnnnnnnnnnnnnnnnnnnnnnnnnnnnnnnnnnnnnnnnnnnnnnnnnnnnnnnnnnnnnnnnnnnnnnnnnnnnnnnnnnnnnnnnnnnnnnnnnnnnnnnnnnnnnnnnnnnnnnnnnnnncttgtccgaacagactataggttccattgggtaagacatcaaggtaagcttgtcactgacaagtagatttcycagaccaccactccttgttgtagcgcttctctaaactctgtgcagtttgctctttgaggaacggtcaccaaaactaaactcactgatgctagccagcactctgacagcagtggtgcagcaccgtctgttccgtccctccggtacacggcccacagcctcctcagctcttacagtcacacccccacagcgctcgtgttcagccacccacctgcagtctgcatccccccatcccactgaccactgctctggaaggggtaagaagtcgtagcagggggcagcaatcaggaaccgaaatgaga

SEQ ID NO: 11685 - DNA, 600 bp, Chicken  19866894214717_2
tctaaactctgtgcagtttgctctttgaggaacggtcaccaaaactaaactcactgatgctagccagcactctgacagcagtggtgcagcaccgtctgttccgtccctccggtacacggcccacagcctcctcagctcttacagtcacacccccacagcgctcgtgttcagccacccacctgcagtctgcatccccccatcccactgaccactgctctggaaggggtaagaagtcgtagcagggggcagcaatcaggaaccgaaatgagagagagaagagcagctggaaatgcagaggaytgggaaaataaataaatattaaataaattaatgcatgcataataactgactctagaggcagcatttagagggaaggagggaagtgctaaggaatatggaaagttaatgttttcctatggcatttaaaatgcagtatttcatttggaacgattttctgtgctcactccttgtgaggatgtcaccttcatcttcatcacctccccccctccgtatttctgctgccgtcatctttatttggtcttaaaccaaacagcagtattttcagagaaatgcattttcctgtgatcccacacagcaacg

SEQ ID NO: 11686 - DNA, 599 bp, Chicken  19866894214718_1
  misc_feature (1)..(12): n is any nucleotide
nnnnnnnnnnnntacaggttaggttctgatctgctggatgggaactccgcagagcaggacctgggtgtcctagttggcaacaggttggtcttgagccagcagtgtgcccatgtggtcaagatggctaatggtatcctggggtgcattaaacaaatcgtggccagcagattgagggaggtgatcctccccttctctgctctggtgaggccacatctagaatactgtatccagttctatactcctaagttcaaaaaagacagggagagagacagagtcctgcagagggtgacaaagacaatwaagggcctagagaatcccctgtatgaggaaaggctgagagacctgggtctgttcagcttggagaagactgagaagtgatctcaacaatgtttaaaaatatctacagtggagaagacaaatagatagggccaagctcttttcagtagtktgcagcaactgaacaaggagcaatggrcacaaactgggacatagaaagttccatacaaacacagattaagaagttctttactgtcagggtgacagagcactggaacaagctgcccagagaggttgtggagtttccttctctggagatattc

SEQ ID NO: 11687 - DNA, 600 bp, Chicken  19866894214718_2
aacaaatcgtggccagcagattgagggaggtgatcctccccttctctgctctggtgaggccacatctagaatactgtatccagttctatactcctaagttcaaaaaagacagggagagagacagagtcctgcagagggtgacaaagacaatwaagggcctagagaatcccctgtatgaggaaaggctgagagacctgggtctgttcagcttggagaagactgagaagtgatctcaacaatgtttaaaaatatctacagtggagaagacaaatagatagggccaagctcttttcagtagtktgcagcaactgaacaaggagcaatggrcacaaactgggacatagaaagttccatacaaacacagattaagaagttctttactgtcagggtgacagagcactggaacaagctgcccagagaggttgtggagtttccttctctggagatattcaagatctgcctggatggtttcctgctcaacctactgtagggaacctgcttttacaaggaggttggacttgatctccagaggcccattccagcccatacagattccacaattacaaaaaaaacaccacgctgatgttcttctttttactt

SEQ ID NO: 11688 - DNA, 600 bp, Chicken  19866894214718_3
aggtgatcctccccttctctgctctggtgaggccacatctagaatactgtatccagttctatactcctaagttcaaaaaagacagggagagagacagagtcctgcagagggtgacaaagacaatwaagggcctagagaatcccctgtatgaggaaaggctgagagacctgggtctgttcagcttggagaagactgagaagtgatctcaacaatgtttaaaaatatctacagtggagaagacaaatagatagggccaagctcttttcagtagtktgcagcaactgaacaaggagcaatggrcacaaactgggacatagaaagttccatacaaacacagattaagaagttctttactgtcagggtgacagagcactggaacaagctgcccagagaggttgtggagtttccttctctggagatattcaagatctgcctggatggtttcctgctcaacctactgtagggaacctgcttttacaaggaggttggacttgatctccagaggcccattccagcccatacagattccacaattacaaaaaaaacaccacgctgatgttcttctttttacttttttaatggaattggccctataactga

SEQ ID NO: 11689 - DNA, 600 bp, Chicken  19866894214721_1
aaagctgaagtgggagttactttaataatgggatgtcatgtgtaaggctatgaaataaatagtaattatcgcatttgagaaactactctgttagaatttctattgctcttgacagcttcatctgtacatcaagctcttctggtttatgcactttcttgttcttaatgagcaaacaaatgaaacaggatttcttaccctgatagaaggtgttgatttcaacaaaacctaaacaaaaatagataaaagagccagtacagcagactgtgggattattttttgttgatgcatttttcttttacraaaaaaaaaaagatgaaaaacacagcaatagtttcattatttacattttccctctgccttccgtatcgtttatttttaaggaggtagatcttgcatactctgtggttcaaagcagtattacaggcggtagtgaattcaaaataaactgcagtttttactaagaaataataatgtctcagtttataaatccagaaatccaatgtatctaatttagaggagattgaaagaatggtgttttgttgctctcctgttgtccttccaaccttccctttgaggaggattccaaccatattgaggaac

SEQ ID NO: 11690 - DNA, 600 bp, Chicken  19866894214721_2
aagctgaagtgggagttactttaataatgggatgtcatgtgtaaggctatgaaataaatagtaattatcgcatttgagaaactactctgttagaatttctattgctcttgacagcttcatctgtacatcaagctcttctggtttatgcactttcttgttcttaatgagcaaacaaatgaaacaggatttcttaccctgatagaaggtgttgatttcaacaaaacctaaacaaaaatagataaaagagccagtacagcagactgtgggattattttttgttgatgcatttttcttttacaraaaaaaaaaagatgaaaaacacagcaatagtttcattatttacattttccctctgccttccgtatcgtttatttttaaggaggtagatcttgcatactctgtggttcaaagcagtattacaggcggtagtgaattcaaaataaactgcagtttttactaagaaataataatgtctcagtttataaatccagaaatccaatgtatctaatttagaggagattgaaagaatggtgttttgttgctctcctgttgtccttccaaccttccctttgaggaggattccaaccatattgaggaaca

SEQ ID NO: 11691 - DNA, 600 bp, Chicken  19866894214733_1
ttgctcacgcttccagcccggtcaggatgaggaaccctctcgctttaccatctgtgaccacgcagtttccactgtttctctgcagttcccgttcctgcctcccccatacacacgttgttcttccttctgtcccctccctcccccggagcaggacagagttggtcacctgtacgggaagtgctgcttagaaacaaaggcaataaatgtccacggatcgtctggcagagtccaagattcctccgcagcaaagccaaagatggcccacgtgcaaagcactacagaactaaaccagttctgctwtcaacatcactgcactgtgctgggcaccatgggggctgtggagcaaacccaccccaggtgacacgggagggttctgggggtgggttgtgcgcctgctgcatggaaaggcagagcaggtccagaagagaggagctaacagaaggtccttccattcctaacggctaacgggagagttcagatatgcagaaatatttcactacgttgccaaccttctgcccaactaaataacagtgtctgaacgcagtgaccgtgccactatctgcagctctaagcactcttctccttccctaaagaagcaaa

SEQ ID NO: 11692 - DNA, 600 bp, Chicken  19866894214734_1
gagagttcagatatgcagaaatatttcactacgttgccaaccttctgcccaactaaataacagtgtctgaacgcagtgaccgtgccactatctgcagctctaagcactcttctccttccctaaagaagcaaagataagcgcttcagggcatgactcattcattctcggtttctttggtatataggtctgtttgttctcagtcatcagcactcggtgaaagatggggatggaagaagcatccatcccccacacctcagccttaacagcccagcaccacgtccaggaggctgcagagtgccmggagaagwrgctgaacccaccctgaatgaattcaagcagtgactcgatgagcctcgtgcatctctctgctctgcaacatgatttctttaaaacaaacaacacaaacaacccacagtaaaccacaaacctttcaactgcatctcgactcaaagcctccttcagtgccgcctttgggagaacaaagcaacattctccgttttgtaaaatacatcatttatatcacaaggactgcttgcaaacaactgaagcagcggctacacctcgccttccaactctctgctgcccactggtttgccacca

SEQ ID NO: 11693 - DNA, 600 bp, Chicken  19866894214734_2
agatatgcagaaatatttcactacgttgccaaccttctgcccaactaaataacagtgtctgaacgcagtgaccgtgccactatctgcagctctaagcactcttctccttccctaaagaagcaaagataagcgcttcagggcatgactcattcattctcggtttctttggtatataggtctgtttgttctcagtcatcagcactcggtgaaagatggggatggaagaagcatccatcccccacacctcagccttaacagcccagcaccacgtccaggaggctgcagagtgccmggagaagwrgctgaacccaccctgaatgaattcaagcagtgactcgatgagcctcgtgcatctctctgctctgcaacatgatttctttaaaacaaacaacacaaacaacccacagtaaaccacaaacctttcaactgcatctcgactcaaagcctccttcagtgccgcctttgggagaacaaagcaacattctccgttttgtaaaatacatcatttatatcacaaggactgcttgcaaacaactgaagcagcggctacacctcgccttccaactctctgctgcccactggtttgccaccagctcactg

SEQ ID NO: 11694 - DNA, 600 bp, Chicken  19866894214734_3
gatatgcagaaatatttcactacgttgccaaccttctgcccaactaaataacagtgtctgaacgcagtgaccgtgccactatctgcagctctaagcactcttctccttccctaaagaagcaaagataagcgcttcagggcatgactcattcattctcggtttctttggtatataggtctgtttgttctcagtcatcagcactcggtgaaagatggggatggaagaagcatccatcccccacacctcagccttaacagcccagcaccacgtccaggaggctgcagagtgccmggagaagwrgctgaacccaccctgaatgaattcaagcagtgactcgatgagcctcgtgcatctctctgctctgcaacatgatttctttaaaacaaacaacacaaacaacccacagtaaaccacaaacctttcaactgcatctcgactcaaagcctccttcagtgccgcctttgggagaacaaagcaacattctccgttttgtaaaatacatcatttatatcacaaggactgcttgcaaacaactgaagcagcggctacacctcgccttccaactctctgctgcccactggtttgccaccagctcactgt

SEQ ID NO: 11695 - DNA, 600 bp, Chicken  19866894214737_1
cctgccctgccctgtcctgcacagccccgagggacgcagcagtgccgggagctgccgggcctggcggtgtactcagccctgtgacagcagcaggtgctgtgcagaggagcctggctgtgttacggactgcttttcttggcccaaattccaaaatggtttccacaacttttttttttttattattattattcctccttttgctgccgtttgaaagcggtctgagatcatcctgccaggctggtctgtacggctggatttagtaaaggcttctataaacctctctgtgtactgcggagatcmtttctgccatgraaaacgctgcgatgaattcactgctttgtgttttgggcgcacaaagccggtggctgactcatggttggtggctcctgcaggggcwwtaggcgctcctgttggtgtttgctggagggcatcggggcgggggggcaccgtcccaggaggtgtttgttgcagtggggatgtggtcagagcacggcggggtgggctgggggtgggcatgggcagctcggaggtctttcccagcccgatgaatgaagttttcacaggacccgctgctgttctcattgcgtcatctataaaacg

SEQ ID NO: 11696 - DNA, 600 bp, Chicken  19866894214737_2
tgtcctgcacagccccgagggacgcagcagtgccgggagctgccgggcctggcggtgtactcagccctgtgacagcagcaggtgctgtgcagaggagcctggctgtgttacggactgcttttcttggcccaaattccaaaatggtttccacaacttttttttttttattattattattcctccttttgctgccgtttgaaagcggtctgagatcatcctgccaggctggtctgtacggctggatttagtaaaggcttctataaacctctctgtgtactgcggagatcmtttctgccatgraaaacgctgcgatgaattcactgctttgtgttttgggcgcacaaagccggtggctgactcatggttggtggctcctgcaggggcwwtaggcgctcctgttggtgtttgctggagggcatcggggcgggggggcaccgtcccaggaggtgtttgttgcagtggggatgtggtcagagcacggcggggtgggctgggggtgggcatgggcagctcggaggtctttcccagcccgatgaatgaagttttcacaggacccgctgctgttctcattgcgtcatctataaaacgtggtgtaggttt

SEQ ID NO: 11697 - DNA, 600 bp, Chicken  19866894214737_3
tgtgcagaggagcctggctgtgttacggactgcttttcttggcccaaattccaaaatggtttccacaacttttttttttttattattattattcctccttttgctgccgtttgaaagcggtctgagatcatcctgccaggctggtctgtacggctggatttagtaaaggcttctataaacctctctgtgtactgcggagatcmtttctgccatgraaaacgctgcgatgaattcactgctttgtgttttgggcgcacaaagccggtggctgactcatggttggtggctcctgcaggggcwwtaggcgctcctgttggtgtttgctggagggcatcggggcgggggggcaccgtcccaggaggtgtttgttgcagtggggatgtggtcagagcacggcggggtgggctgggggtgggcatgggcagctcggaggtctttcccagcccgatgaatgaagttttcacaggacccgctgctgttctcattgcgtcatctataaaacgtggtgtaggtttaaccgggaggaaagacaaataaatgtcttgcaaaaaataccgacgataaaccccaactggtagcagttggattaaggagtgcttt

SEQ ID NO: 11698 - DNA, 600 bp, Chicken  19866894214737_4
gtgcagaggagcctggctgtgttacggactgcttttcttggcccaaattccaaaatggtttccacaacttttttttttttattattattattcctccttttgctgccgtttgaaagcggtctgagatcatcctgccaggctggtctgtacggctggatttagtaaaggcttctataaacctctctgtgtactgcggagatcmtttctgccatgraaaacgctgcgatgaattcactgctttgtgttttgggcgcacaaagccggtggctgactcatggttggtggctcctgcaggggcwwtaggcgctcctgttggtgtttgctggagggcatcggggcgggggggcaccgtcccaggaggtgtttgttgcagtggggatgtggtcagagcacggcggggtgggctgggggtgggcatgggcagctcggaggtctttcccagcccgatgaatgaagttttcacaggacccgctgctgttctcattgcgtcatctataaaacgtggtgtaggtttaaccgggaggaaagacaaataaatgtcttgcaaaaaataccgacgataaaccccaactggtagcagttggattaaggagtgctttt

SEQ ID NO: 11699 - DNA, 600 bp, Chicken  19866894214737_5
gttggtgtttgctggagggcatcggggcgggggggcaccgtcccaggaggtgtttgttgcagtggggatgtggtcagagcacggcggggtgggctgggggtgggcatgggcagctcggaggtctttcccagcccgatgaatgaagttttcacaggacccgctgctgttctcattgcgtcatctataaaacgtggtgtaggtttaaccgggaggaaagacaaataaatgtcttgcaaaaaataccgacgataaaccccaactggtagcagttggattaaggagtgcttttagagcctcctsgagtgcagagcatctgcagggccgttcctggggctgccgctgcccatcgcgttcagccrctcctgctgcaggtgcaggcccagaaccagagagctctgggctgacttttcatgggggtttaatcaaattgctcaatactgaggcagaaaccgatgcttccaaagcactcttcacctctcggtgttcccgttgcctgcgttgcagccccgcacaccagcacgtgcccccgctctgtgcagggaaggggcaggagccggctgcagcacagccgagggctggtgggacggaagcccatctcca

SEQ ID NO: 11700 - DNA, 600 bp, Chicken  19866894214737_6
cagtggggatgtggtcagagcacggcggggtgggctgggggtgggcatgggcagctcggaggtctttcccagcccgatgaatgaagttttcacaggacccgctgctgttctcattgcgtcatctataaaacgtggtgtaggtttaaccgggaggaaagacaaataaatgtcttgcaaaaaataccgacgataaaccccaactggtagcagttggattaaggagtgcttttagagcctcctsgagtgcagagcatctgcagggccgttcctggggctgccgctgcccatcgcgttcagccrctcctgctgcaggtgcaggcccagaaccagagagctctgggctgacttttcatgggggtttaatcaaattgctcaatactgaggcagaaaccgatgcttccaaagcactcttcacctctcggtgttcccgttgcctgcgttgcagccccgcacaccagcacgtgcccccgctctgtgcagggaaggggcaggagccggctgcagcacagccgagggctggtgggacggaagcccatctccaacccagtttgtgtttgtttgtgttgttgctttaaccgaagcgattggagtgcagtaatt

SEQ ID NO: 11701 - DNA, 600 bp, Chicken  19866894214744_1
agatgtgatgcaccatacaacaacatctgattacatgagccccgtggatctgttgtgaaagcatcaagttgtagcttacttcaacaagcgttttcttcaaaatatagtgccatgggcagtaggctagactcctgcagcgtctgaaaacacaggagctgtttgaacaccatcagacaaggcaaactagcagcaaagaagacaaaaagatgatgaaaggggaaactggaatgacctctttgcctattgctccctctgaggtcagggttaaactaggcatggaagggcagctagcagttttawgtttgctagctgaggagctgaatgctgcctcctgatggagaatgctgcaaaatgtcttaattaatcctccaccctatctctaatcaacagagttctgtgatttccaactacttttctgcttgcttgtttctgaatgtcaacagtaggtagagttgacacaaacagcagctgaagcacttaaggaatctgcaataattagcaaaggaagattattattgtttggatttgtacttgattatttaaaggtcagctctcttctgcacataatcagttttctttgcttttgtttttactttaaca

SEQ ID NO: 11702 - DNA, 600 bp, Chicken  19866894214746_1
attaatggatgcccgtcaatttatcatcctctatggttacatattagttcctgggaaatgactgcaatatcttaacatgattacaccatattaagtaattattcaatgtgaagtgatgctcttcaccagcattgccagtcaccctgagcacagttttatctaagactaaaagttttggcctgtaaatctattgatcttacttctttagtccaaatgtaagaatgcactctgttgtcatgacagagttcatttagtaaaagcctttgggtttcctagctgatgtccctatctcagtgtaargagataaggttagctaagagtatctaacccagggtagcaggcaattgtgtagtacaaatatgagtttaggaatgtacttcaaggtgtctaccagtgatttaggcagccaggaactgctgtggtcaggggagatacagggctcaattcaaataggtgatgagttccatctgacatgtctgctccccagctgctacaaagggcagtaggctcatacagatcctgtgctatatgcacctgcccacatgaatgtcttaagtactcaaggacatctcagttggmagacaactgatttgcatcctg

SEQ ID NO: 11703 - DNA, 600 bp, Chicken  19866894214746_2
atgtccctatctcagtgtaargagataaggttagctaagagtatctaacccagggtagcaggcaattgtgtagtacaaatatgagtttaggaatgtacttcaaggtgtctaccagtgatttaggcagccaggaactgctgtggtcaggggagatacagggctcaattcaaataggtgatgagttccatctgacatgtctgctccccagctgctacaaagggcagtaggctcatacagatcctgtgctatatgcacctgcccacatgaatgtcttaagtactcaaggacatctcagttggmagacaactgatttgcatcctgaggacacgcagtcagtcagcagactccagggaataattcagttcaccttcacaygtttacctactgcttgattcagttttccatgtgtggggacttagcaccatttggaagccatagcacatgacttctgcacagagctagcagacacaccacaggacctacaggggaccacggcctgctggatatcaggcagctataatgacactacctgaaggcacccattgagacaggcagctctccagtacctggccaccaagacgctcaccaacccaaaggtgt

SEQ ID NO: 11704 - DNA, 600 bp, Chicken  19866894214746_3
caaatatgagtttaggaatgtacttcaaggtgtctaccagtgatttaggcagccaggaactgctgtggtcaggggagatacagggctcaattcaaataggtgatgagttccatctgacatgtctgctccccagctgctacaaagggcagtaggctcatacagatcctgtgctatatgcacctgcccacatgaatgtcttaagtactcaaggacatctcagttggmagacaactgatttgcatcctgaggacacgcagtcagtcagcagactccagggaataattcagttcaccttcacaygtttacctactgcttgattcagttttccatgtgtggggacttagcaccatttggaagccatagcacatgacttctgcacagagctagcagacacaccacaggacctacaggggaccacggcctgctggatatcaggcagctataatgacactacctgaaggcacccattgagacaggcagctctccagtacctggccaccaagacgctcaccaacccaaaggtgtctctggggcaacaggatctttggcactaggctacagaattcctcttttccactctttccacaggcacaaagaata

SEQ ID NO: 11705 - DNA, 600 bp, Chicken  19866894214749_1
ctctctgttcaaatttacaggtaacataacatctgctggaaaacttttctccaagatgttacaggagagtactttaagccatacacagagacaccaaaacaatacttaaaatgcaagaacatgcttacaatgcatgtgtataaagaaaaaaaacctcagcacagctcctcctttctaccctaagtcctctatagcttcccattccaaaacatactgcatcctgcctaaactttcaatagtctttgtgatgcaagcctggcagggaacatcttaaaaagtaacctggtaagctcttagaayttactgaatcaacacacttcaagactaagaagctatgacgattatcttgagaaccatccctttactccaagtgggaagcaagaattacttatagaacttgttgcatcacaagtcaccacagaaatacagcttggtattatttcctcatttyaaaattttccagcagtatcttccctaatcttcaaaacaggagaggtgtatatgtataatttccatttatttattagaacttttacagacttctgagttcatcttctctatttgagaggtctacaaagtccttaaaaattacatttttca

SEQ ID NO: 11706 - DNA, 536 bp, Chicken  19866894214749_2
aacctcagcacagctcctcctttctaccctaagtcctctatagcttcccattccaaaacatactgcatcctgcctaaactttcaatagtctttgtgatgcaagcctggcagggaacatcttaaaaagtaacctggtaagctcttagaayttactgaatcaacacacttcaagactaagaagctatgacgattatcttgagaaccatccctttactccaagtgggaagcaagaattacttatagaacttgttgcatcacaagtcaccacagaaatacagcttggtattatttcctcatttyaaaattttccagcagtatcttccctaatcttcaaaacaggagaggtgtatatgtataatttccatttatttattagaacttttacagacttctgagttcatcttctctatttgagaggtctacaaagtccttaaaaattacatttttcaaattgtttctctcccaaacgggactgcaatggttagaactcctgaagcgtgaacaggaagagaaatgaggagaagcaacgcagccga

SEQ ID NO: 11707 - DNA, 600 bp, Chicken  19866894214755_1
ggacttgagtgataagccaaatctaacccccctggctcctttgtaaagaatgggagtgggaaggagaaagagaaaaggtgaagaaaagagagatttcttctgtcagtgatccataagattaactcagcctcttttaaaccagcctctgagtcacatgttccactgagctcacaggaagctctaggagatatatctcacgaggctaaatttagtccttatgaatacttacctttgccacagactatcacacagcattaattgggaatctattttagcaggaaattctctcattatgaagcrtgaatgctgasagggcagtacagattaccattttttcttggatgtgtgtgttcagattcaatcagatcagtacgacacacagtgctacttaatttaaattgagttaatcagtagtttacattagccacatcattttgacacagtattggtaaaaaccttgccctgtagaaatcaatgacaaagcctcctggacttggtgtcgagataacatcatgacattagctcttcagaattaatggagcaaaataaatttcttctctcctttatcattcatcaaattctgacccattgccttttgga

SEQ ID NO: 11708 - DNA, 600 bp, Chicken  19866894214755_2
ataagccaaatctaacccccctggctcctttgtaaagaatgggagtgggaaggagaaagagaaaaggtgaagaaaagagagatttcttctgtcagtgatccataagattaactcagcctcttttaaaccagcctctgagtcacatgttccactgagctcacaggaagctctaggagatatatctcacgaggctaaatttagtccttatgaatacttacctttgccacagactatcacacagcattaattgggaatctattttagcaggaaattctctcattatgaagcrtgaatgctgasagggcagtacagattaccattttttcttggatgtgtgtgttcagattcaatcagatcagtacgacacacagtgctacttaatttaaattgagttaatcagtagtttacattagccacatcattttgacacagtattggtaaaaaccttgccctgtagaaatcaatgacaaagcctcctggacttggtgtcgagataacatcatgacattagctcttcagaattaatggagcaaaataaatttcttctctcctttatcattcatcaaattctgacccattgccttttggatgaacatcttc

SEQ ID NO: 11709 - DNA, 600 bp, Chicken  19866894214759_1
tttttttttttaagagaagctttaagaagtttcctattatttaatcaaataataaaaatgagaatatcattcagtgtagcgcacagaacttatttgttttaattttggctagattttctgccatccctacatgcacatcatggtgtgggtcggtcaggtctgctctaaggctggacatccacaatcaccttcccagtcagtgcagtgtgtgcgtgcttgtgtgcctgctgctaaggaaactgggagcaggaacatacagccgcagtgtactttcctcatagaagggaaatggagaaaacrgtgggaagagtttctcagaatcagaggaacaattgcacyctgttttgcacaaattacttgattgtgagatatccgtgcccacctttgctaacgggttctgcagaattggaggggggaaaagcaaatagagcggtgccagattgtcactgagagatgtgctggtgtttaggggggttggtagctgtgtccccggtgcccaaggcagtgggagtggtgaaggttatgagtctttctctggctgatggtattttggtcacatatgtgcctgctccctgagaagggtgggcactgaggaataac

SEQ ID NO: 11710 - DNA, 600 bp, Chicken  19866894214759_2
tttaatcaaataataaaaatgagaatatcattcagtgtagcgcacagaacttatttgttttaattttggctagattttctgccatccctacatgcacatcatggtgtgggtcggtcaggtctgctctaaggctggacatccacaatcaccttcccagtcagtgcagtgtgtgcgtgcttgtgtgcctgctgctaaggaaactgggagcaggaacatacagccgcagtgtactttcctcatagaagggaaatggagaaaacrgtgggaagagtttctcagaatcagaggaacaattgcacyctgttttgcacaaattacttgattgtgagatatccgtgcccacctttgctaacgggttctgcagaattggaggggggaaaagcaaatagagcggtgccagattgtcactgagagatgtgctggtgtttaggggggttggtagctgtgtccccggtgcccaaggcagtgggagtggtgaaggttatgagtctttctctggctgatggtattttggtcacatatgtgcctgctccctgagaagggtgggcactgaggaataactagccatgggtgtgctgtgttaagaagggtgtgattata

SEQ ID NO: 11711 - DNA, 600 bp, Chicken  19866894214770_1
caagggcagaagggctttatatctgctgtttcatacaacgtattcgctggaaggaaaaactattgaagatctggggtaaatatgacactgaaatcttcaatgaatttttgcagttttgtaattatccctttatgtgagtttaataacctaaaataccttgatcctttacatcactgcttgtcaattgttgtcagtagctttttaaaggaggaagctcattatgactctctctgatgcaagttctacttgagcgctgaggtgatcacctttcttggccaaaagccagtgtctcttcctggrgctgtatcaatacggcttgcagagcttgcacagacagtatgaatgtttactgcttgcaagtaccacattcacagaaaacaagctactgaatcagggttgaaattggaattcacacaatcaaaattttgaagagctacttaagctcagaggaggagcagagatgagctgtgagctagatgccagtcagtacagctggaatttccaacactgaatgagagcaaccgtttattcaggtagaatgtataaatgattccctagataacttctggagagcaacatatccttgaaagtcatgaaatg

SEQ ID NO: 11712 - DNA, 600 bp, Chicken  19866894214770_2
gaatcagggttgaaattggaattcacacaatcaaaattttgaagagctacttaagctcagaggaggagcagagatgagctgtgagctagatgccagtcagtacagctggaatttccaacactgaatgagagcaaccgtttattcaggtagaatgtataaatgattccctagataacttctggagagcaacatatccttgaaagtcatgaaatgtccctgaactattcaggtagaaggtggggaaagtcaataagttgcacactttcagttactcatacagctcaagctgtacttcttatrtgctygatgtctcatagatgaaggactttcttctacaggtcttgagaaactttcaaatctgctaagtttaatttagatatcaggtgtttgtctgaccaccttcacctcttcagtctcgaagcagacttgtttcctttattattgcatggattgaactttttcatgtaatcaaagaaatccaaagtcctctagaataataattttgaggaaaatcaggtcttattagacaactgtttctccaataatgttctggcagaagtgggttctgatttcttcttgactgaggaatgaactcataat

SEQ ID NO: 11713 - DNA, 600 bp, Chicken  19866894214770_3
agggttgaaattggaattcacacaatcaaaattttgaagagctacttaagctcagaggaggagcagagatgagctgtgagctagatgccagtcagtacagctggaatttccaacactgaatgagagcaaccgtttattcaggtagaatgtataaatgattccctagataacttctggagagcaacatatccttgaaagtcatgaaatgtccctgaactattcaggtagaaggtggggaaagtcaataagttgcacactttcagttactcatacagctcaagctgtacttcttatrtgctygatgtctcatagatgaaggactttcttctacaggtcttgagaaactttcaaatctgctaagtttaatttagatatcaggtgtttgtctgaccaccttcacctcttcagtctcgaagcagacttgtttcctttattattgcatggattgaactttttcatgtaatcaaagaaatccaaagtcctctagaataataattttgaggaaaatcaggtcttattagacaactgtttctccaataatgttctggcagaagtgggttctgatttcttcttgactgaggaatgaactcataataattg

SEQ ID NO: 11714 - DNA, 600 bp, Chicken  19866894214779_1
tgcaggtccaataaaaaggaactaaaattgtacaagaaacctctgataacactgttatgtaaagcagaaatatttaacattttaagtagcttttacagaaaaaaacaatatttattcttttctacaatgtgatatttatcatggttttagactttgaaatgcaatcaagtaattagaagactgattttttaaataaattatgaaagtagttatgatcaagaagtaaatgttgattcctctctttgtagagagttgtaaattataggtactgtgcagacatattcttacagaagcatatarcatttctacatatccttgtctacacctagacaaaccttattctataagtgaaaggaaagatgcattaatacaaagaaaataggtttggttgtttttctttagaagaagtcttaaggtccaaaattaaataataggtaaacaattgaacattgctggaatacctctgctactgtaggaactgagcaaactcttactgcaactacactgcctttaaattcagagtttggcatctgaagttcttcgtatccacaatacaaacagctgcaggtgttaaatatgaaagaacagactcctgaattt

SEQ ID NO: 11715 - DNA, 600 bp, Chicken  19866894214782_1
tcctgctttgccagccctttgcctgataaagccccttgactatggttatcattatttattgattctaatttgaaacatgcactcaagtatgatgttaattcagtttctggatatcagtgtgccatccatgggattgtaacaaagtgaacaccttgcttacaccagctgaaatataagaaaaaaaatagttttcttgatctggctaatgttgatcatcttatatcgttacaagcaattatgtgatgtataatgatacacattcgtcaagaaggagaaaattaccaatgtcctcccaaagtraagttagtgacacatttgagacagataaytttttccttgaagtttaaaatacaccgatcatacaaatggactgggcaagaaaacttgcaaaaaaatatttttaggtgggaggaagacagcttaagaaagttcagtcactgaagttcacggcaaaaagttttcttttttgcattgtttaccaaggaggagtctctcagacattaatgctcattaacagcattaatgatatttatattctccattacatggaaactcaaggtagttgtatataaacaaaactatatccaaaagaattaataa

SEQ ID NO: 11716 - DNA, 600 bp, Chicken  19866894214782_2
agccccttgactatggttatcattatttattgattctaatttgaaacatgcactcaagtatgatgttaattcagtttctggatatcagtgtgccatccatgggattgtaacaaagtgaacaccttgcttacaccagctgaaatataagaaaaaaaatagttttcttgatctggctaatgttgatcatcttatatcgttacaagcaattatgtgatgtataatgatacacattcgtcaagaaggagaaaattaccaatgtcctcccaaagtraagttagtgacacatttgagacagataaytttttccttgaagtttaaaatacaccgatcatacaaatggactgggcaagaaaacttgcaaaaaaatatttttaggtgggaggaagacagcttaagaaagttcagtcactgaagttcacggcaaaaagttttcttttttgcattgtttaccaaggaggagtctctcagacattaatgctcattaacagcattaatgatatttatattctccattacatggaaactcaaggtagttgtatataaacaaaactatatccaaaagaattaataatatgatcatacagtgttttcctcatgcta

SEQ ID NO: 11717 - DNA, 599 bp, Chicken  19866894214784_1
  misc_feature (1)..(42): n is any nucleotide
nnnnnnnnnnnnnnnnnnnnnnnnnnnnnnnnnnnnnnnnnncaagcagctataacatcagctttctcttcttaccctcttctctcatttcctgcttcaaactgccatatgggcacagttatactcaaaagaagatacagaaagctattgtgtatttatttttaagattttaagaccaagactgtcatcaaccagttcatacattctctttatagtgggattttgatactgtgatggtttgattacacaatgcgaagtatgcttaaaatggtatttcagaccaaatggtatcatttgttrtatttacttgccatttttaatgaatgttacttacaaaaggaatccagaaagccatgccccagccctttgggagatagatatcccagccactcccccatcctggtcgatcttctccagccatttttcctggctgttgcaccaacagtataggaattttagattcacaaggacccaaatcaagctgagatccaggtaccagtaactgggctctcattttgtttaattcctaagaaggagaattttcccataagttagtaagcttttccccctcttccataatatccttccaagatacagac

SEQ ID NO: 11718 - DNA, 600 bp, Chicken  19866894214785_1
tacctagagtttgacaacacttttagtgtccctgtggttaacataatgtaatcacgagtgtctttttgcaggtgctggtttttctatcagcatatgcttgactgaaagcatctgattcatagcctgtggcaggacagtagatcctgtgtgagtcatttcacagtgatacagtgtgtaactcatcattgcaaaagtaacatctttcctttgagatcctatttcaagatatttttaaaatcccttatttttgaaatttttacttcagaaagttttataaagagaataacaacatttttcttrttcctaggatccattctatattgttttctcatatgaaaggatatggcatgctacagaactagtgggtttgggaaccttttgttgatgtcttatctatgtgctttgtgtaggaacaaactcacacagtgaagagcactgatgaagtctgttcacgtgatctgtaattcaaggccagcctcttagaacatggctataggcttctgatggacagactgtgagaatagtgtaggcacaaaggtaaaaagcagagagagttacttaaaaaaagacccacaatcataatggaggattctaggctag

SEQ ID NO: 11719 - DNA, 600 bp, Chicken  19866894214787_1
ctatacctctcataagcacaaagactatttttaaaaccaagtcactgtatttctggccttaattggtgtgttttgaaagtgccctgtgaaagctgcagtacataacctaatccttctaattaaggttgtataaaagtacttattcttttagtacattagattcaagtttgcactcagaatgttagtcccaattaatatgggttaaagcaattgtgcaaacatatttacatcttaaagtaattatacaaaaaatgacttcctaaataagtaaatccttagcaggttatctgctttatttcyatctgcctttaaaagggacacagcagtgtctggcacaaaaccttctcttcagaaaatatwgagtttctgcattacagctatgaactatcacatgtactggaaagaaagaaattcaactaaaagaagatcatatctataatagctttttaaattatggcatttataacttagaattttggtagaatattatagctaactcatggccttttgtttatttcattacaaagggaacagtctgagcagttaygcgtaaccaaaaaaagagagatgtttctgcttttcgtcttgtttgcctgctgc

SEQ ID NO: 11720 - DNA, 600 bp, Chicken  19866894214787_2
aattggtgtgttttgaaagtgccctgtgaaagctgcagtacataacctaatccttctaattaaggttgtataaaagtacttattcttttagtacattagattcaagtttgcactcagaatgttagtcccaattaatatgggttaaagcaattgtgcaaacatatttacatcttaaagtaattatacaaaaaatgacttcctaaataagtaaatccttagcaggttatctgctttatttcyatctgcctttaaaagggacacagcagtgtctggcacaaaaccttctcttcagaaaatatwgagtttctgcattacagctatgaactatcacatgtactggaaagaaagaaattcaactaaaagaagatcatatctataatagctttttaaattatggcatttataacttagaattttggtagaatattatagctaactcatggccttttgtttatttcattacaaagggaacagtctgagcagttaygcgtaaccaaaaaaagagagatgtttctgcttttcgtcttgtttgcctgctgcartgagattttaaagccaataaaatttaagcaaatgataattctgattaaagttttagta

SEQ ID NO: 11721 - DNA, 600 bp, Chicken  19866894214787_3
aaaaatgacttcctaaataagtaaatccttagcaggttatctgctttatttcyatctgcctttaaaagggacacagcagtgtctggcacaaaaccttctcttcagaaaatatwgagtttctgcattacagctatgaactatcacatgtactggaaagaaagaaattcaactaaaagaagatcatatctataatagctttttaaattatggcatttataacttagaattttggtagaatattatagctaactcatggccttttgtttatttcattacaaagggaacagtctgagcagttaygcgtaaccaaaaaaagagagatgtttctgcttttcgtcttgtttgcctgctgcartgagattttaaagccaataaaatttaagcaaatgataattctgattaaagttttagtaactcgtaacacttatcactctgattaaggttttagtaactcataacactactattttgttttcgtacattatttttcatcaagacctcaaagtatttaaaaaaaaaggaaggaaatgtcatcaacccattttacaggtagataaattttactgatttcagttttctctgcctatttcacatcctcct

SEQ ID NO: 11722 - DNA, 558 bp, Chicken  19866894214787_4
ctgcctttaaaagggacacagcagtgtctggcacaaaaccttctcttcagaaaatatwgagtttctgcattacagctatgaactatcacatgtactggaaagaaagaaattcaactaaaagaagatcatatctataatagctttttaaattatggcatttataacttagaattttggtagaatattatagctaactcatggccttttgtttatttcattacaaagggaacagtctgagcagttaygcgtaaccaaaaaaagagagatgtttctgcttttcgtcttgtttgcctgctgcartgagattttaaagccaataaaatttaagcaaatgataattctgattaaagttttagtaactcgtaacacttatcactctgattaaggttttagtaactcataacactactattttgttttcgtacattatttttcatcaagacctcaaagtatttaaaaaaaaaggaaggaaatgtcatcaacccattttacaggtagataaattttactgatttcagttttctctgcctatttcacatcctcctatgcaaggagaaa

SEQ ID NO: 11723 - DNA, 589 bp, Chicken  19866894214789_1
ctatgcagaaaagagaggtatttttgtaggacttcttgattttccttctgccagacttctgcaacatagaagataactgcctgtactaaatgtgattactttggttttatcactttcattatttattgatgccactctcccagatcacttcactgagagccctgctcacataccaggatcttagaataagctttttattacaatctatgttactggatgcctaaatcatgaggctgggatctgtaaaacagttcaagtggtatggttttatgttagaaaagtataatgccaagaagcccrgttctgaaaactgggaaaatccataygcctcattagaactgctgcatgagtatcatctgctctctcctcttcttcccggatattattttcatcatgatttctcttatcctgtaggctttctaacatttttctctccttagactgaggctgactacagaaaaagtttcagattagttcatatatgctacctaaatgcatttgtctcttcacacttaaagcagaacctcttagtttagcgttctttaattatcagtgcagagtcaatggacgccaactgaaagacatacga

SEQ ID NO: 11724 - DNA, 563 bp, Chicken  19866894214789_2
taggacttcttgattttccttctgccagacttctgcaacatagaagataactgcctgtactaaatgtgattactttggttttatcactttcattatttattgatgccactctcccagatcacttcactgagagccctgctcacataccaggatcttagaataagctttttattacaatctatgttactggatgcctaaatcatgaggctgggatctgtaaaacagttcaagtggtatggttttatgttagaaaagtataatgccaagaagcccrgttctgaaaactgggaaaatccataygcctcattagaactgctgcatgagtatcatctgctctctcctcttcttcccggatattattttcatcatgatttctcttatcctgtaggctttctaacatttttctctccttagactgaggctgactacagaaaaagtttcagattagttcatatatgctacctaaatgcatttgtctcttcacacttaaagcagaacctcttagtttagcgttctttaattatcagtgcagagtcaatggacgccaactgaaagacatacga

SEQ ID NO: 11725 - DNA, 599 bp, Chicken  19866894214791_1
  misc_feature (1)..(68): n is any nucleotide
nnnnnnnnnnnnnnnnnnnnnnnnnnnnnnnnnnnnnnnnnnnnnnnnnnnnnnnnnnnnnnnnnnnnctgcagcactgcagtaatccattctgggcaaattccctaaaaaaatattagaaataaaaaaggtatttcaggccctactttgtctgaagagggaatttttagccagcactaagttacctccctcctttctaggtgggaaacaattcaagccatcttaacatatttttagttgggttatcataaagacgttcatgttgccattctgaagagcagattgccatgtaatttcacrtttttcgtccttgtgcaaataagtcacagtttactgtaggctgatttttctatgtgtaatatgtggattagcaattaacattttaattaaagatggattaaccaatattaggaaaattatgtctggaactgttcaatttaaaatccaccgtatacatacagataaacatatctttgttaagtacaagtaattttctggtctgtgcaagaatgatacgatttaggactttgagagacagcatagtaatttgatattattacacatggagataactaccaaacaaatataataagtgaaaa

SEQ ID NO: 11726 - DNA, 600 bp, Chicken  19866894214791_2
atgtggattagcaattaacattttaattaaagatggattaaccaatattaggaaaattatgtctggaactgttcaatttaaaatccaccgtatacatacagataaacatatctttgttaagtacaagtaattttctggtctgtgcaagaatgatacgatttaggactttgagagacagcatagtaatttgatattattacacatggagataactaccaaacaaatataataagtgaaaaacatatttttcaagaagctgcatgattaccattaaattaagtgttagatgttcatttagcragggctcagaccacagctcaagcagcactgctggtagaccagtttaatttagttatgtttaaaccaagagtagtggtgaaggaggacacgctgttctaagtataaactgtattaacagagatttctgtacttcttgttccacttgcagtttttttgctgtgaaaataaatcacagcgcgttttctcttctttcagcaatcttcatagtgagaagccagaatttgtaccatgtgccttcctgtctgcatctggtctcattttgtcagtgcacatcccgggtgctgagttctgttgggttgt

SEQ ID NO: 11727 - DNA, 600 bp, Chicken  19866894214795_1
ggagtttgcacagtgcaacctgactgacatcaggaggtgtctccaggttgatgcaagctctcattgcttccttacccttcgtgcctggggcagtgcatgcttctctttgctttccctgtcccatctgcgcttttcaggcagttctttagggcatgagcccagagaatggctctgccaaggacagatacacatggctatctatagctgcatcctccagctcatactggctctgtgctgctgttctaagcatgttttagggcctctttgatactttatggaccaacagcctgtaacacaacrgaaagcacagcaacgacagcatagtagcaaagtcctaggctacagcaagcagggtaatgctcaaatgaggcagccatagacacagaaacaaaggaaagaatctgcttacccttgaaaggcctcaggtacacagggatctccagcaggattccctctcctccattgccagcccttaaatgaggtctgggaagggggtggatcctggctccagcccttctggtcattcaggtgtattgcatacacctgagctcccttgggttggccctgccttctcaccaggtgctcaatcacagggtcaag

SEQ ID NO: 11728 - DNA, 599 bp, Chicken  19866894214799_1
  misc_feature (1)..(229): n is any nucleotide
nnnnnnnnnnnnnnnnnnnnnnnnnnnnnnnnnnnnnnnnnnnnnnnnnnnnnnnnnnnnnnnnnnnnnnnnnnnnnnnnnnnnnnnnnnnnnnnnnnnnnnnnnnnnnnnnnnnnnnnnnnnnnnnnnnnnnnnnnnnnnnnnnnnnnnnnnnnnnnnnnnnnnnnnnnnnnnnnnnnnnnnnnnnnnnnnnnnnnnnnnnnnnnnnnnnnnnnnnnnnnnnnnnnnncctttaccattcccctctgggctttccttgtgcttctgcagactactgggtgagcttagcaggcccagcargctgagtggttgcaygctgtggcttatgttgtcccatccatgctatagcagccctgtttgcagaagaaaacaacctgaaatttctttctcttaagtatcacttctctggttcattacaaattgagaaagtgatttgtgctggaagatttctgtcactggttcttcataaatgaatccaaactgcattcttgctggaccactgccaaggtttttatctgcttgtcactggagctctggccagtgatcctttcagatcttctagtggagcaaatgatgtttgcaattctccttcacttcag

SEQ ID NO: 11729 - DNA, 599 bp, Chicken  19866894214799_2
  misc_feature (1)..(214): n is any nucleotide
nnnnnnnnnnnnnnnnnnnnnnnnnnnnnnnnnnnnnnnnnnnnnnnnnnnnnnnnnnnnnnnnnnnnnnnnnnnnnnnnnnnnnnnnnnnnnnnnnnnnnnnnnnnnnnnnnnnnnnnnnnnnnnnnnnnnnnnnnnnnnnnnnnnnnnnnnnnnnnnnnnnnnnnnnnnnnnnnnnnnnnnnnnnnnnnnnnnnnnnnnnnnnnnnnnnnnncctttaccattcccctctgggctttccttgtgcttctgcagactactgggtgagcttagcaggcccagcargctgagtggttgcaygctgtggcttatgttgtcccatccatgctatagcagccctgtttgcagaagaaaacaacctgaaatttctttctcttaagtatcacttctctggttcattacaaattgagaaagtgatttgtgctggaagatttctgtcactggttcttcataaatgaatccaaactgcattcttgctggaccactgccaaggtttttatctgcttgtcactggagctctggccagtgatcctttcagatcttctagtggagcaaatgatgtttgcaattctccttcacttcagcacagagtctcrgca

SEQ ID NO: 11730 - DNA, 600 bp, Chicken  19866894214799_3
gcaygctgtggcttatgttgtcccatccatgctatagcagccctgtttgcagaagaaaacaacctgaaatttctttctcttaagtatcacttctctggttcattacaaattgagaaagtgatttgtgctggaagatttctgtcactggttcttcataaatgaatccaaactgcattcttgctggaccactgccaaggtttttatctgcttgtcactggagctctggccagtgatcctttcagatcttctagtggagcaaatgatgtttgcaattctccttcacttcagcacagagtctcrgcagcttgctccttcagggtttgcctactggtgcaaattgtgaccctgtggagctggtgaggttgcagaacgggatccctgtggtgctccacagtggccatgagcggtcacagtgttgtttcactcagaaggctgtgacacgttctggactgctctatcccaccagtgtggccctgacgcccgcctggagctcatctgacagaaaaaaaaatgaactgctaaaagtagtggtcacttttaaatcccagtctttaatcttttgccctgttcgtttcagtgcatttctgaaggaacagccca

SEQ ID NO: 11731 - DNA, 600 bp, Chicken  19866894214800_1
atccttttaaatcccaatccaaataatttagctttccctataaactccacagaaagttaattggtgtaaaagaaaagcaatgtaggatagaagaaggaaaccattctaattgtaaatgctgactactttgacactactgctacatatagctttcaagcatataactgaagctgcactgttcaaacagaactgaactttgaatattgaaggaggattgtgccttgatgtgtacaaaaaattaaagcatgattacaggtatacctgagttcaccagtaaattcaataattaggacactaatkcaatataagactgttaataaggaaattaatatctatattttataatcaaaatttagtatcgcatctacaattttaactcctggagcagttgtctacttgccttcttctctcaaaacctggctgacttgtactgcacatactacatttgaaaaatatatactttatgtaatagtaacttctctattattcttaaatcttcaagtactgtaaactcagtgatgtttgaaaaagcacactcttccaygttgtctgcaaggtggaagcctctttcaagttagctgccatttccactgtaacaat

SEQ ID NO: 11732 - DNA, 600 bp, Chicken  19866894214800_2
catgattacaggtatacctgagttcaccagtaaattcaataattaggacactaatkcaatataagactgttaataaggaaattaatatctatattttataatcaaaatttagtatcgcatctacaattttaactcctggagcagttgtctacttgccttcttctctcaaaacctggctgacttgtactgcacatactacatttgaaaaatatatactttatgtaatagtaacttctctattattcttaaatcttcaagtactgtaaactcagtgatgtttgaaaaagcacactcttccaygttgtctgcaaggtggaagcctctttcaagttagctgccatttccactgtaacaatggaagacatgaagaagtatgacagccactttcattcacatgcttctcattttttagctgtctcacgaaagcagccaagttcgtcttctggttctttaactgtgtggaatggaagtcctgggtttatttataaaattgtaaatgagaataccttaacagtgagcagaattagtatactaatatctgcttacatggagaaatactggtagctagagacctgatctccttggaagactggtttctat

SEQ ID NO: 11733 - DNA, 600 bp, Chicken  19866894214807_1
ccctctgagcagggacggcacaaaggcttctccacatgcctccctcacctggttgtgctctccctctttgtcagcactgccatgtttgcctacctgaagccccattccatttcttccccacctgtggatttggtggtggctgttctgtatgcagtggtaccccctgtaatgaatccacttatttacagcatgagaaacaaggagctcaaggttgctctgtcagaactgatgaacaaatgtgtttcaaaagcaatgaactgctcatatttttctgtatgtcatctgtaattcaggttttarcaatatcaaactgtctctttttgttttgtgttttcattggttaaatggaatttattaaatgttttattctgtgtttaatgtattctaatgtttttcactgaaagttcattatgcctttgaatttgtattcatcttgttccttagcagtgtaacgcagacaccctgcacatgacgaaccaggccctctgtgaaccacatcaaaacwaagggcatgcaatgactttgtctgtcgtccatcttgtgagacatttctggagctgcggggtcagttgctctcagaaacccacagtccagcaggaa

SEQ ID NO: 11734 - DNA, 600 bp, Chicken  19866894214807_2
tcaaggttgctctgtcagaactgatgaacaaatgtgtttcaaaagcaatgaactgctcatatttttctgtatgtcatctgtaattcaggttttarcaatatcaaactgtctctttttgttttgtgttttcattggttaaatggaatttattaaatgttttattctgtgtttaatgtattctaatgtttttcactgaaagttcattatgcctttgaatttgtattcatcttgttccttagcagtgtaacgcagacaccctgcacatgacgaaccaggccctctgtgaaccacatcaaaacwaagggcatgcaatgactttgtctgtcgtccatcttgtgagacatttctggagctgcggggtcagttgctctcagaaacccacagtccagcaggaagcatatggctgttagtcaaactgtgcggtgacctcagcctgcaatagctgatgggccatcccttggctcctggctgggttctgtgctttcaggctcacatctgtcagtgcctctggcaggccagcagcagcacctgctttgcacgttggttgtcagatcccctcttcctcagtccctgtgagaccctgcataggaaaaggtcttg

SEQ ID NO: 11735 - DNA, 467 bp, Chicken  19866894214810_1
gttcaaccccctgctaaagcaggtaccctactgtaggttgcacaggcaacaagtcagtccatgtccatgcttgttttatctctcctaacatatacctatcgtatcaattactttcaaattaatacagtgttaatctcagctaacatgggattacagttcacctctaccttccttacctcaaggtagagcaagagtcacgcacccacattcagagccaggcaagcattgtccaagtgaattgccagagagaccaagcctggccttagactcttagggctatctggagaatctgaatctcaycaacyagatgtaatagaatctgctataaaactagggcagtaactgtgtagaaaagcataaacacaaatgcaaggtcctcagtggcgctagtagcagagcaccctggaggtctgcagtccagcctcaccccttactgcaagactacccagagctagaaacagggcaga

SEQ ID NO: 11736 - DNA, 462 bp, Chicken  19866894214810_2
accccctgctaaagcaggtaccctactgtaggttgcacaggcaacaagtcagtccatgtccatgcttgttttatctctcctaacatatacctatcgtatcaattactttcaaattaatacagtgttaatctcagctaacatgggattacagttcacctctaccttccttacctcaaggtagagcaagagtcacgcacccacattcagagccaggcaagcattgtccaagtgaattgccagagagaccaagcctggccttagactcttagggctatctggagaatctgaatctcaycaacyagatgtaatagaatctgctataaaactagggcagtaactgtgtagaaaagcataaacacaaatgcaaggtcctcagtggcgctagtagcagagcaccctggaggtctgcagtccagcctcaccccttactgcaagactacccagagctagaaacagggcaga

SEQ ID NO: 11737 - DNA, 600 bp, Chicken  19866894214817_1
tggtaagagactttcagataggctcgtctgaatgaagtattagcagcaacaaaactcttccagtttccaaatcaaattgcagaaagagagatgctgcaccgagcttaattgtccaaacttgattccaaagctgtgggaatcatatcaagattgaacactgactttttgtgaaaagaaaaaatgacaagtcgaatacccatctacaggatgtcagcctgctgtattatttgattcctgacgtgatttagaagagttgttgatttcttatatgtttatagatgtggcctaagcactgtggtsatgtggccagattaaggaatcttgttttaagaactgtgaattctttctaagaagtctgtccacacagtctgtaaatagtttgagaaatggatgcagttgtatcacacagtccagctcgtcctcaaaagttaaaacctcttgatttctgtgagcatttggtcagatctacacagatttggttgttggtttaaatctagccaaggctggtggtgtcttaattgctaccacagagcagccatttggcctgtgtgagatgaatgttgtcagagtaccttctgcaaggcggacattcatccactg

SEQ ID NO: 11738 - DNA, 600 bp, Chicken  19866894214817_2
tatcacacagtccagctcgtcctcaaaagttaaaacctcttgatttctgtgagcatttggtcagatctacacagatttggttgttggtttaaatctagccaaggctggtggtgtcttaattgctaccacagagcagccatttggcctgtgtgagatgaatgttgtcagagtaccttctgcaaggcggacattcatccactgggaatgtatcaagaaagttttcattaattggtccctttgttggcatttgtggcagagcagccaaaatctgagtatgaacagacactctatgttgggggygagatttattggcaagtctcagtacaaaaactggtatttactacatacattgtaagcaggagcagaagactttcctcttaagaacaatctgccattaaatgtactctatttttttcttaagacacagaaatgtagcaagaatttacagactacagtgtgagattaagaatattaaacagatctgtcctatgtaatgttgactgtcttgcagcattcttttagcataatgtgaagtgttatgatgagctctgtagtctacagacaaatttacatggacctatgaatacttctgtcagatgg

SEQ ID NO: 11739 - DNA, 600 bp, Chicken  19866894214818_1
tgaagccacattttatgaaagtcttataccctttcaaatgagctttcagtctcttgcaaagtataacaagtggaacagaagcagatttcctgttaatgctcctttgtatgggtttccatgataacaagaaagcaaatagccctcactaaataatgggctctttacaaagacactattaagaaaggctgtctaattttttttaccttcaggtgaactattgagctcagatctattttggcctgatttttgtcagtacattactagcaaaaatcattccagaaacacagtggtgtaaactcygtggtggtaacctgactagactcatgcatcagataccgccctctgtcatagcactcactgttcctgacctttttcccccctctgacaaacacagcacaacatgcctttctggaggatatccagtcattcggacctcttggctctccatcaagcactggaactagagtatttgtaactgtgttctaaagttggcgatcctttttttwtatatatatatatttcaagtacactgaatttttatgtgtgattcaatgcctctggctttacacatatgaattgtcttaagaagggaagaaatat

SEQ ID NO: 11740 - DNA, 600 bp, Chicken  19866894214818_2
caggtgaactattgagctcagatctattttggcctgatttttgtcagtacattactagcaaaaatcattccagaaacacagtggtgtaaactcygtggtggtaacctgactagactcatgcatcagataccgccctctgtcatagcactcactgttcctgacctttttcccccctctgacaaacacagcacaacatgcctttctggaggatatccagtcattcggacctcttggctctccatcaagcactggaactagagtatttgtaactgtgttctaaagttggcgatcctttttttwtatatatatatatttcaagtacactgaatttttatgtgtgattcaatgcctctggctttacacatatgaattgtcttaagaagggaagaaatatttggaattaaaaattccaaactgaagaattcagattgctgaatggagttaaaacattagtgctacataaggaagctctatggtcttatatatgcaacgtttttaaatggattaaaactgtggaggttgctggtacacaccgaatgagccctgacaggagtgaacaaaggactcgaactggcaaagcaccaacacgcgttttccaac

SEQ ID NO: 11741 - DNA, 599 bp, Chicken  19866894214828_1
  misc_feature (1)..(134): n is any nucleotide
nnnnnnnnnnnnnnnnnnnnnnnnnnnnnnnnnnnnnnnnnnnnnnnnnnnnnnnnnnnnnnnnnnnnnnnnnnnnnnnnnnnnnnnnnnnnnnnnnnnnnnnnnnnnnnnnnnnnnnnnnnnnnnnnnnnnnnttagtatactaaatgaacctagacctaatcactgcggttttgactaatactttatagaatctgtatcatttccaacactgacttttcccacagtttgttagaatttcttatccctcttgttctttatgccttctgctggcttaccagagacataggaatgaccacragctgcattcctaaagttacagacctcagccctgaattcaaggctgtcctactggctactacagaaagaatgacttccaaagccctttgccagccttgttcctgctgcgggtctgtcacctccagagacagaaataacctccaaaacaccatctagtcacstttgttccaaggtggtgagttctgcttgcacaagtgacctcacctcaacatatctatccctgccttgtggcccattgctcagygctagggcagctccagggtgcccctgccggctgcctctttctgctgtgcccygag

SEQ ID NO: 11742 - DNA, 600 bp, Chicken  19866894214828_2
atcactgcggttttgactaatactttatagaatctgtatcatttccaacactgacttttcccacagtttgttagaatttcttatccctcttgttctttatgccttctgctggcttaccagagacataggaatgaccacragctgcattcctaaagttacagacctcagccctgaattcaaggctgtcctactggctactacagaaagaatgacttccaaagccctttgccagccttgttcctgctgcgggtctgtcacctccagagacagaaataacctccaaaacaccatctagtcacstttgttccaaggtggtgagttctgcttgcacaagtgacctcacctcaacatatctatccctgccttgtggcccattgctcagygctagggcagctccagggtgcccctgccggctgcctctttctgctgtgcccygaggtgctgcgctctgtgcactgagaccacgtgggcagtgattagagcatggtggggaaacagcccggggccgggaccttggactagggactgtgacatcccctcgccatgaggaaggtttcttctagggggtcctgttttgggactggcagagcagtgatctct

SEQ ID NO: 11743 - DNA, 600 bp, Chicken  19866894214828_3
tccctcttgttctttatgccttctgctggcttaccagagacataggaatgaccacragctgcattcctaaagttacagacctcagccctgaattcaaggctgtcctactggctactacagaaagaatgacttccaaagccctttgccagccttgttcctgctgcgggtctgtcacctccagagacagaaataacctccaaaacaccatctagtcacstttgttccaaggtggtgagttctgcttgcacaagtgacctcacctcaacatatctatccctgccttgtggcccattgctcagygctagggcagctccagggtgcccctgccggctgcctctttctgctgtgcccygaggtgctgcgctctgtgcactgagaccacgtgggcagtgattagagcatggtggggaaacagcccggggccgggaccttggactagggactgtgacatcccctcgccatgaggaaggtttcttctagggggtcctgttttgggactggcagagcagtgatctcttcagcttgatggaaaggtgcctggaccgggtgctcccaagtagggctgatgagcgctgaactgaggaatggaactgatgtgcg

SEQ ID NO: 11744 - DNA, 600 bp, Chicken  19866894214828_4
cacragctgcattcctaaagttacagacctcagccctgaattcaaggctgtcctactggctactacagaaagaatgacttccaaagccctttgccagccttgttcctgctgcgggtctgtcacctccagagacagaaataacctccaaaacaccatctagtcacstttgttccaaggtggtgagttctgcttgcacaagtgacctcacctcaacatatctatccctgccttgtggcccattgctcagygctagggcagctccagggtgcccctgccggctgcctctttctgctgtgcccygaggtgctgcgctctgtgcactgagaccacgtgggcagtgattagagcatggtggggaaacagcccggggccgggaccttggactagggactgtgacatcccctcgccatgaggaaggtttcttctagggggtcctgttttgggactggcagagcagtgatctcttcagcttgatggaaaggtgcctggaccgggtgctcccaagtagggctgatgagcgctgaactgaggaatggaactgatgtgcggaaatcaaactctacagccacagagtagttataacacaggtcggcttaatca

SEQ ID NO: 11745 - DNA, 600 bp, Chicken  19866894214828_5
gctggctctggttgatcgttccattggccagaactccattcaataacccgctgcttctttgttaatttgtggttttatggtctgagcctgctaccctgcatgccagagatagaatactgtaggacaagtgaaggcaatgacagagcctatatttgtgaaaaaggcactggaggaaaagatatcagaaaggaattgactcacccctcctggtaacagtgtggagagagtgacaagccgaagaatgtgaccctcctccgttcgtaccgtcacaccactggagagcacggcaggggcaaaagkgggacccgcacagagacagactgcacagkaagtattgcagaggcagaaggggtgactccagaccaccgcccctgctccaggcacacacacacccatgtagcccacccactggttcaggctgtgaccctggaattctactacagatagataatgatgttatttggaaaaatgggaaacccgctgcctgcgctaattgtctgtagaagagcatctgttatcggcagggagaacctggcttagcaagttcaagtaaacctgaaataaagggagagtaaatgctgtagaaaagtgtgagtaaac

SEQ ID NO: 11746 - DNA, 600 bp, Chicken  19866894214828_6
agaactccattcaataacccgctgcttctttgttaatttgtggttttatggtctgagcctgctaccctgcatgccagagatagaatactgtaggacaagtgaaggcaatgacagagcctatatttgtgaaaaaggcactggaggaaaagatatcagaaaggaattgactcacccctcctggtaacagtgtggagagagtgacaagccgaagaatgtgaccctcctccgttcgtaccgtcacaccactggagagcacggcaggggcaaaagkgggacccgcacagagacagactgcacagkaagtattgcagaggcagaaggggtgactccagaccaccgcccctgctccaggcacacacacacccatgtagcccacccactggttcaggctgtgaccctggaattctactacagatagataatgatgttatttggaaaaatgggaaacccgctgcctgcgctaattgtctgtagaagagcatctgttatcggcagggagaacctggcttagcaagttcaagtaaacctgaaataaagggagagtaaatgctgtagaaaagtgtgagtaaacccagaaaaaagtgtgaataaactcagagt

SEQ ID NO: 11747 - DNA, 600 bp, Chicken  19866894214833_1
tcagtaaggaactcttcccaactggtatttcttatgattaataaacttaactgaagtattggtgttagcacgtcctgtgacagctgactaaccatcagtggaatttcatgttggcctcagtcaaagccaaacagaggtcttgcttgtcagggagaaaacacagctatttactaagatagatgtaatgtctcactaatgacttggtagttatgagtgctattcagcactatgtgtagagagtattggctttctagcgttaagtaaggcattatcttgtctgtaggatttttcagtaaacaratggagagtttaaattcttcaaatctcttttttttttagacatatgtatgtgttaatgctgcataattttcttaattcatcatcacctactttcttttgtaccccattaagtccaggaataacattttgtactgagtttcaaatatgattttggaagtacactgaaatttccaacattttgatgaattctgtatcatttgttgcaataataaacacagacaagcagaagaaacagtctgcaaatgcagaaatcgtgatgtatgggcagcacagaaaataagaagtactaattcaaatcca

SEQ ID NO: 11748 - DNA, 600 bp, Chicken  19866894214835_1
aagtgggaaagatgaaacagagagacggtgtttcctgttaccaacagcttattggagtgtcagacttggcctgacagagcctacttctgtcttttcatgtgctgctgatggttaaaaaaggaaaagaccaaatattctgggtgaatgtcgagtcccagatcaaaatgctggaactgctaatagagtattctgtgtaaaacaagagaggcaattattccactcagctatgctctggtagggccttaattggaagagtgtgttcagttggagctcagtgctttattatacatatctatattwaaaaaaaaaaaaaatcagggtgggggaacagcttaaggaactcataggtataaaggagtaggagcygaacactgatggagagagcttaaggaaactggacacttgcagtctgaaagaaacaattacgaaacatgcattcagttatgaaatgcagacgtgaggcagagtgcttgttctcatggggatgacatttagccyggggaagagcaagcagaatacatctcttgcatcagataaagaccacggaagtcttactctgacaatgtaagacatacgtagcctttttccagccctctttta

SEQ ID NO: 11749 - DNA, 600 bp, Chicken  19866894214835_2
tggcctgacagagcctacttctgtcttttcatgtgctgctgatggttaaaaaaggaaaagaccaaatattctgggtgaatgtcgagtcccagatcaaaatgctggaactgctaatagagtattctgtgtaaaacaagagaggcaattattccactcagctatgctctggtagggccttaattggaagagtgtgttcagttggagctcagtgctttattatacatatctatattwaaaaaaaaaaaaaatcagggtgggggaacagcttaaggaactcataggtataaaggagtaggagcygaacactgatggagagagcttaaggaaactggacacttgcagtctgaaagaaacaattacgaaacatgcattcagttatgaaatgcagacgtgaggcagagtgcttgttctcatggggatgacatttagccyggggaagagcaagcagaatacatctcttgcatcagataaagaccacggaagtcttactctgacaatgtaagacatacgtagcctttttccagccctcttttattggcagtggtgtgaaagccccatcacttcacgccaggctgggacatttttacaccagtttgctag

SEQ ID NO: 11750 - DNA, 600 bp, Chicken  19866894214835_3
acaagagaggcaattattccactcagctatgctctggtagggccttaattggaagagtgtgttcagttggagctcagtgctttattatacatatctatattwaaaaaaaaaaaaaatcagggtgggggaacagcttaaggaactcataggtataaaggagtaggagcygaacactgatggagagagcttaaggaaactggacacttgcagtctgaaagaaacaattacgaaacatgcattcagttatgaaatgcagacgtgaggcagagtgcttgttctcatggggatgacatttagccyggggaagagcaagcagaatacatctcttgcatcagataaagaccacggaagtcttactctgacaatgtaagacatacgtagcctttttccagccctcttttattggcagtggtgtgaaagccccatcacttcacgccaggctgggacatttttacaccagtttgctagagctgccttcagacataagggcttgctttgagatccactgaatgggtgctaacacctgcaccaggcagaagtaaggaatggtcactacaaaactgtctcaaaacacatttttcagggctgtcagttcctctc

SEQ ID NO: 11751 - DNA, 600 bp, Chicken  19866894214837_1
ttggtttcagtggatgtcagatgagatcttcagctcacaagggtgaggctattgacctgggatattgagggtgaggcctcggtgccacatggaggcacgtagataagggactggagttgtagatgggtgagttcaaagactctgcaaattcagtatactacttcagtgagcaaaatcctcacccccaggtgtgctgcacgcatcctcaggtatgtagcttaggtgacccagttcggtaaacacaacctgcagctctttgcctctgtctgcagacagcagtgtctgtaaagcaaggtgccrgagctcctcattccgctgcaggcagcgcrgcgcttggtggctctgtgtcaccgagcagggcagtgtctggctgtggcagtgctgaaagcagatgtaacccagctgacgttagggtgattttcacacagctacaggcaggctggagtctaacctacgctgcgtaatcgaacactctttggaatgtcctggaaaagcctcttggaaaaggggctggctgagagccctcgccgcagctcctcatcccacccacaccccaactccctgtctgtcttctctcggtcatccaggcacgattttctc

SEQ ID NO: 11752 - DNA, 600 bp, Chicken  19866894214837_2
tcagctcacaagggtgaggctattgacctgggatattgagggtgaggcctcggtgccacatggaggcacgtagataagggactggagttgtagatgggtgagttcaaagactctgcaaattcagtatactacttcagtgagcaaaatcctcacccccaggtgtgctgcacgcatcctcaggtatgtagcttaggtgacccagttcggtaaacacaacctgcagctctttgcctctgtctgcagacagcagtgtctgtaaagcaaggtgccrgagctcctcattccgctgcaggcagcgcrgcgcttggtggctctgtgtcaccgagcagggcagtgtctggctgtggcagtgctgaaagcagatgtaacccagctgacgttagggtgattttcacacagctacaggcaggctggagtctaacctacgctgcgtaatcgaacactctttggaatgtcctggaaaagcctcttggaaaaggggctggctgagagccctcgccgcagctcctcatcccacccacaccccaactccctgtctgtcttctctcggtcatccaggcacgattttctcctctttgcagaagctcaggtcattcctta

SEQ ID NO: 11753 - DNA, 600 bp, Chicken  19866894214839_1
tgaagcagtcctgttcaagtacattttacagtatagataaatgtgatacaagatctcacctccttacaatgatcctaaaaagcccataggcttagtggctacatgaaacactactcaagattgttcatgaacagtaatgaaattaagattcaaactgaggactaagatttagctttagcacgtaccacagtgccgtgaactaacatatgtactataaatgtactatttagcatgtacaataaacaagccaggcaccaaaccttggtctttagtccatatcacacagactgggctatgtgractctgcttaggcttcactccttctagagaagattaaccccatgcacgctatataggacccagctctgggttttttggaagactgtttatgaggaaaggaggaaggagcgaggaggcttgcttacacagcctctaagccattgtccttggagaatactgtcctggaactgttccaaattctgggtgatagagacagtcaggaaggtccatggtagagccaaggagacagccagtgaccgagtagataatcaacagtccactgttcgcaccccttctatggaagctggggaagctattgga

SEQ ID NO: 11754 - DNA, 599 bp, Chicken  19866894214848_1
  misc_feature (1)..(197): n is any nucleotide
nnnnnnnnnnnnnnnnnnnnnnnnnnnnnnnnnnnnnnnnnnnnnnnnnnnnnnnnnnnnnnnnnnnnnnnnnnnnnnnnnnnnnnnnnnnnnnnnnnnnnnnnnnnnnnnnnnnnnnnnnnnnnnnnnnnnnnnnnnnnnnnnnnnnnnnnnnnnnnnnnnnnnnnnnnnnnnnnnnnnnnnnnnnnnnnnnnnnnaatcacagaatcattaaggttggaaaagttcactaagatcaccaagtccaactgtcaacccatttccactatgcctactgaccacatccctcagtgccacatstccacatttcttgaacacctccagagatggtgattccaccaccttcctgrgcagctgtgccartgcmtcacctctctttctgagaagaaatatttcctaatatcccacctgaatagctattcctacccagtgacacaaagcggatccaagatgtagctataatgtggtcaaggacagttgcccggatggaactttagcacacttgccatttgcattttttattcacactttgaactgcaaagggtctgatttgtaggaggatatgcagagatttcagaaggcattggtcagggaatctc

SEQ ID NO: 11755 - DNA, 599 bp, Chicken  19866894214848_2
  misc_feature (1)..(147): n is any nucleotide
nnnnnnnnnnnnnnnnnnnnnnnnnnnnnnnnnnnnnnnnnnnnnnnnnnnnnnnnnnnnnnnnnnnnnnnnnnnnnnnnnnnnnnnnnnnnnnnnnnnnnnnnnnnnnnnnnnnnnnnnnnnnnnnnnnnnnnnnnnnnnnnnnnnaatcacagaatcattaaggttggaaaagttcactaagatcaccaagtccaactgtcaacccatttccactatgcctactgaccacatccctcagtgccacatstccacatttcttgaacacctccagagatggtgattccaccaccttcctgrgcagctgtgccartgcmtcacctctctttctgagaagaaatatttcctaatatcccacctgaatagctattcctacccagtgacacaaagcggatccaagatgtagctataatgtggtcaaggacagttgcccggatggaactttagcacacttgccatttgcattttttattcacactttgaactgcaaagggtctgatttgtaggaggatatgcagagatttcagaaggcattggtcagggaatctctgttcttctggatgtgacctcacaacttagaatcacagactcatagaatg

SEQ ID NO: 11756 - DNA, 599 bp, Chicken  19866894214848_3
  misc_feature (1)..(134): n is any nucleotide
nnnnnnnnnnnnnnnnnnnnnnnnnnnnnnnnnnnnnnnnnnnnnnnnnnnnnnnnnnnnnnnnnnnnnnnnnnnnnnnnnnnnnnnnnnnnnnnnnnnnnnnnnnnnnnnnnnnnnnnnnnnnnnnnnnnnnnaatcacagaatcattaaggttggaaaagttcactaagatcaccaagtccaactgtcaacccatttccactatgcctactgaccacatccctcagtgccacatstccacatttcttgaacacctccagagatggtgattccaccaccttcctgrgcagctgtgccartgcmtcacctctctttctgagaagaaatatttcctaatatcccacctgaatagctattcctacccagtgacacaaagcggatccaagatgtagctataatgtggtcaaggacagttgcccggatggaactttagcacacttgccatttgcattttttattcacactttgaactgcaaagggtctgatttgtaggaggatatgcagagatttcagaaggcattggtcagggaatctctgttcttctggatgtgacctcacaacttagaatcacagactcatagaatggcttgagttggaa

SEQ ID NO: 11757 - DNA, 599 bp, Chicken  19866894214848_4
  misc_feature (1)..(130): n is any nucleotide
nnnnnnnnnnnnnnnnnnnnnnnnnnnnnnnnnnnnnnnnnnnnnnnnnnnnnnnnnnnnnnnnnnnnnnnnnnnnnnnnnnnnnnnnnnnnnnnnnnnnnnnnnnnnnnnnnnnnnnnnnnnnnnnnnnaatcacagaatcattaaggttggaaaagttcactaagatcaccaagtccaactgtcaacccatttccactatgcctactgaccacatccctcagtgccacatstccacatttcttgaacacctccagagatggtgattccaccaccttcctgrgcagctgtgccartgcmtcacctctctttctgagaagaaatatttcctaatatcccacctgaatagctattcctacccagtgacacaaagcggatccaagatgtagctataatgtggtcaaggacagttgcccggatggaactttagcacacttgccatttgcattttttattcacactttgaactgcaaagggtctgatttgtaggaggatatgcagagatttcagaaggcattggtcagggaatctctgttcttctggatgtgacctcacaacttagaatcacagactcatagaatggcttgagttggaaggga

SEQ ID NO: 11758 - DNA, 600 bp, Chicken  19866894214849_1
cagcaggtgtcatgaaggttcaagtcccccaacaggacaagagcctgtgattgcaatgcctgcagtgcatagctcctggggcaattttttttttcccctttgtgacctaggtggaccccatcagcagccatcaagccaggcaccaagtaaaccaccccatggagtgcagatagtgtgttacacttctagatcctaatcatacaacatctacaaaactcatttaataatcatctttaatcacatagtcaattcctgtaaatgttctttaatatctacacggtcagaaagatcaatacaatkcaatgtaaatgtagattacaggagatgtaatgacaagggaactagcatgacagaaagatgttacaaagaaaagtgctcacccatctctgatgggctcgcaaaggaaacacctcaagggagggatctccaaccagagatcctttctggcagtcagctgctaaacgaggtctcagagaggtgcagtcaggctccactccttctggtcacacgggtgaattgcattcacctgtgctcccaaggctgacccggtcctttccccaggtgctccatcagtggttgaggccatgactcaacagttac

SEQ ID NO: 11759 - DNA, 599 bp, Chicken  19866894214851_1
  misc_feature (1)..(17): n is any nucleotide
nnnnnnnnnnnnnnnnncacctcttttcactctggattttgcctcttagaaggagaatgatttatttgctgttcctcaagaataaaaaaagtgagtgaacagttatcaacaattcttacctttccaaagcttccttttccaagaaccataagaaagttgaaatctgtcagtttcaccctgtccagattgttggatggcacacttgaattcctgtcttctgatggagtaatgactttgttaccagctggcccaagtttggctttctaaaggacatacacacacatacatacacaaaaacgrggaagtgagaagagcagcccatttcctcagcagagtgggtcattgggtgagcactaggttggagatgaccacattggagatggcattcttgggagaaaggctgcataacaaaatttgtgcagacacaagttcaaagaytcattccaacgatacttttcacattatygagagaattaaagtggaaatatgtgttcatgtataaccagataaaagcagatacacttatctggttattgaagcaaaaccaaagcataaatgaaagccaaagaaaagaagccacgtatattcatgccaaaagc

SEQ ID NO: 11760 - DNA, 600 bp, Chicken  19866894214851_2
ccaagaaccataagaaagttgaaatctgtcagtttcaccctgtccagattgttggatggcacacttgaattcctgtcttctgatggagtaatgactttgttaccagctggcccaagtttggctttctaaaggacatacacacacatacatacacaaaaacgrggaagtgagaagagcagcccatttcctcagcagagtgggtcattgggtgagcactaggttggagatgaccacattggagatggcattcttgggagaaaggctgcataacaaaatttgtgcagacacaagttcaaagaytcattccaacgatacttttcacattatygagagaattaaagtggaaatatgtgttcatgtataaccagataaaagcagatacacttatctggttattgaagcaaaaccaaagcataaatgaaagccaaagaaaagaagccacgtatattcatgccaaaagcaggcttctctggtgtttttgtttcaaaatacaaaaaacgttcttcaaaaataccatgctatcatctatgtagtgtactccagctaaaaacagtctcttcaacacattctcttttaaaatgtagtctcaaagacactctg

SEQ ID NO: 11761 - DNA, 600 bp, Chicken  19866894214851_3
tcagtttcaccctgtccagattgttggatggcacacttgaattcctgtcttctgatggagtaatgactttgttaccagctggcccaagtttggctttctaaaggacatacacacacatacatacacaaaaacgrggaagtgagaagagcagcccatttcctcagcagagtgggtcattgggtgagcactaggttggagatgaccacattggagatggcattcttgggagaaaggctgcataacaaaatttgtgcagacacaagttcaaagaytcattccaacgatacttttcacattatygagagaattaaagtggaaatatgtgttcatgtataaccagataaaagcagatacacttatctggttattgaagcaaaaccaaagcataaatgaaagccaaagaaaagaagccacgtatattcatgccaaaagcaggcttctctggtgtttttgtttcaaaatacaaaaaacgttcttcaaaaataccatgctatcatctatgtagtgtactccagctaaaaacagtctcttcaacacattctcttttaaaatgtagtctcaaagacactctgcatagcaagagttaataaatatttaaca

SEQ ID NO: 11762 - DNA, 600 bp, Chicken  19866894214853_1
gctcattaacaaccagatgatatccattcatatttgtgttaatagcaaatctcacagcttcttttaacccccgctggcttactcatagacagaagttgcatctcagccttcatttaattgatctttgtgtacctcgctactttaatcttctccagcaatacaggctctcctctgatcacctacacgttctttactgatgttctcatcagaattaatctgaactgatagcaggcaacgagagtttaacatgatacatgctacctttcaaatacccatattccttgcagttcttactcacartcttaagcaccatttatccacctgacagatttgaacttgcctgaatcaatctttcttaagtgtacatctgtaaatcctcacaggtgaaaccatatggtgcatttcagtggactacatttcccttagtctaagtttcacagaatttctgtccaagaccaagtttgccataaagaacttacaaaatgattacagaagcaaacggacaaaaacataggaaaaatagatatgtatataagcatagaaattaaatatatcacacatataaaaatgtgtgtacatatgtgaaatatatctaatatg

SEQ ID NO: 11763 - DNA, 600 bp, Chicken  19866894214853_2
ttcccttagtctaagtttcacagaatttctgtccaagaccaagtttgccataaagaacttacaaaatgattacagaagcaaacggacaaaaacataggaaaaatagatatgtatataagcatagaaattaaatatatcacacatataaaaatgtgtgtacatatgtgaaatatatctaatatgcttttatgaaaaatacaagcttatagaaaaaaatatgtaacaaccaatataactgagtatttcaagagaaaaactgccattacagttgctgggtccatcttgagacagatgccgtgwgcagaagtggcatttatggatctgatttcgttcttgcaaatggtgaatgggtccaagaactgaatgggagatgagattaacaattctttaaatctctccttatccaatgaaatgataatgctgttttgggtcacattgcttgtacctttactcagttaagactctctgcagtctggcagtggtggatttcacaaagccacttcttgcatttttaagcagatatactgataatttgagaatataatattcaaagctcaataaacattggtaagtttagcatgttatttagtcacataaatt

SEQ ID NO: 11764 - DNA, 600 bp, Chicken  19866894214855_1
cacaatccttagctctgtgtattctgattatttgaaagctgaagccagccacaagggtcaatggagaaatgataatcaacatgtgtttcacgattgtggagcaagatgctcagtctactcaaaactgaaaggaaagaactggagtggaaatagaccactcagtcagtcctggaagacaatatcacaatatacccatgttccagtcctggccatgcttagtagtgcttaagacaggaaatgccagaagcattagggaatattatgtcaattcttgcatttctagtgaaaggaggcaaaaaystcctcgagaagaaatttagaaaggcttactttgattaggaatcctcatttgaacccttccatgagaacagacatcatttcccattaatttacttgaatttgtgaatctggcagccagtatgccaagaggaaaccatctttagtgactgataccgacaaaatggaagccttatgtcagcaacggaaaagaagttttcctcttgctttataagtagctttataattaagaaacgtaggatacgtttcttaatggcatattattccatgatggtcagttctgatgatcagtagctgattctc

SEQ ID NO: 11765 - DNA, 600 bp, Chicken  19866894214855_2
acaatccttagctctgtgtattctgattatttgaaagctgaagccagccacaagggtcaatggagaaatgataatcaacatgtgtttcacgattgtggagcaagatgctcagtctactcaaaactgaaaggaaagaactggagtggaaatagaccactcagtcagtcctggaagacaatatcacaatatacccatgttccagtcctggccatgcttagtagtgcttaagacaggaaatgccagaagcattagggaatattatgtcaattcttgcatttctagtgaaaggaggcaaaaaystcctcgagaagaaatttagaaaggcttactttgattaggaatcctcatttgaacccttccatgagaacagacatcatttcccattaatttacttgaatttgtgaatctggcagccagtatgccaagaggaaaccatctttagtgactgataccgacaaaatggaagccttatgtcagcaacggaaaagaagttttcctcttgctttataagtagctttataattaagaaacgtaggatacgtttcttaatggcatattattccatgatggtcagttctgatgatcagtagctgattctca

SEQ ID NO: 11766 - DNA, 600 bp, Chicken  19866894214861_1
tcattccattatccttgcagtattattactttttaaagtaacagtaagaactaggcacttgcatacattaaaaaagataaaatttggtggccacactagaacaacattagttttcactgaatacaattcagaacttactaaaacatactggcattcaccagagacttcagaaagaaacctgctgacattttatcaatttgtaacatttgcttacctgaagaaagcctaaaataataacaggtcaaaacaaatataaagaagaatcagcgtgaatgtgttttattaatatcttactgcatraagaaaatgaagacatagagtgggacttagtgcaatccataaggatattgtagaacaaactgccwgactactctggtcatttgagaagagttacaaggttaaacttttcatattaacagaraaacaaaagacattattaaatactaaggtactcacctcttctttcaactgcttttatacactgtctcacaaactgggggacggtagaattctcatgttcgcataccaagtgcaaatgggagccaaaaatttgatctacattttgaggggggaaaaaaaagcacagaaaaatacattaaa

SEQ ID NO: 11767 - DNA, 600 bp, Chicken  19866894214861_2
cattaaaaaagataaaatttggtggccacactagaacaacattagttttcactgaatacaattcagaacttactaaaacatactggcattcaccagagacttcagaaagaaacctgctgacattttatcaatttgtaacatttgcttacctgaagaaagcctaaaataataacaggtcaaaacaaatataaagaagaatcagcgtgaatgtgttttattaatatcttactgcatraagaaaatgaagacatagagtgggacttagtgcaatccataaggatattgtagaacaaactgccwgactactctggtcatttgagaagagttacaaggttaaacttttcatattaacagaraaacaaaagacattattaaatactaaggtactcacctcttctttcaactgcttttatacactgtctcacaaactgggggacggtagaattctcatgttcgcataccaagtgcaaatgggagccaaaaatttgatctacattttgaggggggaaaaaaaagcacagaaaaatacattaaagcatattattagcagtagggcttttctcttttctgagcttgcatatcacttaaaatatggaaggt

SEQ ID NO: 11768 - DNA, 600 bp, Chicken  19866894214861_3
tacaattcagaacttactaaaacatactggcattcaccagagacttcagaaagaaacctgctgacattttatcaatttgtaacatttgcttacctgaagaaagcctaaaataataacaggtcaaaacaaatataaagaagaatcagcgtgaatgtgttttattaatatcttactgcatraagaaaatgaagacatagagtgggacttagtgcaatccataaggatattgtagaacaaactgccwgactactctggtcatttgagaagagttacaaggttaaacttttcatattaacagaraaacaaaagacattattaaatactaaggtactcacctcttctttcaactgcttttatacactgtctcacaaactgggggacggtagaattctcatgttcgcataccaagtgcaaatgggagccaaaaatttgatctacattttgaggggggaaaaaaaagcacagaaaaatacattaaagcatattattagcagtagggcttttctcttttctgagcttgcatatcacttaaaatatggaaggtgggcagacaaagttagagacaaatcctctctgagtcctaatgctcgttagcttcag

SEQ ID NO: 11769 - DNA, 600 bp, Chicken  19866894214865_1
taatagggatgaaaagccccatcagaaagggcccgcgtccccgcgcccggccgggagggcagtgcccggcactttgatctgctgctgcccgctgtgccctgttggagagcccagctccctgccagcagcacgggggggtcctcggggtgaagcgcagcgttgccaggagggctcctgtcctcagcggtgctttctccgtaccatagggaaaaccgaagcgtggctgctttgggagagagtttttaccaaggcacttgaaaggctgcaggagccttcagcttgaggatggcttgaaacaarctcccagcgtgtgggcacgcctgggggtgtgcagccgataagcgcaggcagccgatgcgccacgctttgttttacatcgctgctgctccctgagccccttgtgctgctttccgttttgctgcctgcacacccgcagtgctttcatggaatcacagagtacccagagatggaagggacccgtaaggatcatcgagtccaactcctgtctgcatagagatccgcccagaaatgctttcttgtccttggggagctcagcccccgcaggagctgtctgcactttctgcattgccgtgggctcgc

SEQ ID NO: 11770 - DNA, 600 bp, Chicken  19866894214866_1
cctcagtgccacatctccatggctcttgaacacctccagggacggtgacttcaccacctcctgggcagctgtgccactgcaagcaccactctttatgagaagaaatttttcttaatatccaaccttctgtgccatctccttcaaggacgctcaagaagcatagaatgatttgctgtgcatgacgtggccaaaccacaggtgatgtttccccatgtccttgagttctataagcccatctttttagtctctttgacagcttggtgagaaatcagaatattgtagaggcataattaatttcargtagatgcccactgtgcccttctgcacagtctttatgttagggagtgtttagataacttcttttagtacatcttaaagacatttgtaagtgaagaacagaagactctataaaaacaagtttagcaagaaagctcttcttttctaaaccaaccagaattcattgcacagccttattgacttaaattaatcacgggtccaaatttttaacacctgtaccaggatttctgcacttcccatgaaaatgactagttgaattttgcattagcagkcctgtgacctgcaaacccctgggggagcaca

SEQ ID NO: 11771 - DNA, 510 bp, Chicken  19866894214866_2
cagaatattgtagaggcataattaatttcargtagatgcccactgtgcccttctgcacagtctttatgttagggagtgtttagataacttcttttagtacatcttaaagacatttgtaagtgaagaacagaagactctataaaaacaagtttagcaagaaagctcttcttttctaaaccaaccagaattcattgcacagccttattgacttaaattaatcacgggtccaaatttttaacacctgtaccaggatttctgcacttcccatgaaaatgactagttgaattttgcattagcagkcctgtgacctgcaaacccctgggggagcacagaaatgcccaggaagcctttgggtagtagaagtggtctccagggtgttgagaccgtgtagtttagagtgcaactatgggctgggctctcagggatccattgacaaacataaagaaaaagtaggtgccactgagatatatctgccttcacactgtgggaataggacagtgacgtcaaatg

SEQ ID NO: 11772 - DNA, 600 bp, Chicken  19866894214867_1
ttcacaataatgctagaaaagctgtagcaaggaacttctgtattaccacagtgggagaggtactgctaatccaaacaattgtcagtggcaccttgtaagcatgtaaaagcctttaaacagtcacccacgttagctgcaagcacctgatgtattctgagctctaataagcgtgatgtagggtcaaatgcaagcatgtcttactatagaagcaaaaatttcatctgaagttcagacttcctacacttggattagtattaaagtagttagtattgttctaataattcctgtttttttttctgytttgctttctactccctccttccacaggaggtccagagcctgcaatgcctgatgtaagtactgtttacaatctactaattasctacataatccttatcttttcaagaagcccactgctttctattgcttttttccacactgctttaaaattccaatcaaatcagagtactgagactttttaatgtgtaagagggtgattgcctactgtccctttgaggaggctgaatcaggttcttgccactctaaagctgtagtttttgtaatggcttttatttctcacttgaaattataatgtagcat

SEQ ID NO: 11773 - DNA, 600 bp, Chicken  19866894214867_2
cagtggcaccttgtaagcatgtaaaagcctttaaacagtcacccacgttagctgcaagcacctgatgtattctgagctctaataagcgtgatgtagggtcaaatgcaagcatgtcttactatagaagcaaaaatttcatctgaagttcagacttcctacacttggattagtattaaagtagttagtattgttctaataattcctgtttttttttctgytttgctttctactccctccttccacaggaggtccagagcctgcaatgcctgatgtaagtactgtttacaatctactaattasctacataatccttatcttttcaagaagcccactgctttctattgcttttttccacactgctttaaaattccaatcaaatcagagtactgagactttttaatgtgtaagagggtgattgcctactgtccctttgaggaggctgaatcaggttcttgccactctaaagctgtagtttttgtaatggcttttatttctcacttgaaattataatgtagcatgttgatgacatgaagtaagatagtattaattcatttccatgctgtattagctcccagtcccatccattagtgccccaagtcg

SEQ ID NO: 11774 - DNA, 600 bp, Chicken  19866894214869_1
caggctcagtctgaccatggctttagttgagagttcagggccagcagagcctcaaataatcaagtgcaaaactctcctttagggttttaaagcatagaatcagaatttatatctgaactgaaccaatgatcacagacatatgtgtaacagctgatctacctagcaagcatctgataagatgctaattataacgtatcataagaaaagcagaacgagagcacttcctaaggaaagaaaatagtttcagggaccttatcaggacataattcaagtcccaaacacatcatgctcctgtaggaratgatcttttcaatgttgttctmctggtaagacccaccatgggacagcgctggggtcacatcctggtggcagtgcacagcatctggtggagctggaacagagctgtcacatgcctgcctgctgagtgggtctcaataaaaaaaattagcccttggtaartttaggcggtagatctcaatacatctcaatagcattggcatagacaaaaggatttcttgctaaaagaaacctgagaatggactgggaaaatgtagagaaaggttggaaatttggcacaccatcagaaaaggaaagcgtgta

SEQ ID NO: 11775 - DNA, 600 bp, Chicken  19866894214869_2
tagttgagagttcagggccagcagagcctcaaataatcaagtgcaaaactctcctttagggttttaaagcatagaatcagaatttatatctgaactgaaccaatgatcacagacatatgtgtaacagctgatctacctagcaagcatctgataagatgctaattataacgtatcataagaaaagcagaacgagagcacttcctaaggaaagaaaatagtttcagggaccttatcaggacataattcaagtcccaaacacatcatgctcctgtaggaratgatcttttcaatgttgttctmctggtaagacccaccatgggacagcgctggggtcacatcctggtggcagtgcacagcatctggtggagctggaacagagctgtcacatgcctgcctgctgagtgggtctcaataaaaaaaattagcccttggtaartttaggcggtagatctcaatacatctcaatagcattggcatagacaaaaggatttcttgctaaaagaaacctgagaatggactgggaaaatgtagagaaaggttggaaatttggcacaccatcagaaaaggaaagcgtgtaattagaaacctcactgtgttgca

SEQ ID NO: 11776 - DNA, 600 bp, Chicken  19866894214869_3
ctagcaagcatctgataagatgctaattataacgtatcataagaaaagcagaacgagagcacttcctaaggaaagaaaatagtttcagggaccttatcaggacataattcaagtcccaaacacatcatgctcctgtaggaratgatcttttcaatgttgttctmctggtaagacccaccatgggacagcgctggggtcacatcctggtggcagtgcacagcatctggtggagctggaacagagctgtcacatgcctgcctgctgagtgggtctcaataaaaaaaattagcccttggtaartttaggcggtagatctcaatacatctcaatagcattggcatagacaaaaggatttcttgctaaaagaaacctgagaatggactgggaaaatgtagagaaaggttggaaatttggcacaccatcagaaaaggaaagcgtgtaattagaaacctcactgtgttgcataggtatcctgctgggagatgcaattataacacccttttacatttgcccagtttctctcactgttgaaacgctgtataagtgttgtattaaaaacacacattttcttcctggagtaagctgcaaaagcatcattaa

SEQ ID NO: 11777 - DNA, 600 bp, Chicken  19866894214869_4
ttaaaatgatagaaatgcatgaccacacaatgctagcagaactcggtaatgaataaataaggtttgggaaggctcttgaagcgcagagctggaagctgctaacctatcctgcagcagtcactcaggggaggcaaagagagtctatgtacatacatccaattagccttcttgctctgaggctggaattcattttgggtcgtccctaatgtgatctctagaaaatttcaaatggttgcctttacctctaatgcttttgttcaaaatgcccactgtataggctttaaattacactgttttttwgtgctgtacttcaaggctccttctttaagcttttgcatatgagaacaaacccttctttgtaaacttgatcttttattgtgtagcgagattaacctaatccttataggagctcctcagtcatcacagtgtaacaagaactaactatagggtttactacagacaaagtagaaagtgtggagaaagtaagagaaaactgaatgggctttgaatattttccttaagaaaactaggaagtaatttattttctataggtaagtggcagttttccttgtattgagatttgcagaattcatgtttaca

SEQ ID NO: 11778 - DNA, 600 bp, Chicken  19866894214869_5
tataggagctcctcagtcatcacagtgtaacaagaactaactatagggtttactacagacaaagtagaaagtgtggagaaagtaagagaaaactgaatgggctttgaatattttccttaagaaaactaggaagtaatttattttctataggtaagtggcagttttccttgtattgagatttgcagaattcatgtttacatgaataagattataacaaacatttccatgagcaggaatgttctgaatgaactttctcagtagtttttactcccaataagaactgcacacgcattggagttytcctcccactgaatatcctgctctaaattgccacctgtttttgtgtaatttgcagtaatgtaataacctgtaacctccatttaaatttggttgaaattggtcatgagttctaaaaatacctggagaaattataccaggcagacagaaggacaagtgcttgttcaagtagtgtaattacataggcttttttttttcttttttttttccccaatttggtcacaaattggcaatgtgattatttgagattattcttcctgttttctgtatcagtttcaggtagatctatatttctatatatta

SEQ ID NO: 11779 - DNA, 599 bp, Chicken  19866894214874_1
  misc_feature (1)..(43): n is any nucleotide
nnnnnnnnnnnnnnnnnnnnnnnnnnnnnnnnnnnnnnnnnnncaaaatcagcttctaaatgcaattcatctttccaaaatggttatgaaatatggaaaataagattaaaacaagcaaacaaaaaagcactagaagaatttctttttcaaagaataatataggagggaaaattatcacattcagatcacataacatagcatggactgcaacttcatgtaaaatctgtcctgcatacatgtggtaagaaacactttttgtctagggcagattagcagattcagttacagaatcacagaatygtagggattggaagggacctctagagataaacaagtccaaccctcttctaaagcaggttccctgcagtaagttgcacagaaaagcatmcagagaggtcttgagtatctccagagaaggagactctagaacctccctggacagcctgttctagcactttcttaccctcacagtaaagttcttcatgcttgtatgaaacttcttatgttccagtttttccccactaccccttgttctattgctacacaccrctgaaaagagtctgctcccactgacttgactcctgtactttagatayttt

SEQ ID NO: 11780 - DNA, 600 bp, Chicken  19866894214874_2
aaatatggaaaataagattaaaacaagcaaacaaaaaagcactagaagaatttctttttcaaagaataatataggagggaaaattatcacattcagatcacataacatagcatggactgcaacttcatgtaaaatctgtcctgcatacatgtggtaagaaacactttttgtctagggcagattagcagattcagttacagaatcacagaatygtagggattggaagggacctctagagataaacaagtccaaccctcttctaaagcaggttccctgcagtaagttgcacagaaaagcatmcagagaggtcttgagtatctccagagaaggagactctagaacctccctggacagcctgttctagcactttcttaccctcacagtaaagttcttcatgcttgtatgaaacttcttatgttccagtttttccccactaccccttgttctattgctacacaccrctgaaaagagtctgctcccactgacttgactcctgtactttagatayttttaaacagtggtgagatcacctctcagtcttctccgtgtattgaagagtcccaggtttctcagcctttcctcacacaggagaagctccag

SEQ ID NO: 11781 - DNA, 600 bp, Chicken  19866894214874_3
cactttttgtctagggcagattagcagattcagttacagaatcacagaatygtagggattggaagggacctctagagataaacaagtccaaccctcttctaaagcaggttccctgcagtaagttgcacagaaaagcatmcagagaggtcttgagtatctccagagaaggagactctagaacctccctggacagcctgttctagcactttcttaccctcacagtaaagttcttcatgcttgtatgaaacttcttatgttccagtttttccccactaccccttgttctattgctacacaccrctgaaaagagtctgctcccactgacttgactcctgtactttagatayttttaaacagtggtgagatcacctctcagtcttctccgtgtattgaagagtcccaggtttctcagcctttcctcacacaggagaagctccagatccctaatcaattttgcagcccttcaatggacactttgtagaagatctttttactcctgaatggaggagcccaaaactggacgaagtattccatatgtggtctcaccagggcacagtagagggggaggagagccttcctccaccacattcatttttatgc

SEQ ID NO: 11782 - DNA, 600 bp, Chicken  19866894214874_4
aatygtagggattggaagggacctctagagataaacaagtccaaccctcttctaaagcaggttccctgcagtaagttgcacagaaaagcatmcagagaggtcttgagtatctccagagaaggagactctagaacctccctggacagcctgttctagcactttcttaccctcacagtaaagttcttcatgcttgtatgaaacttcttatgttccagtttttccccactaccccttgttctattgctacacaccrctgaaaagagtctgctcccactgacttgactcctgtactttagatayttttaaacagtggtgagatcacctctcagtcttctccgtgtattgaagagtcccaggtttctcagcctttcctcacacaggagaagctccagatccctaatcaattttgcagcccttcaatggacactttgtagaagatctttttactcctgaatggaggagcccaaaactggacgaagtattccatatgtggtctcaccagggcacagtagagggggaggagagccttcctccaccacattcatttttatgcaccctaggagcaagttaataatgcattcagtatcaaacaagaagcaa

SEQ ID NO: 11783 - DNA, 599 bp, Chicken  19866894214875_1
  misc_feature (1)..(96): n is any nucleotide
nnnnnnnnnnnnnnnnnnnnnnnnnnnnnnnnnnnnnnnnnnnnnnnnnnnnnnnnnnnnnnnnnnnnnnnnnnnnnnnnnnnnnnnnnnnnnnnnttctttttttttttttcctttctctccccattctctttccttcatgataaattttataattatgagctttgaaaaaatctgatgtgtggttctttccttcctttttgtcttctggggttataccgggttatacaactaagtcatggaggaaaacttaaatgttcgctatgttagcttttatttatgctcaaggaaaattttaarttcattaaaaaaaaaaaaaaagctgctatcatttttattctctaatggggacagatatgacatttattaagcacatcctcaaaatactgatagttacattgcttttattaatgattcttaaaagcaaatatagctttttcttttccttctccctattattattattattattattattattgttacagtggacagtgatgactctgtgtcttaaaaactaatcactagtgcctattaaatttgggtttcatatgttgctggaggtagaactgattatcatagtgaatgaaatacttgtt

SEQ ID NO: 11784 - DNA, 600 bp, Chicken  19866894214877_1
agcacaaaataaagatgcatgctgagcatccgtgagtggtgcagtccctggactgatagtcctgtccttctgtttgtaggtagaaccgtcggagttcagacgacctctaatggaatcatgcagctggttagttagtccatccatcactgctgtccaggttttatggttgctttgcagcctctacacatgagctttttttccttgcccagtttcctcttcttaatccatcgtatattttcagtcagagccaaaagcactcactgcagattctcacaaccttctgagtatccctggcatccycagctcctgccagagtcatcctgcactgctggctgggttagctggaggtgatgcacggagagtcggcctcaaagacaactgagccttaggctgcttagaaacacatcggggcsctcaamgttttttatatatccatccaaaatcaggatattagaatgagacrttcctggctctctggtgctattacatcaccaagctataatttcagcatggctccttctcaagtgctgattwcttatgatgtgaggcacctgaacacgttccataggactaatccatcgcagagttgtgccaggtttt

SEQ ID NO: 11785 - DNA, 600 bp, Chicken  19866894214877_2
aatcatgcagctggttagttagtccatccatcactgctgtccaggttttatggttgctttgcagcctctacacatgagctttttttccttgcccagtttcctcttcttaatccatcgtatattttcagtcagagccaaaagcactcactgcagattctcacaaccttctgagtatccctggcatccycagctcctgccagagtcatcctgcactgctggctgggttagctggaggtgatgcacggagagtcggcctcaaagacaactgagccttaggctgcttagaaacacatcggggcsctcaamgttttttatatatccatccaaaatcaggatattagaatgagacrttcctggctctctggtgctattacatcaccaagctataatttcagcatggctccttctcaagtgctgattwcttatgatgtgaggcacctgaacacgttccataggactaatccatcgcagagttgtgccaggttttggtgaggttgctgtctgcagctttgtgtctgcattgcaagccttgctgggccacgtctggagtcagcttatgaaaaacaaaacctccactccctggcatgagaactttgtgca

SEQ ID NO: 11786 - DNA, 600 bp, Chicken  19866894214877_3
gcagctggttagttagtccatccatcactgctgtccaggttttatggttgctttgcagcctctacacatgagctttttttccttgcccagtttcctcttcttaatccatcgtatattttcagtcagagccaaaagcactcactgcagattctcacaaccttctgagtatccctggcatccycagctcctgccagagtcatcctgcactgctggctgggttagctggaggtgatgcacggagagtcggcctcaaagacaactgagccttaggctgcttagaaacacatcggggcsctcaamgttttttatatatccatccaaaatcaggatattagaatgagacrttcctggctctctggtgctattacatcaccaagctataatttcagcatggctccttctcaagtgctgattwcttatgatgtgaggcacctgaacacgttccataggactaatccatcgcagagttgtgccaggttttggtgaggttgctgtctgcagctttgtgtctgcattgcaagccttgctgggccacgtctggagtcagcttatgaaaaacaaaacctccactccctggcatgagaactttgtgcagtgttc

SEQ ID NO: 11787 - DNA, 600 bp, Chicken  19866894214877_4
tggttgctttgcagcctctacacatgagctttttttccttgcccagtttcctcttcttaatccatcgtatattttcagtcagagccaaaagcactcactgcagattctcacaaccttctgagtatccctggcatccycagctcctgccagagtcatcctgcactgctggctgggttagctggaggtgatgcacggagagtcggcctcaaagacaactgagccttaggctgcttagaaacacatcggggcsctcaamgttttttatatatccatccaaaatcaggatattagaatgagacrttcctggctctctggtgctattacatcaccaagctataatttcagcatggctccttctcaagtgctgattwcttatgatgtgaggcacctgaacacgttccataggactaatccatcgcagagttgtgccaggttttggtgaggttgctgtctgcagctttgtgtctgcattgcaagccttgctgggccacgtctggagtcagcttatgaaaaacaaaacctccactccctggcatgagaactttgtgcagtgttctcatcctttgactttgagaaaactattggagctactcagcccat

SEQ ID NO: 11788 - DNA, 585 bp, Chicken  19866894214877_5
ttttcagtcagagccaaaagcactcactgcagattctcacaaccttctgagtatccctggcatccycagctcctgccagagtcatcctgcactgctggctgggttagctggaggtgatgcacggagagtcggcctcaaagacaactgagccttaggctgcttagaaacacatcggggcsctcaamgttttttatatatccatccaaaatcaggatattagaatgagacrttcctggctctctggtgctattacatcaccaagctataatttcagcatggctccttctcaagtgctgattwcttatgatgtgaggcacctgaacacgttccataggactaatccatcgcagagttgtgccaggttttggtgaggttgctgtctgcagctttgtgtctgcattgcaagccttgctgggccacgtctggagtcagcttatgaaaaacaaaacctccactccctggcatgagaactttgtgcagtgttctcatcctttgactttgagaaaactattggagctactcagcccatggctaggaaaatggtgaatggcctgttacatcaatactcccatcgatcttccctcc

SEQ ID NO: 11789 - DNA, 600 bp, Chicken  19866894214880_1
ggccttcatcacttctgcagcccaggagaattcagaaacaattagaatcagctggaagaaaatttcttttatctagaagatgttgcatctttaaggggaaaaaagatgagaaacttgttcactgtaactatttaactcatctgtaaaggtaacatgtttaattttgactaagtaaagccaaagtcatatggcattttaagccagaattgcaattatgacaataaaatatgatcttattctatattttaatctcaaaaactgctttaaagtacactgcaattcaatattaaattagttcaraatactctttcgtacttattatagaaagaagcatttaaatccaataattattttccactacatgattttgtcaaaacaattttctcatgtttttggtgcagaaaatatcttccacaagtaatctaacctgttcaaacactaggtgtttttttttccccaatagacttgatttggcacagaagaggctgctcttcagcttccccactttmctgccctctcctctgcaatacaaactcactgtcagagctgccagcactgaactatcaaagagcagttggcattaaccagcccagcattccc

SEQ ID NO: 11790 - DNA, 600 bp, Chicken  19866894214880_2
caattatgacaataaaatatgatcttattctatattttaatctcaaaaactgctttaaagtacactgcaattcaatattaaattagttcaraatactctttcgtacttattatagaaagaagcatttaaatccaataattattttccactacatgattttgtcaaaacaattttctcatgtttttggtgcagaaaatatcttccacaagtaatctaacctgttcaaacactaggtgtttttttttccccaatagacttgatttggcacagaagaggctgctcttcagcttccccactttmctgccctctcctctgcaatacaaactcactgtcagagctgccagcactgaactatcaaagagcagttggcattaaccagcccagcattcccatacaacacagatgtatgctcgtgcacatctgagctgtggcaggatttgactgaaaaaagactgtccatgtccagacataaaaaatgcagtagagaatctgatttcataattgcatttttaagtggagaaatgtataataagttacaaagctactgacatcagagaaaaacaaaaatacatataaaatgcccaccactaaatcagttcc

SEQ ID NO: 11791 - DNA, 600 bp, Chicken  19866894214880_3
agcgagtgaattgaataaaaaaaataagattcagtcttcggaggatacaactgagttttacatgctggagatataaagactgaagtgagaccgggttccactaacaagattcctggcctgaagtgcctttgtgaaattattcacaaacctgcccataacaatatttcaggctgcagctctctcctctgctgctgtgctccgtgtgggcccacgtgctgctgccacacacttaatggagtctcccagctggtgctttaaaggaacaatgtctccagctgctcattcatctaggagcttcaraacaacattttgcacccctgccttttttggatattaagraattytgaratcttgaagtctcctggaaatgagaaataaatggacaaatgccttgagcaggagaaacccaaggcttcttacatatattttacagtaaaagcaaccttgcttattatttatgctgtgttgtcaacttgttcaggcatagattgttacacagactttcatataaaaatagcttttcctgttgctgctacttcaagcaagtacaaagtattaatactgaagaaatactattcagaaatattatagtcacttttt

SEQ ID NO: 11792 - DNA, 600 bp, Chicken  19866894214880_4
ggaggatacaactgagttttacatgctggagatataaagactgaagtgagaccgggttccactaacaagattcctggcctgaagtgcctttgtgaaattattcacaaacctgcccataacaatatttcaggctgcagctctctcctctgctgctgtgctccgtgtgggcccacgtgctgctgccacacacttaatggagtctcccagctggtgctttaaaggaacaatgtctccagctgctcattcatctaggagcttcaraacaacattttgcacccctgccttttttggatattaagraattytgaratcttgaagtctcctggaaatgagaaataaatggacaaatgccttgagcaggagaaacccaaggcttcttacatatattttacagtaaaagcaaccttgcttattatttatgctgtgttgtcaacttgttcaggcatagattgttacacagactttcatataaaaatagcttttcctgttgctgctacttcaagcaagtacaaagtattaatactgaagaaatactattcagaaatattatagtcacttttttcaaagactcattgaaagctaatccaaagcgtccttaat

SEQ ID NO: 11793 - DNA, 600 bp, Chicken  19866894214880_5
atacaactgagttttacatgctggagatataaagactgaagtgagaccgggttccactaacaagattcctggcctgaagtgcctttgtgaaattattcacaaacctgcccataacaatatttcaggctgcagctctctcctctgctgctgtgctccgtgtgggcccacgtgctgctgccacacacttaatggagtctcccagctggtgctttaaaggaacaatgtctccagctgctcattcatctaggagcttcaraacaacattttgcacccctgccttttttggatattaagraattytgaratcttgaagtctcctggaaatgagaaataaatggacaaatgccttgagcaggagaaacccaaggcttcttacatatattttacagtaaaagcaaccttgcttattatttatgctgtgttgtcaacttgttcaggcatagattgttacacagactttcatataaaaatagcttttcctgttgctgctacttcaagcaagtacaaagtattaatactgaagaaatactattcagaaatattatagtcacttttttcaaagactcattgaaagctaatccaaagcgtccttaatacgca

SEQ ID NO: 11794 - DNA, 600 bp, Chicken  19866894214880_6
aactgagttttacatgctggagatataaagactgaagtgagaccgggttccactaacaagattcctggcctgaagtgcctttgtgaaattattcacaaacctgcccataacaatatttcaggctgcagctctctcctctgctgctgtgctccgtgtgggcccacgtgctgctgccacacacttaatggagtctcccagctggtgctttaaaggaacaatgtctccagctgctcattcatctaggagcttcaraacaacattttgcacccctgccttttttggatattaagraattytgaratcttgaagtctcctggaaatgagaaataaatggacaaatgccttgagcaggagaaacccaaggcttcttacatatattttacagtaaaagcaaccttgcttattatttatgctgtgttgtcaacttgttcaggcatagattgttacacagactttcatataaaaatagcttttcctgttgctgctacttcaagcaagtacaaagtattaatactgaagaaatactattcagaaatattatagtcacttttttcaaagactcattgaaagctaatccaaagcgtccttaatacgcatcag

SEQ ID NO: 11795 - DNA, 600 bp, Chicken  19866894214898_1
acatgcaagatcacaagtgtgggctttgcccacattctgtccaggaaacagcacaggacattgtctgatgtacaatacagatcagttaatcattgtctacaactcagcataggtgccctctggaagcactagcttcactcagttgactgcacagggaccttgatttctcatttagcatctgaaataggtgtcccaagtaggtgtatcctacttttacacaataccacactgtaaacccttgcagctgtctataaagccaaagtttttgtcacattaaaaaaaaaaaagattccatattartaattccctatttgaagatatatcctgttcaatacgaaatgmaataccgcttatcagcaagatctctaaatcacgtaaaactaaaagcatatccaagggaacccactaaattaacatagatgtgtaacacaaagtgaagtgaattttcttaagtgatccaaaaaaaagacattaaaacatatgtaagaagttgccagttaattggacaagtaaagcattatgaagtcagcaacagttaccagaaaaaaacatatataattttaatgggcacagagctgaatccacacacctaccagaaga

SEQ ID NO: 11796 - DNA, 600 bp, Chicken  19866894214898_2
aggaaacagcacaggacattgtctgatgtacaatacagatcagttaatcattgtctacaactcagcataggtgccctctggaagcactagcttcactcagttgactgcacagggaccttgatttctcatttagcatctgaaataggtgtcccaagtaggtgtatcctacttttacacaataccacactgtaaacccttgcagctgtctataaagccaaagtttttgtcacattaaaaaaaaaaaagattccatattartaattccctatttgaagatatatcctgttcaatacgaaatgmaataccgcttatcagcaagatctctaaatcacgtaaaactaaaagcatatccaagggaacccactaaattaacatagatgtgtaacacaaagtgaagtgaattttcttaagtgatccaaaaaaaagacattaaaacatatgtaagaagttgccagttaattggacaagtaaagcattatgaagtcagcaacagttaccagaaaaaaacatatataattttaatgggcacagagctgaatccacacacctaccagaagaaaatcaaaggcttcctctttcctctttgcagccttttctttt

SEQ ID NO: 11797 - DNA, 600 bp, Chicken  19866894214900_1
cacaataaaaccacaactcctgggtaaattctagttactggtagctgtttaactaaaatacattaatgtaactcatgttgaaacccagactaaaatgtataaaaatctaattagaaactagaaacagactgggaagagctttgctgtcaaactggtagtgtgaaactgtacacctagttaagctgacattaatgttctttttcttattattaatttgaattattgaaggttccaggaaccccgaagttaaatcctactgagcaagcacaaaagaagaaaatggtcctctggactttttarggtttctataggctgactttgagcactccctttatttccccactataacaagtagaaggggagaagttgatctatctagcaggggcaaggatccaagacagaggaatggccagtcatgctgctctccacaatctacaagacacattacattcaccagatttttaggagcttgcttgctgcaagtctctctgcaacctatagagagacttctacaaagagtgagtggcagccatgtaagacaaccaaaattgccctttggcagtacctattttactgttgtcgacaacagagagatcatag

SEQ ID NO: 11798 - DNA, 600 bp, Chicken  19866894214900_2
ctaccttgaaagttagttctggttgctcaagtctttgtcaagctaaattttgaatatttcccaaggtggcgattccaaaacctttctgagtaaccttttccaacattttaccattctcatggtaagaacagagttctccctaattagaatttccatgttctaccttgagtgtgttgcacttctgaaaaaagttaggcttcactttatatgaacaaatgccagcaatgtacccttgctgctaagaaggctaatggtaatttgggctgcattaggcaaaatatcactagcaggtcaatggasatgattctgtccctctgtttggaactggtgargccgcatctggagtgctgtgtctaattctgtgctctctaatacaagagagacttgaacatactgaagatggtccaacagagagctatgaagatgtttaagggcctagagaacctttcctaagaggagaggctgagagagctaggcctactcagcctggagracagtacctgagggaaggctgcagagaggacagactcttttcagcggtgcccagtgccaggacaggtgacagtgggcgcaaattggaacacagaagattcctactga

SEQ ID NO: 11799 - DNA, 600 bp, Chicken  19866894214900_3
ctttgtcaagctaaattttgaatatttcccaaggtggcgattccaaaacctttctgagtaaccttttccaacattttaccattctcatggtaagaacagagttctccctaattagaatttccatgttctaccttgagtgtgttgcacttctgaaaaaagttaggcttcactttatatgaacaaatgccagcaatgtacccttgctgctaagaaggctaatggtaatttgggctgcattaggcaaaatatcactagcaggtcaatggasatgattctgtccctctgtttggaactggtgargccgcatctggagtgctgtgtctaattctgtgctctctaatacaagagagacttgaacatactgaagatggtccaacagagagctatgaagatgtttaagggcctagagaacctttcctaagaggagaggctgagagagctaggcctactcagcctggagracagtacctgagggaaggctgcagagaggacagactcttttcagcggtgcccagtgccaggacaggtgacagtgggcgcaaattggaacacagaagattcctactgagcaccaggcagcactgctgtgctgtacagata

SEQ ID NO: 11800 - DNA, 600 bp, Chicken  19866894214900_4
aggcttcactttatatgaacaaatgccagcaatgtacccttgctgctaagaaggctaatggtaatttgggctgcattaggcaaaatatcactagcaggtcaatggasatgattctgtccctctgtttggaactggtgargccgcatctggagtgctgtgtctaattctgtgctctctaatacaagagagacttgaacatactgaagatggtccaacagagagctatgaagatgtttaagggcctagagaacctttcctaagaggagaggctgagagagctaggcctactcagcctggagracagtacctgagggaaggctgcagagaggacagactcttttcagcggtgcccagtgccaggacaggtgacagtgggcgcaaattggaacacagaagattcctactgagcaccaggcagcactgctgtgctgtacagataccagagaactggcacaggtttcccagagagattgtggaatctcctccttggagattttcagaatctggctgcacgtgggtctgcaccccctgctccgggtgtccctgctggagcaagggttgggccaggcagacctgagagccctgccagcctcagccact

SEQ ID NO: 11801 - DNA, 600 bp, Chicken  19866894214915_1
agtcattcttacagctgtgtctcacctcaagatggaaatcgtttttttccagattcttcaccacctgggttagctctgatctcatcagatttgatgcactgtatccagttgctctgcaaaatagtaattttaaacttgtaattattctgttagcctttcaggactgatgatgggcagacaggaatgacttctgtatattctgccatgatttcaggccccacagtaaatgctttgaaggcaaattcctccccagttagcccatccaaattacattttattttctctctgtgaaaatgcaartagttatrgagcattgtgtcttagggcagtgaacccaaatcccagcccaagacagcacgactgacaaaggaggaggagttgtggggttggattggcaatgtggatcacagtccttgagaagagagtcagttctctttaatacagtgatgagcacagtcccagaggtccaagaggtggttcagaggagctttgagaacaggaaataccgctcatcaccctatgcttctccggactccttgagcatacttgggctgaaggtgtcaaacatctctctcatttgcttctgctctgcctcaggat

SEQ ID NO: 11802 - DNA, 600 bp, Chicken  19866894214915_2
ttacagctgtgtctcacctcaagatggaaatcgtttttttccagattcttcaccacctgggttagctctgatctcatcagatttgatgcactgtatccagttgctctgcaaaatagtaattttaaacttgtaattattctgttagcctttcaggactgatgatgggcagacaggaatgacttctgtatattctgccatgatttcaggccccacagtaaatgctttgaaggcaaattcctccccagttagcccatccaaattacattttattttctctctgtgaaaatgcaartagttatrgagcattgtgtcttagggcagtgaacccaaatcccagcccaagacagcacgactgacaaaggaggaggagttgtggggttggattggcaatgtggatcacagtccttgagaagagagtcagttctctttaatacagtgatgagcacagtcccagaggtccaagaggtggttcagaggagctttgagaacaggaaataccgctcatcaccctatgcttctccggactccttgagcatacttgggctgaaggtgtcaaacatctctctcatttgcttctgctctgcctcaggatgacatgag

SEQ ID NO: 11803 - DNA, 600 bp, Chicken  19866894214916_1
atagcgtttatattatttatctgacctaggaacagtgagaataacactatatgaacattctcagaagtaactttacccacaggaacatgaagttacaggaaaagactgaagaagtttggttttgaaaccagtggtcttcaaactacaggggcatgcaatacatcctgaagaggggggagggcatgacaaaagaagttaagaactgatggtctagaacaaaataaaggccatgaaagcagttaactgctattcacagatgcagcatgtgcaaaacaagggagagacattaacgtattgacrttaacrgaaagtatttgcacaacaaaaaaaatggatgcacgctgactgcgacttaaatttaccagggacttgagtctgatatttctaagcaccagtgatatcaaacacagaacagccttttaagaggaccggggacaatttcaatctggagcctgaaaactgagtcatagcacgtgcccatgtgcaacataggactatactcagtcatccaggctgctcctggagaatctgttttccatgtatgcccttagagagatctctctcccaccataacgctaagggcccaggcaaaccaatcaa

SEQ ID NO: 11804 - DNA, 600 bp, Chicken  19866894214916_2
tttatattatttatctgacctaggaacagtgagaataacactatatgaacattctcagaagtaactttacccacaggaacatgaagttacaggaaaagactgaagaagtttggttttgaaaccagtggtcttcaaactacaggggcatgcaatacatcctgaagaggggggagggcatgacaaaagaagttaagaactgatggtctagaacaaaataaaggccatgaaagcagttaactgctattcacagatgcagcatgtgcaaaacaagggagagacattaacgtattgacrttaacrgaaagtatttgcacaacaaaaaaaatggatgcacgctgactgcgacttaaatttaccagggacttgagtctgatatttctaagcaccagtgatatcaaacacagaacagccttttaagaggaccggggacaatttcaatctggagcctgaaaactgagtcatagcacgtgcccatgtgcaacataggactatactcagtcatccaggctgctcctggagaatctgttttccatgtatgcccttagagagatctctctcccaccataacgctaagggcccaggcaaaccaatcaaacatcc

SEQ ID NO: 11805 - DNA, 599 bp, Chicken  19866894214920_1
  misc_feature (1)..(60): n is any nucleotide
nnnnnnnnnnnnnnnnnnnnnnnnnnnnnnnnnnnnnnnnnnnnnnnnnnnnnnnnnnnntcccatggcatcaccccgaggctgaggggagaatctcaccctgagttccctcttcagccccaaatcagtccagaaggagcagggcaggctgcttgcatcgcatacacctagcactggagctaaataccagctgcacctgagtaggttctgtgtcacacgaggctgcagcaccaactccagctggaggagcacagatgtgtgaggccaagagaaggtctctcaccttcctgtcctcttgargggctcaaagaaaggcgctgaagggcagagcaggatgcaagctctgctgctcagccccatccaggactgtgtgctgcctgggctcgtgccacagagccaaatggggataaggagtgatactcccctacttgactgaattaaaggtaatagctgaaaatgcctgaactctcatcaaaactaatgggagttaggagccagaatgcctttgtgtatctggccctccaggtctttatcttgattcaatattccctgggaagtcagtgtggagtgagggataggtcttcctccaagattttgct

SEQ ID NO: 11806 - DNA, 600 bp, Chicken  19866894214920_2
cgctgaagggcagagcaggatgcaagctctgctgctcagccccatccaggactgtgtgctgcctgggctcgtgccacagagccaaatggggataaggagtgatactcccctacttgactgaattaaaggtaatagctgaaaatgcctgaactctcatcaaaactaatgggagttaggagccagaatgcctttgtgtatctggccctccaggtctttatcttgattcaatattccctgggaagtcagtgtggagtgagggataggtcttcctccaagattttgctgactagaagccatggrcagcaggtaaatctcacctggtaatatctcacccttcagagccttttcagaactccgggaagtacaagcatccatcagggctgacacattaattcaaacagtgttattttcacatcatttaaggcctctcttcccacttttgttttgcaattgaaaataatgtggaggcacagcaccactgctgctctcaccaccgcctgcagccgctccgcaggtctgcggggactgtttgcattccagtcagaattaagtgtttgaaggggtttagatttaatcccattcaaatgtgcattttgctta

SEQ ID NO: 11807 - DNA, 590 bp, Chicken  19866894214920_3
aaagagtttgcagagctttttcctcctctcgccaaggactcagactacatccactcggtatatagggaagaggagggctatatttgcctccatgcagatttcccatttggcacagagcgctctctgaacagccaccagcagctcagcgccggccctgcctcatctgctcactgctcagtaactgggcacaatttactgctgctgtgattgcatccagctgcaaatggccatggagccaaaatgcctcttctgtccactgattataaaattaactcaaacaagcataaaataaaggctagyaagctgagctgttggaccccggccctttgagatgattgcagctccttggctgagctgctcttaagcaaacccggggcatccttaggaccccatcacacagccccatgtattcggctgagctgggaagctccaccccagaagcactgatgtgctgggttcaatgcacatagcaacaggtgagcagcatggaaaagttcttacaggctcacaaaggctcttctcctgcacagtgacctttgctttcccagctacctgctcagaaggggcacacgtgctcctcaataaataca

SEQ ID NO: 11808 - DNA, 600 bp, Chicken  19866894214946_1
agtgccctaatagggcaatctgtgcttgcctgggctctccagggcgacagagtcagacagtgactcagaggaacaacagaagaccatttattgaactttcaccttcagctaatcaactgccctgcaacaaaattaggggacttcctagtagcagtgaatgagcgacagggataaaggatactttggcactggtgttattgccttctctgctacctccagggaaattgaggttatggctgctgcaggagaagactaaaagatgactgggaggaaaatgaggaagagcgagtaaaagaaagraaagagaggaaatggagagaagcagagaaggaacgtaagagagagaggtgatggagggagaaaagcaatcattttgaatccactttgaggagctgcaagacagaagagcaggagggagactctgggagggatctccaggaggtcaaattggaagtggggtgagtgggtcttcagtggaattttggggttggattgggaaggatttgcaggttatctagcagaggtgtttggttttggggtggattaaggagtacttgtgatctcaagggatgttacgggatctgaggggaatcaggaagg

SEQ ID NO: 11809 - DNA, 599 bp, Chicken  19866894214947_1
  misc_feature (1)..(190): n is any nucleotide
nnnnnnnnnnnnnnnnnnnnnnnnnnnnnnnnnnnnnnnnnnnnnnnnnnnnnnnnnnnnnnnnnnnnnnnnnnnnnnnnnnnnnnnnnnnnnnnnnnnnnnnnnnnnnnnnnnnnnnnnnnnnnnnnnnnnnnnnnnnnnnnnnnnnnnnnnnnnnnnnnnnnnnnnnnnnnnnnnnnnnnnnnnnnnntgcccttacactgagcattttttaattctttgttttattagagaattatttgtgccttcttgtcaacatccaattgcatcccatcaaagagccctttggccaggtgctgkgagtgcctcagaaggctgtttggatacctgtctcaggagacttatcccagaaacggtttgcagaatccaagaaaacagcaatctctgtaaaacaccaccaactgcatttctttctcccctctcagattcagtggcatgggcagacycagagcagtccccastccagcaggtaccattagcctcaygattcaccttaggctccgcagggaaacatccatgagaaactacatgaaagggcctgaaagtgctgtccaaagaggtgctttccatggaaatcaaaaagatcctataaggctggg

SEQ ID NO: 11810 - DNA, 599 bp, Chicken  19866894214947_2
  misc_feature (1)..(44): n is any nucleotide
nnnnnnnnnnnnnnnnnnnnnnnnnnnnnnnnnnnnnnnnnnnntgcccttacactgagcattttttaattctttgttttattagagaattatttgtgccttcttgtcaacatccaattgcatcccatcaaagagccctttggccaggtgctgkgagtgcctcagaaggctgtttggatacctgtctcaggagacttatcccagaaacggtttgcagaatccaagaaaacagcaatctctgtaaaacaccaccaactgcatttctttctcccctctcagattcagtggcatgggcagacycagagcagtccccastccagcaggtaccattagcctcaygattcaccttaggctccgcagggaaacatccatgagaaactacatgaaagggcctgaaagtgctgtccaaagaggtgctttccatggaaatcaaaaagatcctataaggctgggaaaggcargtgaaccaacgggaaatgagcaatgagcttcttggccatccccagcagcacactctccaagcaatgatgccaggaagggtcaagcaagcaggcccagtctttttttttttwaatttcaagtccaaattgttggaaaaa

SEQ ID NO: 11811 - DNA, 599 bp, Chicken  19866894214947_3
  misc_feature (1)..(29): n is any nucleotide
nnnnnnnnnnnnnnnnnnnnnnnnnnnnntgcccttacactgagcattttttaattctttgttttattagagaattatttgtgccttcttgtcaacatccaattgcatcccatcaaagagccctttggccaggtgctgkgagtgcctcagaaggctgtttggatacctgtctcaggagacttatcccagaaacggtttgcagaatccaagaaaacagcaatctctgtaaaacaccaccaactgcatttctttctcccctctcagattcagtggcatgggcagacycagagcagtccccastccagcaggtaccattagcctcaygattcaccttaggctccgcagggaaacatccatgagaaactacatgaaagggcctgaaagtgctgtccaaagaggtgctttccatggaaatcaaaaagatcctataaggctgggaaaggcargtgaaccaacgggaaatgagcaatgagcttcttggccatccccagcagcacactctccaagcaatgatgccaggaagggtcaagcaagcaggcccagtctttttttttttwaatttcaagtccaaattgttggaaaaaaatggcaaacctccc

SEQ ID NO: 11812 - DNA, 599 bp, Chicken  19866894214947_4
  misc_feature (1)..(5): n is any nucleotide
nnnnntgcccttacactgagcattttttaattctttgttttattagagaattatttgtgccttcttgtcaacatccaattgcatcccatcaaagagccctttggccaggtgctgkgagtgcctcagaaggctgtttggatacctgtctcaggagacttatcccagaaacggtttgcagaatccaagaaaacagcaatctctgtaaaacaccaccaactgcatttctttctcccctctcagattcagtggcatgggcagacycagagcagtccccastccagcaggtaccattagcctcaygattcaccttaggctccgcagggaaacatccatgagaaactacatgaaagggcctgaaagtgctgtccaaagaggtgctttccatggaaatcaaaaagatcctataaggctgggaaaggcargtgaaccaacgggaaatgagcaatgagcttcttggccatccccagcagcacactctccaagcaatgatgccaggaagggtcaagcaagcaggcccagtctttttttttttwaatttcaagtccaaattgttggaaaaaaatggcaaacctcccctggtcaagaaggctctctggtga

SEQ ID NO: 11813 - DNA, 600 bp, Chicken  19866894214947_5
tcagaaggctgtttggatacctgtctcaggagacttatcccagaaacggtttgcagaatccaagaaaacagcaatctctgtaaaacaccaccaactgcatttctttctcccctctcagattcagtggcatgggcagacycagagcagtccccastccagcaggtaccattagcctcaygattcaccttaggctccgcagggaaacatccatgagaaactacatgaaagggcctgaaagtgctgtccaaagaggtgctttccatggaaatcaaaaagatcctataaggctgggaaaggcargtgaaccaacgggaaatgagcaatgagcttcttggccatccccagcagcacactctccaagcaatgatgccaggaagggtcaagcaagcaggcccagtctttttttttttwaatttcaagtccaaattgttggaaaaaaatggcaaacctcccctggtcaagaaggctctctggtgacagacggcttgcagcaaccctagctgcagtgcagagcagagaaatacttctgagatccagatttcatatcctaggtctgctctggcatcagcatagtctttttggctccacaaaaaggacaaa

SEQ ID NO: 11814 - DNA, 600 bp, Chicken  19866894214947_6
ttctttctcccctctcagattcagtggcatgggcagacycagagcagtccccastccagcaggtaccattagcctcaygattcaccttaggctccgcagggaaacatccatgagaaactacatgaaagggcctgaaagtgctgtccaaagaggtgctttccatggaaatcaaaaagatcctataaggctgggaaaggcargtgaaccaacgggaaatgagcaatgagcttcttggccatccccagcagcacactctccaagcaatgatgccaggaagggtcaagcaagcaggcccagtcrttttttttttwaatttcaagtccaaattgttggaaaaaaatggcaaacctcccctggtcaagaaggctctctggtgacagacggcttgcagcaaccctagctgcagtgcagagcagagaaatacttctgagatccagatttcatatcctaggtctgctctggcatcagcatagtctttttggctccacaaaaaggacaaagagcctggacccctgggcacaactgtccttcacccagaacagcctgtcagaggctccacgctgcctttgcatttaatcttgcagctgacatttgaaactt

SEQ ID NO: 11815 - DNA, 600 bp, Chicken  19866894214947_7
ctctcagattcagtggcatgggcagacycagagcagtccccastccagcaggtaccattagcctcaygattcaccttaggctccgcagggaaacatccatgagaaactacatgaaagggcctgaaagtgctgtccaaagaggtgctttccatggaaatcaaaaagatcctataaggctgggaaaggcargtgaaccaacgggaaatgagcaatgagcttcttggccatccccagcagcacactctccaagcaatgatgccaggaagggtcaagcaagcaggcccagtctttttttttttwaatttcaagtccaaattgttggaaaaaaatggcaaacctcccctggtcaagaaggctctctggtgacagacggcttgcagcaaccctagctgcagtgcagagcagagaaatacttctgagatccagatttcatatcctaggtctgctctggcatcagcatagtctttttggctccacaaaaaggacaaagagcctggacccctgggcacaactgtccttcacccagaacagcctgtcagaggctccacgctgcctttgcatttaatcttgcagctgacatttgaaacttgaagctaaaag

SEQ ID NO: 11816 - DNA, 600 bp, Chicken  19866894214954_1
atgtggtgcagttgacaagcctgaggtatgagataccctgcaggaaaggacctgggggtactggtggatggcagctggacatgaggcagcagcgtgcttttgcagcccagaaggccaaccgtgtcctgggctgcatcaaaagggtaaggaaggggatcctgcccctctgctctgtgctgcgagagctcacctggagcactgcgtccagaggtggagtcttcagtacaggagagatgtggagctgctgcagtgcggccagaggccacagaaatgatcccagggatggaacacctccctacraggacaggctgagagctggggctgttcagcctggagaatagaaggctacagggagacctgagagcrgcctttcagtatctaaaggggggctgtaagaaggaaggggacagactctttagcagtgcctgttgtgataggataaggagaaaaggtttaaaacaaaagcaggatagataaatatagataggataaaagaaaaagttgggtttgtttctttctttcttttatggtaattgtwgtaaagcactggcacagattrcyccatccctggagacattcatggtcaggctggaccaggct

SEQ ID NO: 11817 - DNA, 600 bp, Chicken  19866894214954_2
gatggcagctggacatgaggcagcagcgtgcttttgcagcccagaaggccaaccgtgtcctgggctgcatcaaaagggtaaggaaggggatcctgcccctctgctctgtgctgcgagagctcacctggagcactgcgtccagaggtggagtcttcagtacaggagagatgtggagctgctgcagtgcggccagaggccacagaaatgatcccagggatggaacacctccctacraggacaggctgagagctggggctgttcagcctggagaatagaaggctacagggagacctgagagcrgcctttcagtatctaaaggggggctgtaagaaggaaggggacagactctttagcagtgcctgttgtgataggataaggagaaaaggtttaaaacaaaagcaggatagataaatatagataggataaaagaaaaagttgggtttgtttctttctttcttttatggtaattgtwgtaaagcactggcacagattrcyccatccctggagacattcatggtcaggctggaccaggctctgagcacccgattgagctgtaggtgtcccygttcactgcaggggagttagaagggacctttaaag

SEQ ID NO: 11818 - DNA, 600 bp, Chicken  19866894214954_3
gagctgctgcagtgcggccagaggccacagaaatgatcccagggatggaacacctccctacraggacaggctgagagctggggctgttcagcctggagaatagaaggctacagggagacctgagagcrgcctttcagtatctaaaggggggctgtaagaaggaaggggacagactctttagcagtgcctgttgtgataggataaggagaaaaggtttaaaacaaaagcaggatagataaatatagataggataaaagaaaaagttgggtttgtttctttctttcttttatggtaattgtwgtaaagcactggcacagattrcyccatccctggagacattcatggtcaggctggaccaggctctgagcacccgattgagctgtaggtgtcccygttcactgcaggggagttagaagggacctttaaaggcaatctagtccaacacaaatgattttatggttctacgaaaacatgctaagtaaggtaaatacataaaagctctagatgaactgatgtggctagcactccagattccactaacataacatactttagaaatcttaataaggggagctaccagccactaatacctctgacaak

SEQ ID NO: 11819 - DNA, 600 bp, Chicken  19866894214954_4
aggccacagaaatgatcccagggatggaacacctccctacraggacaggctgagagctggggctgttcagcctggagaatagaaggctacagggagacctgagagcrgcctttcagtatctaaaggggggctgtaagaaggaaggggacagactctttagcagtgcctgttgtgataggataaggagaaaaggtttaaaacaaaagcaggatagataaatatagataggataaaagaaaaagttgggtttgtttctttctttcttttatggtaattgtwgtaaagcactggcacagattrcyccatccctggagacattcatggtcaggctggaccaggctctgagcacccgattgagctgtaggtgtcccygttcactgcaggggagttagaagggacctttaaaggcaatctagtccaacacaaatgattttatggttctacgaaaacatgctaagtaaggtaaatacataaaagctctagatgaactgatgtggctagcactccagattccactaacataacatactttagaaatcttaataaggggagctaccagccactaatacctctgacaaktgaaaccagagataagtagac

SEQ ID NO: 11820 - DNA, 600 bp, Chicken  19866894214954_5
gccacagaaatgatcccagggatggaacacctccctacraggacaggctgagagctggggctgttcagcctggagaatagaaggctacagggagacctgagagcrgcctttcagtatctaaaggggggctgtaagaaggaaggggacagactctttagcagtgcctgttgtgataggataaggagaaaaggtttaaaacaaaagcaggatagataaatatagataggataaaagaaaaagttgggtttgtttctttctttcttttatggtaattgtwgtaaagcactggcacagattrcyccatccctggagacattcatggtcaggctggaccaggctctgagcacccgattgagctgtaggtgtcccygttcactgcaggggagttagaagggacctttaaaggcaatctagtccaacacaaatgattttatggttctacgaaaacatgctaagtaaggtaaatacataaaagctctagatgaactgatgtggctagcactccagattccactaacataacatactttagaaatcttaataaggggagctaccagccactaatacctctgacaaktgaaaccagagataagtagacta

SEQ ID NO: 11821 - DNA, 600 bp, Chicken  19866894214954_6
tggagaatagaaggctacagggagacctgagagcrgcctttcagtatctaaaggggggctgtaagaaggaaggggacagactctttagcagtgcctgttgtgataggataaggagaaaaggtttaaaacaaaagcaggatagataaatatagataggataaaagaaaaagttgggtttgtttctttctttcttttatggtaattgtwgtaaagcactggcacagattrcyccatccctggagacattcatggtcaggctggaccaggctctgagcacccgattgagctgtaggtgtcccygttcactgcaggggagttagaagggacctttaaaggcaatctagtccaacacaaatgattttatggttctacgaaaacatgctaagtaaggtaaatacataaaagctctagatgaactgatgtggctagcactccagattccactaacataacatactttagaaatcttaataaggggagctaccagccactaatacctctgacaaktgaaaccagagataagtagactacttccagccctatcactgactggaagattggaagaagttttgagtgccatggcagcatcattaagacagc

SEQ ID NO: 11822 - DNA, 435 bp, Chicken  19866894214954_7
gtaaagcactggcacagattrcyccatccctggagacattcatggtcaggctggaccaggctctgagcacccgattgagctgtaggtgtcccygttcactgcaggggagttagaagggacctttaaaggcaatctagtccaacacaaatgattttatggttctacgaaaacatgctaagtaaggtaaatacataaaagctctagatgaactgatgtggctagcactccagattccactaacataacatactttagaaatcttaataaggggagctaccagccactaatacctctgacaaktgaaaccagagataagtagactacttccagccctatcactgactggaagattggaagaagttttgagtgccatggcagcatcattaagacagcagcagtatgagttaattcagttttgctgctttaatacgtttc

SEQ ID NO: 11823 - DNA, 505 bp, Chicken  19866894214959_1
gaaagccccaaacacctagttttcttctgaatgttccctttcttcctatttaacacattgcagaaaccagcaattctgcatctctgttatgcatgagtgtgggcatgggtgggtagaagggaagatacaaggttggaaagggaatttgtagcattagggttttcactttggggactctggtccagctcacgttaaatttaaatgaaagcttcccattgccaatcctggatagaagaatcaggtcccaaagccttgcttttttttgcacatgcgcctaacctctatgaaggaaatgggaayatctgcttgaaaaagacaaccaagatatgaatctataactacattattttagataaactgcctagagttgattaaagcctttttccccccattattttatagctattctgatgattaagtgattcgaggtgttttccagggctgattacaagtgtaatgggctctggtcttgcaattgcaatatgaccattgacagaggcataaa

SEQ ID NO: 11824 - DNA, 600 bp, Chicken  19866894214966_1
tttggttgcataaggaataataaggtccaatcttttgccttaagcaccagagtataatgatataatttgcatctctgccttacaaaatgagattatcctaccttgagaattccttcacaacacttcggggctgataagaattttttttaatagttttaaaggctatttaaacttccttttctttctttcttttttttttttaagccccttttattccattttttgagtatttgctagaactttcaaatgaaaatcttttctatcatttccattccctaccaataaactgctatccattakcttctggttttgacatgggaaagytgggactaattccacagacttacactcccatgagatctttgctagtatatctcagcattcacacagctttatcctaatagagcactgtttggagagtttaaatttttgcagataawgataatgcacttgcctcttatcagagtatttatatgtaggccattttcaaaaacgaacattccttgtgtagtacccttaaatcagacaatttctatattaattaaatttgtatagttgcattatatggcaaacacataagtctgtgttaaaccccagcag

SEQ ID NO: 11825 - DNA, 600 bp, Chicken  19866894214966_2
gtccaatcttttgccttaagcaccagagtataatgatataatttgcatctctgccttacaaaatgagattatcctaccttgagaattccttcacaacacttcggggctgataagaattttttttaatagttttaaaggctatttaaacttccttttctttctttcttttttttttttaagccccttttattccattttttgagtatttgctagaactttcaaatgaaaatcttttctatcatttccattccctaccaataaactgctatccattakcttctggttttgacatgggaaagytgggactaattccacagacttacactcccatgagatctttgctagtatatctcagcattcacacagctttatcctaatagagcactgtttggagagtttaaatttttgcagataawgataatgcacttgcctcttatcagagtatttatatgtaggccattttcaaaaacgaacattccttgtgtagtacccttaaatcagacaatttctatattaattaaatttgtatagttgcattatatggcaaacacataagtctgtgttaaaccccagcagtgcttcaaaaagtcaaattaagga

SEQ ID NO: 11826 - DNA, 600 bp, Chicken  19866894214966_3
ttttttttaatagttttaaaggctatttaaacttccttttctttctttcttttttttttttaagccccttttattccattttttgagtatttgctagaactttcaaatgaaaatcttttctatcatttccattccctaccaataaactgctatccattakcttctggttttgacatgggaaagytgggactaattccacagacttacactcccatgagatctttgctagtatatctcagcattcacacagctttatcctaatagagcactgtttggagagtttaaatttttgcagataawgataatgcacttgcctcttatcagagtatttatatgtaggccattttcaaaaacgaacattccttgtgtagtacccttaaatcagacaatttctatattaattaaatttgtatagttgcattatatggcaaacacataagtctgtgttaaaccccagcagtgcttcaaaaagtcaaattaaggaatttgggttaacacagtaagtgataccgtaggaatatcagttgatataagyagagactccaaagcaggtgaagtgtctcttgttcagaatgagtcagtgaaatctcatcagtttta

SEQ ID NO: 11827 - DNA, 600 bp, Chicken  19866894214966_4
tcagcattcacacagctttatcctaatagagcactgtttggagagtttaaatttttgcagataawgataatgcacttgcctcttatcagagtatttatatgtaggccattttcaaaaacgaacattccttgtgtagtacccttaaatcagacaatttctatattaattaaatttgtatagttgcattatatggcaaacacataagtctgtgttaaaccccagcagtgcttcaaaaagtcaaattaaggaatttgggttaacacagtaagtgataccgtaggaatatcagttgatataagyagagactccaaagcaggtgaagtgtctcttgttcagaatgagtcagtgaaatctcatcagttttagctccttatgaggtttgttgggtttttttaatatgtgaaattttaatgaaatcagaatatctctggtgattagcaaattgagaagaaaggtgatattttatggcaaacatctacataaagacatgctgaatattcagatcacaggttctaaaagggaggcagatttgaagattaacgtcacaatataatgagtaataatgagtacaaaaaagacaatcctaaaatgaatagctct

SEQ ID NO: 11828 - DNA, 599 bp, Chicken  19866894214979_1
  misc_feature (1)..(160): n is any nucleotide
nnnnnnnnnnnnnnnnnnnnnnnnnnnnnnnnnnnnnnnnnnnnnnnnnnnnnnnnnnnnnnnnnnnnnnnnnnnnnnnnnnnnnnnnnnnnnnnnnnnnnnnnnnnnnnnnnnnnnnnnnnnnnnnnnnnnnnnnnnnnnnnnnnnnnnnnnnnnnnnntgatgttgccttttttccagtctcaaaggacttcacctgactgccatgacttttcacatataatttatagtagtggtgactacatcagccaattccatcaggactctgggatgcatcttactgggccccatagacttacrcgtgttcaggttctgcaggtgttcatgaaccttatcttcacttagagtgagagggcaattctctcccagttctcacctcccaaacggataactcttctataaatctcattgccatgccaggattatagattgaataccattgaaggtctgctggcacatttttgtaatcacaagtctgtgaaagaccatggtctgcacaggctgtggtcatttctagcaatggctttcaccactgaagtaagttgaggatgagaagatgtcrtgggtaagctcatgctatagggaggaggcactgtgtc

SEQ ID NO: 11829 - DNA, 600 bp, Chicken  19866894214979_2
actctgggatgcatcttactgggccccatagacttacrcgtgttcaggttctgcaggtgttcatgaaccttatcttcacttagagtgagagggcaattctctcccagttctcacctcccaaacggataactcttctataaatctcattgccatgccaggattatagattgaataccattgaaggtctgctggcacatttttgtaatcacaagtctgtgaaagaccatggtctgcacaggctgtggtcatttctagcaatggctttcaccactgaagtaagttgaggatgagaagatgtcrtgggtaagctcatgctatagggaggaggcactgtgtctgccctggctcttgtccctggatgtgacttgtaagtgcctcaggtcaggctgcttcataactattgctgaaaataacttcagacagtggacttgcagtcctttcaatgtaggatgtattctgctaagacagccctccttttgtaggacagcagtgtgggtgaggagatgcttcttgagataaaaagcagctctaggctccatcactgcagaataagggcagcacggcctgcaaaggggaaggaagagcaaccaccaaaccatt

SEQ ID NO: 11830 - DNA, 599 bp, Chicken  19866894214980_1
  misc_feature (1)..(141): n is any nucleotide
nnnnnnnnnnnnnnnnnnnnnnnnnnnnnnnnnnnnnnnnnnnnnnnnnnnnnnnnnnnnnnnnnnnnnnnnnnnnnnnnnnnnnnnnnnnnnnnnnnnnnnnnnnnnnnnnnnnnnnnnnnnnnnnnnnnnnnnnnnnnnccagctcccttgtgaaggcccatctaggtgcaccaagacaaaactccaccttccagttttttgaggccactgagaataaccctccccattctcctcacgaagaaaagcatcattttaagcaagactgctgcagtgtcccagcttactgtgtggcaatcrgggaaacagccaggcagaaggcaagaaagtgcggactggcttcaccaccacagccagcgcggcctgcccagccctcagggatgggcccacctgacaaacaccaagctatgacagcacccacctgcctgcacaggcagcacagccagccagttgtcagggagtcctcatcaaacaacttgtcacttcaccaggcagcagtggcacragtcgtgtccttcacacacacctgcttcacctcttccttcatccaggcaggccttaggccagaggggagcagccccttcttgtaggacacagca

SEQ ID NO: 11831 - DNA, 600 bp, Chicken  19866894214980_2
ggccactgagaataaccctccccattctcctcacgaagaaaagcatcattttaagcaagactgctgcagtgtcccagcttactgtgtggcaatcrgggaaacagccaggcagaaggcaagaaagtgcggactggcttcaccaccacagccagcgcggcctgcccagccctcagggatgggcccacctgacaaacaccaagctatgacagcacccacctgcctgcacaggcagcacagccagccagttgtcagggagtcctcatcaaacaacttgtcacttcaccaggcagcagtggcacragtcgtgtccttcacacacacctgcttcacctcttccttcatccaggcaggccttaggccagaggggagcagccccttcttgtaggacacagcacctgcacctcacctgtagctttttcacctcgtgtcatctcgctgggaaaagttggctctgaaactgttaaatgcagcatgctaagcgctgtcaacctgtaaaatcccactgggcagctgctgtacacgcttatctctgtgcagccaggctctgccacctcgttggcttaaaagaaatgttaattttcccctatggaagaaggagct

SEQ ID NO: 11832 - DNA, 599 bp, Chicken  19866894214994_1
  misc_feature (1)..(193): n is any nucleotide
nnnnnnnnnnnnnnnnnnnnnnnnnnnnnnnnnnnnnnnnnnnnnnnnnnnnnnnnnnnnnnnnnnnnnnnnnnnnnnnnnnnnnnnnnnnnnnnnnnnnnnnnnnnnnnnnnnnnnnnnnnnnnnnnnnnnnnnnnnnnnnnnnnnnnnnnnnnnnnnnnnnnnnnnnnnnnnnnnnnnnnnnnnnnnnnnntgaggaacaagagcctgcatggctgtctggaatgtggcttgtctttcccatcgccgttgccactgctgaaatgcactagccaccacctcactgtgctcacatccacwrtttggttttcataaatgttcaccacgtatcaatgaatgtcagtaggtaccatttttttccacacggaggtgttcattgacacccctttgcttcactgacacccctttgcttcatgcacacttccaygtcagatgtcattttgtcagactgcccctctgctgccatccctcacatggcaacaaagtgtaatggaatattggtgggaaggctcaacctctactgccataccaccaacagccacctctgccatcatgggtcaacataataaaacaggagacattagytttggagcagcctt

SEQ ID NO: 11833 - DNA, 599 bp, Chicken  19866894214994_2
  misc_feature (1)..(192): n is any nucleotide
nnnnnnnnnnnnnnnnnnnnnnnnnnnnnnnnnnnnnnnnnnnnnnnnnnnnnnnnnnnnnnnnnnnnnnnnnnnnnnnnnnnnnnnnnnnnnnnnnnnnnnnnnnnnnnnnnnnnnnnnnnnnnnnnnnnnnnnnnnnnnnnnnnnnnnnnnnnnnnnnnnnnnnnnnnnnnnnnnnnnnnnnnnnnnnnntgaggaacaagagcctgcatggctgtctggaatgtggcttgtctttcccatcgccgttgccactgctgaaatgcactagccaccacctcactgtgctcacatccacwrtttggttttcataaatgttcaccacgtatcaatgaatgtcagtaggtaccatttttttccacacggaggtgttcattgacacccctttgcttcactgacacccctttgcttcatgcacacttccaygtcagatgtcattttgtcagactgcccctctgctgccatccctcacatggcaacaaagtgtaatggaatattggtgggaaggctcaacctctactgccataccaccaacagccacctctgccatcatgggtcaacataataaaacaggagacattagytttggagcagccttc

SEQ ID NO: 11834 - DNA, 599 bp, Chicken  19866894214994_3
  misc_feature (1)..(66): n is any nucleotide
nnnnnnnnnnnnnnnnnnnnnnnnnnnnnnnnnnnnnnnnnnnnnnnnnnnnnnnnnnnnnnnnnntgaggaacaagagcctgcatggctgtctggaatgtggcttgtctttcccatcgccgttgccactgctgaaatgcactagccaccacctcactgtgctcacatccacwrtttggttttcataaatgttcaccacgtatcaatgaatgtcagtaggtaccatttttttccacacggaggtgttcattgacacccctttgcttcactgacacccctttgcttcatgcacacttccaygtcagatgtcattttgtcagactgcccctctgctgccatccctcacatggcaacaaagtgtaatggaatattggtgggaaggctcaacctctactgccataccaccaacagccacctctgccatcatgggtcaacataataaaacaggagacattagytttggagcagccttcacaaagacatgatgtttgctgccatttatgctatccagactctaacaacctgcaggcaaccaaataacagaagtaaacatctgtatataaaagttgtatkttaaaatctaatgmagttgtctatag

SEQ ID NO: 11835 - DNA, 600 bp, Chicken  19866894214994_4
gtgctcacatccacwrtttggttttcataaatgttcaccacgtatcaatgaatgtcagtaggtaccatttttttccacacggaggtgttcattgacacccctttgcttcactgacacccctttgcttcatgcacacttccaygtcagatgtcattttgtcagactgcccctctgctgccatccctcacatggcaacaaagtgtaatggaatattggtgggaaggctcaacctctactgccataccaccaacagccacctctgccatcatgggtcaacataataaaacaggagacattagytttggagcagccttcacaaagacatgatgtttgctgccatttatgctatccagactctaacaacctgcaggcaaccaaataacagaagtaaacatctgtatataaaagttgtatkttaaaatctaatgmagttgtctatagaacatttacttatcatcctacctagtaatttgcttggcacttcacattcagttagcagaaggcattacagaacagcagtacgtttataaaaccagatgatgccacagtaccagagactagatagtttaaattgctgtgatgaatcacagttcttatcat

SEQ ID NO: 11836 - DNA, 600 bp, Chicken  19866894214994_5
acccctttgcttcatgcacacttccaygtcagatgtcattttgtcagactgcccctctgctgccatccctcacatggcaacaaagtgtaatggaatattggtgggaaggctcaacctctactgccataccaccaacagccacctctgccatcatgggtcaacataataaaacaggagacattagytttggagcagccttcacaaagacatgatgtttgctgccatttatgctatccagactctaacaacctgcaggcaaccaaataacagaagtaaacatctgtatataaaagttgtatkttaaaatctaatgmagttgtctatagaacatttacttatcatcctacctagtaatttgcttggcacttcacattcagttagcagaaggcattacagaacagcagtacgtttataaaaccagatgatgccacagtaccagagactagatagtttaaattgctgtgatgaatcacagttcttatcattcatctaatgtatacacattacatagatacagcatgactgacaaaagatctgaaaacagtaatagaatgacaattagttccctgacaaaacatatcagaaagcaaccctctttct

SEQ ID NO: 11837 - DNA, 600 bp, Chicken  19866894214994_6
tgcacacttccaygtcagatgtcattttgtcagactgcccctctgctgccatccctcacatggcaacaaagtgtaatggaatattggtgggaaggctcaacctctactgccataccaccaacagccacctctgccatcatgggtcaacataataaaacaggagacattagytttggagcagccttcacaaagacatgatgtttgctgccatttatgctatccagactctaacaacctgcaggcaaccaaataacagaagtaaacatctgtatataaaagttgtatkttaaaatctaatgmagttgtctatagaacatttacttatcatcctacctagtaatttgcttggcacttcacattcagttagcagaaggcattacagaacagcagtacgtttataaaaccagatgatgccacagtaccagagactagatagtttaaattgctgtgatgaatcacagttcttatcattcatctaatgtatacacattacatagatacagcatgactgacaaaagatctgaaaacagtaatagaatgacaattagttccctgacaaaacatatcagaaagcaaccctctttcttatttaggcttgca

SEQ ID NO: 11838 - DNA, 600 bp, Chicken  19866894214997_1
aattttatggaagcagcagttttctcactacaataaacccagatcaaaaagtgttttcttttgaattcaaatcagccaaatgggcatctctgtctgaattcatttgtgctgctgatctctgatctggagcatagctaggagtttcatatggtaaaataggtgtaactcatttacagtgaataatgaatgcatatataatatgcgtaaaatagcctgaagccagagaaatatcctccagccagctatctgtagttaataaaaatgactgtccattcatggaactcctctaaaatttagatkagatgttttttacctgcattattgtactatcagacaatagtgtacaaccctcttttgatatgttccttttagaaaaaaggacttttgttattccaaaaggtaataattttacacaccatatgaattccatacaccatttaagaatccatttattttgatttacttgttgagatacagaatgccactagttcttaggatttcctatagatgtcactgtacgggagaagtgtacctactttccactgttgttagtttcacacaagctctttttttttcttctaatttgaaaatgatttctat

SEQ ID NO: 11839 - DNA, 600 bp, Chicken  19866894214997_2
tataactctaagggaagacagtagggagtaaagttgctcaacttctctgtgtgtagcgtgtattacattaaaataaatctgtcgtagtaattgaaatgttacaagtatattaagagttctctgacatcaactttaaaatgtgtatctctggggaatggtcacacactgtagtctgagctgcagtatgaaaggttacttactttcagagcagtctttataagaatcagggcttttcctattgttcctgtctctttttttcattttgtgcttcctctaaaagttgaagctgtcactctgacwcactttattaggctgtacttaggcacattctctccttgctcccaggtgctccctgatcctggttgctgtcggatcagtgacaaatgyggagcatgcatcatgatctgggtgcgtgcttgtaactcagcctcacaacgaccaagcttggagtcgctttgcagtctgtgcctttgtagccctgggtatgtcctgagaccaaaattgtgttagcagatggaacagactgggcttggagcttaggtggcaaagaaagcatatgtatctgtgtggacatgatatttattggactttccatttagt

SEQ ID NO: 11840 - DNA, 600 bp, Chicken  19866894214997_3
taattgaaatgttacaagtatattaagagttctctgacatcaactttaaaatgtgtatctctggggaatggtcacacactgtagtctgagctgcagtatgaaaggttacttactttcagagcagtctttataagaatcagggcttttcctattgttcctgtctctttttttcattttgtgcttcctctaaaagttgaagctgtcactctgacwcactttattaggctgtacttaggcacattctctccttgctcccaggtgctccctgatcctggttgctgtcggatcagtgacaaatgyggagcatgcatcatgatctgggtgcgtgcttgtaactcagcctcacaacgaccaagcttggagtcgctttgcagtctgtgcctttgtagccctgggtatgtcctgagaccaaaattgtgttagcagatggaacagactgggcttggagcttaggtggcaaagaaagcatatgtatctgtgtggacatgatatttattggactttccatttagttattatttacatgtcatcattatcatctttcatgtcatgtaaaagcttccttggaaattgtactctgaactgtaaaatggttgcata

SEQ ID NO: 11841 - DNA, 600 bp, Chicken  19866894215001_1
ctgagctcagctttctgtaaaaacccacagacactgatgtacaggttcacagagctgggaagcatgtttagggactgccttttggtgtgaagtatgcagctatctggagttataatgtcatagaataatatcttattggcatggccgtgtgcttgcactgagcatgacactgatgctgggaacaggaacacctttctgctacagcactgggattgctcttctgcctggttactcactgggatgagaactagaggttgggagctgggcgctgtgtgctcgtggccctgagcaggagcagcragctgcctgggaggagaggagaggctgtggctcatgtggggatgtgtgatgtgctgtgggtgatggatgaagaaaatcacgttggctgtaacgctccagatccagataggctgtgaacagagcaagggtacatttgtcaagggtggagaagaggatgctgtagtagctgagaaacatctctcctcttaagcctgggagtttaggcagcagtcccctgacagtttgctttggccatgtgggatgccccttactttcaaactgctcagcttttttcccgttaaaaatgtgatttttaattgt

SEQ ID NO: 11842 - DNA, 600 bp, Chicken  19866894215002_1
cactgggtgcactctgcatacccgggctgcacaccatcctgggcagtttgctctgcaccagctggaaagggtctatggccacttccaggcagaccagagcttgtagataaatacaccagagagagctctgtatctgggaagaggcatgtgttaagtctgcagggactacttgtggatttgaagaaatgtttcagagatggttcttcacagtgtgctgtcttacacaaggtcctcatggtgaagtgtcaggtatgcctgagttttaaacttaaagaagaaattttaataagccgaaatatraattgcttatacagtgggtctttctgtggcctgctgtctccattagaagatcaatcaggagctgtgcaaaatagtataattgcattaaaaatgtgtcagagaagttttttcacctttctcttcccctagttcaattgaatacttgctataaataatgtctgaaaatatcaacactggctcctgtgtggcaaactatttgacaaagtcagttttttatttgaagaagtcaatttgaagaggtcaaatgagagaaagaaaaaaagacaagttgtggtaaaaagagatgtgttgtataaagcg

SEQ ID NO: 11843 - DNA, 599 bp, Chicken  19866894215005_1
  misc_feature (1)..(34): n is any nucleotide
nnnnnnnnnnnnnnnnnnnnnnnnnnnnnnnnnngcgggtgctggaatctgcagttctgatagggtaattggcttgtaaagattgaacctgtttcagtcccagtcctgtctctgataaagtagctttctcttgtcctctcctctgctgtaagtgctgatagcctcactatcaagggctagtgataacattcagtgtttactaagtactttacatatatccagtgttgggaaacacagtatctcataatgttttccaatatttatgtaagaagaactgtcattagaattgtcttcgttttrtatatagraataagggagaatataagtaacctaatcacagcaaattagtggcagagttaggatggtgttattgacttctgcatgtcctccgaagaactgtgagaattagtccttattcactcagctaaatagtcttgagctgtcttgtacaacactgttatgggctgtgctgaaagaaataatgggaattcaaacttttgacattgatcttcctccttcagaattctttgacaccaactgtgaagtgctacaaaatttttaaggctgttgagtttccgtgtcttacttaactcatgtaa

SEQ ID NO: 11844 - DNA, 599 bp, Chicken  19866894215005_2
  misc_feature (1)..(26): n is any nucleotide
nnnnnnnnnnnnnnnnnnnnnnnnnngcgggtgctggaatctgcagttctgatagggtaattggcttgtaaagattgaacctgtttcagtcccagtcctgtctctgataaagtagctttctcttgtcctctcctctgctgtaagtgctgatagcctcactatcaagggctagtgataacattcagtgtttactaagtactttacatatatccagtgttgggaaacacagtatctcataatgttttccaatatttatgtaagaagaactgtcattagaattgtcttcgttttrtatatagraataagggagaatataagtaacctaatcacagcaaattagtggcagagttaggatggtgttattgacttctgcatgtcctccgaagaactgtgagaattagtccttattcactcagctaaatagtcttgagctgtcttgtacaacactgttatgggctgtgctgaaagaaataatgggaattcaaacttttgacattgatcttcctccttcagaattctttgacaccaactgtgaagtgctacaaaatttttaaggctgttgagtttccgtgtcttacttaactcatgtaaaatccata

SEQ ID NO: 11845 - DNA, 600 bp, Chicken  19866894215005_3
tgttgagtttccgtgtcttacttaactcatgtaaaatccatatcagaaggagttatgaggccttgcacatcagtgttggtaaggcagagaattgcttgacgtgcagtgggagagctgctcagtggtgtggccagttccccagtacctgtgcaatgtgtgtgccacgctgagcagtactaagagcatgggcaggagagggtgatccccccagatcctggcaaacctgcttcattacaccaagcttcatggatgggagggtttaacaccaactatcctggcattcattcttggctctgctcrtcagcctaggactctttgtaatcttttgtgtttcagtttaattccttgtaagtgcagtggtggtggaggtgtgaccagggtgtgctgaggaaagacatacctcaacatatgaatggcaccatatgcaagatcatggcttctatatcataaacttccttgggagctagctttttaacgggtgccaaactcaacgcaaatgctggatcggatttttttgtattgtccaagtattcrtgttgatgttttctgtgaatcatgaacgtttaaagtttgattgctgctccaaggtcatttgtgttt

SEQ ID NO: 11846 - DNA, 461 bp, Chicken  19866894215005_4
caccaagcttcatggatgggagggtttaacaccaactatcctggcattcattcttggctctgctcrtcagcctaggactctttgtaatcttttgtgtttcagtttaattccttgtaagtgcagtggtggtggaggtgtgaccagggtgtgctgaggaaagacatacctcaacatatgaatggcaccatatgcaagatcatggcttctatatcataaacttccttgggagctagctttttaacgggtgccaaactcaacgcaaatgctggatcggatttttttgtattgtccaagtattcrtgttgatgttttctgtgaatcatgaacgtttaaagtttgattgctgctccaaggtcatttgtgtttgcatcaaggcctgtgcaatgactcactttttgcttcatttccaatgaagatggaccattttcagagttgatttcctctgcagaattttctaggag

SEQ ID NO: 11847 - DNA, 599 bp, Chicken  19866894215006_1
  misc_feature (1)..(13): n is any nucleotide
nnnnnnnnnnnnncacgcggtgggagggagagagttaagatgtcctgcgaaccccgctcgtaaagctgctcacttccattagaaacacatgaatatcctgaaatacagagtgtcttttaaaacgggctcaggaatgtttatctccatccgtgatgctttagaaatcgtggaagaaaccagcggtgacagctctcctcccagttgcccttctggcaggtaaacttcactcgctcatgaaaatcagattcgattaaggatctcccctgccatcacttgactcccgtgtctcccagggctccrgagcacggagattcgtgttagtaactaagatcacgctctatctcctcagctatcagctcagctctcagcaggtttgcggagatttagctctgggttaaacgcatattttcagccgtcagccccgatttatttttttccccaccgctcattaattagctcgaaacaatggaacggaaagtaagagtgaatttcctctgactacagtttttcttccgtctccgtccgactttgattggcccccaagaagttcggctcccctcggcggggcactcccagtgctgtcacacaaagggacggag

SEQ ID NO: 11848 - DNA, 600 bp, Chicken  19866894215009_1
agctgaggatgaaggctctgttctgaagccaaatgtggtctataggatctctgcaaggcagtgagatcattgacctcagcatcccagtcctgcatctctgcacccggggccccagcagtgtcccagtgcttcgcacccacctcaccacatgggtgactgagcccctgccctgcacccacacccatcagcagggagcagtctggtgcagttcctgtgcctctgagaagtacatcatggcatgactcccagctcagtggtttgtgagtagctgttgcctctggagcaccatccctgcagatrgctcctgacctggtcaggggtgagcagccactgaaggggaactgaagtgaagcagcctggaggagaggcaacatcatgcaccagggagggggcacactttggagcagcactttgctgtctgttgtggtttagagggaatgtctattcctaggacacagtttctcagccttttttatcccaagactgcctctctggtaggagggatgcatggaagaaattctttaccatgagggtggtgagacactggaacaagagaagctgtgggtgctctattggttgggaattttggcagcacaatct

SEQ ID NO: 11849 - DNA, 600 bp, Chicken  19866894215011_1
gcctcagagcactgtcatccaagcagctgttgaactctttgcaccaacagctccccataacgatagagcacagggtgggaaggggatcgagtcacgtaagaaactgcaggaggggatttgaaatagagaatagtggagctggaatccggccaggtcactggggttaacccccttgctgctgcaaaatgccatgggatttttaatggctgcaagtgttgaggagcttgtctttcacatctcgtctgatggcaggagagcggggaattagtttactctttttaacactgggcttctgtactscaagtgtcacaaaggatatttctttgcaggcagatgtcggctgccagtgggaagctgagaaatgccagttttaattaaaagctttattttcaaatacaattcagagattataagcagtaagaaggacttgtccgctgggaggcttcagtgtgcggccctgagcaaaacagcagtaattgaaagacaaggcctaattccccttctcccagctgggtctaaccacgaggcagggacatcaatccagcccttcaaggagggctgggagcacctcaggtttgtcattgcctctgctgttggagg

SEQ ID NO: 11850 - DNA, 599 bp, Chicken  19866894215014_1
  misc_feature (1)..(7): n is any nucleotide
nnnnnnncgggatttgctcacccaagttgttgcaccgattgggccggttttatagggactaagttcagcgtgtggtcccgtcgaccctttagcttctgtatggctttgtcgctttgtgtccctaattcagttactgtaggttgtcctggtgttgccatagaaacttgatgacgttcaggggggaataagtctgcctccgagtcagactcctcgtctccactaaccggcagagggacttgctgcagatcagcagcggaaggaggctcggaggttggcagatcagcagtgggaggaggctcrgaggttggcaggggtggatacagcgccggccggctcgccatgcccccttgctctctgtcgcgatgtacttccacatcttaatgccagtcgcctcagccagctgagaaggagcttcctcctcgggaggtgctgatgcagcgtggtctgcggaggcccctgctcccccacccaacaatttcactatggatgaacactgccttgaccccgccaggctcctcaccgccattggtcctctaaagagattgaaaagatgagagcagctcttggggaaattagaggaccctgccttcgcaggagtg

SEQ ID NO: 11851 - DNA, 470 bp, Chicken  19866894215015_1
ctatttctccaatgttatttatacactttctgtttgcattttaagttgttgtattcaacagggaattaagtcaagaaaattctctgcctgctttaatactgatactgatttacttcagatctgaaaactgtttcttctgaagagcatagctcatggtggaaagattaaggtcaactgaatttcttatttagatagcatgaatttgttcactggaatgttgatatggcatcaggtccttactgtctgatgattgtaggattcctccatgaactgtctccgctcttcttcagaaatgaagtygagcagtgtgacttttgcagtataccctgagcacagcactcatcgtgctctagataacctcgtgtgagaagctgcgataagacttctgcaatgctgaagtcttccattagaggtagaagaaggatgataatcagctaccaaaagcaccagagccatgttatcaaagtata

SEQ ID NO: 11852 - DNA, 600 bp, Chicken  19866894215017_1
aatgtagggaggaggtgctttgtagaaagtggggatgtttcaaaaggaaatctccctcatcatctcaaaggcacaggttcacaagtgggtctatggttttctggcaagctcaggaagcactgccccagtgatgccactcagcagggacacaaaggaatgggatgggtgggcaacttagtctgctaagagcttgcctctctcgtcataaatccccagcaaccccctggagaggctgtctgcctgccaagcccagtgctgcaggaccacttgggaccacctgccctgaatcacaggaaaacrtaggctggggaccttagctgtcaacccaagcagacttctcagggctttaatgtgaaaatctcccaagatgggcacaagctcagagtttgcccactcccaccaagggtgatgtttctggctgctgtttgtcccttgagctattgactgccttcagttttggaccaggcctagaaggggctgagtcctggaggagaaggagagcacctacctcactccagctgtgtgggtgcgctagcattgctattgcaggagaagcagaaggctgcctcccaacagccacatcactgagcagagatctcc

SEQ ID NO: 11853 - DNA, 599 bp, Chicken  19866894215019_1
  misc_feature (1)..(59): n is any nucleotide
nnnnnnnnnnnnnnnnnnnnnnnnnnnnnnnnnnnnnnnnnnnnnnnnnnnnnnnnnnnaattaaaattttgtgttttttcatgttttcataaatatgcacaaatgcattaccaataatcttctattaaaattacatttacttcaactgtgatccaaacagcagcaaacttaagcatgaccaaactcctcctggcaacttgggaaccagattgagctgagcaattgtctcactcacacttgacccagccaggtgatgtcagctattctccagtgaactgaaactgggagtggtgactgtygcatcttctcttgctgcaaatgctgaatgaggtgtgtatcagctaaacatctgtgctggcaacagtttatatttaatgttgtcatagcaaaacaagtgaattattatctttggaacagataacatgcttcatttttgggtatcatatcacagttatatttatcctctccactttcacattatctccatagcaagttcagtatcttttcctcaccacacatagtaacagcattttacagggaatggtaaagctaaacagtttcctggagaagtttgttgtaggacagggtattgttcata

SEQ ID NO: 11854 - DNA, 600 bp, Chicken  19866894215022_1
ctttgaaacataaaggcctaggacctacttttgctgtcttacatttttgttaatgtccaaagaaactgaggagttgtatcaaatcccagtaatccgttagcatttgtgattcacagggttttcgtagtgtctaaatatttaatactgaattattaatgctaatttactaattattaaaccagaaaggaaatagatgcagatacagcataaataaaacttgtaggaaatgttgttggagttgggacttggttgggatgctctccttattgctgttgttgcagcaagcagagtattctcatygtatatatgtgcacaagggaggaaaagcctgaaattatttccttactcatcacagttgagaggtttctttggattctcagcctatgagccaagaggtaaaactatgaaagagccgctcagacaaatgtgagttggtaggaaatgcggttccttaaaaacaaaacacaactgttttatgaaagaatggacggctgaattgatctcaagactgtcctgatgacagccacgatgcctgggacaaagcagtgacatggaggagatggtaggaagctgccaggaaagtacggtgtcacatagtgc

SEQ ID NO: 11855 - DNA, 600 bp, Chicken  19866894215027_1
ggtctattccctgcatagccatgctgaggtccaacaggctttcttccctgctgcatccctgcgctgctgtggagttgcagtgctgagggaatgaggcttccctccctgtcctgctattatcccgtataaaaggagattttgcaaagatgctttatgagtatcgagtgactttgatcacttgtgacttgaaaacagagcacggctggtaactgactttgtaacagccatcagaccaccgctcagtatgctttaaatatttccctgctctgaatgagattgtctgaaaaagattctcgcgtytgtggcagcaggaacgtgccaagtacacgctgttaaacttgtgtcggtttaacagcacaactgtttaaaaggatttcagattattttccttctactggagtcagccactttttttttccttttttttttttttccttctttccaaacataatactggaaaaggagagagacactaaaactgatgggcagaagccagcaagttggcaagcacttgatggcagggatcgtcagaggtgataatgcatgtaatacttggaatgaaacaggctgtatactgatggtgttagaaatttacatcaa

SEQ ID NO: 11856 - DNA, 600 bp, Chicken  19866894215029_1
tccggtgcacccgaactgacagccatgtgcacctggtactgtatttgcattgccatttcctgctttccacaaacatcacctgcttttccaggctgcacaacatctgaaactaagtggtcaaatctatcaaagcagcgctgtttgttacacggcaggatgcaatttcgctttctgctatccacatgccctaaaaatcaacctacgggagagtcatactgctcaaacaaataaaaattccatcattctcaaagagcccatctcttcccactgggagaagagaacacggttctgggagtagcrctccrcacagcagagcagagcctgagcccatacggcatcacggtgctgtggccaagccaacaagtcctgacgcaccgcttccctggaggagctgacgttacgcccggatccggcaccacagcctgcattcccacaggcatctggccctgggttgtgctctctgacaaggtaacaggcacaccctccaaatcattttaattaaagctgcatgtaaggagaagctgaccctccttctcaatccagttcgcttcatagccttcatcaaattaagctttggattgcagatattaatgaaatcca

SEQ ID NO: 11857 - DNA, 600 bp, Chicken  19866894215029_2
tgcacccgaactgacagccatgtgcacctggtactgtatttgcattgccatttcctgctttccacaaacatcacctgcttttccaggctgcacaacatctgaaactaagtggtcaaatctatcaaagcagcgctgtttgttacacggcaggatgcaatttcgctttctgctatccacatgccctaaaaatcaacctacgggagagtcatactgctcaaacaaataaaaattccatcattctcaaagagcccatctcttcccactgggagaagagaacacggttctgggagtagcrctccrcacagcagagcagagcctgagcccatacggcatcacggtgctgtggccaagccaacaagtcctgacgcaccgcttccctggaggagctgacgttacgcccggatccggcaccacagcctgcattcccacaggcatctggccctgggttgtgctctctgacaaggtaacaggcacaccctccaaatcattttaattaaagctgcatgtaaggagaagctgaccctccttctcaatccagttcgcttcatagccttcatcaaattaagctttggattgcagatattaatgaaatccacctag

SEQ ID NO: 11858 - DNA, 599 bp, Chicken  19866894215033_1
  misc_feature (1)..(31): n is any nucleotide
nnnnnnnnnnnnnnnnnnnnnnnnnnnnnnnccgcgggtgtacgtggtgcgggcagcgagctgaggtaaccgccgagcacaagggaaaatccaaccttgctgaaaggagcgagggaacagcccttcgtcggggctgagcgtgtgctggatgaaaccaggccagccgtgtgagacttggtcatttttggatgaatggtttaatgccaaacgcagatgatttccgtaggttccctacgcgagggagacacgtctcgttctgccgaggctcgagggaaggcacagcccagttcccaggtctcrttcagcccagaggttgggcacttctaggagcacggcttgcctagtggttttcttgggcgtatgtaatgcagtctaacggaaaataagatgaaaaaaaagggctgtaagagcggaacgtgtcggttcctttactaataagcacttcaaaatagttttagaaacttcttttattcttttccttttcaattaggctttgagaaagccttgggcttcgccgtagttagtacgaaaaatagcaattgttacttttcttacgatagtttcgttatcgagtgtgaaggattatccgttttggtaca

SEQ ID NO: 11859 - DNA, 600 bp, Chicken  19866894215035_1
aaccccccttggtcggtgagcaacatgtgaatctttagaggatataaaccccattcctaacagagaagccctcaggactctgtgatacaaagtattgcaagaccagaaccaaatcctcaggttctcagggcttgtttgtttatctcctgtagagctttttcatttttcaggaataacctgaatggcctgtgtaaaaaagaatgaagctgaaggatttcccctaaaactatgaaggaggagacttctttcttggaagcttcattcttcttcactttccatttcattaataagaaatttctytttagtctgtaggtacttaaggtcagtaatcaatagattctaatttttcataagctttctaaaacctattctatgctaacacaactagattactaggtataaaactacaggtcattttcaacagtacttctgcctgaagcactaatggtgtactgcctacaggttgtgactattcctcctgcaatgtcattatgaagcacttacaaagaattcatcaccagcagggcattctcaaacaaactaatctgttaggcaacacacttcttcagctgggaagtataactgcacaccaggaaaata

SEQ ID NO: 11860 - DNA, 600 bp, Chicken  19866894215035_2
catatttaatctaaagagagaattctctctgctggttatggaggtagtggaaagagactggaattactgccagctgcattatatacttttgactcacctgaataacagcttcacctttgcttccaaaaattagctactcctatttcaactgctatgcaccactctactgtcagtcttccagctgctgatatcaatttcacaggtgtctgtgcatccattttcatgaacaacatgatcatttttttcataccacaagctatactgagtttttagtgccttccagcccctaacatgcatcamagctgaaaggaacaagttcaagacatcaataaattcccttgggtaataaaaatttcatgcttatagcttggtctgctcacagtgttgggtgcttttgtgaacatgttgcctatgtccttttttgttgacaagatgcccaataacacttcatgtgcacatcgctggttctgaagtcacagtgtgtgtgcatcaggcagaacacaatagatgatgtagcatggaaagcagtcaaacagaaaatatagccaagattttgccagactgtgaataagaacattacacagttgttactgcagtctg

SEQ ID NO: 11861 - DNA, 600 bp, Chicken  19866894215039_1
cctgtgcagctgtgccaattagcagcggggagtgatttatggcagcttctcaaagggtgaaaactgagcttttcttaaatctccataggaaagtcaggtatgcactaacctataggaaacccatggggcgagcagacggcacaaaaccaacgtgagtgatggtgaagttatgaggacagggtcagcctgcgtcctatgggcatggcactgctttcaggctcctcacctcttgggtttgctcctttctttaggattggctctgcccctttgcttgcctggagctctctgagccctgctccyatcttagcagaggtcgcagcctaaagagcctaaggaggkctgattgcagagagcggatggagagaccataaaataataataawaaaaaaaaaggcaataaaatcttgggtttgattgcacgaaacaggaagaaaatcagttctccaggccaatcaggatggcccaggcagaggtgggatcagtcccaagttcatacttggtgactgcagcatccgtcagggttacagacaatctgcgtctcattaatcatcccatataaacagagggggactctctggagcggagcggtgtcgctggatg

SEQ ID NO: 11862 - DNA, 600 bp, Chicken  19866894215039_2
tggcagcttctcaaagggtgaaaactgagcttttcttaaatctccataggaaagtcaggtatgcactaacctataggaaacccatggggcgagcagacggcacaaaaccaacgtgagtgatggtgaagttatgaggacagggtcagcctgcgtcctatgggcatggcactgctttcaggctcctcacctcttgggtttgctcctttctttaggattggctctgcccctttgcttgcctggagctctctgagccctgctccyatcttagcagaggtcgcagcctaaagagcctaaggaggkctgattgcagagagcggatggagagaccataaaataataataawaaaaaaaaaggcaataaaatcttgggtttgattgcacgaaacaggaagaaaatcagttctccaggccaatcaggatggcccaggcagaggtgggatcagtcccaagttcatacttggtgactgcagcatccgtcagggttacagacaatctgcgtctcattaatcatcccatataaacagagggggactctctggagcggagcggtgtcgctggatgaatggcctgctcttggaaaataaacatttccaactctgc

SEQ ID NO: 11863 - DNA, 600 bp, Chicken  19866894215039_3
cataggaaagtcaggtatgcactaacctataggaaacccatggggcgagcagacggcacaaaaccaacgtgagtgatggtgaagttatgaggacagggtcagcctgcgtcctatgggcatggcactgctttcaggctcctcacctcttgggtttgctcctttctttaggattggctctgcccctttgcttgcctggagctctctgagccctgctccyatcttagcagaggtcgcagcctaaagagcctaaggaggkctgattgcagagagcggatggagagaccataaaataataataawaaaaaaaaaggcaataaaatcttgggtttgattgcacgaaacaggaagaaaatcagttctccaggccaatcaggatggcccaggcagaggtgggatcagtcccaagttcatacttggtgactgcagcatccgtcagggttacagacaatctgcgtctcattaatcatcccatataaacagagggggactctctggagcggagcggtgtcgctggatgaatggcctgctcttggaaaataaacatttccaactctgccccggcgtttatttttgcagaatgcctttgctgtgctgcagtgc

SEQ ID NO: 11864 - DNA, 600 bp, Chicken  19866894215043_1
agcccctcctgatggggacaggctgggaataccggggctgtgcacctgggaaagggaaggctgagggggggatctgagcagtggtgatggatatctgacgggcaggggttggggatggtcagtgatgcctggggttggactggaggactccagaggccccttccagccccacagctctggagttctgtctagaataggtcttaacaaaatataaaggtggactacagtgattggacacagggctcaataaaacaaccaaaaccaacgtgcagtttgctgatttctgtattggtgtccatsttgccccttttctttgttttcaacgcttaatcgtcttgcttggctcctcccaaataagcagctcccctccccagttaatcttcccccattgctcccaggtttgctgcgttggagcacagatttggtgtttcaagtgctgttagctgagggcattgygtgcttcggggccatggctgagttccctcagtactgctggccctgctccgttcccatcaccataaggacacccgtccttccatcagacacacatggagccattcatctgtcccaccactcccctttacctcccggagaacaccg

SEQ ID NO: 11865 - DNA, 600 bp, Chicken  19866894215043_2
ccccttccagccccacagctctggagttctgtctagaataggtcttaacaaaatataaaggtggactacagtgattggacacagggctcaataaaacaaccaaaaccaacgtgcagtttgctgatttctgtattggtgtccatsttgccccttttctttgttttcaacgcttaatcgtcttgcttggctcctcccaaataagcagctcccctccccagttaatcttcccccattgctcccaggtttgctgcgttggagcacagatttggtgtttcaagtgctgttagctgagggcattgygtgcttcggggccatggctgagttccctcagtactgctggccctgctccgttcccatcaccataaggacacccgtccttccatcagacacacatggagccattcatctgtcccaccactcccctttacctcccggagaacaccgctaagggggacatctgagtacccacggaagataaactgccctctgaggcactctgtgcactctaagcagatttggggcaccgccttcaggtcagcgttcaaaaccacagcaaggtttgtttgagccccacttctgttgcgtgtgatgcctcgaggg

SEQ ID NO: 11866 - DNA, 600 bp, Chicken  19866894215044_1
cgattaagcgttgaaaacaaagaaaaggggcaacatgaacaccaatacagaaatcagcaaactgcacgttggtttggttgttttattgagccctgtgtccaatcactgtagtccacctttatattttgttaagacctattctagacagaactccagagctgtggggctggaaggggcctctggagtcctccagtccaaccccaggcatcactgaccatccccaagccctgcccgtcagatatccatcaccactgctcagatccccccctcagccttccctttcccaggtgcacagccccrgtattcccagcctgtccccatcaggaggggctccaggcccaacccagcagttggaaaccccaaatgccaacgaccacctactgctgggattgctgtgcatgtgatcgctaatgaacgccaattagctcatgagcaagagaccatttttgtcatgtggatggaatgtgagtgcagctcacccgactgcaggcagctccagcatctgcagaccttacagaaacaccaggccagccacatctccaccttctggagttaagaaggatagggaagtggtgacagcatgaggggaaatggcctcaa

SEQ ID NO: 11867 - DNA, 600 bp, Chicken  19866894215047_1
gcatggtggattgctgcaagccagtcttaaaaattaacaataggggaaattgcttatctagttagctttctcaatactggttttgttagaggagactttttctataagaataatgacattgagctttgtaatatttcactacattcttgtctcctctactgaagctgacgtaaaaaaaaaaaaaaaaaaaaaaaaaaaaaggttaaaaaacagaatcctccatgcataatattgttattattatttactattactatttaaagatctgccaggatctttcaaaacccttaaaatactttytgagtgctgtcgttactgtgtagtttcttcttttggcccacatattgtacaatgaagcatgaagatcaaggcccacaccctggtattatgttcaattccatgccttcatgactgaattaaataccagccctgatgtttcatggggtggggcatccttgctgagctttgaactgattctctagttattaacatcacttacaggcaaatgcactgcaggtaaaataaaataaaataaaatatttaaaaaacccctcaccgataagctgtacatctacctaaaataaacataactaagtctgg

SEQ ID NO: 11868 - DNA, 599 bp, Chicken  19866894215048_1
  misc_feature (1)..(59): n is any nucleotide
nnnnnnnnnnnnnnnnnnnnnnnnnnnnnnnnnnnnnnnnnnnnnnnnnnnnnnnnnnnatatttattctccagtaatagggatacatatggatgatcaccataaaattttatattctacagtacatacattgacaagcttcttttaacattcaaagcaattatttttacaaatttagaggctcataatttagctggaatgatttttcctctcctgattcaacacattttgattcttactgtctcatttctataactattcctttttgcgtgagaatttggctggcaggtcaatttattyatatacatgcttattttgtttaactgctaaaatgtattgcaggtaatgtgtctactaagcatttgatctaaccttcttccttccaacaacttgcaaaattttcctacgataatatgatgcatacaaaaaatatggacatgtttactttctgaactgttcattcttaatttgcacctttctggaaacatgaattaaatgcatttgtagacaygcatggcttctgagatactaggttaaaagtcaaaggacagtgagtaacactacatagaatgtcatgtgttaaggtgaaatcatactga

SEQ ID NO: 11869 - DNA, 579 bp, Chicken  19866894215048_2
tcctgattcaacacattttgattcttactgtctcatttctataactattcctttttgcgtgagaatttggctggcaggtcaatttattyatatacatgcttattttgtttaactgctaaaatgtattgcaggtaatgtgtctactaagcatttgatctaaccttcttccttccaacaacttgcaaaattttcctacgataatatgatgcatacaaaaaatatggacatgtttactttctgaactgttcattcttaatttgcacctttctggaaacatgaattaaatgcatttgtagacaygcatggcttctgagatactaggttaaaagtcaaaggacagtgagtaacactacatagaatgtcatgtgttaaggtgaaatcatactgaaactaatagaaaaatttgctgttcttcattagtaataaatttatgaacatgtaaaatattttccagatgaacaaattagaattgaaagcacatttcaccacaaagacatatgacaaacttatgcaactaaagggtcatcaccattgatgaaagcttagataagtaatatccacttccagcagctccatcta

SEQ ID NO: 11870 - DNA, 600 bp, Chicken  19866894215049_1
gattcttatgattaattccaaattcttaatgtgaatcaaataaatagccaatatacaaagatatttgttaaacatgaagttcatcacagtattcactgttagaaactgaaaaaacaatgcaacacctaagtccaagccttttccaattcactggattctgttcagattctactagtcttaacaactgcaaataaaaaaaatggaataaacagatcacttttattggcaaacaactacttggaaagcagataataaggcaatatacagttgcatattatccctctaccttgaataagaaayaagaaactttccttcggttttgactctgaaaggaaggagtgccatttggtgactcaagtagatttactgcagctttaaataatttaatactggtaacattaataaaagaatcacaaatgctatgcagtagcactgttattaatgttgttgttattacttgatagaatactgtaaatgggaggggaaggatgatgctttacttaaagcataactrgaacacgcttttaaatctttttgtgcctcagctgccctaataagaaagaactcaatgggctttctcctacactctataccaagtga

SEQ ID NO: 11871 - DNA, 600 bp, Chicken  19866894215049_2
cacttttattggcaaacaactacttggaaagcagataataaggcaatatacagttgcatattatccctctaccttgaataagaaayaagaaactttccttcggttttgactctgaaaggaaggagtgccatttggtgactcaagtagatttactgcagctttaaataatttaatactggtaacattaataaaagaatcacaaatgctatgcagtagcactgttattaatgttgttgttattacttgatagaatactgtaaatgggaggggaaggatgatgctttacttaaagcataactrgaacacgcttttaaatctttttgtgcctcagctgccctaataagaaagaactcaatgggctttctcctacactctataccaagtgataatctaggctataaattttatggatacaaaagagaatgtggggaaattctgtaggtgctagcaggagtataacttgaaaaatctgttccagagagtaggtcattatgttatacaacagcataagatgcacaggaaatagaagtaaaacacagattacagattttcaaaggataactctccagcagtatgtaaaaattaaatggccaaatttac

SEQ ID NO: 11872 - DNA, 599 bp, Chicken  19866894215054_1
  misc_feature (1)..(83): n is any nucleotide
nnnnnnnnnnnnnnnnnnnnnnnnnnnnnnnnnnnnnnnnnnnnnnnnnnnnnnnnnnnnnnnnnnnnnnnnnnnnnnnnnnntgttgcctggcttgcaatttctccttttctagcaataacttctgctcctctgcctgaagggaatggacatattcagtggcttttttcaaaatcacaacttttgcagctttctcatttttaacaagttctggaacgtggtcccttaacgtgaggaaactggaccgcaggatcattacgcctctgacgctccaagatattatggttacgtcgacgttcrctgtcctccgaatcagagtttcgaggacttgaactcttagactttggttggatcatgggttttactggacggggcacctcggcttttaactttttctgtggtggcacatcttcactctccatatacggagaaggagcggcataattrtgctgctggtgaattggcgcacaacgctttaaaatcagttcattctgctgtgtcctgaccgatggaaaagtggtatttttaggacgcactgtaatagtgagggtggtaacagccttgttggaggaggagcgtcttttctccactgtcacaac

SEQ ID NO: 11873 - DNA, 600 bp, Chicken  19866894215054_2
ggacatattcagtggcttttttcaaaatcacaacttttgcagctttctcatttttaacaagttctggaacgtggtcccttaacgtgaggaaactggaccgcaggatcattacgcctctgacgctccaagatattatggttacgtcgacgttcrctgtcctccgaatcagagtttcgaggacttgaactcttagactttggttggatcatgggttttactggacggggcacctcggcttttaactttttctgtggtggcacatcttcactctccatatacggagaaggagcggcataattrtgctgctggtgaattggcgcacaacgctttaaaatcagttcattctgctgtgtcctgaccgatggaaaagtggtatttttaggacgcactgtaatagtgagggtggtaacagccttgttggaggaggagcgtcttttctccactgtcacaacatctatttcttcttcatcatcctcttcctcctcgtcttcatcatctttcrgttaaagaaaatggaaaaagaaattgatattctctcaaaagcaataatatttattgacaagatatgcacgttagaaataccaatacaataactgatgg

SEQ ID NO: 11874 - DNA, 600 bp, Chicken  19866894215054_3
ggatcatgggttttactggacggggcacctcggcttttaactttttctgtggtggcacatcttcactctccatatacggagaaggagcggcataattrtgctgctggtgaattggcgcacaacgctttaaaatcagttcattctgctgtgtcctgaccgatggaaaagtggtatttttaggacgcactgtaatagtgagggtggtaacagccttgttggaggaggagcgtcttttctccactgtcacaacatctatttcttcttcatcatcctcttcctcctcgtcttcatcatctttcrgttaaagaaaatggaaaaagaaattgatattctctcaaaagcaataatatttattgacaagatatgcacgttagaaataccaatacaataactgatggtaaaaaaatagggtgtgctcactgtccataatcaaatatagttctagagacgtatataacatacacaaaactaaacaaaatagatctctgcaagtttgggggaactttatgaggtttgtttttcatagaataccccgagtttgaagggacccatagggattgtctccaactccttttctttaacaacttctcattttaaatg

SEQ ID NO: 11875 - DNA, 600 bp, Chicken  19866894215055_1
ataaatatttacttcattcctctttcagattcctgctttattttagaaattctagataacaatttaaatagctttctatagctactctgtttaaatgactattaagggcgtttgcagctgtgcacaccgcagcagttggtggtgttctgatctgcacctgatccatcagtctctgcatcctggctgtgtgacagccctgctctgagtgcaggaacaggtttgcacttggcatcacaacctggcagtaccggttctgtctcatagccctgttgctttcctgccctctttggggcccgctcygaatttcatggcacaaagctgaaccgaaggcatgctgctagttaaggagtttgtctgtatgagttgtgaggtgacatttaggctaggtgtggggatgcagtgttacctgggcactgtgagcacccagaacacggggtgcaggaaagcttgttcaggctgctcagcccatgccattacattgcatggggtgctaggattcctgttgcactgagtcacctcttaggtgctgagagctgtccaggtgttgatggccctccaaagcagatctcttctgctagctgggtgctggtttcccaactt

SEQ ID NO: 11876 - DNA, 600 bp, Chicken  19866894215055_2
gaacacggggtgcaggaaagcttgttcaggctgctcagcccatgccattacattgcatggggtgctaggattcctgttgcactgagtcacctcttaggtgctgagagctgtccaggtgttgatggccctccaaagcagatctcttctgctagctgggtgctggtttcccaactttaatttctggtgtaaacacttcagtagtgggagtttatgcagttatgttaggaagcatagcatatacgtgtaggagtttctctcggcctgccatctacagcttacttttcacatgctcttacgtgyagtataaattaaactattattttggctttggacagtcagccttcatgtctagtataaagcttagaattagcattagtaaatgaggcatcaaattctgtcctcccatgtgaccattgctaaaatgacagctgcaaatagactgaagaatcatgtggagctgaccgttctgttcagacatccacagctctgctggtatttactacactcgagtgatccaaaaagaaggaccaaaagacgacaatatttactttgtttgtcctctccacatcgaagtgatcgcagctgagtcagaaagtcgag

SEQ ID NO: 11877 - DNA, 600 bp, Chicken  19866894215064_1
agtttgtaagtacaaacacaacacaccagcagccaggtatctattaacagaccacagaatggtggtcttgttatacaataagctatctaatatgctttacaagtagacatatgaccactactctactagtacacatttaatagttaaccaattttagaaaaaacttgtcatttataaataagccaaagatatttctcacttttttttttcgcatattcatccaaatcttctgaataataactaagaaatctgtgatgagtaaatgataccactctgactgtgatgcctcacctctttgaraacacatgmactgaggcctcacaagagacagaccatgatattccattcatgtgactttcagccagaaccacagtttaaccaccacagtggaatactgtaataggtgggattatcactccaatttgcaccagcagttctttttagacatggaactgcactaatacaagtaaaagaatgattttctgaacmctcagtgttcagtaacagtattattacccatatattgtcacttcactcgtaaataagacataaagtaagtctcttctacctcaatcatgttttccattttattttctttta

SEQ ID NO: 11878 - DNA, 600 bp, Chicken  19866894215064_2
gtacaaacacaacacaccagcagccaggtatctattaacagaccacagaatggtggtcttgttatacaataagctatctaatatgctttacaagtagacatatgaccactactctactagtacacatttaatagttaaccaattttagaaaaaacttgtcatttataaataagccaaagatatttctcacttttttttttcgcatattcatccaaatcttctgaataataactaagaaatctgtgatgagtaaatgataccactctgactgtgatgcctcacctctttgaraacacatgmactgaggcctcacaagagacagaccatgatattccattcatgtgactttcagccagaaccacagtttaaccaccacagtggaatactgtaataggtgggattatcactccaatttgcaccagcagttctttttagacatggaactgcactaatacaagtaaaagaatgattttctgaacmctcagtgttcagtaacagtattattacccatatattgtcacttcactcgtaaataagacataaagtaagtctcttctacctcaatcatgttttccattttattttcttttaaagtgttct

SEQ ID NO: 11879 - DNA, 448 bp, Chicken  19866894215064_3
tatttctcacttttttttttcgcatattcatccaaatcttctgaataataactaagaaatctgtgatgagtaaatgataccactctgactgtgatgcctcacctctttgaraacacatgmactgaggcctcacaagagacagaccatgatattccattcatgtgactttcagccagaaccacagtttaaccaccacagtggaatactgtaataggtgggattatcactccaatttgcaccagcagttctttttagacatggaactgcactaatacaagtaaaagaatgattttctgaacmctcagtgttcagtaacagtattattacccatatattgtcacttcactcgtaaataagacataaagtaagtctcttctacctcaatcatgttttccattttattttcttttaaagtgttctacttggctttttaggtttccagcctgtg

SEQ ID NO: 11880 - DNA, 600 bp, Chicken  19866894215067_1
ctgtcagccaaccagccttcagatgttctgcttcttcactcaatttactgttagtgttgtgaagacccaacaatttccatatggagtgcatgctctagtaattggcatcaggacagactccaatgggtttaacagctgggtcaaaggatccatgccagaaaacagagaaataggccaagactgaaaaaaatctggaatccagaattaggccatagacatctcatgctaacccaaacatgtaacacccgcattaaaaacctgctgatactccagaagctcccgtaagacccttacgggatrgaaatggatgttaggcaaggtgtgttgtttcacagtacagtaagtttgaagggaggggatagaagtaaaagttagaaaatattgagtaaagaagtgtgtcggggtcagtgtttaatttaaggaggctgtctgcttttatatttgtaaaatgtttttcagaaacctgcctaggactttgtttttttgcagtgcagtacctcctttgcttcagtaggcagcttaggatgctgggaaggtggagttggtgyccctgaactaaagatayaccagcctgttaaggggggatgtcttttcttcytg

SEQ ID NO: 11881 - DNA, 600 bp, Chicken  19866894215067_2
cattaaaaacctgctgatactccagaagctcccgtaagacccttacgggatrgaaatggatgttaggcaaggtgtgttgtttcacagtacagtaagtttgaagggaggggatagaagtaaaagttagaaaatattgagtaaagaagtgtgtcggggtcagtgtttaatttaaggaggctgtctgcttttatatttgtaaaatgtttttcagaaacctgcctaggactttgtttttttgcagtgcagtacctcctttgcttcagtaggcagcttaggatgctgggaaggtggagttggtgyccctgaactaaagatayaccagcctgttaaggggggatgtcttttcttcytgtatgcaggtagctgccaagagaagttctgatatggaaaaaggtggtaggactgcagctctgcatttcttacagacattttaataactatttactgaggatgagggtacactgctgcatctgtagcagaatgtacagcacatgtaacttggtggtctgactactaaggtaatgtcactaggacgctcctgcaactgtagagaatactactgttccatttttcagcctgcttacctgtttaactgacaca

SEQ ID NO: 11882 - DNA, 585 bp, Chicken  19866894215067_3
tactccagaagctcccgtaagacccttacgggatrgaaatggatgttaggcaaggtgtgttgtttcacagtacagtaagtttgaagggaggggatagaagtaaaagttagaaaatattgagtaaagaagtgtgtcggggtcagtgtttaatttaaggaggctgtctgcttttatatttgtaaaatgtttttcagaaacctgcctaggactttgtttttttgcagtgcagtacctcctttgcttcagtaggcagcttaggatgctgggaaggtggagttggtgyccctgaactaaagatayaccagcctgttaaggggggatgtcttttcttcytgtatgcaggtagctgccaagagaagttctgatatggaaaaaggtggtaggactgcagctctgcatttcttacagacattttaataactatttactgaggatgagggtacactgctgcatctgtagcagaatgtacagcacatgtaacttggtggtctgactactaaggtaatgtcactaggacgctcctgcaactgtagagaatactactgttccatttttcagcctgcttacctgtttaactgacacata

SEQ ID NO: 11883 - DNA, 552 bp, Chicken  19866894215067_4
trgaaatggatgttaggcaaggtgtgttgtttcacagtacagtaagtttgaagggaggggatagaagtaaaagttagaaaatattgagtaaagaagtgtgtcggggtcagtgtttaatttaaggaggctgtctgcttttatatttgtaaaatgtttttcagaaacctgcctaggactttgtttttttgcagtgcagtacctcctttgcttcagtaggcagcttaggatgctgggaaggtggagttggtgyccctgaactaaagatayaccagcctgttaaggggggatgtcttttcttcytgtatgcaggtagctgccaagagaagttctgatatggaaaaaggtggtaggactgcagctctgcatttcttacagacattttaataactatttactgaggatgagggtacactgctgcatctgtagcagaatgtacagcacatgtaacttggtggtctgactactaaggtaatgtcactaggacgctcctgcaactgtagagaatactactgttccatttttcagcctgcttacctgtttaactgacacata

SEQ ID NO: 11884 - DNA, 600 bp, Chicken  19866894215083_1
tgggacttccttcttagttggagattgctgtctgtgtagctacatacagtgcctgctctcgcatgcaactttattcttctggttacaggttaagaaagatagtaaagggtgtggagggtaagacatatgaggagcggctgaggcccctggatttgctcagaggagctgaggggaggcctcatggcagctgcaccccctcacaggtgagaggaggggcagcgctgggagctagggaagggtttttcactagggggcagtgagaatagaacaggctgtccaaggcagtggacacagccccamgttctagagttcaaggagcacttagataatgctttcagacacagggtttggattttgggtgctcctgtgtcgakctaggagttggactcagtcatctttgtgggctccttccaacttgagatattctacaattctaaacccacccagaagccgagctcaggtattgttctactgttgttccatattcttatctttcagtaagcagaaaaattctgttacagtgaatattgtgtgacttttaccactcctgcataccacaygtaaagtttcacagaagtaacatcatctgcaaatcaggtc

SEQ ID NO: 11885 - DNA, 600 bp, Chicken  19866894215083_2
tcttctggttacaggttaagaaagatagtaaagggtgtggagggtaagacatatgaggagcggctgaggcccctggatttgctcagaggagctgaggggaggcctcatggcagctgcaccccctcacaggtgagaggaggggcagcgctgggagctagggaagggtttttcactagggggcagtgagaatagaacaggctgtccaaggcagtggacacagccccamgttctagagttcaaggagcacttagataatgctttcagacacagggtttggattttgggtgctcctgtgtcgakctaggagttggactcagtcatctttgtgggctccttccaacttgagatattctacaattctaaacccacccagaagccgagctcaggtattgttctactgttgttccatattcttatctttcagtaagcagaaaaattctgttacagtgaatattgtgtgacttttaccactcctgcataccacaygtaaagtttcacagaagtaacatcatctgcaaatcaggtcattcgtaaaaagaagagatttacattcttagtgtagttcacattgtgtctaaccccaactactaacaagttttt

SEQ ID NO: 11886 - DNA, 600 bp, Chicken  19866894215083_3
gaatagaacaggctgtccaaggcagtggacacagccccamgttctagagttcaaggagcacttagataatgctttcagacacagggtttggattttgggtgctcctgtgtcgakctaggagttggactcagtcatctttgtgggctccttccaacttgagatattctacaattctaaacccacccagaagccgagctcaggtattgttctactgttgttccatattcttatctttcagtaagcagaaaaattctgttacagtgaatattgtgtgacttttaccactcctgcataccacaygtaaagtttcacagaagtaacatcatctgcaaatcaggtcattcgtaaaaagaagagatttacattcttagtgtagttcacattgtgtctaaccccaactactaacaagtttttttggcagaggcttctcaggaaggtgtaacatgtgccagcagaaattgtactgccaaaagagctccagttcaaccttccacgtccatagatagaaggctaaggggaattattttttctatttgtgtcctctgcagtacagaaatgcaatttagctactatccttgctgcccatcttgctcctgtgtg

SEQ ID NO: 11887 - DNA, 600 bp, Chicken  19866894215087_1
gccccttcaattctgcatggacagcacagggctggaagaagagctgtggctgagcagcaaggcatgtcatggggctggcaaacaacgtcttctggagaaggtgctgcttctctcctgctgtcaaaatgcacacacagctccctttgtgctttggcatccagtaatgccaggaggagcccctccagtctgagggtgcagagatataacccatgacctctctgacttattttggttaatttgctgcctgcccgggacaacatgcagcagttagtaaaagttatgggcacatacctggctcaktgactgccaaaattttttagttttattgcagtgatgcatccgtcataacagcaatttgcctgcagctactatacctcgtgccacaacctcaccaggtgggaaaacacaggggtggggcagaaagatcgcaggaggcacccagcatcagtccccactctgtgccacagcactgggctaaggggtgggtggcatgaggctgctcggtgtctccccccagcccctgggaggagaggccagcactgttaccagcctgggagccacagggagtccaaatccagttttgccggcactactgaagta

SEQ ID NO: 11888 - DNA, 600 bp, Chicken  19866894215092_1
ccttggaaactacaacagatgaaaagaggacaacagtgctgtttaacagagcaaattcccagctacaaaacattattttttcaacacagccaccaccattagctatgcattttcaccagcaatcaataaaagcttgaatgtcataaccatagaaatctgcaccagtagaagtggcccactgtagcagtcaccactgctgaagctcatcacccaccctttacagtgatcacacccactgtttgatcttcataaacattcagcaagagtcagtgaaagtccagaggtgatatttttttcagsagagaggaaatcaattccacacctttgctttatccacacttccatgttggatgccattctgtcagactgctcccctactgatgtctgtcacacagcaacaaaatgtaatgggatattggaggaaaagtttgatccctgctgccataccaccaacatccacctctgacagtgtgggccaacataataaaataggaggcattactttcagagcascactcttaaatcttaaaagcagaatatattctattccaaatgtatgcacttatttaaaaagttaacgttttatactttctgtaccaa

SEQ ID NO: 11889 - DNA, 547 bp, Chicken  19866894215092_2
ccctttacagtgatcacacccactgtttgatcttcataaacattcagcaagagtcagtgaaagtccagaggtgatatttttttcagsagagaggaaatcaattccacacctttgctttatccacacttccatgttggatgccattctgtcagactgctcccctactgatgtctgtcacacagcaacaaaatgtaatgggatattggaggaaaagtttgatccctgctgccataccaccaacatccacctctgacagtgtgggccaacataataaaataggaggcattactttcagagcascactcttaaatcttaaaagcagaatatattctattccaaatgtatgcacttatttaaaaagttaacgttttatactttctgtaccaagtatatctgacctaattagtgctttcctgccaaacatggctgtaagcaggctccaaatacactggtgactcaaaagacatgtctcaccaggccttttctggtcctctttctgtcctaggatttttaatgtaccttggaaaatactacttaacttgatgag

SEQ ID NO: 11890 - DNA, 599 bp, Chicken  19866894215098_1
  misc_feature (1)..(29): n is any nucleotide
nnnnnnnnnnnnnnnnnnnnnnnnnnnnncataggataacgggaattcccttgaatgctctccaaagctacataaaaataggacttggaggtgtatgactactgatgccaaagcaattctgctttggagagacaggagggaactgtacatgttattaattgcatattaattttacaaaagactgaacagtttgaaaaactgtttatttcagaaagaagtagaatactcagcttaatgcaaggcttttaagtgctgttactgaatagaaattattcaagccctcgactttctgacattcartttgcacatttaaaagactgtgagtgtttttaacatcagttgcataaataaaagataaatttacaaagattatacggaattattctgaagaaaaacaaaaaaggaaaaaaatatcaggtaacagtggagtagggaaagatccttagaaaatttcagaacttttatgttaaaaaaaataattgtttaataacaaataattagggaataatggtataatcttagtttgtctttcaggcaggcattagtcatacaacacagaggggaaaaaaaaaaaaagctgcaagaaatcacagatttgc

SEQ ID NO: 11891 - DNA, 486 bp, Chicken  19866894215100_1
gtacctctgctgccatctgtcacacagttaacaaaatgtaatggaatatgtgagagggctcaacctctactgccatactaccaacatccacccctactgtcatgggctaatgtaatgaaataggaggtattacttttggggcagccctcatatgtgtttgcatatgtatctacatatgttattagagtcattcatagatgagcagctgaaagcaaaggaaataataatctttattttcatttggaaaagcatgagctgccagaagtgagcttttctgaaacgcattcccttgtagtcacwgtcctacactgttggatctagagtaatgtcgtgacttctgatcaaaaaaagaagagccatcatgtaacatagcgtcastgctgggaactgcactctggtatgttgtgatttatgggaatggttccccatttcctgtggattgagcctctaatatgagacacaggtgctacaggaggcttttttaag

SEQ ID NO: 11892 - DNA, 408 bp, Chicken  19866894215100_2
taccaacatccacccctactgtcatgggctaatgtaatgaaataggaggtattacttttggggcagccctcatatgtgtttgcatatgtatctacatatgttattagagtcattcatagatgagcagctgaaagcaaaggaaataataatctttattttcatttggaaaagcatgagctgccagaagtgagcttttctgaaacgcattcccttgtagtcacwgtcctacactgttggatctagagtaatgtcgtgacttctgatcaaaaaaagaagagccatcatgtaacatagcgtcastgctgggaactgcactctggtatgttgtgatttatgggaatggttccccatttcctgtggattgagcctctaatatgagacacaggtgctacaggaggcttttttaag

SEQ ID NO: 11893 - DNA, 599 bp, Chicken  19866894215101_1
  misc_feature (1)..(159): n is any nucleotide
nnnnnnnnnnnnnnnnnnnnnnnnnnnnnnnnnnnnnnnnnnnnnnnnnnnnnnnnnnnnnnnnnnnnnnnnnnnnnnnnnnnnnnnnnnnnnnnnnnnnnnnnnnnnnnnnnnnnnnnnnnnnnnnnnnnnnnnnnnnnnnnnnnnnnnnnnnnnnnncacacttcggtagtaactgcagcagtgatatgtgcttcttctcttctctagagttctgattcaggcagcctgaactgaactgtttgctaatgaaatttctgtcggtgcttaatttaatggtagtactttgtttttcactcrtttttctgaaaaggtatgtgagagacagatgttcatactccacgtggcagcaggacagaacagtactacgtagagtttgttctggacatctgttgggctgcatatacaaagctaattgccatatttttccttctttctgaaggaacttsatttagtaggtttctcacacttaattgctatgttttcttttcccatccccttcccttgtactcttcatttcagatctaaacgagtgtggactgaagccccggccatgcaaacaccggtgcatgaatacctacggcagctacaagtgctac

SEQ ID NO: 11894 - DNA, 599 bp, Chicken  19866894215101_2
  misc_feature (1)..(10): n is any nucleotide
nnnnnnnnnncacacttcggtagtaactgcagcagtgatatgtgcttcttctcttctctagagttctgattcaggcagcctgaactgaactgtttgctaatgaaatttctgtcggtgcttaatttaatggtagtactttgtttttcactcrtttttctgaaaaggtatgtgagagacagatgttcatactccacgtggcagcaggacagaacagtactacgtagagtttgttctggacatctgttgggctgcatatacaaagctaattgccatatttttccttctttctgaaggaacttsatttagtaggtttctcacacttaattgctatgttttcttttcccatccccttcccttgtactcttcatttcagatctaaacgagtgtggactgaagccccggccatgcaaacaccggtgcatgaatacctacggcagctacaagtgctactgtctgaatggctacatgcttctgccagatggaacgtgctccagtacggcaaggcttggtgctttcttttttcatctcctcaaagctcctgcttgggtttcccatgaaattaagttgtgtcccatgctagaagattaatcttgcagttg

SEQ ID NO: 11895 - DNA, 600 bp, Chicken  19866894215102_1
ttcccatataatgtctcattagatttacatctcctatctgcttctctattatcttctataataaatatatttcaagcctctgtcctaatctttcacatttttcacagttcttttccttctcagtcacagaatcatagaatcattaaggttggaaaagacctctaagaacatccagtccaaccattagcccatcattatcatgaccaactgtctctcaaggaccaactcgctgcctatgcagaatactgggggcaggagcccattctgtagaggggtatgttgtggagagtcatgtctgtwagcacacacatcttgatctcgagctaaacctccaggaagcatractgtaaggcttggtttgaatcagctcgaagctgagtttgtgctgtgcactctgcttttcacagaggattgagagctcttcctaggtcagcatactccctctctgatttaatttggtcctaattaattttcacagtaataggatgagaggcagaatggcaacagaggaaaatccattagataaaaggaaaatgttcccattgagaaagcattcagtcatcagaacttagtctcaaataggctgtggggtctctgcac

SEQ ID NO: 11896 - DNA, 600 bp, Chicken  19866894215102_2
ctctattatcttctataataaatatatttcaagcctctgtcctaatctttcacatttttcacagttcttttccttctcagtcacagaatcatagaatcattaaggttggaaaagacctctaagaacatccagtccaaccattagcccatcattatcatgaccaactgtctctcaaggaccaactcgctgcctatgcagaatactgggggcaggagcccattctgtagaggggtatgttgtggagagtcatgtctgtwagcacacacatcttgatctcgagctaaacctccaggaagcatractgtaaggcttggtttgaatcagctcgaagctgagtttgtgctgtgcactctgcttttcacagaggattgagagctcttcctaggtcagcatactccctctctgatttaatttggtcctaattaattttcacagtaataggatgagaggcagaatggcaacagaggaaaatccattagataaaaggaaaatgttcccattgagaaagcattcagtcatcagaacttagtctcaaataggctgtggggtctctgcacctggaaatattcattatttggcaggacagcacataacatctaa

SEQ ID NO: 11897 - DNA, 555 bp, Chicken  19866894215110_1
gcctaaaatacaaggaatagatacagataatcataaataggaaaaacaacaacaacaaatggtttagagagagctaattcatagggatttttctaactgttttaagctgcttggagtacaatgccagcaaccttgcagtgaacaggatgagtacatttgttgttagggatttggttttgatatatcagccaggcaacccacgcctgctgccatttcaaaacaaatgaaagcaggcagccaaatctatcactcacacttgctctaactctgaaacaaatgacatgtttcattagcctattytgctacaagaaaactgaaaccaaagtgttggatttttaaaaatctaattataaatcagtggagcatgaataaaaaattaaaacatggtatatatcacaaaatgctcaaagtattatgtagtttgatcacgcaacagaaatagactttgcctgtcagtgctgtacagtggaacatctgctattcagcaacacccaccactcctgtctgcccactgccacacactgcagtaatgacattccactcatcacattttta

SEQ ID NO: 11898 - DNA, 600 bp, Chicken  19866894215115_1
gaggtcttctttagggattggaaaatgtggcacccacaaaattaacgttatgacagggttttcccaagcagttctaattcccatggtttgcatcctattaatagggatgtctcttctggtctgttgctgaagttgtgtcaataggatgttctctcttcctttccttaacaatattacttctactcatactaacaaattcttaataacttgagaacaattttgctacttcagcaacgcagactttgaacaaagagaaggcaacagcaacagcacgagagcaaatgcagttagaaatgatcrcgtttagtcattctgctgagagggctctattttcagagctcctgttctgctgatcatcagtacccacgaggtgtgaagctcctctttgctaattttgtctttgcagtttggggctgcatgtggagagtgtgcctttgtttaagtgagatttctgtgtgagcagcctgacacaaatttcaggtatttcttagctgtgactttgtttaccaagtaatttttagcaaaaaaaacaaacaaacaaaaaaacaaaacaaaaccaggggcaagatcttaattaaaaattccaactgaaagttgcta

SEQ ID NO: 11899 - DNA, 600 bp, Chicken  19866894215123_1
tttatggcctgacttctgattccgcaagaatactgttataactgtaactgcactaataatcttagtgaagttctgaaggagctggcaagtctcattgcaatcatttggtgtattcacttgcttaagatttctaatactttccatccctactgatgctgcaaagcattgatgcaactccagatttctctcccagtatgcacatttttacagaaattgctaattgacatgcaggcacaaagtcttgtagtttagattttgtctaaatagtcagttaggtttgaaaggtcaggttttcagctragtatatgtatacacataacttaaacagatcaaatatgaatatgtcaagaaaaaattatatggatgacttaacgcaaagtctcctcaaaagagaaataaatcttyttgcaagcaagagaatagagcaacctcagattcctctgagacacttttcatagcatttyttttaagtcttttttcaccttaaatcaagttcttatgccacctctgttatgactacttttttactcagttcatcacattgattgcttaagactgttataaaagggccaaattttgcatagactaaaacatattacc

SEQ ID NO: 11900 - DNA, 600 bp, Chicken  19866894215123_2
tggtgtattcacttgcttaagatttctaatactttccatccctactgatgctgcaaagcattgatgcaactccagatttctctcccagtatgcacatttttacagaaattgctaattgacatgcaggcacaaagtcttgtagtttagattttgtctaaatagtcagttaggtttgaaaggtcaggttttcagctragtatatgtatacacataacttaaacagatcaaatatgaatatgtcaagaaaaaattatatggatgacttaacgcaaagtctcctcaaaagagaaataaatcttyttgcaagcaagagaatagagcaacctcagattcctctgagacacttttcatagcatttyttttaagtcttttttcaccttaaatcaagttcttatgccacctctgttatgactacttttttactcagttcatcacattgattgcttaagactgttataaaagggccaaattttgcatagactaaaacatattacctgaatctatggtattatctgtgtttctctgacttcggcttgccagactcatgggtgacgtttgctgccccttttttcaccggagctggtttcttcatagttggtt

SEQ ID NO: 11901 - DNA, 600 bp, Chicken  19866894215123_3
attgatgcaactccagatttctctcccagtatgcacatttttacagaaattgctaattgacatgcaggcacaaagtcttgtagtttagattttgtctaaatagtcagttaggtttgaaaggtcaggttttcagctragtatatgtatacacataacttaaacagatcaaatatgaatatgtcaagaaaaaattatatggatgacttaacgcaaagtctcctcaaaagagaaataaatcttyttgcaagcaagagaatagagcaacctcagattcctctgagacacttttcatagcatttyttttaagtcttttttcaccttaaatcaagttcttatgccacctctgttatgactacttttttactcagttcatcacattgattgcttaagactgttataaaagggccaaattttgcatagactaaaacatattacctgaatctatggtattatctgtgtttctctgacttcggcttgccagactcatgggtgacgtttgctgccccttttttcaccggagctggtttcttcatagttggtttcacttgcttctgaagtttgggggacgttgtttattgcacttgccactgacgtgtcaac

SEQ ID NO: 11902 - DNA, 600 bp, Chicken  19866894215127_1
gatgctgagtactccctgacaagtctgggtatagctgccctcccttgccaggaagcaatcaggatagggagaggctgaagagaccgctgtcctactgtgctgctagcatcctggccttcagaggggaactctggtataagtgaactgggcagaaaagaatgggaatataaaggtgtttcaaggccatttcagtctaatggattcaggggctctatttgcccatctacaggtctttctatcaagaggagcagaacagcctctatgacagcctgagggcacccacatttgtgaagttagtayggaatatagcctcctcagggtttctgggttccaggtgcctgtcctctgctgctcttcccctttgctcttgcttttgacttagaaaataacattccagccacatctgttcaatatgggagacatgggttttccttctctgtcctgttcttggctggaatagctctagatacagctgggctctccatcaggactgaccttccctgaaggagagggtctgctagagtaggaggaagacatgaaaagtgcatatatggaaatgctgtgagaatgagtctgcctcctatccctcagggccctatc

SEQ ID NO: 11903 - DNA, 599 bp, Chicken  19866894215132_1
  misc_feature (1)..(14): n is any nucleotide
nnnnnnnnnnnnnncattatttttatttcaaagttgcagcagactccaattgccttaagaatttccttctaattcctagactacattacacatagtttatagcatttggttttgtgtaaaaattattctaccctttatgaagggtcttcattattgtctttcatggatagtggtggccaaaatcaccaacaaaaaaacagcaatgccacctcagttgaagcccaaagtttgaaaagcaaatgatggcagcaaaaaaggcaacgatcatttttgaatccattaataaatccatcagtaaayagggagagaaacacattttagagtttctttcacaagcatgaacaaacactgtggtaactgaaaaggcccatacaaaagcacagatacaaataacgcatagacctcaccaagtcatcccagcttatttatgccctcctacagaactaagtaagtattgaagaagctgctccccaggtccactggggaaaagaaaataaactatatttctattcttgttgaagtccagggtaaacatgccttggaggtcaggttagtcattattccctcaaattatgaaatacaagtgagaaacaaatccg

SEQ ID NO: 11904 - DNA, 600 bp, Chicken  19866894215132_2
atcagaaattactgtatgagaaccttttaaggagtatttgaagcaactgttccactgctccctacaaaaatcttgcttcattcccactaagtgtgggctcacagtgaacagaggagtgagggataggaggcattatgtcctggcaaaccacaggatgggagttgcaccacagaggtactaagtctggacaacatcctctttgtgtgacacctgccagttcccttggagacacagcccagacactgccctgcagaaagccacaatacaaaccacgccttcaagtcatcactcaactccttytgaaggagccctgcattaagctacacagtattgcacagatcagcatctgacttcctatcgaattccatgatacagcagaacctgccactgctgcttgcgataaattttaggttggtatatctaaatcagacagctgatctggacatctgaaaaaaaaacatggaaagatataggagaaataatgaaccatgtcagcatcatatagtgatgcacagtgaatttcagatttcctttagggacctgcatgttacattgcaccctaccttcctctacccattgctgccattacttctgcaagca

SEQ ID NO: 11905 - DNA, 599 bp, Chicken  19866894215140_1
  misc_feature (1)..(180): n is any nucleotide
nnnnnnnnnnnnnnnnnnnnnnnnnnnnnnnnnnnnnnnnnnnnnnnnnnnnnnnnnnnnnnnnnnnnnnnnnnnnnnnnnnnnnnnnnnnnnnnnnnnnnnnnnnnnnnnnnnnnnnnnnnnnnnnnnnnnnnnnnnnnnnnnnnnnnnnnnnnnnnnnnnnnnnnnnnnnnnnnnnnncccgacaggaggatatcggtctctctctgggctccatgcatcatcttttccattttgtgctgttccctgctggtaccaatgggtcccagcatgcagcaatgggagcgcagggtgccctcrgggtgctgactccagtcgccttcagatggcttttcatgagcattaatgggagcaggatgtgtgtggcagactgataacatgcttcagacaggcaggggctagcacctccacaacagcttgtgtttgtatcacacttctgcgaataagctgttttaaaaaggtctgaaattgcattatttcagctattctgatttgtatcaagaaataatgcagctgaggctgctgaaacttgatttcttcattgacctgggtttcttttactcattttatcagtgtgatggatttttagtccttttctc

SEQ ID NO: 11906 - DNA, 600 bp, Chicken  19866894215140_2
tcgccttcagatggcttttcatgagcattaatgggagcaggatgtgtgtggcagactgataacatgcttcagacaggcaggggctagcacctccacaacagcttgtgtttgtatcacacttctgcgaataagctgttttaaaaaggtctgaaattgcattatttcagctattctgatttgtatcaagaaataatgcagctgaggctgctgaaacttgatttcttcattgacctgggtttcttttactcattttatcagtgtgatggatttttagtccttttctcctgcagtttaaccctygcctgtagagaccacattacccaagggttttcttgaatgcattggatgcacccacccactagcacagtactccgagctgctccctctgaagcctccgtccctagctgccatcaagtaggaactatcaggtgctcgggcccatgtctggcctgtttccttacaaaagacggccttcgcggtgattgtggtggcgtttcccatctgtcattatcgtgatcctccaaacaagagctgtctcaggcgatctctgcctggcagcactgcgcttcctgctcgtggctgcatcccactcgggtgcct

SEQ ID NO: 11907 - DNA, 556 bp, Chicken  19866894215143_1
gctcaggttggaaaagaccttaaagatcacaaagtccaaccacaacctaaccatactaccctaactctaacaaccctccgctaaatcatgtccctgagcaccacatccaaatggtttttaaagacatccagggatggtgactcaaccatctccctggggagcctattccagtgcttaacaaccctttctgtaaagaagtgtttcctgatatccaaactaaacttaccctgatgcaacttgaggccgtttcccctcatcctgtcacctgtcaccaatgagaagagaccaaccccgctctckctgtaagcatctttcagatattggaagagagcaataaggtctcctcttccccattcccattcaccctgtctctgtcctccacacagccacaaggagcttgagtgaccccactatcaaaagtaagaaatgtccctatatgtatgctgcaagttatatggcaaactcctgtagtctcatgtcagtacaaatatcttcatacttttatgaatcttactttttctacctgtaccttttttctaaacaagtgttgacaaaa

SEQ ID NO: 11908 - DNA, 599 bp, Chicken  19866894215156_1
  misc_feature (1)..(205): n is any nucleotide
nnnnnnnnnnnnnnnnnnnnnnnnnnnnnnnnnnnnnnnnnnnnnnnnnnnnnnnnnnnnnnnnnnnnnnnnnnnnnnnnnnnnnnnnnnnnnnnnnnnnnnnnnnnnnnnnnnnnnnnnnnnnnnnnnnnnnnnnnnnnnnnnnnnnnnnnnnnnnnnnnnnnnnnnnnnnnnnnnnnnnnnnnnnnnnnnnnnnnnnnnnnnnttaattaaattcccctaggctaatgagagtaatgagaggtgctatgaaaggagatttaccaaaaaaaaattggcaagctgcatccaagagagaaytggcaaccagaacagctgcttttggcaacaaggaacaccaagcagcaggcttaggagcctacactgagctgtatggaacgcctcgacatcagattaagcagcactttgatggatttacactaatcctgccacagccaggaccgatgctgctcccctctcacacaaccactcgttgcccctgtagctggagaacattcaggaaatacagcagaagatgattagcatgcactcaagacaaagccgaaaagagacacaggagagctccaggatgttgcatatgatctttgctaccacagaaa

SEQ ID NO: 11909 - DNA, 600 bp, Chicken  19866894215157_1
caagagtgcatgatgatccagtccgtgggtgcgggcaggtgcatgtccgtggccaggaagacaatctctgccccctgaaggatgttgatgcggtgagtttgcctcaggtgggacaccaccacctccaggtgcccttcccatgggcaggagaagagcggacacgtgcagggaaccagctgggggtcgtgcactgcttcatggtgatggcagggaggaaggctgccttgctccgtggatgtctgtgcgaccacacaacgggttggtgcatactatgagaagagagaaatcatagaatcatcragactggaaaagacctccaaggtcatcttgtctgaccatcaacccatcaccaccatgcccactgacacatgtccctcagtgccacatctacatgctttttgagcaccgccagggacagtgactccaccacctccctgggtagcctgtgccactgcctcaaaactctttcggagaagttttacctgatgtccaacttgaacctctcctggtacaacttaaggccattaactatcatcctattggtagtcacctgggaaaagagactgacttcaacctcattacaacctcattttgagaagc

SEQ ID NO: 11910 - DNA, 600 bp, Chicken  19866894215165_1
ctctcctgccctcattatcttagctttcttctagccctccctcgtcctcttaatgctgctacttttcagggtttctctcctttgactcttcatggtcatttccctcctaagtaaacctctgcccttttgtcagagaggagcacggagactggccactgtgtcatgctcttcctcctctcatctctgcttctcccccagtagcggtgtgactccttgtgtgccgttatggacatcctggtacagggagctaccagaggctgcttgttatgctgctcttttatttcattttgtgtatgttgrgtgtttttctgaagtgacagtrtcacttagccaagatgaggcaacagatggctatttgccttctcttttaaatacctccttccttygtacattatttagtaccgtgaaggatccaagtgctacttggtcttaagaaaatgccctcatgaacatgaatatcagttgaagcaacacacactgaagtgacacactagctatttggtatttcttttgctattgaaagcagaatagctctagtcttgagctgattgtatagattaaattatgcagtgtgtttatgttgggaagtcctttccaatc

SEQ ID NO: 11911 - DNA, 600 bp, Chicken  19866894215165_2
gctttcttctagccctccctcgtcctcttaatgctgctacttttcagggtttctctcctttgactcttcatggtcatttccctcctaagtaaacctctgcccttttgtcagagaggagcacggagactggccactgtgtcatgctcttcctcctctcatctctgcttctcccccagtagcggtgtgactccttgtgtgccgttatggacatcctggtacagggagctaccagaggctgcttgttatgctgctcttttatttcattttgtgtatgttgrgtgtttttctgaagtgacagtrtcacttagccaagatgaggcaacagatggctatttgccttctcttttaaatacctccttccttygtacattatttagtaccgtgaaggatccaagtgctacttggtcttaagaaaatgccctcatgaacatgaatatcagttgaagcaacacacactgaagtgacacactagctatttggtatttcttttgctattgaaagcagaatagctctagtcttgagctgattgtatagattaaattatgcagtgtgtttatgttgggaagtcctttccaatccccctgaattatacagggatcc

SEQ ID NO: 11912 - DNA, 600 bp, Chicken  19866894215165_3
tcttcatggtcatttccctcctaagtaaacctctgcccttttgtcagagaggagcacggagactggccactgtgtcatgctcttcctcctctcatctctgcttctcccccagtagcggtgtgactccttgtgtgccgttatggacatcctggtacagggagctaccagaggctgcttgttatgctgctcttttatttcattttgtgtatgttgrgtgtttttctgaagtgacagtrtcacttagccaagatgaggcaacagatggctatttgccttctcttttaaatacctccttccttygtacattatttagtaccgtgaaggatccaagtgctacttggtcttaagaaaatgccctcatgaacatgaatatcagttgaagcaacacacactgaagtgacacactagctatttggtatttcttttgctattgaaagcagaatagctctagtcttgagctgattgtatagattaaattatgcagtgtgtttatgttgggaagtcctttccaatccccctgaattatacagggatcctctgtccaggttcctgccattgaaagtactgattgcatgaaagcaagcggaactgatgggtttt

SEQ ID NO: 11913 - DNA, 600 bp, Chicken  19866894215174_1
gtctttctgtttttcattgctttaggttgcatggtaaaggatatcaggtgtctcctgggaaaaatcactttctagagaatatgcagtactttttttaggtgagttagcttgtgatttgaatgtaaacttctccattgcttatattcagagtgaaaaaaattacagtttacatcaaaaagcttctgttcataagtaacttctgtttcagaaaaatttaggaaacaaagctacagaacatagaaatgaaatttaaataaaatacattttttaaaaaactgactaacttggcttttgctttgyaactaatgtgaatgttggcataattctrcttctcagagaactgctgaagtcatttatgtgcctgtaactttggacatatgccagcaccctgcgttaagccaaatcatatgagcttccagtcaatgaaggacttaagtttttaagttcttttctgtgcttggaacaaatcagggtttatttaagatgctgattytgctgttgttaccttacttttggacactgctacaaaatgtgaatgtcttattctttttgacaatacagtatgtgcagacattcaaaagcttttctaaggctcagatg

SEQ ID NO: 11914 - DNA, 600 bp, Chicken  19866894215174_2
gcatggtaaaggatatcaggtgtctcctgggaaaaatcactttctagagaatatgcagtactttttttaggtgagttagcttgtgatttgaatgtaaacttctccattgcttatattcagagtgaaaaaaattacagtttacatcaaaaagcttctgttcataagtaacttctgtttcagaaaaatttaggaaacaaagctacagaacatagaaatgaaatttaaataaaatacattttttaaaaaactgactaacttggcttttgctttgyaactaatgtgaatgttggcataattctrcttctcagagaactgctgaagtcatttatgtgcctgtaactttggacatatgccagcaccctgcgttaagccaaatcatatgagcttccagtcaatgaaggacttaagtttttaagttcttttctgtgcttggaacaaatcagggtttatttaagatgctgattytgctgttgttaccttacttttggacactgctacaaaatgtgaatgtcttattctttttgacaatacagtatgtgcagacattcaaaagcttttctaaggctcagatgcacagtgtgatgcagcttgaaagacttt

SEQ ID NO: 11915 - DNA, 495 bp, Chicken  19866894215174_3
taacttctgtttcagaaaaatttaggaaacaaagctacagaacatagaaatgaaatttaaataaaatacattttttaaaaaactgactaacttggcttttgctttgyaactaatgtgaatgttggcataattctrcttctcagagaactgctgaagtcatttatgtgcctgtaactttggacatatgccagcaccctgcgttaagccaaatcatatgagcttccagtcaatgaaggacttaagtttttaagttcttttctgtgcttggaacaaatcagggtttatttaagatgctgattytgctgttgttaccttacttttggacactgctacaaaatgtgaatgtcttattctttttgacaatacagtatgtgcagacattcaaaagcttttctaaggctcagatgcacagtgtgatgcagcttgaaagacttttagtaaagtgtgtgcctggataactaaatgaacacatgggaaacgtatgattctacaatt

SEQ ID NO: 11916 - DNA, 600 bp, Chicken  19866894215183_1
tcatctgctggaattaggccttaaattaaagaactgaaatattgaataagtactaatcttaggaggcacagaggttgcacaaagaaaataaaatatttgttgaaaactgttcagaatttggttagagttctgaactccttaatgccaaggaccacacgatcattgttaatatacttcaatacattattttatagggaatcaatttcaattaaaattcattcaaatggtgactagaaaaattctataatattgatcttaagggggaacctgcatagttaaaattattaatcatacttgaaygtgccataaaacactgggctagtacctgtgctttatgatcctgtcaaataaagaggttaaaaaaaaacacaactctttcctttatggaagacgccagagatccacatcctgcttagtactgaaaaagcagttcataacactactgactcactgtataagtgagtaaatgaaggtgctctgtcatatggagcataaaagccattaagagcaaacttttatttgaatagaaccacattcatttttaaaattgcattacagaaaggcttccaaagaatgtgaatgaagaaagagaagttttaa

SEQ ID NO: 11917 - DNA, 600 bp, Chicken  19866894215184_1
cctaacacagattataaatattccagtgagatattcctagaatgatttgacagggaaatatgtaaaagatttcagtatttggcaatatccttttaatagtccttataaaggctatttgcactctccacttcagattggatttacatgcaggtgttgctttcctggaggacctttcctttgctgaccacacagagtagctttgcctccaggggcacaagtcagcaatgtaaatattcttccattcaactgcaccacctctgaagaggtttctcattgctacaacatgtatttcagaaaacrtaaagtagttcttataatcttgttagacaaatagtcttaaattcaattatgggaactacaaaggtgttctaatgcctgatttctactgctatttagcttgaaagggtctcccagtaaacattcaaaaattgcttcattactttccttaaaacccaaaccccatactaccaatcagtattttattctcattttcctgggcctcttacctctaaccacattacctcttaccttatatttcaatcacaagcccttgaaaaagagatcagcttcctattctgtccatgcagtgaagtataataa

SEQ ID NO: 11918 - DNA, 599 bp, Chicken  19866894215187_1
  misc_feature (1)..(13): n is any nucleotide
nnnnnnnnnnnnngatcatctcgttctttcctctacacagcagtttgccatgacagaaacaaacatttgtattgaaaataaatccattctgtgtaccttgaggagcttactacacgttgaaacgggatgacgggaagtcacttccctatgtcagggcacagtgggacagacttcagccactgggcagaactacagttcacgcagtcactattgcagccatgttgcactgtaaaggcagaggttcctatagcaagaggagagctcctaaacctccttcccctgtccctccagaggcatggragtgcatgcttgtgcatggaatacatgtgcagttcaattagatattttgcacataattggcaaggctattaagtaataacttccatgtgctctgccycattctttgtcttccaaaggatcctgatgcacttggcaagcagtagagcatacaaaaggaacgatctcctgatggaggacaaaatccacctgatgtgcagtgttgcacaaggacacagagctaaggatgaaagcagaaggcagtcctgtccacagtgcatgctctgtttatcttcattctcttcaacagcaacacagctgac

SEQ ID NO: 11919 - DNA, 600 bp, Chicken  19866894215187_2
ttgaggagcttactacacgttgaaacgggatgacgggaagtcacttccctatgtcagggcacagtgggacagacttcagccactgggcagaactacagttcacgcagtcactattgcagccatgttgcactgtaaaggcagaggttcctatagcaagaggagagctcctaaacctccttcccctgtccctccagaggcatggragtgcatgcttgtgcatggaatacatgtgcagttcaattagatattttgcacataattggcaaggctattaagtaataacttccatgtgctctgccycattctttgtcttccaaaggatcctgatgcacttggcaagcagtagagcatacaaaaggaacgatctcctgatggaggacaaaatccacctgatgtgcagtgttgcacaaggacacagagctaaggatgaaagcagaaggcagtcctgtccacagtgcatgctctgtttatcttcattctcttcaacagcaacacagctgacctgacagacacagtgactttaagttgttcttggctgtttttcagaaggatccactgctcatcccagaagagttttcagactccatgtacagattcaca

SEQ ID NO: 11920 - DNA, 600 bp, Chicken  19866894215189_1
taatccagagcagtgtacaaatcatctgctctacacaactgacatacttaaaacctaagcttcagtaaaagcatttgaatcctcaaaacctgccagggccctctgaaagcactggtgatgaagagcatatgttacataatgtggtgtcagagagctgctagaaggacatccaggtgagtcaaacagctgtgttgcatttgggcaagaaattatcatggttcctggcaatgtaatgtaggaaccttccctctgtacccaaatgtgggaatgttttcaatgctggtcagtgtactgaagcarctggaaaaccgagaagtctgtcagcattattgaacattatatctctggctatagatgatctacaatgctgcaataataggcctcaaaactgaagccaaataattcatcagggtaacaaaacaactcttcctaggcctgacagaaaaacagcacagacccctctttacgtgacagaatacatatttatatattgggtactgagagaactgaggacgtcaccaaaaactggccctgatccatacatgctcagaaacactgtaaatttcagtgacatttttataagttcactggtaaagtttc

SEQ ID NO: 11921 - DNA, 600 bp, Chicken  19866894215190_1
tagcaggtgatcccagaaaatgttagggaattacaatcacaggcaagacattgacaagcagctaggagtgataatgtcccttaccaacacaacagaggaacaaggaggagatcccacacagccttggagcagcctgtgccagcactccatcacttgcacagcacagaaatgcttcctggagtttagacagaacttcctgtgctttagtttgtgcccaatgcttcttaccctggcactgagcaccactgaaaatagcatgactctgtattcatcgcatcttccctgcgatttggacccatyctcctatttggacccatactgaaattgtatgtgcaattaaaatcctggcttttcctattataaaagctaagaatctaatttagcaagccaactgttactttgacatacttgtgcaatttcctgtaacaacagctcatcacttcatacatcatcaaactgcagtccttttaacttaacttaacaaaytgcaatcttttaactctcttaaagatttcagtcaaacttaagtttgccatgtagcaataagacaaaarcatattgctgaaattagttttcatcagctacatcctcctttctttt

SEQ ID NO: 11922 - DNA, 600 bp, Chicken  19866894215190_2
acagaacttcctgtgctttagtttgtgcccaatgcttcttaccctggcactgagcaccactgaaaatagcatgactctgtattcatcgcatcttccctgcgatttggacccatyctcctatttggacccatactgaaattgtatgtgcaattaaaatcctggcttttcctattataaaagctaagaatctaatttagcaagccaactgttactttgacatacttgtgcaatttcctgtaacaacagctcatcacttcatacatcatcaaactgcagtccttttaacttaacttaacaaaytgcaatcttttaactctcttaaagatttcagtcaaacttaagtttgccatgtagcaataagacaaaarcatattgctgaaattagttttcatcagctacatcctcctttcttttgaaagagccttttctacacaaggaaagctttactgattagctcaggaarcatgttcttaatattgtattttgtcagaataatgtattatagtaaactgaaaaagtaatcctaggccagctgaaaacttcagtggctcaggagttgcttcagacatagctccatcactcttmctagatcgctcttac

SEQ ID NO: 11923 - DNA, 600 bp, Chicken  19866894215190_3
gcatgactctgtattcatcgcatcttccctgcgatttggacccatyctcctatttggacccatactgaaattgtatgtgcaattaaaatcctggcttttcctattataaaagctaagaatctaatttagcaagccaactgttactttgacatacttgtgcaatttcctgtaacaacagctcatcacttcatacatcatcaaactgcagtccttttaacttaacttaacaaaytgcaatcttttaactctcttaaagatttcagtcaaacttaagtttgccatgtagcaataagacaaaarcatattgctgaaattagttttcatcagctacatcctcctttcttttgaaagagccttttctacacaaggaaagctttactgattagctcaggaarcatgttcttaatattgtattttgtcagaataatgtattatagtaaactgaaaaagtaatcctaggccagctgaaaacttcagtggctcaggagttgcttcagacatagctccatcactcttmctagatcgctcttacacttgacactgaagcaaagacagaaaaactgaytgggggccatttcagctctccagtttgaatttatt

SEQ ID NO: 11924 - DNA, 600 bp, Chicken  19866894215190_4
ttttcctattataaaagctaagaatctaatttagcaagccaactgttactttgacatacttgtgcaatttcctgtaacaacagctcatcacttcatacatcatcaaactgcagtccttttaacttaacttaacaaaytgcaatcttttaactctcttaaagatttcagtcaaacttaagtttgccatgtagcaataagacaaaarcatattgctgaaattagttttcatcagctacatcctcctttcttttgaaagagccttttctacacaaggaaagctttactgattagctcaggaarcatgttcttaatattgtattttgtcagaataatgtattatagtaaactgaaaaagtaatcctaggccagctgaaaacttcagtggctcaggagttgcttcagacatagctccatcactcttmctagatcgctcttacacttgacactgaagcaaagacagaaaaactgaytgggggccatttcagctctccagtttgaatttattctggatataactgaatcttactggtcagtattggaacatcattgtctcaaagtagaacagcaaaatttatcatgcgcactgaggcacatctggta

SEQ ID NO: 11925 - DNA, 600 bp, Chicken  19866894215190_5
cttaacttaacaaaytgcaatcttttaactctcttaaagatttcagtcaaacttaagtttgccatgtagcaataagacaaaarcatattgctgaaattagttttcatcagctacatcctcctttcttttgaaagagccttttctacacaaggaaagctttactgattagctcaggaarcatgttcttaatattgtattttgtcagaataatgtattatagtaaactgaaaaagtaatcctaggccagctgaaaacttcagtggctcaggagttgcttcagacatagctccatcactcttmctagatcgctcttacacttgacactgaagcaaagacagaaaaactgaytgggggccatttcagctctccagtttgaatttattctggatataactgaatcttactggtcagtattggaacatcattgtctcaaagtagaacagcaaaatttatcatgcgcactgaggcacatctggtaggatccagcttaggtctaccagctgcactgctatagaattgtcatttcttcataagaactatataggccctggtttttgggagtgttcagattaagtgagtttgattcaggctaaaatccct

SEQ ID NO: 11926 - DNA, 594 bp, Chicken  19866894215190_6
aaacttaagtttgccatgtagcaataagacaaaarcatattgctgaaattagttttcatcagctacatcctcctttcttttgaaagagccttttctacacaaggaaagctttactgattagctcaggaarcatgttcttaatattgtattttgtcagaataatgtattatagtaaactgaaaaagtaatcctaggccagctgaaaacttcagtggctcaggagttgcttcagacatagctccatcactcttmctagatcgctcttacacttgacactgaagcaaagacagaaaaactgaytgggggccatttcagctctccagtttgaatttattctggatataactgaatcttactggtcagtattggaacatcattgtctcaaagtagaacagcaaaatttatcatgcgcactgaggcacatctggtaggatccagcttaggtctaccagctgcactgctatagaattgtcatttcttcataagaactatataggccctggtttttgggagtgttcagattaagtgagtttgattcaggctaaaatcccttaaacaaatgtagggaaaaaggaattaactcttttgataatg

SEQ ID NO: 11927 - DNA, 600 bp, Chicken  19866894215192_1
atccaaactatgtagaacacaaaatagcgcatttcagaatgagttatctatttctaactacatactctaagttttgtttgcttgtgtttccccccccagtttatatttattcagtaatataaagaacaagtaggactccatcacacttccgctctgaaatgatctttgtcagatccttgaactgaatcaaccctccaattatgtatacaggtcattaactcagagatgtctctcactccatgtgagcatccacatagctgtgactgtgctccagcaagttgacatggctaaaaaacaaaygagcaaaagaacaacacacaaaaacccacaaaccacatttcagcaacaagtcaaggtattcctacagaagagtagactgaaacttgcctaaaatttccaccaaaaaatctaccaaaaactgtttccactggttttgtattcattttcctagagtttcagaaaggaaaaaaaaaaaaaaaaaaaaccccaagcaattcactggatggtcttcttgaaacatgtcgatgtgtcactatgactgcctcacagtctgcacagaacttagtcttgagagaaagaggcaaaaccattgcactctta

SEQ ID NO: 11928 - DNA, 600 bp, Chicken  19866894215198_1
aaaaatttttaaaaagatgaaataccctcagtttgatcctattcagaaaccaatgtgaacataagatacaagaagcgcatggaagcctacaaatgatagcatgccatttttgttagaaacctgaaagccccattcacagataaacaattagagcttcagaaaaagaacagcagttagtcaaagctaaacagaatcttcaacacatctatcacttaattccttaaaaaaaaaaccaacaaccataaataccattgtctgaagcagtccctgagtggatctgcatgtggcaaaaacccttaygcacactctatgctacaagagcaggattaaaaactaaacaaaaacctacatacacacactcatcagaaaagattttctattactcctctcatttaactttgtacactaaaaccttgccctgtatctcctctaccggtttgaacattaccccaaagttcttgtgagcttccaggtaaacattagaatacgctgcacatcccgctgaccaaaaagtaacttcataatttttgcactgaccttgttcccagttctagttaagggacctgagagtgggaacaagggatcatatgaaagtaaatg

SEQ ID NO: 11929 - DNA, 600 bp, Chicken  19866894215200_1
agccatgatccctagtctcttgatgttaaaagcataacatatggaagatggatctctcctgctttcaattatttaatttaagaaggctgtattaaagtttttcttgatatagatgataaagatattcagttattcaatgattggtgattatataataaaaacaacacacctcactagtttgccaaaagtattactaatgcatattggggaaaaatctgagattgctgataagccacgaaaagcttcttgtgtgtccatataaccaaatcttatggtctagaatcagactggaaatatttwcaactttacagtagtctctgattttctaggaatgtctattcattatggtttctctactggctagagagaactttgttttttcccttccctcccatgctgtgctgtgtgcaggacataaactacrtatgagtacacaaagtattttattgtggtatatctttgcctcatatagtgagctctgctctgctgtttggcaaaggtgtggcaagcagaaaattgtctctagtagttagtactggcttgatttcaagcttagttatttgtgattatagggtagatggtaaagtttttggcatgttt

SEQ ID NO: 11930 - DNA, 600 bp, Chicken  19866894215200_2
ttcagttattcaatgattggtgattatataataaaaacaacacacctcactagtttgccaaaagtattactaatgcatattggggaaaaatctgagattgctgataagccacgaaaagcttcttgtgtgtccatataaccaaatcttatggtctagaatcagactggaaatatttwcaactttacagtagtctctgattttctaggaatgtctattcattatggtttctctactggctagagagaactttgttttttcccttccctcccatgctgtgctgtgtgcaggacataaactacrtatgagtacacaaagtattttattgtggtatatctttgcctcatatagtgagctctgctctgctgtttggcaaaggtgtggcaagcagaaaattgtctctagtagttagtactggcttgatttcaagcttagttatttgtgattatagggtagatggtaaagtttttggcatgttttgtgtgtcttgcaattggattacctctggcctgagatggtgtcagtgtctagctgaaatatttctgaagtgaagttgtattaataggcaataatttgacaaagtcaaagatagtgctgaaaagt

SEQ ID NO: 11931 - DNA, 599 bp, Chicken  19866894215204_1
  misc_feature (1)..(8): n is any nucleotide
nnnnnnnntggagaaatgtgaaaaagacttgagtaaagcacttgttttgtgtacatgtcctttctcatccttacttcttagggtcaaatacttcctagagtcctagatacctaaatctgaggggagttgttaatgggaaggctgttttgtgcttggtacaaaaggattgaggacagttcccatctcaggtgggttttaacatccaaaggccttttgggcatcagatgcgtaagtagattttatttggctttgaaaagttatttgcaatttttcttagagcgctgttttccatttagagcrtatcggccatattccaagaactcagcaaatctgacagaactgaaaatgaaaatacctcaaaaaagtcttggttctggtcagggctccatcccactgatctttgtgagttctccttcaaaaattagttgttctcggaagaaaatgaaggagagatgatgtcgctcctgctttcttgtagctttattacatctgtaaatccttctgcgctgatcatgatagtaattccaaagagcactttctgacttctttactgaaatacatgtgggaataatggagttttgttgtgtctgatctcaagt

SEQ ID NO: 11932 - DNA, 600 bp, Chicken  19866894215223_1
cccgtgctgatgcagccattgatttccgatatgacgcctctactcagcatcttgaacagaatcattcgggtccttgggtccaacacctcaagttaaacaaagaacagtcaccacaagtgtcccctgtgaagagaattaagcttacttactcctccagccccttcttagtactatactaaaggaccaatgacatcaggctattcttaaggatcaaacaatagttcaaacagctgtcacactgaattttgccacgattttacaataacacttcaatttatttaaaaaaataataattaaaayaagtacatgtccttgagctagcttcataacagacttatgagaatgatttcccacttacagttacaccagatggtaaaatatggtatagcagacataacttaaatggaacagctatatggccttgggccagtaataacttcagccttccttaagaaaaaaagatggaaagaaagcaaacccagcatcttctgtttgatgcttggaattcaacaaatgcttaaaatggaattctgcattacatgtaccatcaaatcatgatgctaagcacaaaaatgagctccaaaactgttacgggagcaa

SEQ ID NO: 11933 - DNA, 600 bp, Chicken  19866894215224_1
gggacagaactgctccctgtgaggacaggctgagaactggggttctgcagcgtggagcagggaaggctctggggagaccagcctgtcagtatctagagaggctgtaagaaagaaggggacagagaggtggtgggtatcccattcttggagacccccaacttcaggatggatggggttctgagcacccaatggagctgtacgaatccctgttcattgcatgggagttggactaggtggtctttaaaggtcccttccaactgaaaaaattacatgattctatgaaatagctaaactgctaasgtgatttttaaaagcatttctgttaaaatgtgtctccttcacaggttatgtcactattttatttttaataacattggaaccatcaaacagccagagctgacatttgcaagtagccttactttggacaagaacagcaccagttagatctcaacaacagtgctggctgagtgtatggaaacatcttgctccgtagattcttctttacaaaaccattccagaatttgaatccatttttaaaaggtgcttcagaaatgcacataaaccccatcagtcctgttgggctgaaagaaacctatattt

SEQ ID NO: 11934 - DNA, 600 bp, Chicken  19866894215225_1
aacaagagtgatgaaagaagagtaggtcacatgaatgacagtaccttaagcaagtgttcctaagggggaaaaattaggtaaggagaacaatgttgtatttatgaagtagataatctcaattaacggtgctctgtctgtaagctatgaggggatgtggcctacccagataattcatctgcccgttgctcacctaacagtggctcttcttgctgggcaaccagacagcaaattacacagtaagtgtgttgttcttgagtggtggcagccaccgtcatctccaaactgctgccagtctgcagrctctcaccccatcccataatctcacagaaggtgagcgcatgaacgcaaatctgtttaggaaaccttctccaccccctttagcattcttttcccaaccacctccatttgtttactatcttagacaacttccagaccttkggaaaacatttggttccaatccagtttgaatattattggattgatatattggattgatttttgagatgctggaaaatgtcaagaaattaatgctacagacttattatactttctgcatttacaagcctyttgattctatgaaatgagaaatattctgtttcc

SEQ ID NO: 11935 - DNA, 600 bp, Chicken  19866894215225_2
aagctatgaggggatgtggcctacccagataattcatctgcccgttgctcacctaacagtggctcttcttgctgggcaaccagacagcaaattacacagtaagtgtgttgttcttgagtggtggcagccaccgtcatctccaaactgctgccagtctgcagrctctcaccccatcccataatctcacagaaggtgagcgcatgaacgcaaatctgtttaggaaaccttctccaccccctttagcattcttttcccaaccacctccatttgtttactatcttagacaacttccagaccttkggaaaacatttggttccaatccagtttgaatattattggattgatatattggattgatttttgagatgctggaaaatgtcaagaaattaatgctacagacttattatactttctgcatttacaagcctyttgattctatgaaatgagaaatattctgtttccatttgataggaatatatttcaaagttctgtcaacataggatggcctttggattttagtgctttctagattgagaggtgtaagtctgcatgtccagggacttgtacagcctttccatgtttagatacttggccatttgg

SEQ ID NO: 11936 - DNA, 515 bp, Chicken  19866894215225_3
accgtcatctccaaactgctgccagtctgcagrctctcaccccatcccataatctcacagaaggtgagcgcatgaacgcaaatctgtttaggaaaccttctccaccccctttagcattcttttcccaaccacctccatttgtttactatcttagacaacttccagaccttkggaaaacatttggttccaatccagtttgaatattattggattgatatattggattgatttttgagatgctggaaaatgtcaagaaattaatgctacagacttattatactttctgcatttacaagcctyttgattctatgaaatgagaaatattctgtttccatttgataggaatatatttcaaagttctgtcaacataggatggcctttggattttagtgctttctagattgagaggtgtaagtctgcatgtccagggacttgtacagcctttccatgtttagatacttggccatttggaagcaaccttttcaagaaggttgacgtggtaccgagtcaagaag

SEQ ID NO: 11937 - DNA, 599 bp, Chicken  19866894215226_1
  misc_feature (1)..(41): n is any nucleotide
nnnnnnnnnnnnnnnnnnnnnnnnnnnnnnnnnnnnnnnnncccccctgccgggcagggccaccaacctccccatttactagaccgtttgcccagggcctcatcaaacttggatgctcaggattctaatggagacaacaaggcaaaaagcacagatctaggctttgaggaagtagattttggcctcttcaagatctgcttggaagaattctatgaaagatggctctgtagaaaggagtccaggagagctgaatctctgctaagctcaataatgatcaatctacatgtgcaggaaatcaartaaagacaatgaaaggccagcatggatgagcaagaaacttctagggaaaaaaagctaaaataatataaggaaccatacaggaagttaaacttgggacaggagacccaagaggaatataaaggcactgcctaagcttgcttggaataaggttaggaaggccaaatcctgcttggagttgaatctggctagagatggtaaagggcaggagaaaggtcttcctcaagtaccacaacagcagaaggaagactacggaagattwgggctatctgctgaatggggcaggagtcttggtgacagag

SEQ ID NO: 11938 - DNA, 600 bp, Chicken  19866894215226_2
taagctcaataatgatcaatctacatgtgcaggaaatcaartaaagacaatgaaaggccagcatggatgagcaagaaacttctagggaaaaaaagctaaaataatataaggaaccatacaggaagttaaacttgggacaggagacccaagaggaatataaaggcactgcctaagcttgcttggaataaggttaggaaggccaaatcctgcttggagttgaatctggctagagatggtaaagggcaggagaaaggtcttcctcaagtaccacaacagcagaaggaagactacggaagattwgggctatctgctgaatggggcaggagtcttggtgacagaggacatagagaatgcttctcagtgccctcttcaccattgtctttgatggaaagatttgctttcrggaattacaggtctctgaaacaaatgagaaagcttggagcaggcttacctttcactcattcttttataagtgtrcrcaacttgatgagattcacccacaatactaaatgaaaggtggttagttggaggttcctgagagctgaaagagagcaaatgccaggggaggttcagagtagatattagaaaaaatttmttctc

SEQ ID NO: 11939 - DNA, 600 bp, Chicken  19866894215226_3
atataaggaaccatacaggaagttaaacttgggacaggagacccaagaggaatataaaggcactgcctaagcttgcttggaataaggttaggaaggccaaatcctgcttggagttgaatctggctagagatggtaaagggcaggagaaaggtcttcctcaagtaccacaacagcagaaggaagactacggaagattwgggctatctgctgaatggggcaggagtcttggtgacagaggacatagagaatgcttctcagtgccctcttcaccattgtctttgatggaaagatttgctttcrggaattacaggtctctgaaacaaatgagaaagcttggagcaggcttacctttcactcattcttttataagtgtrcrcaacttgatgagattcacccacaatactaaatgaaaggtggttagttggaggttcctgagagctgaaagagagcaaatgccaggggaggttcagagtagatattagaaaaaatttmttctcagaaagagtggtgagactttggatcaggctgcccacagacatagtggagtcactgtcgctggaggttttaaaaaaaaaggtagatgtttcactgggtgacatg

SEQ ID NO: 11940 - DNA, 600 bp, Chicken  19866894215226_4
gcttggaataaggttaggaaggccaaatcctgcttggagttgaatctggctagagatggtaaagggcaggagaaaggtcttcctcaagtaccacaacagcagaaggaagactacggaagattwgggctatctgctgaatggggcaggagtcttggtgacagaggacatagagaatgcttctcagtgccctcttcaccattgtctttgatggaaagatttgctttcrggaattacaggtctctgaaacaaatgagaaagcttggagcaggcttacctttcactcattcttttataagtgtrcrcaacttgatgagattcacccacaatactaaatgaaaggtggttagttggaggttcctgagagctgaaagagagcaaatgccaggggaggttcagagtagatattagaaaaaatttmttctcagaaagagtggtgagactttggatcaggctgcccacagacatagtggagtcactgtcgctggaggttttaaaaaaaaaggtagatgtttcactgggtgacatggtttagtgccacggtagtgatgagttgactgttggactaagttatcttactgatctttccagccttcatgattc

SEQ ID NO: 11941 - DNA, 600 bp, Chicken  19866894215226_5
ttggaataaggttaggaaggccaaatcctgcttggagttgaatctggctagagatggtaaagggcaggagaaaggtcttcctcaagtaccacaacagcagaaggaagactacggaagattwgggctatctgctgaatggggcaggagtcttggtgacagaggacatagagaatgcttctcagtgccctcttcaccattgtctttgatggaaagatttgctttcrggaattacaggtctctgaaacaaatgagaaagcttggagcaggcttacctttcactcattcttttataagtgtrcrcaacttgatgagattcacccacaatactaaatgaaaggtggttagttggaggttcctgagagctgaaagagagcaaatgccaggggaggttcagagtagatattagaaaaaatttmttctcagaaagagtggtgagactttggatcaggctgcccacagacatagtggagtcactgtcgctggaggttttaaaaaaaaaggtagatgtttcactgggtgacatggtttagtgccacggtagtgatgagttgactgttggactaagttatcttactgatctttccagccttcatgattcta

SEQ ID NO: 11942 - DNA, 535 bp, Chicken  19866894215226_6
gattwgggctatctgctgaatggggcaggagtcttggtgacagaggacatagagaatgcttctcagtgccctcttcaccattgtctttgatggaaagatttgctttcrggaattacaggtctctgaaacaaatgagaaagcttggagcaggcttacctttcactcattcttttataagtgtrcrcaacttgatgagattcacccacaatactaaatgaaaggtggttagttggaggttcctgagagctgaaagagagcaaatgccaggggaggttcagagtagatattagaaaaaatttmttctcagaaagagtggtgagactttggatcaggctgcccacagacatagtggagtcactgtcgctggaggttttaaaaaaaaaggtagatgtttcactgggtgacatggtttagtgccacggtagtgatgagttgactgttggactaagttatcttactgatctttccagccttcatgattctatgaaatgtcatgcctatcttcaaaaaggacaaaaagaaagatcagggggag

SEQ ID NO: 11943 - DNA, 599 bp, Chicken  19866894215227_1
  misc_feature (1)..(22): n is any nucleotide
nnnnnnnnnnnnnnnnnnnnnnaccatctatattgctcactaaaccacgtccctcagtactacatttacacattccttgaacacctccagggatggtaactccaccgcctccctgggcagcccttgggatcatttcaatttcagtgatttggtggatttttaaacaacaacaacaacaaaaaaagcaaaccaaccaagtttgggtaacaggcaaatctataatacaaatcaaggcaaaactgtgactgagccaaaattaactttgaatagaataacatcagagtttttaaaatgcatacrtaaattttaaaacagaatactttttatgatttctgtaatgtcaagtgaacttcagaatttcattctaagttggaatgaaaactaatattaaaactatatacgtatatgtatgttgcagtaaaaatttaattcctgcagggctttaaagaacagctttttgtttgaagcaagatttatattctacctcatatatcatacaaaccctgaatggataaattcagccctrtagaaacaaacagtaagtcctcagcggccatggattagcaccaacagaagctgtgtggaaagttttgttcctt

SEQ ID NO: 11944 - DNA, 505 bp, Chicken  19866894215227_2
aatcaaggcaaaactgtgactgagccaaaattaactttgaatagaataacatcagagtttttaaaatgcatacrtaaattttaaaacagaatactttttatgatttctgtaatgtcaagtgaacttcagaatttcattctaagttggaatgaaaactaatattaaaactatatacgtatatgtatgttgcagtaaaaatttaattcctgcagggctttaaagaacagctttttgtttgaagcaagatttatattctacctcatatatcatacaaaccctgaatggataaattcagccctrtagaaacaaacagtaagtcctcagcggccatggattagcaccaacagaagctgtgtggaaagttttgttccttattactcaaaccatgccttagcaggaaagtacttctccataaggccaacactgttctcatttaagagggcaaaaatagcttcataagagaaaattactgcataaaaccataaatcttccccagatctcacca

SEQ ID NO: 11945 - DNA, 599 bp, Chicken  19866894215229_1
  misc_feature (1)..(273): n is any nucleotide
nnnnnnnnnnnnnnnnnnnnnnnnnnnnnnnnnnnnnnnnnnnnnnnnnnnnnnnnnnnnnnnnnnnnnnnnnnnnnnnnnnnnnnnnnnnnnnnnnnnnnnnnnnnnnnnnnnnnnnnnnnnnnnnnnnnnnnnnnnnnnnnnnnnnnnnnnnnnnnnnnnnnnnnnnnnnnnnnnnnnnnnnnnnnnnnnnnnnnnnnnnnnnnnnnnnnnnnnnnnnnnnnnnnnnnnnnnnnnnnnnnnnnnnnnnnnnnnnnnnnnnnnnnnnnnnnncaaccttcaggcaggctgggttctggmggacccaactaagtccaaagaaggctctcttgggtgctgtggctgggaatgctcaatggtttttcttgtttccctataggattctgaactcctgcacggacttaatgaaggtcagtgctgcaagagctgagctgcttcttagggagtcagaaaccacacaaaaatatcacttaaaaacactggcaaaatcattccttttgtataaaatycccgtctgccacccaaacttgttcttcctcattccaggctattaggcttcttgtaatgacatcaacaaacttacagaaggagattgtgga

SEQ ID NO: 11946 - DNA, 599 bp, Chicken  19866894215229_2
  misc_feature (1)..(64): n is any nucleotide
nnnnnnnnnnnnnnnnnnnnnnnnnnnnnnnnnnnnnnnnnnnnnnnnnnnnnnnnnnnnnnnncaaccttcaggcaggctgggttctggmggacccaactaagtccaaagaaggctctcttgggtgctgtggctgggaatgctcaatggtttttcttgtttccctataggattctgaactcctgcacggacttaatgaaggtcagtgctgcaagagctgagctgcttcttagggagtcagaaaccacacaaaaatatcacttaaaaacactggcaaaatcattccttttgtataaaatycccgtctgccacccaaacttgttcttcctcattccaggctattaggcttcttgtaatgacatcaacaaacttacagaaggagattgtggagagtggccgggtaagtcctcccttacactcatctctgtgcactgatgtggaaaattctgtattttacaatatgtagraaaaaaaacagctgaattttgcactttcccatgttgatgacatgttttcagtcctgctggctcgaatgggggctgttcagcccggtgcattttgcagaccttgctattgcctttgtccgttgaaagatgatg

SEQ ID NO: 11947 - DNA, 600 bp, Chicken  19866894215229_3
taggattctgaactcctgcacggacttaatgaaggtcagtgctgcaagagctgagctgcttcttagggagtcagaaaccacacaaaaatatcacttaaaaacactggcaaaatcattccttttgtataaaatycccgtctgccacccaaacttgttcttcctcattccaggctattaggcttcttgtaatgacatcaacaaacttacagaaggagattgtggagagtggccgggtaagtcctcccttacactcatctctgtgcactgatgtggaaaattctgtattttacaatatgtagraaaaaaaacagctgaattttgcactttcccatgttgatgacatgttttcagtcctgctggctcgaatgggggctgttcagcccggtgcattttgcagaccttgctattgcctttgtccgttgaaagatgatgacccaaatgtggctgtgttacacccacaccacgtttggagccccaagcttgtaatgtttgggtttaagcaagccagtaagagcatcctgaagggcacagaagtgcggccaatccctggacttatgggtttatatatgggggttctgtattgttagatgtgatattttt

SEQ ID NO: 11948 - DNA, 599 bp, Chicken  19866894215231_1
  misc_feature (1)..(80): n is any nucleotide
nnnnnnnnnnnnnnnnnnnnnnnnnnnnnnnnnnnnnnnnnnnnnnnnnnnnnnnnnnnnnnnnnnnnnnnnnnnnnnnntttcctgttagtaggaatgttgttgctgtcacatgaaaagtagtcagtctcaatttattgtaaaagtgaaatattctatgaagttctcagatctagaaaggctgttgtgtgatgctactaaatttatatttggtaaatgaagatgaatttaaatactttctggacaaaggagattggttatagcacgcaggtagctgtgagagcagagttttggtcttartattaattaccaatgcacacaggcatctcccrgtctgtaagagagcctgcctaggraggagcagatgggggccttacttgggcaccgggatatggattgggctctggttggagtgatggccgatgagctgagtgtgtgagggaaaagcacacatgmtttccttctctggttgatcaggaagcagcaggactcagaaagctgctgcgcctgtcagccctgattttcctccttttgtgttttctcagcctcagtaatatgctgctgggaaacaatgtaatcagtggacaactgcactgcta

SEQ ID NO: 11949 - DNA, 599 bp, Chicken  19866894215231_2
  misc_feature (1)..(48): n is any nucleotide
nnnnnnnnnnnnnnnnnnnnnnnnnnnnnnnnnnnnnnnnnnnnnnnntttcctgttagtaggaatgttgttgctgtcacatgaaaagtagtcagtctcaatttattgtaaaagtgaaatattctatgaagttctcagatctagaaaggctgttgtgtgatgctactaaatttatatttggtaaatgaagatgaatttaaatactttctggacaaaggagattggttatagcacgcaggtagctgtgagagcagagttttggtcttartattaattaccaatgcacacaggcatctcccrgtctgtaagagagcctgcctaggraggagcagatgggggccttacttgggcaccgggatatggattgggctctggttggagtgatggccgatgagctgagtgtgtgagggaaaagcacacatgmtttccttctctggttgatcaggaagcagcaggactcagaaagctgctgcgcctgtcagccctgattttcctccttttgtgttttctcagcctcagtaatatgctgctgggaaacaatgtaatcagtggacaactgcactgctaataaacacctccactttctccatagggtcagg

SEQ ID NO: 11950 - DNA, 599 bp, Chicken  19866894215231_3
  misc_feature (1)..(24): n is any nucleotide
nnnnnnnnnnnnnnnnnnnnnnnntttcctgttagtaggaatgttgttgctgtcacatgaaaagtagtcagtctcaatttattgtaaaagtgaaatattctatgaagttctcagatctagaaaggctgttgtgtgatgctactaaatttatatttggtaaatgaagatgaatttaaatactttctggacaaaggagattggttatagcacgcaggtagctgtgagagcagagttttggtcttartattaattaccaatgcacacaggcatctcccrgtctgtaagagagcctgcctaggraggagcagatgggggccttacttgggcaccgggatatggattgggctctggttggagtgatggccgatgagctgagtgtgtgagggaaaagcacacatgmtttccttctctggttgatcaggaagcagcaggactcagaaagctgctgcgcctgtcagccctgattttcctccttttgtgttttctcagcctcagtaatatgctgctgggaaacaatgtaatcagtggacaactgcactgctaataaacacctccactttctccatagggtcaggagatgtgggcagtggggcctcgga

SEQ ID NO: 11951 - DNA, 600 bp, Chicken  19866894215231_4
tatgaagttctcagatctagaaaggctgttgtgtgatgctactaaatttatatttggtaaatgaagatgaatttaaatactttctggacaaaggagattggttatagcacgcaggtagctgtgagagcagagttttggtcttartattaattaccaatgcacacaggcatctcccrgtctgtaagagagcctgcctaggraggagcagatgggggccttacttgggcaccgggatatggattgggctctggttggagtgatggccgatgagctgagtgtgtgagggaaaagcacacatgmtttccttctctggttgatcaggaagcagcaggactcagaaagctgctgcgcctgtcagccctgattttcctccttttgtgttttctcagcctcagtaatatgctgctgggaaacaatgtaatcagtggacaactgcactgctaataaacacctccactttctccatagggtcaggagatgtgggcagtggggcctcggagcaaatcagcccttttccacttcgtactgtgtccttactgacagtaacaatgtcttgcaattaggtccctgcagaaggtagttaaccctgaagagcagcag

SEQ ID NO: 11952 - DNA, 599 bp, Chicken  19866894215234_1
  misc_feature (1)..(120): n is any nucleotide
nnnnnnnnnnnnnnnnnnnnnnnnnnnnnnnnnnnnnnnnnnnnnnnnnnnnnnnnnnnnnnnnnnnnnnnnnnnnnnnnnnnnnnnnnnnnnnnnnnnnnnnnnnnnnnnnnnnnnnnntttataattgagtaccctgaccatgagaccaagtgctgggtctttgtggaagttgaagaaatgtattgtttgatttctggattttgaagggagtggggaaaaactgttttgatggtatatggaagtgcagttgttaatggtacaccaaagtgtaattgatagtacaagtagtggaattgkggggggggaaacaaaaaaagaaaaaagaaaaaaaaatggcaaaagggttaaggaaaacagtttgtgccggcacgagaacacatcctccgcactaaccccaccgcggcttgtaagaacaactcggagtgagaaagagctgggggccagggactccccctttaactgtaaagggcgtattacttctgaacgggggtgggacgggacattggaagtgagaatagccctcatctgcagagatctaaggaaacccgatataccagtattagcactggaagcctggggacgggaggggttgaaac

SEQ ID NO: 11953 - DNA, 600 bp, Chicken  19866894215234_2
tggggaccaattaaatatacgccaggagaacaagtaggaatacataaattcttgtacatgccaggttctccaaaaccattacttgggcatgacatattagaacagttgaatgtagagattaaattcagtaaagaaaattggagctaagtgtcaagcaagactaattgactgaaaattaagtctggctttaacacaaactgggaaaagcaatgttgtaccctcagaagttatgtaaatcctaaatcaggtatacacaggattgcaggcatcaggaatgcctggcagagccaaaaatgcagyccagtagaagctaagttaaagacaagatccagcccagtcagggtaaagcaatgtcctttgaggatacaagattgtaggaggataaaagaaataataaatgacttcttggattttggattattaattggataggaatccaaatacagcaccccaatcttgctaatgaaaaattgtatagcaaaagctatagtttggtacaagatttgagggtaattattgaagagacgcaaccccgtggtggcaaatccatgcactttattaaccaagttaaggaatgagtaggagggatttgctcttctg

SEQ ID NO: 11954 - DNA, 600 bp, Chicken  19866894215237_1
ctgttgtgtgtcaaatgttttagagaactgaaactcacttaaaccaagaacagggttagttatcgttgcattattaatgtggttattttgtcttttaaaaatgcagtattctactgaggaagacatgattgaatgggctaagagggaaagtgagagagaagagaaagaaagattggcaagactaaaacagcaagagcaagaagacttggaactggctattgcactcagtaaatcagaaatatcagaagcatgaagcttagaataagatgttgtcatatgtcaactgttttgtcccttttyctgaatacctaacctatttaaatgttaatcagaagatgacatgtatacaaaaaattaagaaaggttttaaacttttgaaagtgggtgtgttcctgctaaattcaatcctttggggttatttttattatttgaataacttaattctagcattcaatttctctcacgttttcaggaaaataaggaacttttcccagatgtaagcaaatcagttgaaaatgcagaaaatgagacattagtttgactggaatctgtcagcagttggtaattgagcataaagtgaacatagcaattattctgcca

SEQ ID NO: 11955 - DNA, 600 bp, Chicken  19866894215241_1
gcgggagggaggagaaaaacatttttttttttctttccctccaggcatctgatttactccgtgactctgatgcttatcaacaacgcgtgaagattgcaataaggatcctccctggaaggcgaggaggagtgacttccagggggttgggaggaggtggagtgcagctctcgcctataaggaggtgcccagcgcccggtgccgcttccagccgcagctcgcgaggtgcattgccgcggcggcagccgggctgagcgctcggctcgggcgctgccgccgctattcggaacggctccccccctrccagggccgccgagcagggtctctcggctgcccctgcacccggagtgcctggatgctgcatggagtaaatgagcggagaaaaagggagcgcacagagactgagaggtgctcggagagcgagaccgggggagacaggcgggcggctgctggcttccccccgcggggctgaagatggattccccagccctcggggctgtcgttctgctgcttgccggtttttggcacctgggattaaccgcgactaactgtgagtagcgggcgcgcgcggagttccctggtgttgggatgggggttggggcg

SEQ ID NO: 11956 - DNA, 600 bp, Chicken  19866894215242_1
tctgcagggattactgaccatggctacggggctttgtttaggaggggctggaagcaggtggaggaaggatgtgagcagaaggggggaaggaagatgacatctggatttgtgcacctggggacggaaggcagctttgcagatgctaagtggtggcaaagctccccagaaaggagctgagatggcaaaggggacgcccagccccacgcttgccctggtgacggtggctttgggaaggctttggggcatgcaaccctgctctgagaacgtgcagcacagatggataaggacagctggggagcraaggggaaaccctacccggctgggggtcaccgccaaggcatggggaaggagccctgcacccggggctggatgctcaccccatgtcatggatgggggctccctgcagcccagagcaggtgcagccctgcatggtgtgcagacggccacgtactgccctcttgctcgcacgtgcagagccaaactgggacacaccatcacgtctgtgcccgaggagcctctctcagccctgagcacacacagtggtgaggggaaggctttggggctgggggaagccggcagagcggggacagctatttataa

SEQ ID NO: 11957 - DNA, 600 bp, Chicken  19866894215244_1
ggcatggcagtgggaaatgccttggtcaggccggacccaggcatgcacgtgggctgtgggagcatacacctgtggggcaggaggaaaaggctgccggtaaaacaggaatgtatcgcttggggtgagcacaactttcagtctttggagaattaagaacaggcaggatggaccttgttgtggaggacagcgggacggctgtatggaatctctgcagagctcttccagccagatttcctgcatgcagccaaggctgtgcagtgctcatctctcctcagtcttcctccatgcccagatcctgcyttcccagctgcaatgatgcagtctccccatacgctccctgctgatggagcagctctgtccctgagtgcggggctctgccctgctgctcccactgctcccagccctgcaccctgccccgtgycctcccttccctgccccatccccacygaggctttgtctcaacctgtgcggctgctgcatggaaacatctcccaacccaaacctgtttcctcagaagattcctggctgactccagtcatgtattatgtactggaagcactgcccttgggatcagcgttcaggttagagacacgcgtggga

SEQ ID NO: 11958 - DNA, 593 bp, Chicken  19866894215244_2
gtgagcacaactttcagtctttggagaattaagaacaggcaggatggaccttgttgtggaggacagcgggacggctgtatggaatctctgcagagctcttccagccagatttcctgcatgcagccaaggctgtgcagtgctcatctctcctcagtcttcctccatgcccagatcctgcyttcccagctgcaatgatgcagtctccccatacgctccctgctgatggagcagctctgtccctgagtgcggggctctgccctgctgctcccactgctcccagccctgcaccctgccccgtgycctcccttccctgccccatccccacygaggctttgtctcaacctgtgcggctgctgcatggaaacatctcccaacccaaacctgtttcctcagaagattcctggctgactccagtcatgtattatgtactggaagcactgcccttgggatcagcgttcaggttagagacacgcgtgggacctcagtaggtcttcttctcacaaagcctctcatgtgcagtttgcagtaagagaaatggatacgcttgctctgataattcgccagcgtggcccaaagcagtgacctgctgatgg

SEQ ID NO: 11959 - DNA, 567 bp, Chicken  19866894215244_3
aattaagaacaggcaggatggaccttgttgtggaggacagcgggacggctgtatggaatctctgcagagctcttccagccagatttcctgcatgcagccaaggctgtgcagtgctcatctctcctcagtcttcctccatgcccagatcctgcyttcccagctgcaatgatgcagtctccccatacgctccctgctgatggagcagctctgtccctgagtgcggggctctgccctgctgctcccactgctcccagccctgcaccctgccccgtgycctcccttccctgccccatccccacygaggctttgtctcaacctgtgcggctgctgcatggaaacatctcccaacccaaacctgtttcctcagaagattcctggctgactccagtcatgtattatgtactggaagcactgcccttgggatcagcgttcaggttagagacacgcgtgggacctcagtaggtcttcttctcacaaagcctctcatgtgcagtttgcagtaagagaaatggatacgcttgctctgataattcgccagcgtggcccaaagcagtgacctgctgatgg

SEQ ID NO: 11960 - DNA, 600 bp, Chicken  19866894215248_1
gtatttcacattgtatttcagaatgattgcttcacagcttgtttatgtaaaccgaaaatacgtgagaacgatgccacctaatgtaaatagagagcataacaaccatttcccttgtatttgttaacactgctttccagttgatgttgaaaggttagaagtttagtatccctccttttagcccttctgcctaaatatgtccacctgagatttcaatggaatgactgaaaaggtctaattcctacagaactcatttctattctggacattgtttaagtatgtcttgaactattacttcttttyagaacatatgaagtaaggaaaatgctttgaacaatttctttttttttttttttttttttttaggcttatctgcatgcagctctcctgaattcaatcaaattcatctgaactttttcaaattccactggaggaggagacaggaggatttagtagacattgcctgctgagaagaaacaaggggcgataactcagggaaagcctaaaagagtaggacctgtcatgcagcctccttaactatgtcgttcctaactgcatttgttacagtcttagccatgatcttgcccaatcccagctgcgtac

SEQ ID NO: 11961 - DNA, 600 bp, Chicken  19866894215253_1
acttatttagcacgtcagctctacattcaattagtgaacataaaaaaggccacacatccacctgcaaggctgatctactcagaaatcttgggataagcacaaacagtgggaacaaaggaaccaagagttacagccaccatcaccaagcacctctgtatccaaaggagcagggcaagaggggctttaggacatgagattaagttatgttctaaggaagagggctgagcacatccttaatcccacgagcggggcctggtcccagcagggacaacgaaggtctgtggaactcagcactgtgaraaggaatcctgataaaccctttccaacacgttggctagaagcagtcagggaacacttctggatgccaacacttaacaggctaccacttcagtggaaaaaggctgcagcggtagctagcaatgccacaacagcatcatctcaaacaccagaaacgcaggtttcactataaggggcagagagaacgtcaaaggcagagtaaaacagagcaacaaccacagtgcagcagagagccgcacaggggacagcgtggagagtgcatgtgaggacagaggcacagccccgcctcacagcagcagggct

SEQ ID NO: 11962 - DNA, 600 bp, Chicken  19866894215263_1
aagtatgaaagcagctagaaagatgtaattagtgtggagaaaaacaacacaaggagaaacagatgccagtgcaagtctaacaagtttgtatgtgtatgggcggcctatttatttggtgaaaaataagcagaattggctgaagtatggcagcagccaagaagttaagcatgtgattaacttgtggtctacccttaggtctctgacctcttgaactctattctcaggaggttccctctggacaccaggaagcatttctgccctttgagggtgatgaagcatagacagtttgccccaaaaggyggtgaaatcttattcttggagwtctccaaaggctgcctgcacatgggcctcagagagcagccctgagtatccttgcttgagctggcgttggaccacatgaacccagagggccctctcccaccctcagccattctgtgattctttgtccatgctaatcatactcttgagtacctgaaagttaacctaagcaatgtttttgtttgtctgtgtgtttgcttttgttttgttgtacattttcagataactgactgaattagtggcatgagaattttgttactaatttccagaaacaatatcatc

SEQ ID NO: 11963 - DNA, 600 bp, Chicken  19866894215263_2
atgtaattagtgtggagaaaaacaacacaaggagaaacagatgccagtgcaagtctaacaagtttgtatgtgtatgggcggcctatttatttggtgaaaaataagcagaattggctgaagtatggcagcagccaagaagttaagcatgtgattaacttgtggtctacccttaggtctctgacctcttgaactctattctcaggaggttccctctggacaccaggaagcatttctgccctttgagggtgatgaagcatagacagtttgccccaaaaggyggtgaaatcttattcttggagwtctccaaaggctgcctgcacatgggcctcagagagcagccctgagtatccttgcttgagctggcgttggaccacatgaacccagagggccctctcccaccctcagccattctgtgattctttgtccatgctaatcatactcttgagtacctgaaagttaacctaagcaatgtttttgtttgtctgtgtgtttgcttttgttttgttgtacattttcagataactgactgaattagtggcatgagaattttgttactaatttccagaaacaatatcatcttatagctttactgtggtaata

SEQ ID NO: 11964 - DNA, 600 bp, Chicken  19866894215266_1
aactgtatcatgacaagaagattgcaaagtcacttgccataattgggtgtgtctttgccatttgctgggccccatatactttagtaatgattattcgtggagcctgccaaagtgaatgtgtccattcagttctctatcaaattaccttttggcttttgtggatcaattcctctctgaacccattcctctaccctctctgtcatgataaatttcgaatggcttttatgaaaatattatgtcccaagaagtttgcactattgagatcagcctcttgttagaaggttagaaaaaacaaaaacwaaacaggctgacgttcagctatatctgtagagaacgactgttgtaaatagcaaaggtttgtcattaacttcttctggaagactaacccaaaggtaaggctttggtgaaatatgttcttcagaggaatgcacatgcccaaagtttgtgtacatttttcagcaattcagattggctaggaaaagaatattacttctgcctgtctttccttagtagactgttgacattatcttcattctgattgtggaagatattatctccaattgcaacattgataatatttgtgttcacagatggtgttaa

SEQ ID NO: 11965 - DNA, 600 bp, Chicken  19866894215267_1
aatttaccataagtaggacttgtcttctactgacttggttgttatttatgagcaatctaataatccctagataccttgagaaggctgcagtgagtatatatgttctacattttcttgtttggttgttttttagggttggttgcttttgttgagtattttttccagttatttttaatttgaagcttagtatttgaaaggtttcagtgatgccatctatattagtggaaaatcctgttgtaactactgagtgtaagaaaaggaaagttgaagttgaacattagaccatagtgacttgcaaaracaattttttagaattgttttcccttattccaagctaagtttaatgtgggctgcttctgactgtgccttattctgatttggtatgtaataattgtttctgaacttcatcctctagacagtcttaatttagcttaggtagctaacatggggcatatatgcactgactttgatgtcaaaatactcaacagatcatttcatccttacaccgccaaactgtttattcaaaatccaagaataaaaagctagttacattcttgttggcaataaagtggctttacttaaaacttcatcctttttttt

SEQ ID NO: 11966 - DNA, 560 bp, Chicken  19866894215272_1
ccaagatgatgtcacggataaaggaaaatcaacccaaatcagtgacagtgtagacatacaagattaagttcaatgattacttatttatagttatttatgtgaacaatcactgcattttctttgctagatgtgcatagatgacaatgcccaaattcagcagaagtcagcagtgagtggtaggacaccacatgatatcttttggctttgtattaagttctgacaggaggtaaatgttaaacgttaaacagaaaatggaaggattgtatgcatgcttgtttcccctatttctatacacacttytgagcaaagttgaggtgtagctacactccaaatatttattttcctggtgtagtctttcatttcacaatcaagctatcgacaatggagcatctgatgaggtaaaacaataaaattattcatctctaataattgccttttctaattgattattgcttactgaatgtgattttatctgggaatagctcaggaaaaaataagtgcacagcaaactcttaatgacagcaaataatgctgcccagtgactatacctctttagtttg

SEQ ID NO: 11967 - DNA, 600 bp, Chicken  19866894215274_1
gcatgtgccagagtgaagaattcaggaacacagtgatgataaagctctccaggaggaaggagatctttctcagaatgaagaaggtggttccaactctcctgtgtcttccagacttgtcataataattccatatctgagagttaagattgctcttacttaagtagacacttttgcttgcctttcctgaatggaaatccatcagttaaatgctttcaggctcatgaatcttctccagaggatcctgcaagtgttcctcatctatctgcccccattcctcttcctccaataacccatttggayctccagaatgaatctcataaacacagagctgggttaaggctcagatactctctgatttaacaagcctcttgcttgttagtcttagcctaatcatgctgctttgatgggtttaccttgcaaggggcccttatgttgtgtttccattgtggccagacaagcttgctttgctttccactaatgttgtcctatatttagtgttttgactttatgtgaccctgacattgtgttgggggaggagaaggaaaaaatgtattgcttatggctaatcctatgcattgctcagagactgcattcactctg

SEQ ID NO: 11968 - DNA, 599 bp, Chicken  19866894215275_1
  misc_feature (1)..(49): n is any nucleotide
nnnnnnnnnnnnnnnnnnnnnnnnnnnnnnnnnnnnnnnnnnnnnnnnntgctttgtaagcaattcttgtcccccacccgtttgtataagaagatggtgatgcaacctgtccaagagtgtgtaagagaaaaggaagtacggtaagatcatggcatttaggattaatagcaaagaaaccaaccccagtaaagataaaaatgttaaggtctactataagaataagaaaacaacatttgaacattaccaaaactggatattaaatgagattctgcaacacttcttcacatctgcctcacaaaygtaggaacaagtacgatctaaatattaggagacaagtctagtctgccatcattaactcaaaataggaatcagctacacttggtagagaaaartctgtttgttaatggagatattagtttcagtttcaaagtctttgagaattaacattcacatgaactactgaaatgaaattcaaggctgtctgagaaaagataatttatcmgtcagatactaaaacaatgtactaaaatgcctgtatattgttacaatgtacagctagaaaggaaattgagaggttatttagttctcctgttcacttt

SEQ ID NO: 11969 - DNA, 600 bp, Chicken  19866894215275_2
gatggtgatgcaacctgtccaagagtgtgtaagagaaaaggaagtacggtaagatcatggcatttaggattaatagcaaagaaaccaaccccagtaaagataaaaatgttaaggtctactataagaataagaaaacaacatttgaacattaccaaaactggatattaaatgagattctgcaacacttcttcacatctgcctcacaaaygtaggaacaagtacgatctaaatattaggagacaagtctagtctgccatcattaactcaaaataggaatcagctacacttggtagagaaaartctgtttgttaatggagatattagtttcagtttcaaagtctttgagaattaacattcacatgaactactgaaatgaaattcaaggctgtctgagaaaagataatttatcmgtcagatactaaaacaatgtactaaaatgcctgtatattgttacaatgtacagctagaaaggaaattgagaggttatttagttctcctgttcactttgtggtagcacctactaaaaaaaaaggagatgttcccttccctgtttgtctagtcgcttcctaaaaatgaagaagatcccataactttgcaagg

SEQ ID NO: 11970 - DNA, 600 bp, Chicken  19866894215275_3
aaggtctactataagaataagaaaacaacatttgaacattaccaaaactggatattaaatgagattctgcaacacttcttcacatctgcctcacaaaygtaggaacaagtacgatctaaatattaggagacaagtctagtctgccatcattaactcaaaataggaatcagctacacttggtagagaaaartctgtttgttaatggagatattagtttcagtttcaaagtctttgagaattaacattcacatgaactactgaaatgaaattcaaggctgtctgagaaaagataatttatcmgtcagatactaaaacaatgtactaaaatgcctgtatattgttacaatgtacagctagaaaggaaattgagaggttatttagttctcctgttcactttgtggtagcacctactaaaaaaaaaggagatgttcccttccctgtttgtctagtcgcttcctaaaaatgaagaagatcccataactttgcaaggaagcaaaaaatgaagatttttattttggtgggtgaggatgataatttatcatcctcttgttttccagttttctcttttctcaattcagtaaactcaattccttcaacctc

SEQ ID NO: 11971 - DNA, 600 bp, Chicken  19866894215300_1
caactgtatcctggtttgcatcaagagaaacgggtcgagggagttgattctgccccactaacccacctggagtactgggcccagttctgggaaccccaacacaagaaggatactgagctattggagtgggcccagaggagagccacaaagatgaccagagggctgaagcacctcccctgtgaggacaggctgagagagttagggctcttcagcatggagaagagaaggctctggcgggaccttacagcagccttccagtacctgaggggacctacaggaaaactagggggggactttttmtaasggcttgtagtgacaggatgaggggaaatggttttaaactggaagagggtagatttagaccagatatcaggaagaaattccctactgtgagggtggcgagacactggaacaggttgctcagcgaggttgtggatgccccctccctggaagcactcaaggccagcctggatggggctttgagcagcctggtctagagggagatgtccctgcctattggagggcagttggaactagattatatcaaaggtcccttccaactcaaaccattctgtgattctataattctgtgactgtgtg

SEQ ID NO: 11972 - DNA, 600 bp, Chicken  19866894215300_2
tgtatcctggtttgcatcaagagaaacgggtcgagggagttgattctgccccactaacccacctggagtactgggcccagttctgggaaccccaacacaagaaggatactgagctattggagtgggcccagaggagagccacaaagatgaccagagggctgaagcacctcccctgtgaggacaggctgagagagttagggctcttcagcatggagaagagaaggctctggcgggaccttacagcagccttccagtacctgaggggacctacaggaaaactagggggggactttttmtaasggcttgtagtgacaggatgaggggaaatggttttaaactggaagagggtagatttagaccagatatcaggaagaaattccctactgtgagggtggcgagacactggaacaggttgctcagcgaggttgtggatgccccctccctggaagcactcaaggccagcctggatggggctttgagcagcctggtctagagggagatgtccctgcctattggagggcagttggaactagattatatcaaaggtcccttccaactcaaaccattctgtgattctataattctgtgactgtgtgtgct

SEQ ID NO: 11973 - DNA, 600 bp, Chicken  19866894215310_1
ttgtttgggacaaatcttccccacttgtctgcaccacatgcaaacaaagggaggaaatcagttttacatttatttgagcacaaacatacaacctaagtacagtgtacgttaaactcattgcaggctgctggagttcttctaggaaaaggaaaggacattaaatgcagatcttcagctcagtgtgaccaccacctagatgaaatgccttagcacacattcaaagatgcttcaaatgacacagggacccacaaccattaagttactcatctctaacttaaaaactttgctcctcttcacaarcaactctttctcaagcatgcactggctccagcatttaactgggtcattatgatgttgctattatttcttatcctacctccttgcacagacacagtcctctgccatgggatggggactgcttggagccaggctcagatggtgccaggtgagtgacaggatccagtgctagatgcccagtgccttgctccggattggcatcagttgggtgggttcaagggttgtgaaaatccatgaggaaagactgggttttatacctcgctgttccatgagacttaaacacatagaaagtgagacactcat

SEQ ID NO: 11974 - DNA, 600 bp, Chicken  19866894215316_1
cttggcaaggctggtggtgagcctctaatttgaagctgaagcttcttgtgttattgtcagtgacaaaactcccgttaagttcagagtgtgtaggattgcataggagaaagccagagtataaaagtacgtacgtgtttaacatctgattaatcacttaactcctttgcaccagcctatttaatccctttgaagccagattttactaacactgtcccaattaaacactggtcgttactattcactgtgacattataggagaagtcagtttcctgggaggcaacccattaaaacagcagcccyggtctgaaatgccccagttaaacagaggatcctttaatgataatttacatgtatttttgcgccttgcatctcaaattgctttttggagggaggcagttcagcaacacactgctgatagaagtgatgataagtagaaggtaaagtcttgtacagttagaccttccttttagaaagtcgtctggsttcttgagcgcttcccaatgacagcttgcatcatgaagtcttctgacaaaaagtttcctcataatctgcttactgtgtgagaaaggaaggctggggcagcctgtgcttttggccagc

SEQ ID NO: 11975 - DNA, 600 bp, Chicken  19866894215316_2
cctttgaagccagattttactaacactgtcccaattaaacactggtcgttactattcactgtgacattataggagaagtcagtttcctgggaggcaacccattaaaacagcagcccyggtctgaaatgccccagttaaacagaggatcctttaatgataatttacatgtatttttgcgccttgcatctcaaattgctttttggagggaggcagttcagcaacacactgctgatagaagtgatgataagtagaaggtaaagtcttgtacagttagaccttccttttagaaagtcgtctggsttcttgagcgcttcccaatgacagcttgcatcatgaagtcttctgacaaaaagtttcctcataatctgcttactgtgtgagaaaggaaggctggggcagcctgtgcttttggccagcagtatagttctgagctgcagtccaaaaattagctgtttgcattttttttgcatgtgtttgttttggaatatttgtgattcagtgccataagctgggtatccccagagcaacagcaaatcatcagcaagtgcttctgaaaatgttcgctttggcctttgctttctctttctgtgaaacaggcat

SEQ ID NO: 11976 - DNA, 600 bp, Chicken  19866894215316_3
tgcagcttggccacagcaacccgaggcaacactacaggcttggggcagagtggctggaagactgcgtaggggaaacagacctgggggtgtcggttgattcttggctgcgtatgagctagcagtgtgcccaggtggccaagaaagccagtggcattgtggcttgtgttgctagcaggtgcagggaagtaattgtccctctgtactcagccctggtgaggccacacctcaagtactgtgtccagttttgggtcctttgctacaagaaagacattgaggccctggagcatgtttagagaaggrcaacaaagctggtgaggggtctggagcacaggccttatggggagcagctgaaggagctgggattgttcagtctggaggctcaggggagacttcattgctctctataactacctgaatggaggttgtagtgagctgaggattggtctctctgtcatgtaactcgtgataggactagagggaatggtctcaagttgcaccagaggagattgaggctggacgttaggaaatactgcttctctgaaagggtggtcaggcactggaatgggctgcccagggaggtggtggagtcaccgaccctgg

SEQ ID NO: 11977 - DNA, 528 bp, Chicken  19866894215316_4
gttaagttagtttatggaatgtttggagcagcagtaaataatgcattttgaatggaattaggcctttcagtgacagatgatatgcttcttgactgtaatactactgagctccaaagtgaactgggtatagcaattaaggaaaactacaaatgattctttatctaaatgattttccaaaggttatcccttgttaagctgcatgcagtttcctttgcttcagagttgtccttgtatagtttgcaaatagtgtcagcactgaggcagtctggagagagacaaggtgggtaagagagagagacrggcaatcacagcgttatttatattggtcggtgttctgtggaatgtttgcacatggaaattaatactattgtaaatcattttataaatgtgtataatgccgagagtagtgctgggtgtgacagagagttaagtggtagaatagccccacaaaaatactttgtgacaagcggattttgcatgttaaaccattaacagctggctaacattaaatgcagcgtttagactttt

SEQ ID NO: 11978 - DNA, 600 bp, Chicken  19866894215324_1
cctgcacccagaactgacgtcatacaattccttgcggttgtctaccccggatatgtgggtaaaagcaacttcccccaaaccagttcctgttttgcttttccattttcattctttttaaggttctgcaaaacatgtgacatgctatgactcatatcttgatgaaatagcaaattcttagaggaattttccaaactattaacttcaatgccacttgctttggatttgaccatatgaatcacattccaaaatattgacagttactgatcctgagcctaggagacaatacagcagcaaaggatratccagcagccaccatgcaactactgccctgtatctggtgtggggacgtaacacacaaagacattgacaccctcattactcaaaaagatgaagcaaggaaagctttcagccataagagtggggtcaaaaggacaaggaagccttatgttctttcataccacatcagtagtctttcagaagaagcagaaggggaagattcctatgacctaaaccagcytggcaagtttcctcacacaggaaacccccgtattttgttgcatcccacagttttgacatgaatctagaaatgctgtgtttctt

SEQ ID NO: 11979 - DNA, 599 bp, Chicken  19866894215324_2
tggatttgaccatatgaatcacattccaaaatattgacagttactgatcctgagcctaggagacaatacagcagcaaaggatratccagcagccaccatgcaactactgccctgtatctggtgtggggacgtaacacacaaagacattgacaccctcattactcaaaaagatgaagcaaggaaagctttcagccataagagtggggtcaaaaggacaaggaagccttatgttctttcataccacatcagtagtctttcagaagaagcagaaggggaagattcctatgacctaaaccagcytggcaagtttcctcacacaggaaacccccgtattttgttgcatcccacagttttgacatgaatctagaaatgctgtgtttctttttacccagttattctcccatcagtacacttggccttgtatgtgaaaagcaacagtatgccttgaatgtctcttcttagaggatgcaaagggaggagggcaatcagtaatgggttttggtgtgacatttctaagatcttccagaggtgccaaagagaaaacatcccttaaatgtaagttgcttcaaatgttgcctctttaaagggtaatcccataa

SEQ ID NO: 11980 - DNA, 600 bp, Chicken  19866894215325_1
caccatttgataatagtacattgccatttggatttgtagtgctaattgtgtagtactagaagaaatattgcgtaatagtttatttctggttttgcttattcttgctgtgctcttgttcaaatgcattgctctctcctctttagagtgcacctggtgtgtagttgataataaccagtatgaagaagaattcagaggcttcctggaaactgtctacaaggcagaatgcttcttgcaggtaagtgcccgctatgtggaaatcaagggtttcatgaagttgttccttaaagttcatttgagacrcgtgcttcctgtagtgtaactgagaaatggcactgtctgaagtcacccaaagtctttagaaatacattttccagtagaaagccagtattctgtatataactgtgatttccacaggaatgataatgtgagtgtcctggagaattgcacgaagcaggtgcaaacctcttccttctccggggtgatctggaggtgaatttctgaatgctcaccttctgttttgtaggagggatttccttcctgtgaggagttcctgtacaggagtcttcctctctgggatggtgtttcctgccgatcgcaaat

SEQ ID NO: 11981 - DNA, 600 bp, Chicken  19866894215329_1
gattactgatctgatttagtctgtcaacctgtgcgtctccatgcagagattgcaagtctttcatggacaatctgccatggaagagaggagcttaaggcatgatttattctgtaacaacagcaataacaataactgagctgctgaatgtgggcagcatccagcacgggtgtaccgacatcactgctctgctgtaacacagcaatagcagaagatgcaattcaaaggggacaaatctgaatttctgccagtggccaaatttttccagcaaagagagtgtaaagaaagaatatggacattacyccacctgtgatggtttaaccagtaattggtgtgatgtatgttgggaaagcagagtttgaggctatgctccactgcagctttccattgcaagccctgccaagccacttagcttctccctctgtggtctctacagtgaggacagccccgtgtcaccttgcaaggatcactgcatgatctggaggctgctcaggtttcaaagaaatgagtatggtgaagagacagcaaataggctgtgcaccaaaacaagaattgcccccctgttcatcagtcatgagaatgggctgcaatcagatggtgaaa

SEQ ID NO: 11982 - DNA, 600 bp, Chicken  19866894215332_1
cagccaaataaaacaggtgtcctaatacatgcactcaacacctgttattttgcagagaaacataaccgcagacacagttcccatttgatttattaagattctcagtatgtacaaagcttttctgtactggacacccaaacagggccttgcaccaaaatgcatttctgatactgccctaaatacaagattcaaaacaattttcttttttgtcccttcccacacctgactgattcataagctttaaaatatcagttggttatgtatattataattgctgtgaaatctttttctttctttttwaaaatttctaagataaggtgcccagaatattaattcatgttaagtcatgaatttgccactatttcatggcatttacaattacttccatatctttttttttttttaataatttcagtaacatgattctataaacatagaaattttatttcattgactctatagactctttcagtatagtgctagattcctcactaaaacatccttcacatataatttatgtggagctgttggagagggtccagaggagggccatgaagatgatcagagggctggagcacaacccctatgaagacaggctga

SEQ ID NO: 11983 - DNA, 351 bp, Chicken  19866894215336_1
ggagcacaggggtacataaacacttctttaaattataaaacgtagtagttgaaagcatttctataacaaataaaatcatagtgttgaaaagaaatcaccattcaaagatagaggctggaaattagaggagatctgatcattaaattctttcacaatttcagtgacaaaatatttaaagacgcagtatcacatagtttagaactgcatttaagtttgttgacaaaaatgtttttgaacgcaaggactaattttaagcaaagaaagggaaatagccttacaaattaaatgaaatgcagatcytttcaaaagcactcttactttctcctttttaaactggattatacttttcaa

SEQ ID NO: 11984 - DNA, 600 bp, Chicken  19866894215339_1
taaaaaacacaggagcaagcaaacaggtaaagctacagagatccttgaaaaagcataataagagcactgcactgatttcaataggctctgagaaccaaacttgtattatgagcatggtgcatacaaacacgagccaaataatcgatttccccgtctccttttattcctgcccaagagctttcaacatcagtggtgaacattacatggccttgcaagtgaccgaacctcgaaatctgcttgtttctttctagatgctaattttttctcaaaacaaacaaatgcacatttcatcaacatccyacgaagactcatgctctcgaggtgaagtgataaagaaaaatattttgaatatgaagtgctgcacatttgcattaaaatagctatcctcttccagccgtactctgcttgctgcttttggatctttaaacaaagctccgctctgtgtttattttcatttgaagatggaggtaatgtgcaaaattcatcatgcttttatcactttattcaacctcatcctcccctccactctccctccaccttttcctttatcctcaaattcaagattgttttaatgttctgcacaatgtctgactgcagctg

SEQ ID NO: 11985 - DNA, 600 bp, Chicken  19866894215339_2
aaatattttgaatatgaagtgctgcacatttgcattaaaatagctatcctcttccagccgtactctgcttgctgcttttggatctttaaacaaagctccgctctgtgtttattttcatttgaagatggaggtaatgtgcaaaattcatcatgcttttatcactttattcaacctcatcctcccctccactctccctccaccttttcctttatcctcaaattcaagattgttttaatgttctgcacaatgtctgactgcagctgaacataatcaccatgacagaaggaattgatgaagaaygctgaagcycattttctcttaaaaaataaaataaaacactgccgtataataaattctgttataattccccacattgattattcctgcaaaatacaacatccttcaatattgaatgtggcttcaagattacacaagcattacaccaaatctaccacgcacttaaatgccttttaaaaccagccatagctacctgcctttcctacagccaacacgccaaactcgtgtcaatcctaaactagcatttatttgcctattacctctgttttacaacctacctccttcaatagaygcagaaaaagg

SEQ ID NO: 11986 - DNA, 600 bp, Chicken  19866894215339_3
gaatatgaagtgctgcacatttgcattaaaatagctatcctcttccagccgtactctgcttgctgcttttggatctttaaacaaagctccgctctgtgtttattttcatttgaagatggaggtaatgtgcaaaattcatcatgcttttatcactttattcaacctcatcctcccctccactctccctccaccttttcctttatcctcaaattcaagattgttttaatgttctgcacaatgtctgactgcagctgaacataatcaccatgacagaaggaattgatgaagaaygctgaagcycattttctcttaaaaaataaaataaaacactgccgtataataaattctgttataattccccacattgattattcctgcaaaatacaacatccttcaatattgaatgtggcttcaagattacacaagcattacaccaaatctaccacgcacttaaatgccttttaaaaccagccatagctacctgcctttcctacagccaacacgccaaactcgtgtcaatcctaaactagcatttatttgcctattacctctgttttacaacctacctccttcaatagaygcagaaaaaggaaagaaaaa

SEQ ID NO: 11987 - DNA, 398 bp, Chicken  19866894215339_4
tgatgaagaaygctgaagcycattttctcttaaaaaataaaataaaacactgccgtataataaattctgttataattccccacattgattattcctgcaaaatacaacatccttcaatattgaatgtggcttcaagattacacaagcattacaccaaatctaccacgcacttaaatgccttttaaaaccagccatagctacctgcctttcctacagccaacacgccaaactcgtgtcaatcctaaactagcatttatttgcctattacctctgttttacaacctacctccttcaatagaygcagaaaaaggaaagaaaaaaaaatagaggacaagaaacagaaaccagaatatactgaaggtttccaatgctaatctaggtttaaatttttatagcta

SEQ ID NO: 11988 - DNA, 600 bp, Chicken  19866894215342_1
agtcaatcattatgaaaacaagttaagaaaagaaagatgttacattaaatcagtgaaataaaatatttggagagcaaagcatttgcacttagccatcgtgtgttcctgattgagtctggtttgaaggcagtgtatcaccttctcaggcagcatttgtttcttttaatcactttcatgcttcatgtaatcaaaagcatctttttatttcttttcaagcaaaatgctcttatgggcattgtatttgctgcttctaatcaattatttagtgattgtaaaaatcagtgtcagtagctggaaatktacttcttaagtatttttcagataaacctctagttttcattacttcagtgaccagttctagaagtcttacaaacagctttagaggagagagacctaaaccatctctgaggtggtttgtgccagtcgagtttaataaaggtgtcattgttcttcaaggcaacacttctgatcctgacctacgtgggcaaaaatttagtgttttgtttaaaaactgctacagctaatccccttgtttactgtaaagacagctgcaagtaagtaaacagaaatgttttcagtcatgctgggaaaagattgctc

SEQ ID NO: 11989 - DNA, 600 bp, Chicken  19866894215342_2
gtaaatcattcttcttgcttttattcttcatgagtatgtgcttttgtttatataccttgttggagatcaagtgacttgcatatgaatgctgcttaatgctaggagaggtctggccttgagggaacatctttattttgtctcctgatctatgccagttcttatgcagccaactgcatggtgtttgggcaggggtctgcagggtgccctgcatgggggaggctaagagacacctgtgacactctcagatagttctgatgccaatgagaacaatcagtgggagcctcatccctgaaatatttwagaaagagcctcagctactgaagaaaggcgacttgtaagaagacggttcagaagtggaagaartacagaggggaccgttgctgggggcatggttggagagacgctctgggaagaaggtgctctgtggtagtagaggaactgagagactggctgtggggcacccacaccaagaggtgataccccaaggaggaggagaggtggtggattgatgttagtctggggaaarggcacaaaagatgctgccctaaatatttatttatttgtggtgctgttgaattccatctccagaaatggaatgtt

SEQ ID NO: 11990 - DNA, 600 bp, Chicken  19866894215342_3
agatcaagtgacttgcatatgaatgctgcttaatgctaggagaggtctggccttgagggaacatctttattttgtctcctgatctatgccagttcttatgcagccaactgcatggtgtttgggcaggggtctgcagggtgccctgcatgggggaggctaagagacacctgtgacactctcagatagttctgatgccaatgagaacaatcagtgggagcctcatccctgaaatatttwagaaagagcctcagctactgaagaaaggcgacttgtaagaagacggttcagaagtggaagaartacagaggggaccgttgctgggggcatggttggagagacgctctgggaagaaggtgctctgtggtagtagaggaactgagagactggctgtggggcacccacaccaagaggtgataccccaaggaggaggagaggtggtggattgatgttagtctggggaaarggcacaaaagatgctgccctaaatatttatttatttgtggtgctgttgaattccatctccagaaatggaatgttgtgcaacattccccccattttactactcctttcttgtctttcaccgctttgcttgtttcctat

SEQ ID NO: 11991 - DNA, 523 bp, Chicken  19866894215342_4
acacctgtgacactctcagatagttctgatgccaatgagaacaatcagtgggagcctcatccctgaaatatttwagaaagagcctcagctactgaagaaaggcgacttgtaagaagacggttcagaagtggaagaartacagaggggaccgttgctgggggcatggttggagagacgctctgggaagaaggtgctctgtggtagtagaggaactgagagactggctgtggggcacccacaccaagaggtgataccccaaggaggaggagaggtggtggattgatgttagtctggggaaarggcacaaaagatgctgccctaaatatttatttatttgtggtgctgttgaattccatctccagaaatggaatgttgtgcaacattccccccattttactactcctttcttgtctttcaccgctttgcttgtttcctatggcccttccttctttctctgtttctattctttaatagcagatcacttctccttgatctatagtggatatgtgccttcagttccctc

SEQ ID NO: 11992 - DNA, 599 bp, Chicken  19866894215343_1
  misc_feature (1)..(45): n is any nucleotide
nnnnnnnnnnnnnnnnnnnnnnnnnnnnnnnnnnnnnnnnnnnnnctcttgaaaatgagaaacataatggaggcaggccatgtgaatcttctctaggtagtgttttttgatttatttttgctactctgttcctaaatatatttacattgatttcggtaggatatgtgaagttttcagcccatcctctgtcttttcttataaccagcacaacccttgcagtcactggcacatctctcataaatctctctttatgccacaaattatactactggcatacatcccagttagcacaacttgcaraagtgttttgagccatggacagtmtgctgcaaggaggagttttgaaagyagacactggtgggcgtaaggagccatcgcagctactacaggtgaaagcagccatcagctgggatcacagggccctcttctatgctctgcatgaagtcacagttatgttcatatgtacttttgaccctctggcactggttgtacagcactatgtaatagctctacaaaaccarcttacacattgacaggaaatggccaaggtagcaagaatagttacagcaaacaatgtgcctggagagactcctgaactg

SEQ ID NO: 11993 - DNA, 599 bp, Chicken  19866894215343_2
  misc_feature (1)..(21): n is any nucleotide
nnnnnnnnnnnnnnnnnnnnnctcttgaaaatgagaaacataatggaggcaggccatgtgaatcttctctaggtagtgttttttgatttatttttgctactctgttcctaaatatatttacattgatttcggtaggatatgtgaagttttcagcccatcctctgtcttttcttataaccagcacaacccttgcagtcactggcacatctctcataaatctctctttatgccacaaattatactactggcatacatcccagttagcacaacttgcaraagtgttttgagccatggacagtmtgctgcaaggaggagttttgaaagyagacactggtgggcgtaaggagccatcgcagctactacaggtgaaagcagccatcagctgggatcacagggccctcttctatgctctgcatgaagtcacagttatgttcatatgtacttttgaccctctggcactggttgtacagcactatgtaatagctctacaaaaccarcttacacattgacaggaaatggccaaggtagcaagaatagttacagcaaacaatgtgcctggagagactcctgaactggtttcccctaagtttcagcagaaa

SEQ ID NO: 11994 - DNA, 600 bp, Chicken  19866894215343_3
tgaaaatgagaaacataatggaggcaggccatgtgaatcttctctaggtagtgttttttgatttatttttgctactctgttcctaaatatatttacattgatttcggtaggatatgtgaagttttcagcccatcctctgtcttttcttataaccagcacaacccttgcagtcactggcacatctctcataaatctctctttatgccacaaattatactactggcatacatcccagttagcacaacttgcaraagtgttttgagccatggacagtmtgctgcaaggaggagttttgaaagyagacactggtgggcgtaaggagccatcgcagctactacaggtgaaagcagccatcagctgggatcacagggccctcttctatgctctgcatgaagtcacagttatgttcatatgtacttttgaccctctggcactggttgtacagcactatgtaatagctctacaaaaccarcttacacattgacaggaaatggccaaggtagcaagaatagttacagcaaacaatgtgcctggagagactcctgaactggtttcccctaagtttcagcagaaaaaaataggcaagataaaaattgagag

SEQ ID NO: 11995 - DNA, 600 bp, Chicken  19866894215343_4
actggcacatctctcataaatctctctttatgccacaaattatactactggcatacatcccagttagcacaacttgcaraagtgttttgagccatggacagtmtgctgcaaggaggagttttgaaagyagacactggtgggcgtaaggagccatcgcagctactacaggtgaaagcagccatcagctgggatcacagggccctcttctatgctctgcatgaagtcacagttatgttcatatgtacttttgaccctctggcactggttgtacagcactatgtaatagctctacaaaaccarcttacacattgacaggaaatggccaaggtagcaagaatagttacagcaaacaatgtgcctggagagactcctgaactggtttcccctaagtttcagcagaaaaaaataggcaagataaaaattgagagatcattatccactgattcttcccagtcataataggctgcttagctttaccaggtcagaaggggcctagtatgacatatatatatattaaagaaagaaacatagatgaacatgtcaaagactgacaagaaaaaaaaaaaaaggaaaagaaaatacaattcttctgaccttaag

SEQ ID NO: 11996 - DNA, 401 bp, Chicken  19866894215356_1
tccgtgcttttgtgcgtctctgcagtagggattttccttctggactcacagaacgtctcataattatctaaaataggagttcagtttagtttgcaatttaaccaactgttttccataaaacagtttttggccatgcaatttgtgaaaggcagcaggtgggagactttcacccattattttagggggaggagaggagctgctgtgtttgcgtgtttgttttgctttgctttgctttagggaactaaattgaatgacaacgtttaaggctcactctgtattttgttataggatggtgccctyatacatggggctctgggcagcggacgtttctgttgttgggggtcctgctgccaccctcgaggtactgagccaaactgccaccttctgtgtgaaacgggagg

SEQ ID NO: 11997 - DNA, 600 bp, Chicken  19866894215364_1
gcacagggcttatgattaccgtgacacagggatgacatattcgtatagcctttctattatggtgccagatagtatttcagcgttagagagagatgaatcgtcggagagtattccatcgtagtttaagcctaagagggcaccatcctataacaaaatacagagtgagccttaaacgttgtcattcaatttagatccctaaagcaaagcaaagcaaaacaaacatgcaaacacagcagctcctctcctccccctaaaataatgggtgaaagtctcccacctgccgcctttcacaaattgcayggccgttttatggaaaacagtcagttamattgcaaactaaactgaactcctattttctataattatgagacgtactgtgagtccagaaggaaaatccctactgcagagacgcacaaaagcacggagcatttgtgctgctcttctcaagaggagcatttccaaaagagggcaccaggtacatgcttttaaactgcattcctactgctttcttgagcctatttccccctcctttccccacgacttcctccacaataggtacggaccaccctaaatggaaagtactcacattttggctgtygt

SEQ ID NO: 11998 - DNA, 600 bp, Chicken  19866894215364_2
gggatgacatattcgtatagcctttctattatggtgccagatagtatttcagcgttagagagagatgaatcgtcggagagtattccatcgtagtttaagcctaagagggcaccatcctataacaaaatacagagtgagccttaaacgttgtcattcaatttagatccctaaagcaaagcaaagcaaaacaaacatgcaaacacagcagctcctctcctccccctaaaataatgggtgaaagtctcccacctgccgcctttcacaaattgcayggccgttttatggaaaacagtcagttamattgcaaactaaactgaactcctattttctataattatgagacgtactgtgagtccagaaggaaaatccctactgcagagacgcacaaaagcacggagcatttgtgctgctcttctcaagaggagcatttccaaaagagggcaccaggtacatgcttttaaactgcattcctactgctttcttgagcctatttccccctcctttccccacgacttcctccacaataggtacggaccaccctaaatggaaagtactcacattttggctgtygtatgttgtgcttttcgacaccaaaacctg

SEQ ID NO: 11999 - DNA, 600 bp, Chicken  19866894215364_3
ayggccgttttatggaaaacagtcagttamattgcaaactaaactgaactcctattttctataattatgagacgtactgtgagtccagaaggaaaatccctactgcagagacgcacaaaagcacggagcatttgtgctgctcttctcaagaggagcatttccaaaagagggcaccaggtacatgcttttaaactgcattcctactgctttcttgagcctatttccccctcctttccccacgacttcctccacaataggtacggaccaccctaaatggaaagtactcacattttggctgtygtatgttgtgcttttcgacaccaaaacctgcctttcctttgtgctggaataatctcctttttattacaattggcygtgtgacagggagtcattgctatttcaccgtgttactgcattcacacccacagctgagcagcatagatatggctttactgttgggttcctgactgctcagccagttttgttctccctggcttctccctgactcagaagagtcatagacatgttagagcttagagttccttttttttcctgtactgtagggcttggcctccagttttggctttgtttatatcacaa

SEQ ID NO: 12000 - DNA, 600 bp, Chicken  19866894215364_4
actgtgagtccagaaggaaaatccctactgcagagacgcacaaaagcacggagcatttgtgctgctcttctcaagaggagcatttccaaaagagggcaccaggtacatgcttttaaactgcattcctactgctttcttgagcctatttccccctcctttccccacgacttcctccacaataggtacggaccaccctaaatggaaagtactcacattttggctgtygtatgttgtgcttttcgacaccaaaacctgcctttcctttgtgctggaataatctcctttttattacaattggcygtgtgacagggagtcattgctatttcaccgtgttactgcattcacacccacagctgagcagcatagatatggctttactgttgggttcctgactgctcagccagttttgttctccctggcttctccctgactcagaagagtcatagacatgttagagcttagagttccttttttttcctgtactgtagggcttggcctccagttttggctttgtttatatcacaaggtrtcagatagcaaattaagttcaaggcagtgcagctgatgcactgggacagcagcaacattccttatggttgc

SEQ ID NO: 12001 - DNA, 600 bp, Chicken  19866894215364_5
gttgtgcttttcgacaccaaaacctgcctttcctttgtgctggaataatctcctttttattacaattggcygtgtgacagggagtcattgctatttcaccgtgttactgcattcacacccacagctgagcagcatagatatggctttactgttgggttcctgactgctcagccagttttgttctccctggcttctccctgactcagaagagtcatagacatgttagagcttagagttccttttttttcctgtactgtagggcttggcctccagttttggctttgtttatatcacaaggtrtcagatagcaaattaagttcaaggcagtgcagctgatgcactgggacagcagcaacattccttatggttgctagccaacctaggaaaagttaccctctcctgtgcagatcctayacagccttcccacaacccctaaggcctcttccaagagtttggaactcaagcccagcctcttccaaatgctgaaagaaaaaacaacagctgttaaatttcctttatgtttcttgcatcttatagtacatatggtttagaaaacactacgacaagcttaatatggaatggtcttcctagcctcaagca

SEQ ID NO: 12002 - DNA, 600 bp, Chicken  19866894215364_6
acacccacagctgagcagcatagatatggctttactgttgggttcctgactgctcagccagttttgttctccctggcttctccctgactcagaagagtcatagacatgttagagcttagagttccttttttttcctgtactgtagggcttggcctccagttttggctttgtttatatcacaaggtrtcagatagcaaattaagttcaaggcagtgcagctgatgcactgggacagcagcaacattccttatggttgctagccaacctaggaaaagttaccctctcctgtgcagatcctayacagccttcccacaacccctaaggcctcttccaagagtttggaactcaagcccagcctcttccaaatgctgaaagaaaaaacaacagctgttaaatttcctttatgtttcttgcatcttatagtacatatggtttagaaaacactacgacaagcttaatatggaatggtcttcctagcctcaagcagcagaagtaacttctcccagttaggcagggaattatccatttttcctatataagaaaaacaagaatgtttgcatggtaacagaatgtttacaatctgacatccacatccactgt

SEQ ID NO: 12003 - DNA, 600 bp, Chicken  19866894215367_1
cagcgtgtgcccagtgcctctggtcctgctgctgggcaccgctgggggcagcccggctccgtcctctctgcacctccctgcaggggctgatggccgtgcctgggatccccctgagcctcctcttctgcaggccaagccgccccagctctcccagaatcccaccccaaccatttcccacgcagcgctgaggaggggaggggatgtgggggggaaggatggggctggtggttgcagtcctatgacgctgccattggtgctgccccgtccttacccagaggtgggcacagggatggggggggrgagtgggagggtctttggagctgcagaaacaactgcaggcagaaatgtagaaaaacaaacgctcaacatttaatcatttcacataaagagcaataagcagagaaatgtccatattcccaaccagtttccatcctaacaatcgctcccccctcacagctcccctcctcggggccaacacgaagcggctccgtgtcggcttcacgcagctccgggagctccgcacggggacagaccgggataaggaaaacgggagttggggactccacctgcggggcaggagctcagcacgcgctgctgccg

SEQ ID NO: 12004 - DNA, 599 bp, Chicken  19866894215370_1
  misc_feature (1)..(36): n is any nucleotide
nnnnnnnnnnnnnnnnnnnnnnnnnnnnnnnnnnnnctgactacaaagccttcagagcagtcactgacagacacaaagcttgcagatatccccccacccagtgacgtgctgtgagctgatgtctctgggcccagtgcacagcagccttttcttcagtgccctaatgcctcctcacagcaaacctctgctgccaaagcatcctttggccaaggaaactgtgccataaagcacaatgctttctgatctgactgtatccacaaagcataaagacagaccgtgccttcctcctaagtaccaccrcttctacacagactcytccactttcgtgcttctttctcgtttgtgttatctgactgctgtttgaaccckgtggatttacagtggatgtggatgtcagattgtaaacattctgttaccatgcaaacattcttgtttttcttatataggaaaaatggctaattccctgcctaactgggagaagttacttctgctgcttgaggctaggaagaccattccatattaagcttgtcgtagtgttttctaaaccatatgtactgtaagatgcaagaaacataaaggaaatttaacagttgttgttt

SEQ ID NO: 12005 - DNA, 599 bp, Chicken  19866894215370_2
  misc_feature (1)..(20): n is any nucleotide
nnnnnnnnnnnnnnnnnnnnctgactacaaagccttcagagcagtcactgacagacacaaagcttgcagatatccccccacccagtgacgtgctgtgagctgatgtctctgggcccagtgcacagcagccttttcttcagtgccctaatgcctcctcacagcaaacctctgctgccaaagcatcctttggccaaggaaactgtgccataaagcacaatgctttctgatctgactgtatccacaaagcataaagacagaccgtgccttcctcctaagtaccaccrcttctacacagactcytccactttcgtgcttctttctcgtttgtgttatctgactgctgtttgaaccckgtggatttacagtggatgtggatgtcagattgtaaacattctgttaccatgcaaacattcttgtttttcttatataggaaaaatggctaattccctgcctaactgggagaagttacttctgctgcttgaggctaggaagaccattccatattaagcttgtcgtagtgttttctaaaccatatgtactgtaagatgcaagaaacataaaggaaatttaacagttgttgttttttctttcagcatttg

SEQ ID NO: 12006 - DNA, 600 bp, Chicken  19866894215370_3
gacacaaagcttgcagatatccccccacccagtgacgtgctgtgagctgatgtctctgggcccagtgcacagcagccttttcttcagtgccctaatgcctcctcacagcaaacctctgctgccaaagcatcctttggccaaggaaactgtgccataaagcacaatgctttctgatctgactgtatccacaaagcataaagacagaccgtgccttcctcctaagtaccaccrcttctacacagactcytccactttcgtgcttctttctcgtttgtgttatctgactgctgtttgaaccckgtggatttacagtggatgtggatgtcagattgtaaacattctgttaccatgcaaacattcttgtttttcttatataggaaaaatggctaattccctgcctaactgggagaagttacttctgctgcttgaggctaggaagaccattccatattaagcttgtcgtagtgttttctaaaccatatgtactgtaagatgcaagaaacataaaggaaatttaacagttgttgttttttctttcagcatttggaagaggctgggcttgagttccaaactcttggaagaggccttaggggttgtggg

SEQ ID NO: 12007 - DNA, 519 bp, Chicken  19866894215370_4
gaagaccattccatattaagcttgtcgtagtgttttctaaaccatatgtactgtaagatgcaagaaacataaaggaaatttaacagttgttgttttttctttcagcatttggaagaggctgggcttgagttccaaactcttggaagaggccttaggggttgtgggaaggctgtgtaggatctgcacaggagagggtaacttttcccaggttggctagcaaccataaggaatgttgctgctgtcccagtgcatcagctgcactgccttgaacttgatttgctatctgataccttgggatayaaacaaagccaaaactggaggccaagccctacagcacaggaaaaaaaaaggaactctaagctctaacatgcctatgactcttctgagtcagggagaagccagggagaacaaaactggctgagcagtcaggaacccaacagtaaagccctatctatgctgctcagctgtgggtgtgaatgcagtaacgcagtgaaatagcaatactccctgtcacacggc

SEQ ID NO: 12008 - DNA, 599 bp, Chicken  19866894215374_1
  misc_feature (1)..(70): n is any nucleotide
nnnnnnnnnnnnnnnnnnnnnnnnnnnnnnnnnnnnnnnnnnnnnnnnnnnnnnnnnnnnnnnnnnnnnnttccctctgtccttgctcctcttcagctggctattaattctccccgtgacggctcctattgtgccattctttcttccccgcatcctcacttttccttcgtctgcgtctgcactcctcttccactgttctttcttctgtgtctcctcagtcctctttcttcggcatctgcactccttttctcctgttctttcttctctgtatcctcactcctatttcttctgcctctgctytcctctctgctcttctttattccctgtattctcacttatctatcttctgcatctgttccccttctcctgttttttcccctgtatcctcacttctttcttctgaccgctctccttttctgctcttctttgctccctrtatcatctcaycttctgcatctgtactmttctgctgttcattttttccctgtatctttcccctcttcccacctcctgtacttctgccatacctctttctctcttctcctcctaagctcctctccgcttctgcttttctgtctcatctgtatccactcatcgtt

SEQ ID NO: 12009 - DNA, 600 bp, Chicken  19866894215374_2
ttctttcttccccgcatcctcacttttccttcgtctgcgtctgcactcctcttccactgttctttcttctgtgtctcctcagtcctctttcttcggcatctgcactccttttctcctgttctttcttctctgtatcctcactcctatttcttctgcctctgctytcctctctgctcttctttattccctgtattctcacttatctatcttctgcatctgttccccttctcctgttttttcccctgtatcctcacttctttcttctgaccgctctccttttctgctcttctttgctccctrtatcatctcaycttctgcatctgtactmttctgctgttcattttttccctgtatctttcccctcttcccacctcctgtacttctgccatacctctttctctcttctcctcctaagctcctctccgcttctgcttttctgtctcatctgtatccactcatcgtttttttcagcttttcttcccacccgcttgtttttcttaccttcatcctctttttcttctcttcctcttctgctcttgtttcttccctgtgtctgttcttctctcyttctgctcttatccttcccagcatctgtcatag

SEQ ID NO: 12010 - DNA, 600 bp, Chicken  19866894215374_3
ccgcatcctcacttttccttcgtctgcgtctgcactcctcttccactgttctttcttctgtgtctcctcagtcctctttcttcggcatctgcactccttttctcctgttctttcttctctgtatcctcactcctatttcttctgcctctgctytcctctctgctcttctttattccctgtattctcacttatctatcttctgcatctgttccccttctcctgttttttcccctgtatcctcacttctttcttctgaccgctctccttttctgctcttctttgctccctrtatcatctcaycttctgcatctgtactmttctgctgttcattttttccctgtatctttcccctcttcccacctcctgtacttctgccatacctctttctctcttctcctcctaagctcctctccgcttctgcttttctgtctcatctgtatccactcatcgtttttttcagcttttcttcccacccgcttgtttttcttaccttcatcctctttttcttctcttcctcttctgctcttgtttcttccctgtgtctgttcttctctcyttctgctcttatccttcccagcatctgtcatagctttatcctct

SEQ ID NO: 12011 - DNA, 600 bp, Chicken  19866894215374_4
cttcgtctgcgtctgcactcctcttccactgttctttcttctgtgtctcctcagtcctctttcttcggcatctgcactccttttctcctgttctttcttctctgtatcctcactcctatttcttctgcctctgctytcctctctgctcttctttattccctgtattctcacttatctatcttctgcatctgttccccttctcctgttttttcccctgtatcctcacttctttcttctgaccgctctccttttctgctcttctttgctccctrtatcatctcaycttctgcatctgtactmttctgctgttcattttttccctgtatctttcccctcttcccacctcctgtacttctgccatacctctttctctcttctcctcctaagctcctctccgcttctgcttttctgtctcatctgtatccactcatcgtttttttcagcttttcttcccacccgcttgtttttcttaccttcatcctctttttcttctcttcctcttctgctcttgtttcttccctgtgtctgttcttctctcyttctgctcttatccttcccagcatctgtcatagctttatcctctcttctcttctgctcatc

SEQ ID NO: 12012 - DNA, 600 bp, Chicken  19866894215374_5
ccgctctccttttctgctcttctttgctccctrtatcatctcaycttctgcatctgtactmttctgctgttcattttttccctgtatctttcccctcttcccacctcctgtacttctgccatacctctttctctcttctcctcctaagctcctctccgcttctgcttttctgtctcatctgtatccactcatcgtttttttcagcttttcttcccacccgcttgtttttcttaccttcatcctctttttcttctcttcctcttctgctcttgtttcttccctgtgtctgttcttctctcyttctgctcttatccttcccagcatctgtcatagctttatcctctcttctcttctgctcatctcctcttctgctgtcttgcctgtatcagatcctttcctctgttgctcttttcatcttctgcacttcttccttacctgtatccttccttcttctcttctactcttgttttaccagcatgctttttcctcctctccagctctccaatctgttcctgctcatctctcttaatttcatcctcagttctgctcttctctcytacctgtatccactcatcataggccaagggaagaaaggtgctt

SEQ ID NO: 12013 - DNA, 600 bp, Chicken  19866894215374_6
cctcttctgctcttgtttcttccctgtgtctgttcttctctcyttctgctcttatccttcccagcatctgtcatagctttatcctctcttctcttctgctcatctcctcttctgctgtcttgcctgtatcagatcctttcctctgttgctcttttcatcttctgcacttcttccttacctgtatccttccttcttctcttctactcttgttttaccagcatgctttttcctcctctccagctctccaatctgttcctgctcatctctcttaatttcatcctcagttctgctcttctctcytacctgtatccactcatcataggccaagggaagaaaggtgcttgcaaagcaaaggcaggcaggtgcttgcttagcaacggcaggtaagggtgtgcttgaaaaaggtctgacttgaagcgagggtgcagagcagatttaacctctgcaggcgtgtatgccagagcatgaagcatcgtcaacgagcacggggtagcaccagcttgacataggggaagcttccacagagcccccagatggagtcccagggtgatgagatgaagctgattttggcagcattaacggtggttttccaggatctgt

SEQ ID NO: 12014 - DNA, 520 bp, Chicken  19866894215375_1
ttctgcatctgttccccttctcctgttttttcccctgtatcctcacttctttcttctgaccgctctccttttctgctcttctttgctccctgtatcatctcatcttctgcatctgtactcttctgctgttcattttttccctgtatctttcccctcttcccacctcctgtacttctgccatacctcttttctctcttctgctcttaagctcctctccgcttctgcttttctgtctcatctgtatccactcatctttttttcagcttttcttcccacccgcttgtttttcttaccttcatyctctttttcttctcytcctcttctgctcttgtttcttccctgtgtctgttcttctctccttctgctcttatctttctcagcatctgtcatagctttatcctctcttctcctcttctgctcatctcctcttctgctgtcttgcctgtatcagatcctttcctctggttgctcttttcatcttctgcacttcttccttacctgcatccttcctacttctctt

SEQ ID NO: 12015 - DNA, 505 bp, Chicken  19866894215375_2
ccttctcctgttttttcccctgtatcctcacttctttcttctgaccgctctccttttctgctcttctttgctccctgtatcatctcatcttctgcatctgtactcttctgctgttcattttttccctgtatctttcccctcttcccacctcctgtacttctgccatacctcttttctctcttctgctcttaagctcctctccgcttctgcttttctgtctcatctgtatccactcatctttttttcagcttttcttcccacccgcttgtttttcttaccttcatyctctttttcttctcytcctcttctgctcttgtttcttccctgtgtctgttcttctctccttctgctcttatctttctcagcatctgtcatagctttatcctctcttctcctcttctgctcatctcctcttctgctgtcttgcctgtatcagatcctttcctctggttgctcttttcatcttctgcacttcttccttacctgcatccttcctacttctctt

SEQ ID NO: 12016 - DNA, 555 bp, Chicken  19866894215379_1
gaagaaaaggaaaagaggagcaatgggcaggggaggactgagaggagggaacagcagagcacagaagtgcagaagaaggaagaagagaaataacggcgccgagaaaagggagagaagagtatggaaaagaaataaagtagaggagaggaagacagcagagaggtgaagttagaaaagacagaagagggcaaaggagggaaggggcatcagggaagggattccaaaggtagaaaggaagagaaataaagacgacaggagtccaacagtaggagaacaggacatgtaagaactgggaaggcrtgtggagagagcagagagagaaggtgagaacaaattaagtcactaagaagaaaaaggaatgggaataatttttaatctctattaaagctggattctgttcaggacatgcagttgggtgctgttctgctcctttctttccttgttttttgcattgcttgtattcttttagacaattgaacaacattcaggaacattttcagagctttgtaacgtctccttaatctcagctgcactgaaacacctgactgatgtcaa

SEQ ID NO: 12017 - DNA, 600 bp, Chicken  19866894215381_1
taggaggaaggcacggtctgtctttatgctttgtggatacaatcagatcagaaagcattgtgctttatggcacagtttccttggccaaaggatgctttggcagcagaggtttgctgtgaggaggcattagagcactgaagaaaaggctgctgtgcactgggcccagagacatcagctcacagcacgtcactggtgatggatatctgcaagctttgtgtctgtcagtgactgctctgaaggctttgtagtcagctgtccgtggctgttttgctttttagggtgtaggaagagatgacaacrcaccaattggagtgatggtgtcctrctcggaaatggatgtgctggatggcagaagaggattcttggccaagtatggaatcatctctgttccttcacaaaggtaaatttttaaaaggtaaacacacagaggtggatttgcaggatgccttgaaggaggtgaccctcacttgacatcagtcaggtatttcagtgcagctgagattaaggagacgttacaaagctctgaaaatgttcctgaatgttgttcaattgtctaaaagaatacaagcaatgcaaaaaacaaggaargaaaggagcaga

SEQ ID NO: 12018 - DNA, 600 bp, Chicken  19866894215381_2
atgctttgtggatacaatcagatcagaaagcattgtgctttatggcacagtttccttggccaaaggatgctttggcagcagaggtttgctgtgaggaggcattagagcactgaagaaaaggctgctgtgcactgggcccagagacatcagctcacagcacgtcactggtgatggatatctgcaagctttgtgtctgtcagtgactgctctgaaggctttgtagtcagctgtccgtggctgttttgctttttagggtgtaggaagagatgacaacrcaccaattggagtgatggtgtcctrctcggaaatggatgtgctggatggcagaagaggattcttggccaagtatggaatcatctctgttccttcacaaaggtaaatttttaaaaggtaaacacacagaggtggatttgcaggatgccttgaaggaggtgaccctcacttgacatcagtcaggtatttcagtgcagctgagattaaggagacgttacaaagctctgaaaatgttcctgaatgttgttcaattgtctaaaagaatacaagcaatgcaaaaaacaaggaargaaaggagcagaacagcaccaactgcatgtcctgaac

SEQ ID NO: 12019 - DNA, 600 bp, Chicken  19866894215381_3
gagatgacaacrcaccaattggagtgatggtgtcctrctcggaaatggatgtgctggatggcagaagaggattcttggccaagtatggaatcatctctgttccttcacaaaggtaaatttttaaaaggtaaacacacagaggtggatttgcaggatgccttgaaggaggtgaccctcacttgacatcagtcaggtatttcagtgcagctgagattaaggagacgttacaaagctctgaaaatgttcctgaatgttgttcaattgtctaaaagaatacaagcaatgcaaaaaacaaggaargaaaggagcagaacagcaccaactgcatgtcctgaacagaatccagctttaatagagattaaaaattattcccattcctttttcttcttagtgacttaatttgttctcaccttctctctctgctctctccacacgccttcccagttcttacatgtcctgttctcctactgttggactcctgtcgtctttatttctcttcctttctacctttggaatcccttccctgatgccccttccctcctttgcctcttctgtcttttctaacttcacctctctgctgtcttcctctcctctacttta

SEQ ID NO: 12020 - DNA, 600 bp, Chicken  19866894215384_1
tgctgggtcatcttccctctgtccttgctcctcttcagctggctgttaattctccccgtgacggctcctattgtgccattctttcttccccgcatcctcacttttccttcatctgcgtctgcactcctcttccttcttctgtgaagaagattcctcttctttcttctgtgtctcctcagtcctctttcttctgcatctgcactccttttctcctgttctttcttctctgtatcctcactcctatttcctctgcctctgctctcctctctgctcttctttattccctgtattctcacttayctatcttctgcatctgtgtccccttctcctgtttttttcccctgtatcctcacttctttcttctgaccgctctcctttcctgctcttctttgctccctgtatcatctcatcttctgcatctgtactcttctgctgttcattttttccctgtatctttcccctcttcccacctcctgtacttctgccatacctcttttctctcttctcctcttaagctcctctccgcttctgcttttctgtctcatctgtatccactcatctttttttcagcttttcttcccacccgcttgtttttcttac

SEQ ID NO: 12021 - DNA, 600 bp, Chicken  19866894215385_1
tgggatatgaccatctacgtacatagctgtaccaaaccctaaccaaaaaccagtgctaacacctatttttctttcatgtcaagccaaacctcaatgcagactgaagtgaccacctcccttccctaagaagtccggttaacgatcagagaatcacagaatcatacaacaccctgaactggaagatacccacaaggatcactgagtccagctcctgggttcacacacgatcaccccaaatccaaaccctatgtctgagagtactgaccaaatgctccttgaactccagcagcccggggccaygatcactgccctaagtaacaaaaataagccagagcaacataacgagcacggccaggatgtcccaaattttatgagactcgcagcacagcgttatggatttgaaaatactatgctcacaaaggaaacactggactagaaagaatcacctagatattaaattctcattcatgatagcactagtttattcccaaagcacccattttacccaactgactctccaaatcctgggaaaccagaaaggttctggttgatgctgccaaacaagtgactggcgtgcacctarcccagcacagcatttgg

SEQ ID NO: 12022 - DNA, 600 bp, Chicken  19866894215385_2
cagcagcccggggccaygatcactgccctaagtaacaaaaataagccagagcaacataacgagcacggccaggatgtcccaaattttatgagactcgcagcacagcgttatggatttgaaaatactatgctcacaaaggaaacactggactagaaagaatcacctagatattaaattctcattcatgatagcactagtttattcccaaagcacccattttacccaactgactctccaaatcctgggaaaccagaaaggttctggttgatgctgccaaacaagtgactggcgtgcacctarcccagcacagcatttggtcagtgcatccagaaacaaggaaaaaggaaggcataagggtaggcaaaaaaaagtatttttgtcaagcaggcagccaggcagaatatggtcagcacaccattcatgcccttgcattgcaagcagcaaagaaaacagctcatttccagcctcaggttacatggtgtagtaaacacagtatgtgtgagtaaaacaaggaacttgtctttgcacgtcgacagaagtcagcctcttatcctccagtttttaggtttgaccatgcttggaagtcacacaaaaacagca

SEQ ID NO: 12023 - DNA, 584 bp, Chicken  19866894215387_1
tggggcgcagcaagccagggtttgctctccacagtctcacaagaagtgaaatgttttcatcagcaaaattgagatggttgaaaaacctgtccaggtgtgtgacagaaaaaagattaagctgccagttttcacaaaagctaccagagctgttccaacagtaatgcctccccttctattatgttggaccatgaaatcagtggtggatgttggtggttcggcagtagaggttgaaccttcctgccagtattccattacattttgttaccatgtgacagatgacagcagaggagtagtcagccmtaatggcatctgacatggaagtacatctgaagcaaaggtgtgtcattgtattcctccatgtagaaaaatggcacccattgacattcactgacacttggtgaatgtttctggagaccaaacggtgagtatgagcacattgaggcggtgggtggtgcatttcagcagtggtgacagtgacatgaaagaaaggcacattctggatggccatgcatatctgtcacaccacgaaatgaagagcatttccatcagctcatccaggtccattggcagattatgatcaggga

SEQ ID NO: 12024 - DNA, 600 bp, Chicken  19866894215389_1
gcctgtgtgagttatgaaggtatccttagcagctaaagaaaatacaacgttggatatgcaatcatgagacttttgtgttctcaattagcatgattccttagtgtttttttttattttgtttttttttccttttaagtaatgtatttgctgtcttgataactatgttggcttgaagaagacaacttgagattcgtggcaaagctagtgaaggagcacttgctatctgtatctctaacagaaatgctggttgtttaaaatggcctttcaagctcagccactctgaggtcttgtgaaaaacartatgcttggtgcaaggcaaaaaatcactttcttgcaaaaatatactctgtgtactgtacggtactgagtagatgaataaaagatgaaatttgttgtggaaggttaagggtaatttcagttcctgaaagttttcaaagttagtttaaatggaattcactgtttcttttctctcttttgatcaatgaaacccttttcagtcacttactttgacatcatttactttatctccttcatcctttgcattgtccttcactccttctaagccacaatgaactactcaattatgaactggaggtaacg

SEQ ID NO: 12025 - DNA, 600 bp, Chicken  19866894215394_1
atacaaggattcacacctcagctgtatgcacatatggaacaacgtattaggaagtctacagctcactcctccctgtacctgaagactaaaccgaaggacattcaggagttaaaacaagccatgtcagaatcaaaataaggtatttttaagaaaggaagaactgctctacaaggtaaaaaaaaaaaaaaattcaacagaaacactagtcatcactatcacctaaatcccatgaactggaagcactgagaagtgatggtatagagaacagttcagaaagatacaactgacagtcttttctayasagcaagattcaattactttggactttagataccatttgatataacccctctacctttggggataaatcatcttccacaacatctgtggcttacagcacatctggagtttccctcagtatgagaactaaataaatcaacatgacagaagagaggtgtttgcttggaggttcttgtttcttgttatgttaaaayatacagatacattataaagcccaagagaagtgtcctgaagtgcctcacctgagtagttgctagtccattactaatgttgaatccattgatggttatctgaatttgt

SEQ ID NO: 12026 - DNA, 600 bp, Chicken  19866894215394_2
acaaggattcacacctcagctgtatgcacatatggaacaacgtattaggaagtctacagctcactcctccctgtacctgaagactaaaccgaaggacattcaggagttaaaacaagccatgtcagaatcaaaataaggtatttttaagaaaggaagaactgctctacaaggtaaaaaaaaaaaaaaattcaacagaaacactagtcatcactatcacctaaatcccatgaactggaagcactgagaagtgatggtatagagaacagttcagaaagatacaactgacagtcttttctayasagcaagattcaattactttggactttagataccatttgatataacccctctacctttggggataaatcatcttccacaacatctgtggcttacagcacatctggagtttccctcagtatgagaactaaataaatcaacatgacagaagagaggtgtttgcttggaggttcttgtttcttgttatgttaaaayatacagatacattataaagcccaagagaagtgtcctgaagtgcctcacctgagtagttgctagtccattactaatgttgaatccattgatggttatctgaatttgtcc

SEQ ID NO: 12027 - DNA, 600 bp, Chicken  19866894215394_3
cagaaacactagtcatcactatcacctaaatcccatgaactggaagcactgagaagtgatggtatagagaacagttcagaaagatacaactgacagtcttttctayasagcaagattcaattactttggactttagataccatttgatataacccctctacctttggggataaatcatcttccacaacatctgtggcttacagcacatctggagtttccctcagtatgagaactaaataaatcaacatgacagaagagaggtgtttgcttggaggttcttgtttcttgttatgttaaaayatacagatacattataaagcccaagagaagtgtcctgaagtgcctcacctgagtagttgctagtccattactaatgttgaatccattgatggttatctgaatttgtccacgattaatcatctcaatcacagcttctgcaattgtgttcatwggaatgactggcatactgagggcagcattgctgtctgcactgtctccactatcagggcacttcatctatgtgagaaatcccagaaagtcagagaaagcaatagcttaaatgcttaagacagaacacacaaaggtgtagcactcacctta

SEQ ID NO: 12028 - DNA, 600 bp, Chicken  19866894215394_4
acccctctacctttggggataaatcatcttccacaacatctgtggcttacagcacatctggagtttccctcagtatgagaactaaataaatcaacatgacagaagagaggtgtttgcttggaggttcttgtttcttgttatgttaaaayatacagatacattataaagcccaagagaagtgtcctgaagtgcctcacctgagtagttgctagtccattactaatgttgaatccattgatggttatctgaatttgtccacgattaatcatctcaatcacagcttctgcaattgtgttcatwggaatgactggcatactgagggcagcattgctgtctgcactgtctccactatcagggcacttcatctatgtgagaaatcccagaaagtcagagaaagcaatagcttaaatgcttaagacagaacacacaaaggtgtagcactcaccttaactatcttgacatcggggaggctgtccaagaaagccttcaagtcaatgccattcaaaacaattctgttatcataaatgtgaccattggatttgaaatcaatgactgcttttttctggaaataaagagaagcacaccacagtcgtttacaag

SEQ ID NO: 12029 - DNA, 600 bp, Chicken  19866894215395_1
gaaagacatggacttgttagactgggtccaaaggaggaccagtgaactggaacacctttcatacaaagacaggctgaaaaagttggggttatttagcttgcagaaggcgatgagaagaccttatagtggactgccagtacctaaagggaatcaaggggacaaaggttaaaggtttcaagctaagagagggtagttttagatcaagcattaagaagagtttctttgctatgagagtggtgaggcaccatttgcccagattagctgtggatgccccatcccaggtagtgttcaaggccagaytgaatgaagttctggagaacctgacctagcggttggcaatcctgcccacagcgagaggctgggaaagaaattatctttaatgtccacattgttaatgtgtttaacaatattggtcctactatcaacaaccactggagtacactattamatgggcttagtcttagcctggtgcaactgatcacaagctttcgggctcagccattccaccagttttcagtccacctcactgtcgacttatctaaccaatgcttcttaacaggtgccctgccccattcagcagcaggctgaatgggtgagctg

SEQ ID NO: 12030 - DNA, 584 bp, Chicken  19866894215395_2
aatcaaggggacaaaggttaaaggtttcaagctaagagagggtagttttagatcaagcattaagaagagtttctttgctatgagagtggtgaggcaccatttgcccagattagctgtggatgccccatcccaggtagtgttcaaggccagaytgaatgaagttctggagaacctgacctagcggttggcaatcctgcccacagcgagaggctgggaaagaaattatctttaatgtccacattgttaatgtgtttaacaatattggtcctactatcaacaaccactggagtacactattamatgggcttagtcttagcctggtgcaactgatcacaagctttcgggctcagccattccaccagttttcagtccacctcactgtcgacttatctaaccaatgcttcttaacaggtgccctgccccattcagcagcaggctgaatgggtgagctgaattaacactccggttttctatcacttcggtgtgttagtgaacattgactgtgtgtatagttacataggaaagtgactagaaatatctgtcttaacactgtggactgtggaatgcagaacaacttgtctctg

SEQ ID NO: 12031 - DNA, 600 bp, Chicken  19866894215396_1
cacagctgatgtccatgttagaaaaatgaagaaagcctgaccctgttgcacggatatgctccctgaaaggcagcgggcttgctatttatctcactgtgttgagcagggacgtgccctcccgcatttcggaaacaaatggttctgtaaatccagcagcactgagcgcagcatgatctaagggaactaaatacactaccttgatattcgcatttcctcttttatcaaaacaaacagcgatacactcattaaatacagcatttctgtgaattaattcagcagttgctgcaaatcacctttaaytggattagctataattacaataaaataattatccaaaatcataagaagttgtatttgtaagttyttgtggtttttttttaacagaggtaggaatgtgaggtgaacgtacagtagacaagaatcacttcaaaggtgactatcaaaccctccttcctctcttttttgctgagcatgcttgtgcatygcctgcacccacccctggtcaccctgctgtgtgcccccacagaccccagctggcccaaaagctgacttcaggccgctctgtgggctgggcaccctgcagcagccccaagggcttga

SEQ ID NO: 12032 - DNA, 600 bp, Chicken  19866894215396_2
gaaaggcagcgggcttgctatttatctcactgtgttgagcagggacgtgccctcccgcatttcggaaacaaatggttctgtaaatccagcagcactgagcgcagcatgatctaagggaactaaatacactaccttgatattcgcatttcctcttttatcaaaacaaacagcgatacactcattaaatacagcatttctgtgaattaattcagcagttgctgcaaatcacctttaaytggattagctataattacaataaaataattatccaaaatcataagaagttgtatttgtaagttyttgtggtttttttttaacagaggtaggaatgtgaggtgaacgtacagtagacaagaatcacttcaaaggtgactatcaaaccctccttcctctcttttttgctgagcatgcttgtgcatygcctgcacccacccctggtcaccctgctgtgtgcccccacagaccccagctggcccaaaagctgacttcaggccgctctgtgggctgggcaccctgcagcagccccaagggcttgagggcctccatgactccccctcatggcaggcctgccctgtatggcaggacaccagcaccargcct

SEQ ID NO: 12033 - DNA, 600 bp, Chicken  19866894215396_3
gcagcgggcttgctatttatctcactgtgttgagcagggacgtgccctcccgcatttcggaaacaaatggttctgtaaatccagcagcactgagcgcagcatgatctaagggaactaaatacactaccttgatattcgcatttcctcttttatcaaaacaaacagcgatacactcattaaatacagcatttctgtgaattaattcagcagttgctgcaaatcacctttaaytggattagctataattacaataaaataattatccaaaatcataagaagttgtatttgtaagttyttgtygtttttttttaacagaggtaggaatgtgaggtgaacgtacagtagacaagaatcacttcaaaggtgactatcaaaccctccttcctctcttttttgctgagcatgcttgtgcatygcctgcacccacccctggtcaccctgctgtgtgcccccacagaccccagctggcccaaaagctgacttcaggccgctctgtgggctgggcaccctgcagcagccccaagggcttgagggcctccatgactccccctcatggcaggcctgccctgtatggcaggacaccagcaccargcctgtgtg

SEQ ID NO: 12034 - DNA, 600 bp, Chicken  19866894215396_4
taaatacactaccttgatattcgcatttcctcttttatcaaaacaaacagcgatacactcattaaatacagcatttctgtgaattaattcagcagttgctgcaaatcacctttaaytggattagctataattacaataaaataattatccaaaatcataagaagttgtatttgtaagttyttgtggtttttttttaacagaggtaggaatgtgaggtgaacgtacagtagacaagaatcacttcaaaggtgactatcaaaccctccttcctctcttttttgctgagcatgcttgtgcatygcctgcacccacccctggtcaccctgctgtgtgcccccacagaccccagctggcccaaaagctgacttcaggccgctctgtgggctgggcaccctgcagcagccccaagggcttgagggcctccatgactccccctcatggcaggcctgccctgtatggcaggacaccagcaccargcctgtgtgtcccaaacatgtcttttcctcrgtatgacacaatggggctttggggagctgactcctccaaaatctcgtttttttctgtgattcctcacaagtcaggcacccacaaactaccaaa

SEQ ID NO: 12035 - DNA, 533 bp, Chicken  19866894215396_5
gttyttgtggtttttttttaacagaggtaggaatgtgaggtgaacgtacagtagacaagaatcacttcaaaggtgactatcaaaccctccttcctctcttttttgctgagcatgcttgtgcatygcctgcacccacccctggtcaccctgctgtgtgcccccacagaccccagctggcccaaaagctgacttcaggccgctctgtgggctgggcaccctgcagcagccccaagggcttgagggcctccatgactccccctcatggcaggcctgccctgtatggcaggacaccagcaccargcctgtgtgtcccaaacatgtcttttcctcrgtatgacacaatggggctttggggagctgactcctccaaaatctcgtttttttctgtgattcctcacaagtcaggcacccacaaactaccaaatgccctgaattacaacctaggtcaataattaacctcaccaaaagccctctgtctttgctatgtacctctgtgtcatagctaagggtgccatgtcaggtgaggcacaagg

SEQ ID NO: 12036 - DNA, 502 bp, Chicken  19866894215396_6
aatgtgaggtgaacgtacagtagacaagaatcacttcaaaggtgactatcaaaccctccttcctctcttttttgctgagcatgcttgtgcatygcctgcacccacccctggtcaccctgctgtgtgcccccacagaccccagctggcccaaaagctgacttcaggccgctctgtgggctgggcaccctgcagcagccccaagggcttgagggcctccatgactccccctcatggcaggcctgccctgtatggcaggacaccagcaccargcctgtgtgtcccaaacatgtcttttcctcrgtatgacacaatggggctttggggagctgactcctccaaaatctcgtttttttctgtgattcctcacaagtcaggcacccacaaactaccaaatgccctgaattacaacctaggtcaataattaacctcaccaaaagccctctgtctttgctatgtacctctgtgtcatagctaagggtgccatgtcaggtgaggcacaagg

SEQ ID NO: 12037 - DNA, 600 bp, Chicken  19866894215400_1
agatttactctgaagataggctcagatgaaaagaagaaacctgaattcgttggttgttattcctccccagatgcaagactctacacttgctcttcttaaacctcatcaggatcctccctgcccaaccctccagtctgtccgagtcttgttgaatggtagcagggcctgccagtgtgttagccaatcctctcaactttgtatcatcagcaaatttgtggagggtggactcagtcccttcatgcaggtcaccgatgaagatgttgaacaaggccaggcctagcaccaaaccctggggaacakcacttgttataggcctccagccagactctgcccactgatgacaaccctctaaactctgccagtcagccatttctcagtccacttcaccatccactcatctatcccacactttctaattttcgttacaaggatgytgtgggagatggtgtcaaacaccttgctgcagtcaaggtacacaacatccactactctctccccatttagccagcctgtgatttctccttggtgaaatcatgttgactgatcctgataacatcttccaattgcttggagatggcatccagaacaagttgttctaac

SEQ ID NO: 12038 - DNA, 600 bp, Chicken  19866894215400_2
ctgtccgagtcttgttgaatggtagcagggcctgccagtgtgttagccaatcctctcaactttgtatcatcagcaaatttgtggagggtggactcagtcccttcatgcaggtcaccgatgaagatgttgaacaaggccaggcctagcaccaaaccctggggaacakcacttgttataggcctccagccagactctgcccactgatgacaaccctctaaactctgccagtcagccatttctcagtccacttcaccatccactcatctatcccacactttctaattttcgttacaaggatgytgtgggagatggtgtcaaacaccttgctgcagtcaaggtacacaacatccactactctctccccatttagccagcctgtgatttctccttggtgaaatcatgttgactgatcctgataacatcttccaattgcttggagatggcatccagaacaagttgttctaacacctttccagggatggaggtgaggctgactggcctgtagtttcccagtaggtcctgataaatatgtatatggtgtttgtaggacccacctggtgcaaactttgtgatattccaacattgccaccattgttttgg

SEQ ID NO: 12039 - DNA, 562 bp, Chicken  19866894215400_3
aaatcatgttgactgatcctgataacatcttccaattgcttggagatggcatccagaacaagttgttctaacacctttccagggatggaggtgaggctgactggcctgtagtttcccagtaggtcctgataaatatgtatatggtgtttgtaggacccacctggtgcaaactttgtgatattccaacattgccaccattgttttggaaaacattgaagctgatattcagctctttacgcagttctctggtcttagtctgccaacttgtgtggatgagctgatcaagacactcttcatttygtggtgtgacaactgtgcacagccatctgtgcgttgtctttcatgtcagtgtcccactgctgaaaagcacccactggctcactgtacttacatccagtgttcaatctccataaacattcagcaagaatcaatgaatgtcaatggttgccattttttctgcgtggaagatttcaattacacccctttgcttcatacacacttccgtgtcagataccattctgtcagattgaccctctgctgccatctgtcacatgacaatgtg

SEQ ID NO: 12040 - DNA, 599 bp, Chicken  19866894215401_1
  misc_feature (1)..(88): n is any nucleotide
nnnnnnnnnnnnnnnnnnnnnnnnnnnnnnnnnnnnnnnnnnnnnnnnnnnnnnnnnnnnnnnnnnnnnnnnnnnnnnnnnnnnnnnngaagaacagaatggcactgcctgctgcaggcacactcacttccagagagctctttgaagcacagctcaaacaggaataattgtttgcacagaacttcaattccctgtcaccgggattgcaatctgcacattacaatccaaacctggggaaacgtgcaaggatcacgcgtatgccatgcaagaaacaattattccaatgtaatgtaagtaccrtggctaggcaaaggcattcttgcacatctgaccctccactgtttcatcatgcatgcaatagctctgcatttttgcaagccagacccctcctaacagcagttacgtgcactggctgtggctccccatcccaattctgcacccgctgacaatgcactccgaatccaagagctctgcaaacctccacgaacttacactgagagtctaagggaacaaaacaggctagaaaagaaaacacaacgatctcaactggatggggaccaaggagcagctcagactgcaatatcacatcccaacgccca

SEQ ID NO: 12041 - DNA, 600 bp, Chicken  19866894215403_1
tctgggggcggtttccctcggccccgcctgggtcccacggggctgttgtcattgctctctggtcttcatctgttgctctggcggcaatctcagtgctggcagaagctccacgtccccgtgctctgctgcgatcaaagagcacttcctgctgcctttccctggggggctgtgttttagggggcaggaggggtgggggccgcctcgatccctgcgcttaccccccctttgtcatctcttcccttccaccttcttggcagcattgagaagatctccaaaatcacctctcctgtcctcatcatycacggcaccgaggatgaagtcatcgacttctcccacggcctggcgctcttcgaacgctgtcccaaagccgtggagccgctgtgggtggatggggccgggcacaatgacattgaactctacagccagtacctcgagcgccttcggaaattcatctcccaggagctggccagccaacgcaactagcctcgctgcagggcggaggacggggcgggctgggggttgccgcgtgttcgtccagttctcccagcgctcccagtccctgctgccgggggcacagtgggtttctacagccccggcctt

SEQ ID NO: 12042 - DNA, 600 bp, Chicken  19866894215405_1
ccacatggatggaggctctgcattacccccaaagcacccaagagatccttgaatgcacagttaggcccactgagagccctggggtacacataaagccaaacagatggcatgtggatacaccaaaaaccaaaccatgggacaccggggacatgtgaaggattgctgagagtctccaagtgcagggtggagggtgctgagggcactgaaagacacaaggaggtaaatggtgcacactgaaatgcacacaaaggggcaagagggggtaagccagaggaaaaggatcagcagaaggcaccctcwgcccctgctggccctgactcagtgacccccactgctgaggggtctcctccaggyttggggttccttgcgtagatgctggtaaatgaccacgatgaagcctatcaaggtacagcagaagatgctggccaggaaggagaagggcccgatgagcaggaaggcagcgtagtgctgggctgacagcgggaccttctgacactgctggaaggaatcgttcccaaaggccgtgatcgggtatgtgttcagcgactctgggaagacgcactggagagaactcctctctggaagagagaagtggtggtg

SEQ ID NO: 12043 - DNA, 600 bp, Chicken  19866894215405_2
gcacagttaggcccactgagagccctggggtacacataaagccaaacagatggcatgtggatacaccaaaaaccaaaccatgggacaccggggacatgtgaaggattgctgagagtctccaagtgcagggtggagggtgctgagggcactgaaagacacaaggaggtaaatggtgcacactgaaatgcacacaaaggggcaagagggggtaagccagaggaaaaggatcagcagaaggcaccctcwgcccctgctggccctgactcagtgacccccactgctgaggggtctcctccaggyttggggttccttgcgtagatgctggtaaatgaccacgatgaagcctatcaaggtacagcagaagatgctggccaggaaggagaagggcccgatgagcaggaaggcagcgtagtgctgggctgacagcgggaccttctgacactgctggaaggaatcgttcccaaaggccgtgatcgggtatgtgttcagcgactctgggaagacgcactggagagaactcctctctggaagagagaagtggtggtggtgggcacacgaggcttctgggacaaggcaggtgggacagtagggctgcgtggg

SEQ ID NO: 12044 - DNA, 599 bp, Chicken  19866894215410_1
  misc_feature (1)..(57): n is any nucleotide
nnnnnnnnnnnnnnnnnnnnnnnnnnnnnnnnnnnnnnnnnnnnnnnnnnnnnnnnnatattttgagatgtgaatttgaaataacttaggcgttttttttccatttgctgtgatgaggtgtattaattctgaaaaaatgctaagtcatacattgtagttctgggattagactgaaattgaattagttcagctcagtaaggtaaataaacgtatgggtgcgtgaagtgtagattttttttaattttttttaatccctggtattctcttggacatgactaaatgtctgtgtatgccatgctracaagaaatgacttggttgtgcttttcctgaggtgtgctttctggaaaatattccaagaactttcttaaagattaaaaaaaaaagtgtcttgcattatcctttcaaggtgagactacagttttgttaactagtattaattttttgtacttagagaatacacttacctaatcgtgtgtgaatttgcacatcttgcacaaagacagctcttccattagcagtaagccagctgctcagagttcagtggtttgcagaataaggcagaaaggtaaggctgcacattggactaggcyctgttgct

SEQ ID NO: 12045 - DNA, 600 bp, Chicken  19866894215410_2
gccatgctracaagaaatgacttggttgtgcttttcctgaggtgtgctttctggaaaatattccaagaactttcttaaagattaaaaaaaaaagtgtcttgcattatcctttcaaggtgagactacagttttgttaactagtattaattttttgtacttagagaatacacttacctaatcgtgtgtgaatttgcacatcttgcacaaagacagctcttccattagcagtaagccagctgctcagagttcagtggtttgcagaataaggcagaaaggtaaggctgcacattggactaggcyctgttgctctgcaacagcaaagtgtgctttgttctaccagcaaggctcctggctgcaagtccaaggtttctcaaaggcatctttctgtttcacctaaaattgcctcatttaattaattttctgttttgttttatttttttgcccatgttwtagagaaaattacctatatctgttttcaggaataagggtttgtgggtgttttaacagaaaagacattcaatttataaatactaaatcgatttaaaagatggaggattatagggagagaaacttctcgatatgtttttgaggtaggccagt

SEQ ID NO: 12046 - DNA, 600 bp, Chicken  19866894215410_3
tttgtacttagagaatacacttacctaatcgtgtgtgaatttgcacatcttgcacaaagacagctcttccattagcagtaagccagctgctcagagttcagtggtttgcagaataaggcagaaaggtaaggctgcacattggactaggcyctgttgctctgcaacagcaaagtgtgctttgttctaccagcaaggctcctggctgcaagtccaaggtttctcaaaggcatctttctgtttcacctaaaattgcctcatttaattaattttctgttttgttttatttttttgcccatgttwtagagaaaattacctatatctgttttcaggaataagggtttgtgggtgttttaacagaaaagacattcaatttataaatactaaatcgatttaaaagatggaggattatagggagagaaacttctcgatatgtttttgaggtaggccagtttgtgaagtcctgtgctgctgtaaagaacttgagggaatcttttagtgagatcaagcttctgcttcaccatagattcttgatcttaagaaaagagatgggttggaaatgttaaaaatgtagaaatttccttgaagtaaggattgggaata

SEQ ID NO: 12047 - DNA, 535 bp, Chicken  19866894215420_1
ctctgtgccctactactgcaccccgcccttcccagagatgtcgccccccggagcgcagtgccagctccctctctcctctccccactggttgctcccacaccgatagcccagttgccgctctctgccagttggcactgccccgttgtcctccaggaaccctcccgggcaggcagcagccgcagcactgcaggctcttgggccaggcagactgagaagccagcaggtgggacaccgggacggccgggaggtctcggaccgcttccactccccagggactgccattctcgcccttaagcccckctgtatgcaaaatgccattttcagtaagaactcgcagcgctccgatggcaaaaccgaaagaccaaacagcagacaaaaaaaatcctaccagaaaaacagcaacaacggcagcttacaaccttcgttcaaagtaaatgtgtaaattatcaccacgttaagaaacgtaaagtgcccataaaggagaaagagagtaagaaataaaatggttttcaaactaagcaggactttcaggaaa

SEQ ID NO: 12048 - DNA, 599 bp, Chicken  19866894215422_1
  misc_feature (1)..(199): n is any nucleotide
nnnnnnnnnnnnnnnnnnnnnnnnnnnnnnnnnnnnnnnnnnnnnnnnnnnnnnnnnnnnnnnnnnnnnnnnnnnnnnnnnnnnnnnnnnnnnnnnnnnnnnnnnnnnnnnnnnnnnnnnnnnnnnnnnnnnnnnnnnnnnnnnnnnnnnnnnnnnnnnnnnnnnnnnnnnnnnnnnnnnnnnnnnnnnnnnnnnnnnnttcaaggtccagttggaggaagtaaaggctcacatgttacttcagaatgaccaatcaaaagcaatgttaagttacatccagagcatccttgctgagcagaratttgcactgactagatacatttttagggacaggcaaacaatcatagatgcagaacacaatgaaatctcactccacaatcaaagacacaaggagcaggatgacagaaaaagacagcagaaaacaatacaaacaccaggggtccaagacaggtttgattttcctttccttgcatcttccagaggtacagtgttgcaggttttaagacacagaacaggattatttcaaattacaacacctgctacactgttgtatttctgtttactcatgtctgtgtccacagcccatgagacacattgcc

SEQ ID NO: 12049 - DNA, 600 bp, Chicken  19866894215426_1
ttaattattagacttaagaaagaatatcagagtttgtgaaagaagaattgggatctggtgttacaggacagattttaataggataagagaaaaatgttcaagcagaacaatgggcagtgaataagtcaaaatcagaagcaatgtttgagcagagaggaagagtgtgtgaggaaaaccacctgacttaagttagcatagcctgaattctgacggagagccctgcccaaatgcagccaggatctggctctttgtagctggaatttgtgacagtggcaaaacttattttctccatagtgggakactctggactttgtgtgggcaagacttttttccttcttcttccttccccgcacacctttgataaataatacatcttagttgttttcttttcccttgtgtcacccgagctactgtatctttgcctttttcaggttcatctgataagtacctagagtaccttttcacttggaaagtgaaaattaggtcactatttcttgtatttcttcaccgcatgtggcatttttttaagccttttccaaaggaaagaaaacctaagaacttgtactttgttttccctcctgtaccctcttgctctatctg

SEQ ID NO: 12050 - DNA, 600 bp, Chicken  19866894215428_1
tgtaagtttataatacatttctctccaagcagcacaggggaaagaagtgttggttgtgtcttgtccctgcgcctcctggcagctcatacactgagggaaggcagcactgccattgcagccacgcagctctaatgcaggcactgctgttctgctgggaattgatggatcacatcatactccactgtctgttgctgaatttcatcaaaggaagtcaaggataagtatttttctgctatgagttttccctgtgctcagtagctgtagtgccaggaggatggatggtgcgatgcagatggcagygagctgtggttccaggtttctgggaaaggtagggtcgagtgaggctgtgttaaggaaagttttgtgttgctgctgtctcacctgtactaccttcagtgcatcagcttttcatttagagtgctgactgatctttgaaatgaagaaccttttcaaatatgaagcacctttttgggaaattctgtaacctcttggctgagcacagtgatgaatgcatgtatgtcagtgtggggttcctgataagagtgctttccttgccccgtcgtcacgtcttcatcgtcacctttccctataattacccgc

SEQ ID NO: 12051 - DNA, 600 bp, Chicken  19866894215428_2
cgtcacgtcttcatcgtcacctttccctataattacccgctgggagctgtacctgcttctggaagcactgatcatgtagatatgctgcccagccaaaaaaaaccctgggggaggggaagatgctttgaagttttctggtcactttctagaaagagcgatgagcaaagctgaatggttgtagaggtcactccttgcctttctgggaaggtgagatgtgtcgcttacaggtctgtgccgagctgagctcttgccacgccatgcactgtcactgggcaggagcagtgagcagtgagcaggagygttcctcccaggagctggcagtgacacagcacattccaggcactgcttattcaccctgtgctggagagagcagtgtcaggtgattgaacggagataagactgcctagatcctcggtggaggaataaacagcttccatcttctgtttgtgcctttggatggagaggtttgcttcagcgggctccttcctgtgtgtgctgtgcagtgccctcaccccacagccacatccccttacagagcttctggcagcaggattggatcccacctcatcgtgttcccttctccgtcaccaacagcccata

SEQ ID NO: 12052 - DNA, 599 bp, Chicken  19866894215433_1
  misc_feature (1)..(111): n is any nucleotide
nnnnnnnnnnnnnnnnnnnnnnnnnnnnnnnnnnnnnnnnnnnnnnnnnnnnnnnnnnnnnnnnnnnnnnnnnnnnnnnnnnnnnnnnnnnnnnnnnnnnnnnnnnnnnnntaaaatggcaggtcaaggcttgccaggcttgcctgtgtggtcacttgcaagggctgcctgtatacgcatggaggtgcattcaggaagctggcctcggtcagatggtgcccctggggcacagcaaaatgccattaacatgtgtgcttgtggtgtgtctgcttacagagagtgctggaaacagcgagcttwggagtgaagcgagggctgggaggtggcagtggagaatgtatgctgtttctacctgggctatctaatctgcccttccattttcttcagggatggggaccattatgacgctttaagggactgcctgaaggccatatccttgaatccatgccacctgaaggcccatttccgtcttgctcgctgtctctttgaactcaagtacgtggcagaagcactggagtgtctggatgactttaaagggaagttcccagaacaagcacacagcagtgcctgcgatgcattagacagagacatcaacgcag

SEQ ID NO: 12053 - DNA, 599 bp, Chicken  19866894215440_1
  misc_feature (1)..(6): n is any nucleotide
nnnnnngaacagataggaaacttaagtcagagaagggtgtcaaaagaacatgcttggcaacccaattgcctcttgaatcctggcctcagatgatgctgagccagaagccaaccagctgtgactcccagcatgaggaaaacaccaccagggtgatgcagagacattgacaccccggcagtaacatggcagtccacaacctctttcctttctgctggataaaagatgttttttcttgcccctaatgagggcaagctcatcagtgcagccagggggagctcctcagctggtacccagacacgyagaaaggatgcaggaggacactggaggaagaggacagcagtgctggtcactgccccacagaggctgttgcatggggcatggggtgaaagccccctgcaatcagctgtagctgctgctctctatcgccagctggaacacgaggaattcataggtgttcgtaggaattcttctgtcccatgataaaagtgacaacagctacgatggaacaaaaagggaagggcagcgtccaaataaccggctccttgcagatgacttattttgggaagcaattaccccctgtgccacacacccctggctcc

SEQ ID NO: 12054 - DNA, 600 bp, Chicken  19866894215449_1
gcacgtttacagccgctcattagttagctcattagttaaacgtgcatctgcaaggtgaagatcacggaatcactggatggtttgggttaggatcaactcatctgtgtgtttcaactgttatctgggcattagtttcacaaaaacgaggtcagctatcccactagccttacgctcctgttaccctttttatgttttaataggaaatataaaaaaagatatagaaaatcagtgatttagaggctgcagataaacccaaagctcaggctgaacgttcctcagaggcagactgaccaggaggargaggaggatccctccgaaatgatgggcaggaagaagagaggagcgctgctgcttaccctgcggttccggttgtgctctgcggagcgcaggtgccgctgcaggaggtggttctgggcagggatcagcatgtcacaggccatgcagtgagcagcctcgatcttcttgaagaagtgttcctggccaatgcctgcggggatgrgaaaacaccgggcaaaaaaaatcggaaggaaatgaggcattctgcccaaactttttgaggtctgcctcctttttaggatctatttcgcgagcctcgcagat

SEQ ID NO: 12055 - DNA, 600 bp, Chicken  19866894215449_2
ggaaatataaaaaaagatatagaaaatcagtgatttagaggctgcagataaacccaaagctcaggctgaacgttcctcagaggcagactgaccaggaggargaggaggatccctccgaaatgatgggcaggaagaagagaggagcgctgctgcttaccctgcggttccggttgtgctctgcggagcgcaggtgccgctgcaggaggtggttctgggcagggatcagcatgtcacaggccatgcagtgagcagcctcgatcttcttgaagaagtgttcctggccaatgcctgcggggatgrgaaaacaccgggcaaaaaaaatcggaaggaaatgaggcattctgcccaaactttttgaggtctgcctcctttttaggatctatttcgcgagcctcgcagatctgctgcttgaggaaccgcagaagggacggacatccccttccccataatgatttactctacaaaacaagcaaaaaactcactctgccccaaagagcacacccagcaccacccggctgctgcccctggacggctgacacctcttacccttgaagggatccggcttctgcttcacgccctccttctccgtcagctcctggc

SEQ ID NO: 12056 - DNA, 599 bp, Chicken  19866894215451_1
  misc_feature (1)..(48): n is any nucleotide
nnnnnnnnnnnnnnnnnnnnnnnnnnnnnnnnnnnnnnnnnnnnnnnncattcacatccatatttgatcttcttgggataccacaactagtactgtatcttatcaactggcattgatgccaacagcacttactaaaaggagtaacgaggcagtaatccatactgtaatcacatacagataattaaaaccagtaactgtaaggacatccatagtatttcagactcactccaaacgcaagattttgtttgtttcccctcttacacctccaatcttttcatccaccttcggttttgctcgtcrttaatgaggctgcttctrcatggaggccatatgtaagaggacagacagacagcccactgctgctcctttctgcaacgccagctccttaccttgcctacacatcactgcagctctcggaggtgttactcctgactcattccagcacaagcagaaaggagcagcaattttccacagtgaaaaaagctgtgaaattaatagttgggtatccaagacaaaataagtattcacttctagacaaacagtacaggtctgagagcagaacacagccagccttcccatgcaagcttaccaatagaagt

SEQ ID NO: 12057 - DNA, 599 bp, Chicken  19866894215451_2
  misc_feature (1)..(30): n is any nucleotide
nnnnnnnnnnnnnnnnnnnnnnnnnnnnnncattcacatccatatttgatcttcttgggataccacaactagtactgtatcttatcaactggcattgatgccaacagcacttactaaaaggagtaacgaggcagtaatccatactgtaatcacatacagataattaaaaccagtaactgtaaggacatccatagtatttcagactcactccaaacgcaagattttgtttgtttcccctcttacacctccaatcttttcatccaccttcggttttgctcgtcrttaatgaggctgcttctrcatggaggccatatgtaagaggacagacagacagcccactgctgctcctttctgcaacgccagctccttaccttgcctacacatcactgcagctctcggaggtgttactcctgactcattccagcacaagcagaaaggagcagcaattttccacagtgaaaaaagctgtgaaattaatagttgggtatccaagacaaaataagtattcacttctagacaaacagtacaggtctgagagcagaacacagccagccttcccatgcaagcttaccaatagaagtgctcctccaccatctttg

SEQ ID NO: 12058 - DNA, 599 bp, Chicken  19866894215453_1
  misc_feature (1)..(56): n is any nucleotide
nnnnnnnnnnnnnnnnnnnnnnnnnnnnnnnnnnnnnnnnnnnnnnnnnnnnnnnnttactgagggtacactcaatcctctcatctagatcatcaataaaaatattaaacaagatgggccccagtactgacccctggggacaccactttttacaggtcgccagctagatttaactccattaactactgtccactgggcatggccctctagccagttccttacccaaagaagagtatacctgtccaggacatggtgtcttgctccagtttataggagggagaggaggttctttgaaatacktatgcctggcatgagattaagaaacaacggttcgaatgttggtctgaccagtttattacaaatcttamtaagggagatgaagaaagggactctattatggattgyggtgatggggaagggaaggcgagcwatagaaaaaatagaaagtagcaagaattgcgtaaagcggggatagtcaccaccaggatccggcagtagtcccgttgcatgacgttccgatgttccgaggccaaagggcaggagcagcgaggccagtcttgggccacgagagggtgcaggtacggggtgggtacaggaag

SEQ ID NO: 12059 - DNA, 600 bp, Chicken  19866894215453_2
cactcaatcctctcatctagatcatcaataaaaatattaaacaagatgggccccagtactgacccctggggacaccactttttacaggtcgccagctagatttaactccattaactactgtccactgggcatggccctctagccagttccttacccaaagaagagtatacctgtccaggacatggtgtcttgctccagtttataggagggagaggaggttctttgaaatacktatgcctggcatgagattaagaaacaacggttcgaatgttggtctgaccagtttattacaaatcttamtaagggagatgaagaaagggactctattatggattgyggtgatggggaagggaaggcgagcwatagaaaaaatagaaagtagcaagaattgcgtaaagcggggatagtcaccaccaggatccggcagtagtcccgttgcatgacgttccgatgttccgaggccaaagggcaggagcagcgaggccagtcttgggccacgagagggtgcaggtacggggtgggtacaggaagaagccgcagagtaagcccaggaggaagcagcaggtctcaggtagcaggcccagggaagtctatcagcat

SEQ ID NO: 12060 - DNA, 600 bp, Chicken  19866894215453_3
taaacaagatgggccccagtactgacccctggggacaccactttttacaggtcgccagctagatttaactccattaactactgtccactgggcatggccctctagccagttccttacccaaagaagagtatacctgtccaggacatggtgtcttgctccagtttataggagggagaggaggttctttgaaatacktatgcctggcatgagattaagaaacaacggttcgaatgttggtctgaccagtttattacaaatcttamtaagggagatgaagaaagggactctattatggattgyggtgatggggaagggaaggcgagcwatagaaaaaatagaaagtagcaagaattgcgtaaagcggggatagtcaccaccaggatccggcagtagtcccgttgcatgacgttccgatgttccgaggccaaagggcaggagcagcgaggccagtcttgggccacgagagggtgcaggtacggggtgggtacaggaagaagccgcagagtaagcccaggaggaagcagcaggtctcaggtagcaggcccagggaagtctatcagcatgcaggccttccatagtgagggatctgatggcagaaac

SEQ ID NO: 12061 - DNA, 600 bp, Chicken  19866894215453_4
cccctggggacaccactttttacaggtcgccagctagatttaactccattaactactgtccactgggcatggccctctagccagttccttacccaaagaagagtatacctgtccaggacatggtgtcttgctccagtttataggagggagaggaggttctttgaaatacktatgcctggcatgagattaagaaacaacggttcgaatgttggtctgaccagtttattacaaatcttamtaagggagatgaagaaagggactctattatggattgyggtgatggggaagggaaggcgagcwatagaaaaaatagaaagtagcaagaattgcgtaaagcggggatagtcaccaccaggatccggcagtagtcccgttgcatgacgttccgatgttccgaggccaaagggcaggagcagcgaggccagtcttgggccacgagagggtgcaggtacggggtgggtacaggaagaagccgcagagtaagcccaggaggaagcagcaggtctcaggtagcaggcccagggaagtctatcagcatgcaggccttccatagtgagggatctgatggcagaaacctatcctcatggttgttggaccctc

SEQ ID NO: 12062 - DNA, 599 bp, Chicken  19866894215460_1
  misc_feature (1)..(163): n is any nucleotide
nnnnnnnnnnnnnnnnnnnnnnnnnnnnnnnnnnnnnnnnnnnnnnnnnnnnnnnnnnnnnnnnnnnnnnnnnnnnnnnnnnnnnnnnnnnnnnnnnnnnnnnnnnnnnnnnnnnnnnnnnnnnnnnnnnnnnnnnnnnnnnnnnnnnnnnnnnnnnnnnnnnggaggggatgagctgagtttggtgatggggatgggaggtgatggaagcactcctgcagtgatggacattcctgggatggctgcttaacagcagcattgcctgcaataatccatgcactccccccgccctgctccacrgtcctgctgttctcaaaggtgtggaactgaaaacaaggcaagcacggcactgaggggcagcacgtgcagagtgccatccagggacactgctgggccgtggtttgtgaggctgctctatttgtggagcrcactgagggtgtgtgaaaaacagggccttaagttctcagggttcacacagactcatttgtttctcgttttgttgtgtgagatttcacacccccacgttgggtgctaaagctcctgcggcaccgcagggtttcgggtgatttggggctctcaggaccctctgaagcagagct

SEQ ID NO: 12063 - DNA, 599 bp, Chicken  19866894215460_2
  misc_feature (1)..(35): n is any nucleotide
nnnnnnnnnnnnnnnnnnnnnnnnnnnnnnnnnnnggaggggatgagctgagtttggtgatggggatgggaggtgatggaagcactcctgcagtgatggacattcctgggatggctgcttaacagcagcattgcctgcaataatccatgcactccccccgccctgctccacrgtcctgctgttctcaaaggtgtggaactgaaaacaaggcaagcacggcactgaggggcagcacgtgcagagtgccatccagggacactgctgggccgtggtttgtgaggctgctctatttgtggagcrcactgagggtgtgtgaaaaacagggccttaagttctcagggttcacacagactcatttgtttctcgttttgttgtgtgagatttcacacccccacgttgggtgctaaagctcctgcggcaccgcagggtttcgggtgatttggggctctcaggaccctctgaagcagagctgtgagccacgtgygggggctgcaaagcagtggtgaccttcagctgagttgtggggttttccagtgccacccaaagtgcctgcagttccaacgagggcacccgtgctgtgcagctctaaaacaaaacgg

SEQ ID NO: 12064 - DNA, 600 bp, Chicken  19866894215460_3
tcaaaggtgtggaactgaaaacaaggcaagcacggcactgaggggcagcacgtgcagagtgccatccagggacactgctgggccgtggtttgtgaggctgctctatttgtggagcrcactgagggtgtgtgaaaaacagggccttaagttctcagggttcacacagactcatttgtttctcgttttgttgtgtgagatttcacacccccacgttgggtgctaaagctcctgcggcaccgcagggtttcgggtgatttggggctctcaggaccctctgaagcagagctgtgagccacgtgygggggctgcaaagcagtggtgaccttcagctgagttgtggggttttccagtgccacccaaagtgcctgcagttccaacgagggcacccgtgctgtgcagctctaaaacaaaacgggctctccgtctcaccccggaatgtgccgtcctgctttcctgggctgacagcttcactgatggctgctgtgcagatggatggagcccgggtgttactcacccaaaccatcaaaagctatctgccgtgtgcccaaacagccccctgacaccgaccaccctgcttttgtgggtggaaactggttgttt

SEQ ID NO: 12065 - DNA, 600 bp, Chicken  19866894215460_4
cctccgtgttcctggaggacactgccttgtggcaggcttttcattgcgggtacagctgaagggctgtgcttactgctgggctcagctctgggttatgtttggtggcacttctcaatgacctggcactcattcgcatgagaaaattcctctgttcccttctttctccttttcttttgcttgaggctcacaagctcaggaacgtatcttgttccaagtcacatgtctttattaattttatataccatccagctttctctattctatttcttgttgggaatctcgcattgcaaataattctcyttcctttcctcctcctgcagctgccattccataaccgatgacctctgccttgcttcccacagattgctgacgacctgggaaacgagaagttctgcatcgatgccaaccagagcggagctgggacctggctgaagtacatccgtgcagcctgctcctgtgctgagcagaacctcgcccgtgtgccacgtcaacgaccaggtaacagccccagcactgctgccttgcagcacgccctgcccctcgtgcacggtgcacacagcagcagcgcggagcggctgcagcacccatccatgcggcggc

SEQ ID NO: 12066 - DNA, 600 bp, Chicken  19866894215461_1
tgactgaaaacacagataaatttgtgctgagagtggcaaaagacacatcactgatataaaggctacttcattttccttcagattatccttcagattatcttttgaaggtaagttctcttgtttaatatgaattaaacaatacatttttcttaagtttcattctcggaaatattcaaatcattctgacttaaattaaatatatgtaaaaataatgtacttctgccttaaagaggcaaaaagcttttgaaatgtcagcttaattatttaatgtatgacaaaactatatgaggaggaatgcaktrtcttgtaatgcagagcttaataagatacactgttgccgtttccatctacactgaaactaatttagagtactcttttactcagggacgctttaccagttttgaagttgtttctacctgtgctgattttcatatttttatcaccactggggaaaataaataaataaatagaaagacagaaacaacccctcactatctgaattctgattacaaggaagaagaatggttgcaaaccggatcaaaggtaatgaaaactaatctgaacttctaaagaaatattcaacagaaacagctgcctgtc

SEQ ID NO: 12067 - DNA, 600 bp, Chicken  19866894215461_2
actgaaaacacagataaatttgtgctgagagtggcaaaagacacatcactgatataaaggctacttcattttccttcagattatccttcagattatcttttgaaggtaagttctcttgtttaatatgaattaaacaatacatttttcttaagtttcattctcggaaatattcaaatcattctgacttaaattaaatatatgtaaaaataatgtacttctgccttaaagaggcaaaaagcttttgaaatgtcagcttaattatttaatgtatgacaaaactatatgaggaggaatgcaktrtcttgtaatgcagagcttaataagatacactgttgccgtttccatctacactgaaactaatttagagtactcttttactcagggacgctttaccagttttgaagttgtttctacctgtgctgattttcatatttttatcaccactggggaaaataaataaataaatagaaagacagaaacaacccctcactatctgaattctgattacaaggaagaagaatggttgcaaaccggatcaaaggtaatgaaaactaatctgaacttctaaagaaatattcaacagaaacagctgcctgtctg

SEQ ID NO: 12068 - DNA, 600 bp, Chicken  19866894215462_1
caaccccagcccaccccaccatgcccatccccatatccttcagtgccacatcgccacggttctggaacacccctggggacggtgaccccaccactccgtgagcaggttgggtcgggtcaggtcaggccattcccaccctccaccatattagaatggctcagaagtgaaacaaaatgctcatttcaagctgcaaaaaacccacagtttggcaaaaccttctcgtgttctattaagcacgccgtccttgcacggggcctcccagcgtcaccccgtgctcccggtgctgggttggaagaaagmgaggagaaatcattcattagaagtaaatatgtgggaaaaggcaccgcttggagcgacggaaacctttcctttccgctctgtctttttaaaggaacaaataaaagcagcagaaggtaaacaaataagctcgggactcaccgtggcttgggaatttttacatcaaaagtagcaaatttaataagatgtctgaaaaatgcatcctttcaggttgaaaagcacacaggctgaaccggggagcggagtcttttggcgtgtatttaagtaggacagcttaaacaacgcgatcgtggcaacatggct

SEQ ID NO: 12069 - DNA, 599 bp, Chicken  19866894215465_1
  misc_feature (1)..(104): n is any nucleotide
nnnnnnnnnnnnnnnnnnnnnnnnnnnnnnnnnnnnnnnnnnnnnnnnnnnnnnnnnnnnnnnnnnnnnnnnnnnnnnnnnnnnnnnnnnnnnnnnnnnnnnnncaacctttgaacctgggaacttgcactactacagccaatgcatggccaacaacaatcactagaatacatcacaaaagcagatgaaaaatgctactgcattcagtaagtgtgcttgaatccctgttttgttcacacaccaagattacaggcagctccattctgttactacagaacagaacgaaatggttagagaagsactgttcgaaacaaagggaaagaagtagaaatcctaaagagaagtgcagatagacgtaacccaaacaaagctagataaagacagtacttagtggagaggaaaagtacaaactgsaatagagcacgagctgtgcgaaaaacamagtagtacagaaattctacagagtgataattctatcatgctgcatctaatcacattttacgttttcatatttcacaattttactgtgaacttattcccacattcagttcctaagtagcgctagcctgccacaaggaattgcatctctaagactcctc

SEQ ID NO: 12070 - DNA, 600 bp, Chicken  19866894215465_2
acctgggaacttgcactactacagccaatgcatggccaacaacaatcactagaatacatcacaaaagcagatgaaaaatgctactgcattcagtaagtgtgcttgaatccctgttttgttcacacaccaagattacaggcagctccattctgttactacagaacagaacgaaatggttagagaagsactgttcgaaacaaagggaaagaagtagaaatcctaaagagaagtgcagatagacgtaacccaaacaaagctagataaagacagtacttagtggagaggaaaagtacaaactgsaatagagcacgagctgtgcgaaaaacamagtagtacagaaattctacagagtgataattctatcatgctgcatctaatcacattttacgttttcatatttcacaattttactgtgaacttattcccacattcagttcctaagtagcgctagcctgccacaaggaattgcatctctaagactcctctgccactctacatcacctctcaagtcccagaaaccatgacaatgtcagtttctatttttattggttacagcaaccaagcaagaaataaacttaytcctttgcactagcaaygaca

SEQ ID NO: 12071 - DNA, 600 bp, Chicken  19866894215465_3
tgcatggccaacaacaatcactagaatacatcacaaaagcagatgaaaaatgctactgcattcagtaagtgtgcttgaatccctgttttgttcacacaccaagattacaggcagctccattctgttactacagaacagaacgaaatggttagagaagsactgttcgaaacaaagggaaagaagtagaaatcctaaagagaagtgcagatagacgtaacccaaacaaagctagataaagacagtacttagtggagaggaaaagtacaaactgsaatagagcacgagctgtgcgaaaaacamagtagtacagaaattctacagagtgataattctatcatgctgcatctaatcacattttacgttttcatatttcacaattttactgtgaacttattcccacattcagttcctaagtagcgctagcctgccacaaggaattgcatctctaagactcctctgccactctacatcacctctcaagtcccagaaaccatgacaatgtcagtttctatttttattggttacagcaaccaagcaagaaataaacttaytcctttgcactagcaaygacagagctctgcattattaacaataccttct

SEQ ID NO: 12072 - DNA, 600 bp, Chicken  19866894215465_4
gagaggaaaagtacaaactgsaatagagcacgagctgtgcgaaaaacamagtagtacagaaattctacagagtgataattctatcatgctgcatctaatcacattttacgttttcatatttcacaattttactgtgaacttattcccacattcagttcctaagtagcgctagcctgccacaaggaattgcatctctaagactcctctgccactctacatcacctctcaagtcccagaaaccatgacaatgtcagtttctatttttattggttacagcaaccaagcaagaaataaacttaytcctttgcactagcaaygacagagctctgcattattaacaataccttcttactcayatccttcttcctaggctaaccacgcagaagctgaaattgcttttttagttaaaatagcaggattttaaaaagaaagcactaacaagtacatcttaaatcaggaaatgtatagcattatataatgtaaaagtaaaatactgattaactgtagggtacataaaacagggacgttcacgctctagcaggaatgtagaatagttctagtagaacatgaacagtcaaggagattracattcatgacaaa

SEQ ID NO: 12073 - DNA, 600 bp, Chicken  19866894215465_5
ctgsaatagagcacgagctgtgcgaaaaacamagtagtacagaaattctacagagtgataattctatcatgctgcatctaatcacattttacgttttcatatttcacaattttactgtgaacttattcccacattcagttcctaagtagcgctagcctgccacaaggaattgcatctctaagactcctctgccactctacatcacctctcaagtcccagaaaccatgacaatgtcagtttctatttttattggttacagcaaccaagcaagaaataaacttaytcctttgcactagcaaygacagagctctgcattattaacaataccttcttactcayatccttcttcctaggctaaccacgcagaagctgaaattgcttttttagttaaaatagcaggattttaaaaagaaagcactaacaagtacatcttaaatcaggaaatgtatagcattatataatgtaaaagtaaaatactgattaactgtagggtacataaaacagggacgttcacgctctagcaggaatgtagaatagttctagtagaacatgaacagtcaaggagattracattcatgacaaaagcatactgctcatagt

SEQ ID NO: 12074 - DNA, 600 bp, Chicken  19866894215465_6
cagaaattctacagagtgataattctatcatgctgcatctaatcacattttacgttttcatatttcacaattttactgtgaacttattcccacattcagttcctaagtagcgctagcctgccacaaggaattgcatctctaagactcctctgccactctacatcacctctcaagtcccagaaaccatgacaatgtcagtttctatttttattggttacagcaaccaagcaagaaataaacttaytcctttgcactagcaaygacagagctctgcattattaacaataccttcttactcayatccttcttcctaggctaaccacgcagaagctgaaattgcttttttagttaaaatagcaggattttaaaaagaaagcactaacaagtacatcttaaatcaggaaatgtatagcattatataatgtaaaagtaaaatactgattaactgtagggtacataaaacagggacgttcacgctctagcaggaatgtagaatagttctagtagaacatgaacagtcaaggagattracattcatgacaaaagcatactgctcatagtgaatctattctgctcttcctaaaggcattctatggtatt

SEQ ID NO: 12075 - DNA, 600 bp, Chicken  19866894215465_7
agaaataaacttaytcctttgcactagcaaygacagagctctgcattattaacaataccttcttactcayatccttcttcctaggctaaccacgcagaagctgaaattgcttttttagttaaaatagcaggattttaaaaagaaagcactaacaagtacatcttaaatcaggaaatgtatagcattatataatgtaaaagtaaaatactgattaactgtagggtacataaaacagggacgttcacgctctagcaggaatgtagaatagttctagtagaacatgaacagtcaaggagattracattcatgacaaaagcatactgctcatagtgaatctattctgctcttcctaaaggcattctatggtattaaggacaaagtcagagaatcaggaaaaacacagatagaactgactagtacattaagtgttaatgttgaggataaaaagagaggttgtgcttaaaaagacctcctgaacacactttccataaagttcctcagaacaaggccatacattaacccaaaagaaagttaaaaactactgataaccaggctctgattcactttttcttccaatgaaaagtcataatatgagcaaga

SEQ ID NO: 12076 - DNA, 600 bp, Chicken  19866894215465_8
aggttgtgcttaaaaagacctcctgaacacactttccataaagttcctcagaacaaggccatacattaacccaaaagaaagttaaaaactactgataaccaggctctgattcactttttcttccaatgaaaagtcataatatgagcaagagcttcgcagacatgtggaaaagcagccaaaattaggaattacggagttaaaaccactttaactttcaaaggaagatttttttcattttaacaaacagaaaagttgcagatacaacttcccatgtatttttttttctatataaaaaatagmtcactttggaacttttatgtggtgacttttttccccaattaaataaaagcttaattatcacttaagccctctaaaacacatgaagcatttgacagcagatgaagatgacttgtgccataaagagctccagcactactaactgctgtagctacctttacaaatacaaatctacttgcaattcttactttgtaattatgtcacaaagtggtgaaagacagataccttccgtcaaaagatggcacctttataagcatgttctcatgtgaagagtttttcttacttctcaaagggcacattgag

SEQ ID NO: 12077 - DNA, 599 bp, Chicken  19866894215467_1
  misc_feature (1)..(208): n is any nucleotide
nnnnnnnnnnnnnnnnnnnnnnnnnnnnnnnnnnnnnnnnnnnnnnnnnnnnnnnnnnnnnnnnnnnnnnnnnnnnnnnnnnnnnnnnnnnnnnnnnnnnnnnnnnnnnnnnnnnnnnnnnnnnnnnnnnnnnnnnnnnnnnnnnnnnnnnnnnnnnnnnnnnnnnnnnnnnnnnnnnnnnnnnnnnnnnnnnnnnnnnnnnnnnnnncagagattgcattgagatttttttcatgatagcaatagtgaacatctgcctgtaggaaaaaaagtagtagtccatacctacgtttttgtttytgttgaggttgtaatcttttgtttgtactcagtgtttatgtttttatttgcagtttcctcctacgtatgctggcatatctgaaatgaatcagccagctgagcttctgcctcagttctctagcattgaatatgtagtacaggtaaartcattraataagatatttaacattatctataagctaacaatgtacaaaaagaattaatttcattaatcactgcattttaatgactgagtcatatgtgcgtgttagtagatcgaaggtttgtcatcagatggaaatggaaaacatagctttttt

SEQ ID NO: 12078 - DNA, 599 bp, Chicken  19866894215467_2
  misc_feature (1)..(62): n is any nucleotide
nnnnnnnnnnnnnnnnnnnnnnnnnnnnnnnnnnnnnnnnnnnnnnnnnnnnnnnnnnnnnncagagattgcattgagatttttttcatgatagcaatagtgaacatctgcctgtaggaaaaaaagtagtagtccatacctacgtttttgtttytgttgaggttgtaatcttttgtttgtactcagtgtttatgtttttatttgcagtttcctcctacgtatgctggcatatctgaaatgaatcagccagctgagcttctgcctcagttctctagcattgaatatgtagtacaggtaaartcattraataagatatttaacattatctataagctaacaatgtacaaaaagaattaatttcattaatcactgcattttaatgactgagtcatatgtgcgtgttagtagatcgaaggtttgtcatcagatggaaatggaaaacatagcttttttgtaagaacacaagcatgattactaacactgctgttttaaataacaccaaacccccaaactgaatgaggtttcttttaaatacaacacttttcttaggtatatttctaaaactgggastttaatttttgtttatgctggggktttct

SEQ ID NO: 12079 - DNA, 599 bp, Chicken  19866894215467_3
  misc_feature (1)..(56): n is any nucleotide
nnnnnnnnnnnnnnnnnnnnnnnnnnnnnnnnnnnnnnnnnnnnnnnnnnnnnnnncagagattgcattgagatttttttcatgatagcaatagtgaacatctgcctgtaggaaaaaaagtagtagtccatacctacgtttttgtttytgttgaggttgtaatcttttgtttgtactcagtgtttatgtttttatttgcagtttcctcctacgtatgctggcatatctgaaatgaatcagccagctgagcttctgcctcagttctctagcattgaatatgtagtacaggtaaartcattraataagatatttaacattatctataagctaacaatgtacaaaaagaattaatttcattaatcactgcattttaatgactgagtcatatgtgcgtgttagtagatcgaaggtttgtcatcagatggaaatggaaaacatagcttttttgtaagaacacaagcatgattactaacactgctgttttaaataacaccaaacccccaaactgaatgaggtttcttttaaatacaacacttttcttaggtatatttctaaaactgggastttaatttttgtttatgctggggktttctttactg

SEQ ID NO: 12080 - DNA, 600 bp, Chicken  19866894215467_4
tctagcattgaatatgtagtacaggtaaartcattraataagatatttaacattatctataagctaacaatgtacaaaaagaattaatttcattaatcactgcattttaatgactgagtcatatgtgcgtgttagtagatcgaaggtttgtcatcagatggaaatggaaaacatagcttttttgtaagaacacaagcatgattactaacactgctgttttaaataacaccaaacccccaaactgaatgaggtttcttttaaatacaacacttttcttaggtatatttctaaaactgggastttaatttttgtttatgctggggktttctttactgctgctgcttgctcaaatgattttgactcaaattgttgattaaaatctcaytaattatttgtatttaagtttgtaattgaataattatgagttggtattagattagagaaaacagctaatacttattcattaggatcgaaaagagttgaaaggactgggatgaaaaaaaaatgtacaacctaaaggtgcaaacttgtggtctctaaattctacttttgagaattacaatttcagacttcagtgaggcattcagataatggaaaaaa

SEQ ID NO: 12081 - DNA, 600 bp, Chicken  19866894215467_5
gtaaartcattraataagatatttaacattatctataagctaacaatgtacaaaaagaattaatttcattaatcactgcattttaatgactgagtcatatgtgcgtgttagtagatcgaaggtttgtcatcagatggaaatggaaaacatagcttttttgtaagaacacaagcatgattactaacactgctgttttaaataacaccaaacccccaaactgaatgaggtttcttttaaatacaacacttttcttaggtatatttctaaaactgggastttaatttttgtttatgctggggktttctttactgctgctgcttgctcaaatgattttgactcaaattgttgattaaaatctcaytaattatttgtatttaagtttgtaattgaataattatgagttggtattagattagagaaaacagctaatacttattcattaggatcgaaaagagttgaaaggactgggatgaaaaaaaaatgtacaacctaaaggtgcaaacttgtggtctctaaattctacttttgagaattacaatttcagacttcagtgaggcattcagataatggaaaaaagctcaacagaatctgtattttgcc

SEQ ID NO: 12082 - DNA, 600 bp, Chicken  19866894215467_6
aatttcattaatcactgcattttaatgactgagtcatatgtgcgtgttagtagatcgaaggtttgtcatcagatggaaatggaaaacatagcttttttgtaagaacacaagcatgattactaacactgctgttttaaataacaccaaacccccaaactgaatgaggtttcttttaaatacaacacttttcttaggtatatttctaaaactgggastttaatttttgtttatgctggggktttctttactgctgctgcttgctcaaatgattttgactcaaattgttgattaaaatctcaytaattatttgtatttaagtttgtaattgaataattatgagttggtattagattagagaaaacagctaatacttattcattaggatcgaaaagagttgaaaggactgggatgaaaaaaaaatgtacaacctaaaggtgcaaacttgtggtctctaaattctacttttgagaattacaatttcagacttcagtgaggcattcagataatggaaaaaagctcaacagaatctgtattttgccaactcttttaacacaaagtacaggaaatatttcttcatagtgcagcaaaatttgttgagaa

SEQ ID NO: 12083 - DNA, 600 bp, Chicken  19866894215477_1
gaaaaatagtgcttacactattcccaaactggaattcttgaagtgctatactgctggcgatttaaattttcaatttatgccaggatattgcctcctgttaagaagctctagaagttcctgtaatcccagccacgtgagggatcctcatgtccactggccttcaaacattcctctggccagagcttttcagcctgctgtgctccttataaacactcaagaaagcagttgactcttcttagagccttacttctcgaatacttgtgaattttaattgattctcctggttccagatactgtctstctcagcaaaaggacagtgctacygtgacscacacttctctcttccctacagcatgtctatctgtggtcctgcacagctccggaaataaactgcttttctcagagagacccactggccagagtcaggctctctgaaggcacagcagcttcaaggagactcatttaaactcaaagtcctcaccatggtagttctggagagctggaaatgctcctgggagtggtggtgagggagagaagaggcaggaagttaaaaaaagatttctcaccccatcctatgcttggaaagcagtcctttggggt

SEQ ID NO: 12084 - DNA, 543 bp, Chicken  19866894215477_10
gttcaccatcaaattcatttagtgtttgctgcagtagtgtgattggcacagaggcatttagcatcaatgctagcttcaggaggatggcttcaaggtgtgcctcccgctgcacgtactgcccaggagtgctgcctgtgctcctcaagggacgtcttgggaagttgtgccacgtgtctgtggsaaaacaaaaatcaaagaaatactyctgtaaaggctgccaacactttgccaaggtacaaaacacgtacaaaayatgaactatcctakatagatcacgcatacgatatatataggaattamaatgaaagggatagataaggagtctctagatctgtgtgcatttatatgcacatacttatgtaaaggtagataaaattgaattcatacctctattctgtggaatgggggaatatgttgtgactttaatagaaactggttcttgacttagagtggatacatcaggcagcataatgtttactgcttataccaaattatatacacagctacgctgctatataagtatacctatatatatacacatag

SEQ ID NO: 12085 - DNA, 600 bp, Chicken  19866894215477_2
caaactggaattcttgaagtgctatactgctggcgatttaaattttcaatttatgccaggatattgcctcctgttaagaagctctagaagttcctgtaatcccagccacgtgagggatcctcatgtccactggccttcaaacattcctctggccagagcttttcagcctgctgtgctccttataaacactcaagaaagcagttgactcttcttagagccttacttctcgaatacttgtgaattttaattgattctcctggttccagatactgtctstctcagcaaaaggacagtgctacygtgacscacacttctctcttccctacagcatgtctatctgtggtcctgcacagctccggaaataaactgcttttctcagagagacccactggccagagtcaggctctctgaaggcacagcagcttcaaggagactcatttaaactcaaagtcctcaccatggtagttctggagagctggaaatgctcctgggagtggtggtgagggagagaagaggcaggaagttaaaaaaagatttctcaccccatcctatgcttggaaagcagtcctttggggtctgtctgctcccttccatctcgtt

SEQ ID NO: 12086 - DNA, 600 bp, Chicken  19866894215477_3
ggaattcttgaagtgctatactgctggcgatttaaattttcaatttatgccaggatattgcctcctgttaagaagctctagaagttcctgtaatcccagccacgtgagggatcctcatgtccactggccttcaaacattcctctggccagagcttttcagcctgctgtgctccttataaacactcaagaaagcagttgactcttcttagagccttacttctcgaatacttgtgaattttaattgattctcctggttccagatactgtctstctcagcaaaaggacagtgctacygtgacscacacttctctcttccctacagcatgtctatctgtggtcctgcacagctccggaaataaactgcttttctcagagagacccactggccagagtcaggctctctgaaggcacagcagcttcaaggagactcatttaaactcaaagtcctcaccatggtagttctggagagctggaaatgctcctgggagtggtggtgagggagagaagaggcaggaagttaaaaaaagatttctcaccccatcctatgcttggaaagcagtcctttggggtctgtctgctcccttccatctcgttttcttc

SEQ ID NO: 12087 - DNA, 600 bp, Chicken  19866894215477_4
acttctctcttccctacagcatgtctatctgtggtcctgcacagctccggaaataaactgcttttctcagagagacccactggccagagtcaggctctctgaaggcacagcagcttcaaggagactcatttaaactcaaagtcctcaccatggtagttctggagagctggaaatgctcctgggagtggtggtgagggagagaagaggcaggaagttaaaaaaagatttctcaccccatcctatgcttggaaagcagtcctttggggtctgtctgctcccttccatctcgttttcttctcrtagctggaagtcacactagcgcagcactgagaatattttaaatgattcattaatgtttgtacacatatgccagatgctttcctttttttaataaacaaataaacagaaacctcaaacaccccctgagagatggaacactttccctccagtgaaagccacactgggtgcttgtgcaagagaagggaaggttaaagaaaaaaaacaacctgcacacacccaccgcagaagcccgctttatgagcatttctcctctccctctgatcacttcccctgccacaccagttatccagactctgggga

SEQ ID NO: 12088 - DNA, 600 bp, Chicken  19866894215477_5
acacacccaccgcagaagcccgctttatgagcatttctcctctccctctgatcacttcccctgccacaccagttatccagactctggggaggtatggaggtactgagagatgtcacagctgcttatttcccccacagcacctatgaggagcctggactgggggctttggactggcttagttgaatgtagctgatgggacactccattaacacagctactgaagcctttgatgggtgttcatcagagcaccagcctgtgcaggtacttccatctcagtacttgtggtcaccgcagagattsttccaattacttatggctgggacttcctaagctatgtaggtgttctggtaattttatcccaaaccccttttcttccatgctacggtcatttggaaattaagtaccgtaatttcccacatctggcagtctcactctgtcatgtggttcagcatgaaaattgcagtattacacaagggatgtctcaggtgagcagtaggtgtgcagaaatgagtcctgacagcgttgtcagagagctcagatccaaaactgcagagaaggtgatgcaagtaagaagtgatctctccatgttcgtcctgccag

SEQ ID NO: 12089 - DNA, 600 bp, Chicken  19866894215477_6
ctgtcaggatcagcatttcaagaaggaattcagctttatcaacattcaacagcattgtaattcaggaataattaatgtaatattaacatagagttatcgagaaaggtaagaatgtaagtgttcaccatcaaattcatttagtgtttgctgcagtagtgtgattggcacagaggcatttagcatcaatgctagcttcaggaggatggcttcaaggtgtgcctcccgctgcacgtactgcccaggagtgctgcctgtgctcctcaagggacgtcttgggaagttgtgccacgtgtctgtggsaaaacaaaaatcaaagaaatactyctgtaaaggctgccaacactttgccaaggtacaaaacacgtacaaaayatgaactatcctakatagatcacgcatacgatatatataggaattamaatgaaagggatagataaggagtctctagatctgtgtgcatttatatgcacatacttatgtaaaggtagataaaattgaattcatacctctattctgtggaatgggggaatatgttgtgactttaatagaaactggttcttgacttagagtggatacatcaggcagcataatgtttactgc

SEQ ID NO: 12090 - DNA, 600 bp, Chicken  19866894215477_7
ggaattcagctttatcaacattcaacagcattgtaattcaggaataattaatgtaatattaacatagagttatcgagaaaggtaagaatgtaagtgttcaccatcaaattcatttagtgtttgctgcagtagtgtgattggcacagaggcatttagcatcaatgctagcttcaggaggatggcttcaaggtgtgcctcccgctgcacgtactgcccaggagtgctgcctgtgctcctcaagggacgtcttgggaagttgtgccacgtgtctgtggsaaaacaaaaatcaaagaaatactyctgtaaaggctgccaacactttgccaaggtacaaaacacgtacaaaayatgaactatcctakatagatcacgcatacgatatatataggaattamaatgaaagggatagataaggagtctctagatctgtgtgcatttatatgcacatacttatgtaaaggtagataaaattgaattcatacctctattctgtggaatgggggaatatgttgtgactttaatagaaactggttcttgacttagagtggatacatcaggcagcataatgtttactgcttataccaaattatatacacagct

SEQ ID NO: 12091 - DNA, 590 bp, Chicken  19866894215477_8
taatgtaatattaacatagagttatcgagaaaggtaagaatgtaagtgttcaccatcaaattcatttagtgtttgctgcagtagtgtgattggcacagaggcatttagcatcaatgctagcttcaggaggatggcttcaaggtgtgcctcccgctgcacgtactgcccaggagtgctgcctgtgctcctcaagggacgtcttgggaagttgtgccacgtgtctgtggsaaaacaaaaatcaaagaaatactyctgtaaaggctgccaacactttgccaaggtacaaaacacgtacaaaayatgaactatcctakatagatcacgcatacgatatatataggaattamaatgaaagggatagataaggagtctctagatctgtgtgcatttatatgcacatacttatgtaaaggtagataaaattgaattcatacctctattctgtggaatgggggaatatgttgtgactttaatagaaactggttcttgacttagagtggatacatcaggcagcataatgtttactgcttataccaaattatatacacagctacgctgctatataagtatacctatatatatacacatag

SEQ ID NO: 12092 - DNA, 576 bp, Chicken  19866894215477_9
catagagttatcgagaaaggtaagaatgtaagtgttcaccatcaaattcatttagtgtttgctgcagtagtgtgattggcacagaggcatttagcatcaatgctagcttcaggaggatggcttcaaggtgtgcctcccgctgcacgtactgcccaggagtgctgcctgtgctcctcaagggacgtcttgggaagttgtgccacgtgtctgtggsaaaacaaaaatcaaagaaatactyctgtaaaggctgccaacactttgccaaggtacaaaacacgtacaaaayatgaactatcctakatagatcacgcatacgatatatataggaattamaatgaaagggatagataaggagtctctagatctgtgtgcatttatatgcacatacttatgtaaaggtagataaaattgaattcatacctctattctgtggaatgggggaatatgttgtgactttaatagaaactggttcttgacttagagtggatacatcaggcagcataatgtttactgcttataccaaattatatacacagctacgctgctatataagtatacctatatatatacacatag

SEQ ID NO: 12093 - DNA, 600 bp, Chicken  19866894215481_1
tggacagatatgcatctgtatgtagcagctaatcctgcacaagttcagtgctggttgggagttggttgctactgccatcacaagcctacaacctgggcacttggagtgttgaagacagaggcaaagagggcactaagaatcacagtatggcccaggttggaagggacctcaaggatcgtgaatctccagccctccccccttcccacagacagggccaccaacttccacatttaatactaaaccaggctgcccagggcctcatactacctggccttgaacacctccagcaacaggacatcmacaacctctctggagagcctgtttcagcatcttaccactctaatagtaaagaacttccccctgaaatccaacctaaatcttccctccttcaacttaaaaccatttccccttgtcctgctcttatctaccctctcaaagagttgagaagcactaagtatctccactttgtctatgtcctgtttgtatgatgaccattctcaccaagtaatgagcctatttccacacaaattttctccctacaaaggcaagcagaaacccatgtttcctratcttgtttccagcagccataaactatcttct

SEQ ID NO: 12094 - DNA, 600 bp, Chicken  19866894215481_2
tggccttgaacacctccagcaacaggacatcmacaacctctctggagagcctgtttcagcatcttaccactctaatagtaaagaacttccccctgaaatccaacctaaatcttccctccttcaacttaaaaccatttccccttgtcctgctcttatctaccctctcaaagagttgagaagcactaagtatctccactttgtctatgtcctgtttgtatgatgaccattctcaccaagtaatgagcctatttccacacaaattttctccctacaaaggcaagcagaaacccatgtttcctratcttgtttccagcagccataaactatcttctgcctgagctctagaagattcaggcaggctggtcttttgtcctgcctgcttgacttctgacatttcgaaatcacctgttcctgtgctctcaagaaggagtacttaaaaagtgaccagcactgatgaactcagtgtcttcaaaagcagttcaccagggaatcttatgaagtaattccatgatcagcctgaaatctgctctctccatatccagcactgaggttttggtgacagttttcctcctatcatgaaaggttttgaataatcataat

SEQ ID NO: 12095 - DNA, 599 bp, Chicken  19866894215484_1
  misc_feature (1)..(182): n is any nucleotide
nnnnnnnnnnnnnnnnnnnnnnnnnnnnnnnnnnnnnnnnnnnnnnnnnnnnnnnnnnnnnnnnnnnnnnnnnnnnnnnnnnnnnnnnnnnnnnnnnnnnnnnnnnnnnnnnnnnnnnnnnnnnnnnnnnnnnnnnnnnnnnnnnnnnnnnnnnnnnnnnnnnnnnnnnnnnnnnnnnnnnntgtttcctaaagatttggactgctaagtagggtttctgtccttcagggaatgaataaaaacacccctcataacagctaagtggaaatgaatagcatccagcactgaagggagagcaarygttgcatgtctacctgaaattgcccagctaggagcaaccactgcaagcgatgcgagcggctggagctgttcttcgtctggttggaggagttctccaactcamaggataaacaccaagactatttcagtgagtcagattttagttctgtttgtctggatctttcaaacagatgcagaggaatgataaacatcgggactggggctttgtgaaaatgaagccatttcttctttgggaggaattgtactgcacacgggtaactggctctgcccagaactgcaggcactyggtggcactgcac

SEQ ID NO: 12096 - DNA, 599 bp, Chicken  19866894215484_2
  misc_feature (1)..(181): n is any nucleotide
nnnnnnnnnnnnnnnnnnnnnnnnnnnnnnnnnnnnnnnnnnnnnnnnnnnnnnnnnnnnnnnnnnnnnnnnnnnnnnnnnnnnnnnnnnnnnnnnnnnnnnnnnnnnnnnnnnnnnnnnnnnnnnnnnnnnnnnnnnnnnnnnnnnnnnnnnnnnnnnnnnnnnnnnnnnnnnnnnnnnntgtttcctaaagatttggactgctaagtagggtttctgtccttcagggaatgaataaaaacacccctcataacagctaagtggaaatgaatagcatccagcactgaagggagagcaarygttgcatgtctacctgaaattgcccagctaggagcaaccactgcaagcgatgcgagcggctggagctgttcttcgtctggttggaggagttctccaactcamaggataaacaccaagactatttcagtgagtcagattttagttctgtttgtctggatctttcaaacagatgcagaggaatgataaacatcgggactggggctttgtgaaaatgaagccatttcttctttgggaggaattgtactgcacacgggtaactggctctgcccagaactgcaggcactyggtggcactgcact

SEQ ID NO: 12097 - DNA, 599 bp, Chicken  19866894215484_3
  misc_feature (1)..(79): n is any nucleotide
nnnnnnnnnnnnnnnnnnnnnnnnnnnnnnnnnnnnnnnnnnnnnnnnnnnnnnnnnnnnnnnnnnnnnnnnnnnnnnntgtttcctaaagatttggactgctaagtagggtttctgtccttcagggaatgaataaaaacacccctcataacagctaagtggaaatgaatagcatccagcactgaagggagagcaarygttgcatgtctacctgaaattgcccagctaggagcaaccactgcaagcgatgcgagcggctggagctgttcttcgtctggttggaggagttctccaactcamaggataaacaccaagactatttcagtgagtcagattttagttctgtttgtctggatctttcaaacagatgcagaggaatgataaacatcgggactggggctttgtgaaaatgaagccatttcttctttgggaggaattgtactgcacacgggtaactggctctgcccagaactgcaggcactyggtggcactgcactatttgaagaatcgagggcattcatcctctctttgctgtactcgtggtcatactgagccaaaccgtgtgcctttatttgtgttgtgtgtgtatgtttttctgt

SEQ ID NO: 12098 - DNA, 600 bp, Chicken  19866894215484_4
gaagggagagcaarygttgcatgtctacctgaaattgcccagctaggagcaaccactgcaagcgatgcgagcggctggagctgttcttcgtctggttggaggagttctccaactcamaggataaacaccaagactatttcagtgagtcagattttagttctgtttgtctggatctttcaaacagatgcagaggaatgataaacatcgggactggggctttgtgaaaatgaagccatttcttctttgggaggaattgtactgcacacgggtaactggctctgcccagaactgcaggcactyggtggcactgcactatttgaagaatcgagggcattcatcctctctttgctgtactcgtggtcatactgagccaaaccgtgtgcctttatttgtgttgtgtgtgtatgtttttctgttttgctccgttaggcsagtagcattctaataaacaatgttaactttatgtagctgttaaatacactgacctttagtattggtttgcacaaactgtacacaatgtgagtcccactgaaatatcaagactgatttaagcaagtctctctgctgcaatcaaaataggacatttttattactgaacag

SEQ ID NO: 12099 - DNA, 600 bp, Chicken  19866894215484_5
actatttcagtgagtcagattttagttctgtttgtctggatctttcaaacagatgcagaggaatgataaacatcgggactggggctttgtgaaaatgaagccatttcttctttgggaggaattgtactgcacacgggtaactggctctgcccagaactgcaggcactyggtggcactgcactatttgaagaatcgagggcattcatcctctctttgctgtactcgtggtcatactgagccaaaccgtgtgcctttatttgtgttgtgtgtgtatgtttttctgttttgctccgttaggcsagtagcattctaataaacaatgttaactttatgtagctgttaaatacactgacctttagtattggtttgcacaaactgtacacaatgtgagtcccactgaaatatcaagactgatttaagcaagtctctctgctgcaatcaaaataggacatttttattactgaacagatgcttcgtcagccccagctctagcatttcccagaactagttctgtctttccgtcttttgatgctttgatgcggtaccgtttccctttcagtctccgtttcctcacctgaaaaacagaaataaaaattctgt

SEQ ID NO: 12100 - DNA, 600 bp, Chicken  19866894215487_1
acacacagcatttcacagtaacccagtgtttaatgttgtctagtagcacattttggagttagctgtctgcagtggcagatacctcgtcctggctctgtcgatgatactttttgcctcttcataggacacgccaatcattgactccttgtttatggagacaagctgatctccaggctgcagtcgtccatcctaacccacaacaaacaaaaaacaaaacccacagattttgtattaactactaacactggattttggtgaagccgtgtaaagaaatttggactgcgggacatacttctgttmaaaaaggataagccacagatatttccttcaccaagcagtaacgacccataggactagaggaaacttcttactaattaactcagctgagacttggactaatttgtattccaaggaacagacattcttggctataagtaggacttttcagggacctcctaccacgttcascttaacaagacaaacagacctgtctgttacgaactggccaagcagaatgaccatagaaataatcatagaaataatactgtcagctttatgcttctgctgaattattcattgcaggttttctaccagcacagg

SEQ ID NO: 12101 - DNA, 600 bp, Chicken  19866894215487_2
tccaggctgcagtcgtccatcctaacccacaacaaacaaaaaacaaaacccacagattttgtattaactactaacactggattttggtgaagccgtgtaaagaaatttggactgcgggacatacttctgttmaaaaaggataagccacagatatttccttcaccaagcagtaacgacccataggactagaggaaacttcttactaattaactcagctgagacttggactaatttgtattccaaggaacagacattcttggctataagtaggacttttcagggacctcctaccacgttcascttaacaagacaaacagacctgtctgttacgaactggccaagcagaatgaccatagaaataatcatagaaataatactgtcagctttatgcttctgctgaattattcattgcaggttttctaccagcacaggaataatatcactcttctgtttcagggattgcaagacaaaactttcaatatgtgtgggcagatttctcattaatataaaacattctttactcactttttaaacaagccttaacaatttaactgaaaatgcatggcattcacctacatactgcacatcagccctgcccat

SEQ ID NO: 12102 - DNA, 600 bp, Chicken  19866894215489_1
tttcttggtgggagaaccatggtaaagcttggattccatagtcaggcagtgagtgctctgcaggttgaaaacattggacttcatagtaatttgtgcaatgtatttgatcagtggtagctatgagtagactactgcagtagagtagactactaaaatggacttcagatttctacaattttaataatgcataagtactgaagtatattagttctccctacaggaagtagcagttgggcagtctctgacactgatctttttttctgtgaattaactctctaaacggttattattattttattytgaaatcagaaagtcttmgtgtgagctttcagttcatctgtgaatattaagtaatgtcattgtacttactgatgcttgtaattagtttcgtaaaatcaggcgtgtacatttacaaaattttacatctgagatgaacataagtatcaaaacttttcagtgactgtgatatgatattcttcctggaactcatatttctctgctaacattccagctcaggcaatttcttctattctgagagctattttgtggtaagggagraggaggagaggcagcgttcattatgacaggaagtatgcaggc

SEQ ID NO: 12103 - DNA, 600 bp, Chicken  19866894215489_2
atggtaaagcttggattccatagtcaggcagtgagtgctctgcaggttgaaaacattggacttcatagtaatttgtgcaatgtatttgatcagtggtagctatgagtagactactgcagtagagtagactactaaaatggacttcagatttctacaattttaataatgcataagtactgaagtatattagttctccctacaggaagtagcagttgggcagtctctgacactgatctttttttctgtgaattaactctctaaacggttattattattttattytgaaatcagaaagtcttmgtgtgagctttcagttcatctgtgaatattaagtaatgtcattgtacttactgatgcttgtaattagtttcgtaaaatcaggcgtgtacatttacaaaattttacatctgagatgaacataagtatcaaaacttttcagtgactgtgatatgatattcttcctggaactcatatttctctgctaacattccagctcaggcaatttcttctattctgagagctattttgtggtaagggagraggaggagaggcagcgttcattatgacaggaagtatgcaggctcatagaatcatcttggc

SEQ ID NO: 12104 - DNA, 600 bp, Chicken  19866894215489_3
ttctgtgaattaactctctaaacggttattattattttattytgaaatcagaaagtcttmgtgtgagctttcagttcatctgtgaatattaagtaatgtcattgtacttactgatgcttgtaattagtttcgtaaaatcaggcgtgtacatttacaaaattttacatctgagatgaacataagtatcaaaacttttcagtgactgtgatatgatattcttcctggaactcatatttctctgctaacattccagctcaggcaatttcttctattctgagagctattttgtggtaagggagraggaggagaggcagcgttcattatgacaggaagtatgcaggctcatagaatcatcttggccttggaagctttgtcagtttttttgttctggagcattcagcgtgttgagagacttgtcatcaaaaccagtcattacaagagaagttacaggaaaagtggggatttttaaaatatcaaactgcacagtcattcttccttactactgatactactattaggcatctgtacatccgtggaacaaacctggacttgttggggaggtgattaaaaattgcaggttgtgtttttgggtgtgagggg

SEQ ID NO: 12105 - DNA, 600 bp, Chicken  19866894215493_1
caaggatttgtgcagaggtcgtcacctcatggtgctggggacatttcctttgctacccagagaaggatttaaaaaaaaataataattattaaaaaatttacttttggggattgggctgctttataaaaacaaaacccaacccaaaaggaactgtgacacatgctataaactctacacttcagtttgcatttttagaattccttgcaatggatctggaataaatcagcaatgggtcaaacccagttcagaaagtgtttgaatagctgcctatggagtgttcaggggtcctccgtcagctgrgtattttgactgctgctgttcaattaccatttgagaaagcaggactgctgggaaagacaacacaacgtaaaccaacactggctagaaaagcatacagtgtactgatattcatgctgcacatcctgtgctccagggactttaccaaaagcagcttcacatcacactgctcaccagtgctcccagcaaatgacgttcaatacagtcacaggtaagagctcctcagtaaaacagcaygagagcccaaaatagctaattttatctctataatagacacactgactgacaattattttacgctta

SEQ ID NO: 12106 - DNA, 600 bp, Chicken  19866894215493_2
caaacccagttcagaaagtgtttgaatagctgcctatggagtgttcaggggtcctccgtcagctgrgtattttgactgctgctgttcaattaccatttgagaaagcaggactgctgggaaagacaacacaacgtaaaccaacactggctagaaaagcatacagtgtactgatattcatgctgcacatcctgtgctccagggactttaccaaaagcagcttcacatcacactgctcaccagtgctcccagcaaatgacgttcaatacagtcacaggtaagagctcctcagtaaaacagcaygagagcccaaaatagctaattttatctctataatagacacactgactgacaattattttacgcttataaaatatgtcatgaggaatgtaccacatgcattctaggctgtctgcaygggaaatcaacggggaaattaggaaatatgacatagaaacatcactacggatatactgtattactgcttatgcagctgcagtcccagaatttgttcctcagtaattcagttacccacgtttaaacaagcagccagcaaaagaaaggctgatatatttcatatgcattctcttttagcaaggggac

SEQ ID NO: 12107 - DNA, 600 bp, Chicken  19866894215493_3
gggaaagacaacacaacgtaaaccaacactggctagaaaagcatacagtgtactgatattcatgctgcacatcctgtgctccagggactttaccaaaagcagcttcacatcacactgctcaccagtgctcccagcaaatgacgttcaatacagtcacaggtaagagctcctcagtaaaacagcaygagagcccaaaatagctaattttatctctataatagacacactgactgacaattattttacgcttataaaatatgtcatgaggaatgtaccacatgcattctaggctgtctgcaygggaaatcaacggggaaattaggaaatatgacatagaaacatcactacggatatactgtattactgcttatgcagctgcagtcccagaatttgttcctcagtaattcagttacccacgtttaaacaagcagccagcaaaagaaaggctgatatatttcatatgcattctcttttagcaaggggaccttcacgtctggtcaaaaaatgtcaggctcatatgacaccaccaaagtcaggagagatgcctaaccataactaaaagcagaatttggccaacacaattggaaaataccagcagag

SEQ ID NO: 12108 - DNA, 600 bp, Chicken  19866894215494_1
gatgaggagctacgagatatggtttagtgacttgtggtagtaagggtaacgggaggatggttggactatgatgatcctgtaggtcctttccaatcttgtgattctgtgattctatgatttaaccagtggcttcctttggaggaaccattccctcataaagtttacaccagaattctgtgatacagtctcaaaagcaagctgagaaagggtcagtccctgataactgcataaataagatttccattcagttggccactatcactgttagagcatttgtattttctgtatgtgttgataaamataaaaaaatgctaaacaagtcaccatgcattaagccttaccatagagatgaggtagtatcttttcttctaccctgaagctgtagacttcaacacaacaggcatgagttatgaaagtctaacttgtgaatggaaaaatgtggacattgcttctcaattgactgctacattctaaagggtctttgctatatattttatagaagatatacaataagtgtgggcatgtgtgtgtgcatcagtgcatttacacactcctacacccttaaactcaactactttgtcataattaacactcattatt

SEQ ID NO: 12109 - DNA, 599 bp, Chicken  19866894215495_1
  misc_feature (1)..(33): n is any nucleotide
nnnnnnnnnnnnnnnnnnnnnnnnnnnnnnnnngagacagaagaaaacccaaagctggacatcgctcacttcatataaccaccagctactccaaaagcactgctatcaacagcaagccactgcactgaactgtgtagacatttggcttacaatctgccaacaagggacaaggggacgctgatacccaggcacaggcacccagagcccaaggacaaaggagcccattgcaaacacaaacattatccaaagccaaaacagtgtcccacaaggctttccacccagcagcagagccagaaaacygctggcttcttaacacttagtagcaacacaggaacaacagaagcaaaaaaagaaaaawttggttgtcacagcaatggtcagtcagacagctcctctgcagcctggagggcacctccaggaggaaccatggctgcagcacrgccacagcaggaggcagcccagagccgaagcacagcttttcccacaggtttctaacggtttcacaagcaacagcagcattgcttacatggctgaaccccagccgtgcaatctaaggaggtgcccttgctctggataacatcagtaaggtttatttccca

SEQ ID NO: 12110 - DNA, 600 bp, Chicken  19866894215495_2
aacccaaagctggacatcgctcacttcatataaccaccagctactccaaaagcactgctatcaacagcaagccactgcactgaactgtgtagacatttggcttacaatctgccaacaagggacaaggggacgctgatacccaggcacaggcacccagagcccaaggacaaaggagcccattgcaaacacaaacattatccaaagccaaaacagtgtcccacaaggctttccacccagcagcagagccagaaaacygctggcttcttaacacttagtagcaacacaggaacaacagaagcyaaaaaagaaaaawttggttgtcacagcaatggtcagtcagacagctcctctgcagcctggagggcacctccaggaggaaccatggctgcagcacrgccacagcaggaggcagcccagagccgaagcacagcttttcccacaggtttctaacggtttcacaagcaacagcagcattgcttacatggctgaaccccagccgtgcaatctaaggaggtgcccttgctctggataacatcagtaaggtttatttcccaatgttttgcacatggtttttggaacgcgttcaagtcaatgtggttg

SEQ ID NO: 12111 - DNA, 600 bp, Chicken  19866894215495_3
acatcgctcacttcatataaccaccagctactccaaaagcactgctatcaacagcaagccactgcactgaactgtgtagacatttggcttacaatctgccaacaagggacaaggggacgctgatacccaggcacaggcacccagagcccaaggacaaaggagcccattgcaaacacaaacattatccaaagccaaaacagtgtcccacaaggctttccacccagcagcagagccagaaaacygctggcttcttaacacttagtagcaacacaggaacaacagaagcaaaaaaagaaaaawttggttgtcacagcaatggtcagtcagacagctcctctgcagcctggagggcacctccaggaggaaccatggctgcagcacrgccacagcaggaggcagcccagagccgaagcacagcttttcccacaggtttctaacggtttcacaagcaacagcagcattgcttacatggctgaaccccagccgtgcaatctaaggaggtgcccttgctctggataacatcagtaaggtttatttcccaatgttttgcacatggtttttggaacgcgttcaagtcaatgtggttgacagctgcctcgt

SEQ ID NO: 12112 - DNA, 600 bp, Chicken  19866894215495_4
tttggcttacaatctgccaacaagggacaaggggacgctgatacccaggcacaggcacccagagcccaaggacaaaggagcccattgcaaacacaaacattatccaaagccaaaacagtgtcccacaaggctttccacccagcagcagagccagaaaacygctggcttcttaacacttagtagcaacacaggaacaacagaagcaaaaaaagaaaaawttggttgtcacagcaatggtcagtcagacagctcctctgcagcctggagggcacctccaggaggaaccatggctgcagcacrgccacagcaggaggcagcccagagccgaagcacagcttttcccacaggtttctaacggtttcacaagcaacagcagcattgcttacatggctgaaccccagccgtgcaatctaaggaggtgcccttgctctggataacatcagtaaggtttatttcccaatgttttgcacatggtttttggaacgcgttcaagtcaatgtggttgacagctgcctcgtatcaggtgactcactgaagccacacatcataaattgctcttactcaagctatgaattagcatggcaggttggtaaaggagtc

SEQ ID NO: 12113 - DNA, 600 bp, Chicken  19866894215497_1
aataaatccaagagcactattgcttattttgcaattgtttcaacagagtatacgatgatatagatgctgtgtctgcatcaagtccgcttcaaacttctgtgaggaatgccattgttgaaagccagcaagtgttgtccaaagaagattttctgaagctgatgcttccagaaaacatctctgtggaggaggggagaagaaaggttagatacttttttgcgtgtaattcagacagttatgttggaaatgatcgtctggcattccaaaaatttctgtagggaaggcaacatcattttgtgtaarctaagtatattccttgggaatgctttaaatactgaccataaatcccaaaacatcatctcccacatcatgaaaatcatacttcatgattatgcatgaaataccatgtttgtctaagtatgactctgcttaactgtaaaggttgagcaagttaattataatttcaaaggttaagagtaacattttcaaggttggatggttacatttactcacctcaaattatatttaggtagaggaataaaagttttcccttgtcctgtgctactcggtacagacaattctgttcaaatcacaattctgcat

SEQ ID NO: 12114 - DNA, 600 bp, Chicken  19866894215497_2
tgctttaaatactgaccataaatcccaaaacatcatctcccacatcatgaaaatcatacttcatgattatgcatgaaataccatgtttgtctaagtatgactctgcttaactgtaaaggttgagcaagttaattataatttcaaaggttaagagtaacattttcaaggttggatggttacatttactcacctcaaattatatttaggtagaggaataaaagttttcccttgtcctgtgctactcggtacagacaattctgttcaaatcacaattctgcataattgtgcagtggttgtatscataaatgcagtggatgaaagtactcagaaggcatagttgttggtgctggaggaaagygtaactctatacagtatgaagataatcaggaatattaacaagttcacaagaagagtatagggaatttattatttactaggtttcgtgtatacatgattctgattttggggcttaatttgcaataaagcacaaagcaattgaattacttgagtaattgtcacactcagatataaattcaatgccctcttaaccccccatgttcatgcagtgtgctaaatagtgtaatcatcatgtctgaacaa

SEQ ID NO: 12115 - DNA, 600 bp, Chicken  19866894215497_3
cttcatgattatgcatgaaataccatgtttgtctaagtatgactctgcttaactgtaaaggttgagcaagttaattataatttcaaaggttaagagtaacattttcaaggttggatggttacatttactcacctcaaattatatttaggtagaggaataaaagttttcccttgtcctgtgctactcggtacagacaattctgttcaaatcacaattctgcataattgtgcagtggttgtatscataaatgcagtggatgaaagtactcagaaggcatagttgttggtgctggaggaaagygtaactctatacagtatgaagataatcaggaatattaacaagttcacaagaagagtatagggaatttattatttactaggtttcgtgtatacatgattctgattttggggcttaatttgcaataaagcacaaagcaattgaattacttgagtaattgtcacactcagatataaattcaatgccctcttaaccccccatgttcatgcagtgtgctaaatagtgtaatcatcatgtctgaacaaaagaaacacatgggaatcctctaagtgctgagtttaaaattcagattacatgtatttt

SEQ ID NO: 12116 - DNA, 600 bp, Chicken  19866894215508_1
agttaattaaagatgtgaatttagagcagatcagttcagccaccctaaaactcttagcagagcatttcattcagaattcaagcgccgttgattcagctcagcttgattcactggctgtgtgttgcaagaaattgaattaaggccattttaaatctgaatgaatgtcagcaccagcccttcttgggggttaattttctcccagtgtttcccccgagcatctcagtgcggtgctgggagccaccaatgggatgcaccagtagcaatgcccctgggtggggaatgacaccaatggcactgccytcccagtsctgactgctgtggaaatacaatatttccgttcattgtgatgggagatccagtgcagagctattaatgcagagcagctggggacttctcctacaagtgacagctactgggaagactgcagatctctgagcacagtggcatccatcacccctgccatcagcttgtcacccacatcacagacaggcatcctccgtgctcccagtgcctccaggtgtgaggtgagtgacgcccacccaacactcacatacgcaaacacaccccagtatggaacatcttgaaaaatatcattatgag

SEQ ID NO: 12117 - DNA, 600 bp, Chicken  19866894215508_2
aaagatgtgaatttagagcagatcagttcagccaccctaaaactcttagcagagcatttcattcagaattcaagcgccgttgattcagctcagcttgattcactggctgtgtgttgcaagaaattgaattaaggccattttaaatctgaatgaatgtcagcaccagcccttcttgggggttaattttctcccagtgtttcccccgagcatctcagtgcggtgctgggagccaccaatgggatgcaccagtagcaatgcccctgggtggggaatgacaccaatggcactgccytcccagtsctgactgctgtggaaatacaatatttccgttcattgtgatgggagatccagtgcagagctattaatgcagagcagctggggacttctcctacaagtgacagctactgggaagactgcagatctctgagcacagtggcatccatcacccctgccatcagcttgtcacccacatcacagacaggcatcctccgtgctcccagtgcctccaggtgtgaggtgagtgacgcccacccaacactcacatacgcaaacacaccccagtatggaacatcttgaaaaatatcattatgagcccttgat

SEQ ID NO: 12118 - DNA, 600 bp, Chicken  19866894215514_1
tggcaaatttacactttggtacagaattgtcaattcgagttttaatgtgttaaatgctttagttcaactgtgaaggaatttactactgtagctttattctgtgcttcttttgagtaattacaattcacaccactttcttttttttttcctgtttattttccctctcaaacaatgcagttcagggaataatcttagagtggcaagatatgcccaagaaattctgccttaattacttttgcaaccatgaacactctctggcaatgattataatagctttggaagatctgttatgaagttcayatctggaatagtccttgggtttgaaaattgcagagctgtacattgagtttatgctgctttaagatgggaaatggacatgcttgtgtgtgggtacaggctgctggaggcttcagaaatgaaaaccctgtgagtaggtacccagtaagcattccttctacacactttgtttgcatatttgtggtgtgctgytcacagccattcagactgcctctgtcccaagcacacctggaaggatgaagtgccttccactgaaaaaagggaaatcctgaattcctggtgcttgacgagaagggagtgtgg

SEQ ID NO: 12119 - DNA, 600 bp, Chicken  19866894215514_2
tcttagagtggcaagatatgcccaagaaattctgccttaattacttttgcaaccatgaacactctctggcaatgattataatagctttggaagatctgttatgaagttcayatctggaatagtccttgggtttgaaaattgcagagctgtacattgagtttatgctgctttaagatgggaaatggacatgcttgtgtgtgggtacaggctgctggaggcttcagaaatgaaaaccctgtgagtaggtacccagtaagcattccttctacacactttgtttgcatatttgtggtgtgctgytcacagccattcagactgcctctgtcccaagcacacctggaaggatgaagtgccttccactgaaaaaagggaaatcctgaattcctggtgcttgacgagaagggagtgtgggatggtgggtgcctgggctggctgtgctgcagctgaaccaakgcactcaacacaggcagggaggcttggggctaaggtgaggccacatcctctctgtggtaaatcctgctgtctgcatctcctgtgaaaggttaaaaggtacacagtgtttcatatttgagattaatttttaacatttgagatggatgg

SEQ ID NO: 12120 - DNA, 600 bp, Chicken  19866894215514_3
ttgagtttatgctgctttaagatgggaaatggacatgcttgtgtgtgggtacaggctgctggaggcttcagaaatgaaaaccctgtgagtaggtacccagtaagcattccttctacacactttgtttgcatatttgtggtgtgctgytcacagccattcagactgcctctgtcccaagcacacctggaaggatgaagtgccttccactgaaaaaagggaaatcctgaattcctggtgcttgacgagaagggagtgtgggatggtgggtgcctgggctggctgtgctgcagctgaaccaakgcactcaacacaggcagggaggcttggggctaaggtgaggccacatcctctctgtggtaaatcctgctgtctgcatctcctgtgaaaggttaaaaggtacacagtgtttcatatttgagattaatttttaacatttgagatggatggatatcttctttcctgctcaatgagctgcagaggttatatttcagttgctgcttttgacattggtaaaggcttttaaaggtagcatcaattgattgcagtggtttggagcctcgctgttcaattgcataagtttggcttttctttttctttctt

SEQ ID NO: 12121 - DNA, 600 bp, Chicken  19866894215515_1
tgcagaggaaagagcaaatggatttgtgctcttcatctaggaaccctagatgtgcaaagtctatcttggagaagcaagggcatcaaaaaagaaaaaagaaaaaaaaaaagacagtcagaaagctgaaggaaattaaaatgatgcaggagtgctggtgatgcagaaccacactcataagcacgcatctggagacatggacataattctggagaaaaaggatttgccctctttcagcagctgccatttggacaagttttgccatctcagctacaactcctaagcatcccttttgtcccagaytgaagagaaaggcttgtctggcagtaagttcaaargggacctttcatcagttgggttgagatgtgagttagtgttgggcctaagtgttttattgaaaatatccctccctctcttgtcatcagctatgggaaaacaaaggaagagaggaaatacagctgtaagtgtggagaaataccagtgaaattattaagggaggcttcaaacaactcaggggattacatgaactacatagggaaaataatgtctactgatgggaagaggaaactgcctaacacaaaagtcaaaatgccttcatttctc

SEQ ID NO: 12122 - DNA, 600 bp, Chicken  19866894215515_2
tctaggaaccctagatgtgcaaagtctatcttggagaagcaagggcatcaaaaaagaaaaaagaaaaaaaaaaagacagtcagaaagctgaaggaaattaaaatgatgcaggagtgctggtgatgcagaaccacactcataagcacgcatctggagacatggacataattctggagaaaaaggatttgccctctttcagcagctgccatttggacaagttttgccatctcagctacaactcctaagcatcccttttgtcccagaytgaagagaaaggcttgtctggcagtaagttcaaargggacctttcatcagttgggttgagatgtgagttagtgttgggcctaagtgttttattgaaaatatccctccctctcttgtcatcagctatgggaaaacaaaggaagagaggaaatacagctgtaagtgtggagaaataccagtgaaattattaagggaggcttcaaacaactcaggggattacatgaactacatagggaaaataatgtctactgatgggaagaggaaactgcctaacacaaaagtcaaaatgccttcatttctctactgcatgctctctggatcagaccaccaaatgca

SEQ ID NO: 12123 - DNA, 600 bp, Chicken  19866894215515_3
atgtgagttagtgttgggcctaagtgttttattgaaaatatccctccctctcttgtcatcagctatgggaaaacaaaggaagagaggaaatacagctgtaagtgtggagaaataccagtgaaattattaagggaggcttcaaacaactcaggggattacatgaactacatagggaaaataatgtctactgatgggaagaggaaactgcctaacacaaaagtcaaaatgccttcatttctctactgcatgctctctggatcagaccaccaaatgcatgaaagaatataagataaacttccycaaaagaagggcaaatggggataaaagctacatacagcgcaagaaagaggaaaaataggctgtaatttcaccaatgtctatttagtgaggaacaaacatgggatcgttaaaggaaaataccagagcttagtacaaagtcaatagtcggctggtgtgtagcatggcaagagggtgagttattacttaggagaaagtttgagggtcttgtcagggagaggctgaggaagagggagctttcagtgatgttcctgctaagtccattaccaactgaggtcgaggagcgaagggcaataaagcaca

SEQ ID NO: 12124 - DNA, 600 bp, Chicken  19866894215518_1
aagatttgggtacaatagatcagtatcagtttttcttctaaagaattatctcattacatttcacagactttgatcaagagagagaaaccaccaggactctgtaaaatcaaaatacccaggtcaaaagaagggcaacaaggctggtgaagggcttggagaacatgccccacaaggagagactgaaggaactggggctgtttagtctggggaggagaaggttgaggggagaccttattgctctcttccaatacctgaaaggtacttacagcagagcggggttggtctcttctcactgctgamaggtgacaggagaaggggaaatggcctcaagttgcaccagggtaagtttaggttggatatcaggaaacacttctttacataaagggttgttaagcactggaataggctccccagggaggtggttgagtcaccatccctggatgtgtttaaaaaccatttggatgtggtgctcaggggcatgatttagcagagggttgttagagtcagggtagtagggttaggttgtggttcgacttgatgatctttgaggtcttttccaacctgagtgattctatgattctatcattgcagccaaactca

SEQ ID NO: 12125 - DNA, 600 bp, Chicken  19866894215521_1
tgcacttcagccataaatgtgtgtttttaaatgggatatgatacaacaagcaaatataatgagtatattcattaacaaaattgcatcccttcatcataattgcgcgtctttatttctgtagagacaaaagtgcaggaatgagttcttgttggcataggtctttgcaaatgaccctgatttttgtcctaaggtctctgatttgggatagatttcacaagtcatctacttggccatgaattgtcacccctttgatgtgcccaaaccttggataaggtatgtgtgaaacttgtttacttgggyrcgtcaggaagacaatctctgatttccaggggaagttgatctggctggcttcattacatgagtagagctggtctgatttatagcgaggtgggcaagttttccaattgggcttatttttactctgagctgtaccacctgagatcctgagaattgtgacatcactgcttggcttttccttggaagtgaagccaagttatccctgtcrctctctttgatagtgatttgcagtggggagttatcactgccataaggttgtccttttctaacgtggtaacatggttacaacacttctgttctgta

SEQ ID NO: 12126 - DNA, 600 bp, Chicken  19866894215521_2
gcacttcagccataaatgtgtgtttttaaatgggatatgatacaacaagcaaatataatgagtatattcattaacaaaattgcatcccttcatcataattgcgcgtctttatttctgtagagacaaaagtgcaggaatgagttcttgttggcataggtctttgcaaatgaccctgatttttgtcctaaggtctctgatttgggatagatttcacaagtcatctacttggccatgaattgtcacccctttgatgtgcccaaaccttggataaggtatgtgtgaaacttgtttacttgggyrcgtcaggaagacaatctctgatttccaggggaagttgatctggctggcttcattacatgagtagagctggtctgatttatagcgaggtgggcaagttttccaattgggcttatttttactctgagctgtaccacctgagatcctgagaattgtgacatcactgcttggcttttccttggaagtgaagccaagttatccctgtcrctctctttgatagtgatttgcagtggggagttatcactgccataaggttgtccttttctaacgtggtaacatggttacaacacttctgttctgtaa

SEQ ID NO: 12127 - DNA, 600 bp, Chicken  19866894215521_3
tagatttcacaagtcatctacttggccatgaattgtcacccctttgatgtgcccaaaccttggataaggtatgtgtgaaacttgtttacttgggyrcgtcaggaagacaatctctgatttccaggggaagttgatctggctggcttcattacatgagtagagctggtctgatttatagcgaggtgggcaagttttccaattgggcttatttttactctgagctgtaccacctgagatcctgagaattgtgacatcactgcttggcttttccttggaagtgaagccaagttatccctgtcrctctctttgatagtgatttgcagtggggagttatcactgccataaggttgtccttttctaacgtggtaacatggttacaacacttctgttctgtaacattctgcttacttaatctttcttttggttcctgggtaaagtttgaccatcctcaccagttaacaagtgaaaattgaataatagcctacgttggccccatttaattataaaataacagaatggctgtaaggggcctctgaaggtaacaatcctgctcaagcagggctggctggtcagttgcccagtaccgtgtcagtcagcttc

SEQ ID NO: 12128 - DNA, 599 bp, Chicken  19866894215522_1
  misc_feature (1)..(6): n is any nucleotide
nnnnnncttcctgcttatataggcattgccctgtgctgccgcacaggatccagaatgtggccagcaggcatctccgtggggctctgtccttaccctgataggtgaattcctgacctcaacaagagtttcttcattaacctcagtgaacagctcgcaggcaggattttaccccatatttttgtaactgctctgcctcagtggaacagatatcaacaaacatagctgaatcagctcggtcaataacaactgttacagtattgtttcacagctgttcactgaatatttccgtgctgcctctcygttctgggaggttgagagaatgttgccaagatgtgctgggatttttggagtgtttgaaggtcatgttctcttgcagcatggaaaaaatcctcctagctggttctgtccctgtcttggaactgccatttcaaccactgtgygactggaagctctgctgctctcttacacttgagccaatacgggccgatgttttgcttttaagyacagggaggattgcagactttgttgtgccctgragtgtcgagccagtctttatccagatgcctacaagtgcagtcagtagtgctgcctcttccttg

SEQ ID NO: 12129 - DNA, 600 bp, Chicken  19866894215522_2
cagtgaacagctcgcaggcaggattttaccccatatttttgtaactgctctgcctcagtggaacagatatcaacaaacatagctgaatcagctcggtcaataacaactgttacagtattgtttcacagctgttcactgaatatttccgtgctgcctctcygttctgggaggttgagagaatgttgccaagatgtgctgggatttttggagtgtttgaaggtcatgttctcttgcagcatggaaaaaatcctcctagctggttctgtccctgtcttggaactgccatttcaaccactgtgygactggaagctctgctgctctcttacacttgagccaatacgggccgatgttttgcttttaagyacagggaggattgcagactttgttgtgccctgragtgtcgagccagtctttatccagatgcctacaagtgcagtcagtagtgctgcctcttccttgagatccatctccaggctcgacattaagaagcttactgctcccactgctcacctgagctaccagcttggctctggtgttttgtcctctgttaacttcagtatctcaattgtgtggctctgtgcagtgatggagaattgtaga

SEQ ID NO: 12130 - DNA, 600 bp, Chicken  19866894215522_3
cagatatcaacaaacatagctgaatcagctcggtcaataacaactgttacagtattgtttcacagctgttcactgaatatttccgtgctgcctctcygttctgggaggttgagagaatgttgccaagatgtgctgggatttttggagtgtttgaaggtcatgttctcttgcagcatggaaaaaatcctcctagctggttctgtccctgtcttggaactgccatttcaaccactgtgygactggaagctctgctgctctcttacacttgagccaatacgggccgatgttttgcttttaagyacagggaggattgcagactttgttgtgccctgragtgtcgagccagtctttatccagatgcctacaagtgcagtcagtagtgctgcctcttccttgagatccatctccaggctcgacattaagaagcttactgctcccactgctcacctgagctaccagcttggctctggtgttttgtcctctgttaacttcagtatctcaattgtgtggctctgtgcagtgatggagaattgtagagaggaaataagtacttttgttgtaatgagaaggagtagcgcttacatggtgaattgtcagctc

SEQ ID NO: 12131 - DNA, 600 bp, Chicken  19866894215522_4
tcaataacaactgttacagtattgtttcacagctgttcactgaatatttccgtgctgcctctcygttctgggaggttgagagaatgttgccaagatgtgctgggatttttggagtgtttgaaggtcatgttctcttgcagcatggaaaaaatcctcctagctggttctgtccctgtcttggaactgccatttcaaccactgtgygactggaagctctgctgctctcttacacttgagccaatacgggccgatgttttgcttttaagyacagggaggattgcagactttgttgtgccctgragtgtcgagccagtctttatccagatgcctacaagtgcagtcagtagtgctgcctcttccttgagatccatctccaggctcgacattaagaagcttactgctcccactgctcacctgagctaccagcttggctctggtgttttgtcctctgttaacttcagtatctcaattgtgtggctctgtgcagtgatggagaattgtagagaggaaataagtacttttgttgtaatgagaaggagtagcgcttacatggtgaattgtcagctcacgtgagctattatatcctgcctgcaatccctg

SEQ ID NO: 12132 - DNA, 600 bp, Chicken  19866894215524_1
tatcctaagctgctatcaggctctgaaatcactgacagttgcaagttcaaacaaaccaaaccttaagtgcaagcagttataaggaggaggaaatgatttttgaaaccaatgtcagaattaaaataaagtgagagatactatctgagaccaacccacgacttcatatgcaatcacatgcacaccactgacacagatagaaaccgaacagcctggcaagagaggagcttatcacaggtttaaaatgaaatcacttattctgcactgctcagcttctaagtaatgtgtaactgttacaaccamactcctctgtgcccctcactctgtcctctgctttaagctgggacaatccattaaaatacagtcacattaaattcagaggyatgaaataaatcaattatagtaaaaaaaaagcattgggtttgagcattcttttaagcgctgcctctgacagacacaggcaacgtcaaacagttttcagaacaacaataaattgtttcacttttcactacttacataaatgactgtaatgacaactgagtgactagtcagtgtcttttaaagatgtagggctggattctgcactaacatgactcygtacac

SEQ ID NO: 12133 - DNA, 600 bp, Chicken  19866894215524_2
aaggaggaggaaatgatttttgaaaccaatgtcagaattaaaataaagtgagagatactatctgagaccaacccacgacttcatatgcaatcacatgcacaccactgacacagatagaaaccgaacagcctggcaagagaggagcttatcacaggtttaaaatgaaatcacttattctgcactgctcagcttctaagtaatgtgtaactgttacaaccamactcctctgtgcccctcactctgtcctctgctttaagctgggacaatccattaaaatacagtcacattaaattcagaggyatgaaataaatcaattatagtaaaaaaaaagcattgggtttgagcattcttttaagcgctgcctctgacagacacaggcaacgtcaaacagttttcagaacaacaataaattgtttcacttttcactacttacataaatgactgtaatgacaactgagtgactagtcagtgtcttttaaagatgtagggctggattctgcactaacatgactcygtacacttacaccaaatcaatcttactgtcaagcacttatttgtaacaaaacacattttaaaacccaccttggttctgatgctgct

SEQ ID NO: 12134 - DNA, 600 bp, Chicken  19866894215524_3
aaaccaatgtcagaattaaaataaagtgagagatactatctgagaccaacccacgacttcatatgcaatcacatgcacaccactgacacagatagaaaccgaacagcctggcaagagaggagcttatcacaggtttaaaatgaaatcacttattctgcactgctcagcttctaagtaatgtgtaactgttacaaccamactcctctgtgcccctcactctgtcctctgctttaagctgggacaatccattaaaatacagtcacattaaattcagaggyatgaaataaatcaattatagtyaaaaaaaagcattgggtttgagcattcttttaagcgctgcctctgacagacacaggcaacgtcaaacagttttcagaacaacaataaattgtttcacttttcactacttacataaatgactgtaatgacaactgagtgactagtcagtgtcttttaaagatgtagggctggattctgcactaacatgactcygtacacttacaccaaatcaatcttactgtcaagcacttatttgtaacaaaacacattttaaaacccaccttggttctgatgctgctgcattcagccagcaaactcttg

SEQ ID NO: 12135 - DNA, 600 bp, Chicken  19866894215524_4
aaccamactcctctgtgcccctcactctgtcctctgctttaagctgggacaatccattaaaatacagtcacattaaattcagaggyatgaaataaatcaattatagtaaaaaaaaagcattgggtttgagcattcttttaagcgctgcctctgacagacacaggcaacgtcaaacagttttcagaacaacaataaattgtttcacttttcactacttacataaatgactgtaatgacaactgagtgactagtcagtgtcttttaaagatgtagggctggattctgcactaacatgactcygtacacttacaccaaatcaatcttactgtcaagcacttatttgtaacaaaacacattttaaaacccaccttggttctgatgctgctgcattcagccagcaaactcttgcagttcttatggacattcactgcacaatctgaaacacacacaagaagtcttaattattcttgccattcccatctacggaaagaaagagaaagacataaatgatctttacattttggaatagatgcaggttaacctggggtgtttcagtgagcatccttatgcatgccctggttgggttccaccccaggtgga

SEQ ID NO: 12136 - DNA, 600 bp, Chicken  19866894215525_1
tctattgagaacttttgttagatgtgacttatatttaataggactgatatttttatgttgtctatatggagtttgctcctcaccgtagcataagttcatagtctacttccccatgttcttcaataaaactgatatgtgataatccatatgcacctacaaagaagacaaaattagagagattgtttctagctctgctttctcgtggactatatgacagtagtcaacatgcctgaaaaatgtttccagatatgttttttacagccccattgcattagtcagcttccattaataaatcagatrcaagttgtgacatgttgttaatttgatcactaataacctgctcaaataacaaatccatgtcagcaggttggtgttgattaagtcgtagtcaccactaacatattgttttaaatgactgataaattttatttgctgcagtgatagactacctgctctgtgttttttttttgttgttgttgttttgttttgttttgtttttgttttggttggttggttggttggttggttttttgtttgtttgggtttgtttttgtggttgttcttgtttggttggttggttgctgttgattttttccctct

SEQ ID NO: 12137 - DNA, 600 bp, Chicken  19866894215528_1
taatgttccagactgctccaatttaaaggagtatttttttgttgcagtctgtttttaaataaagttgacttctttaaatgagcagattaaattattgaaaaaaggctggttattatgttgaagttttgtttcataaaacagcagtgtactatctaaataaaacttaagctcttcataaattaaagaaggtactagaaatagcttaaagatagaatcctttagcacagaaagaattttcctactttagtatggttttattgggtttccatcttgacatgtcataaatagttggacacaaamctctgtatacacagtatgaatatatattctaaatcgtccttcacaytgtttcataataccaaccactgttaaatctctattgtctactttacacaaataatcgattctgttctaaattctgatgactratttagtagctttttttcttgcttgtaatcagatgaatcctcggcagtggagccatatttctgaaagtgccaaagatctggtacgccgcatgcttatgctggatccagcagaaaggataacagtatatgaagcactgaatcatccctggttgaaggtagtaaaaccaattgt

SEQ ID NO: 12138 - DNA, 590 bp, Chicken  19866894215528_2
gtctgtttttaaataaagttgacttctttaaatgagcagattaaattattgaaaaaaggctggttattatgttgaagttttgtttcataaaacagcagtgtactatctaaataaaacttaagctcttcataaattaaagaaggtactagaaatagcttaaagatagaatcctttagcacagaaagaattttcctactttagtatggttttattgggtttccatcttgacatgtcataaatagttggacacaaamctctgtatacacagtatgaatatatattctaaatcgtccttcacaytgtttcataataccaaccactgttaaatctctattgtctactttacacaaataatcgattctgttctaaattctgatgactratttagtagctttttttcttgcttgtaatcagatgaatcctcggcagtggagccatatttctgaaagtgccaaagatctggtacgccgcatgcttatgctggatccagcagaaaggataacagtatatgaagcactgaatcatccctggttgaaggtagtaaaaccaattgtttactgtatcagttccttcttaaagggataaaaaga

SEQ ID NO: 12139 - DNA, 508 bp, Chicken  19866894215528_3
tttcataaaacagcagtgtactatctaaataaaacttaagctcttcataaattaaagaaggtactagaaatagcttaaagatagaatcctttagcacagaaagaattttcctactttagtatggttttattgggtttccatcttgacatgtcataaatagttggacacaaamctctgtatacacagtatgaatatatattctaaatcgtccttcacaytgtttcataataccaaccactgttaaatctctattgtctactttacacaaataatcgattctgttctaaattctgatgactratttagtagctttttttcttgcttgtaatcagatgaatcctcggcagtggagccatatttctgaaagtgccaaagatctggtacgccgcatgcttatgctggatccagcagaaaggataacagtatatgaagcactgaatcatccctggttgaaggtagtaaaaccaattgtttactgtatcagttccttcttaaagggataaaaaga

SEQ ID NO: 12140 - DNA, 600 bp, Chicken  19866894215529_1
gtattatactttcaacacggtattcatagagctattattcctctttgccatgcttagagagagccaagcaaagctgaagtgccaaactattgtttatatataactgaaacatgaaaacaaaaagatccactcaagcttgatctttaatttactagttagatacttcccaacctaactaacatctagccacgtgaaatggaaccaataactgagaaagtcagtcaagtgacagttatggaaccaagagactgaaaaagagttaaaaaaaaaaaaaatcactgagacataggttttagaatrtacttttgattcaatatgtgttagcatggatctttccgaagttaaaatagttttgaatgcttaagcaccttagtaagtataacaaataaacagaatctatagtagaaacttcatttcctcctatattctttgtttaccatgaccagattgtgctgtctcttgcttcaagttctccttctgaaacagctgaatatgatatagaatagtttgtacttttgtcagactacctcactcttcttatatcggccaattaatactctcttcagtactctcccacacaacttaataatgccttccctc

SEQ ID NO: 12141 - DNA, 599 bp, Chicken  19866894215536_1
  misc_feature (1)..(32): n is any nucleotide
nnnnnnnnnnnnnnnnnnnnnnnnnnnnnnnnaaaaatctactgaatttatagttaaagcattttaacaggaagatgagagagaagacactggaaccaaaggggtgaaaatccttcatctaatccttattcaccagctgagtgcttattgcttcacatgtttacacgctcacaagtctgagaattgctcaagtctcagctcagctccagccctccaggttgagagaggtgaggcatggcatggtgtggtgggttgctgctccagagccaaagctcccacaactgcagttagaaacagccktgaggttgctccctttgtgcattggaatggaacgagcgggaatgaaaattgcatcttggaaatatggagttttcacaaatcacggaggaggaagaagagagagtgggcaaaaaatagctggttgatgatgacaaccacagtggcacaargctggcgatggacataaggaaaggtttcctgcagactgcaaaacttatgtcactttgacagaagttgttattttctttcacactggctgatgccagaagctccctggggcccatgaggtctctgagctggtaagctcatgatgcttatac

SEQ ID NO: 12142 - DNA, 600 bp, Chicken  19866894215536_2
gcttcacatgtttacacgctcacaagtctgagaattgctcaagtctcagctcagctccagccctccaggttgagagaggtgaggcatggcatggtgtggtgggttgctgctccagagccaaagctcccacaactgcagttagaaacagccktgaggttgctccctttgtgcattggaatggaacgagcgggaatgaaaattgcatcttggaaatatggagttttcacaaatcacggaggaggaagaagagagagtgggcaaaaaatagctggttgatgatgacaaccacagtggcacaargctggcgatggacataaggaaaggtttcctgcagactgcaaaacttatgtcactttgacagaagttgttattttctttcacactggctgatgccagaagctccctggggcccatgaggtctctgagctggtaagctcatgatgcttatactttcaataatcagaaagtattcccaagcatctgcgctgattgacagactgacaggatctacctgcagggtaggaatagctctgaaaccataacagcagccctgagggattgatgtggtgaggtgctgggtgttcacaactcttctaaggg

SEQ ID NO: 12143 - DNA, 600 bp, Chicken  19866894215540_1
ataattactgtggtattaaaattgttagtagcagtaattaattttataatattttttaaattaaaataaatattgtgatcctattctatgtgaatttggataattagtaatttggattgaaatcagagaatactagatgtaattatgagtaaactatacattcatatttttgaccactgatatttaatcattctttttgttgataaagtctcacagaaatgaagttctgaattttaagggctcgttcatgtaatgaaaatgcattttaagaatggaaaagttaattaagttccttagttrcaagatgtaggtagtggtcaggcaaggttactcaaagcccagggaaaccttgttctggcatctgatttccagcattctaggctttgagcattttcttttgattgtaggggtcacaaagttccaacagattgtaaagagtccagaacttaaataygtstaatagtagtgtgttttacactaatacatctctagcacatctcttaagtcaatagttattctacaaccttctgtaaaacaggcttctggttcaagagcttcttcaggttcaatttctgcttgctctccctctccaggaggggc

SEQ ID NO: 12144 - DNA, 600 bp, Chicken  19866894215540_2
tatacattcatatttttgaccactgatatttaatcattctttttgttgataaagtctcacagaaatgaagttctgaattttaagggctcgttcatgtaatgaaaatgcattttaagaatggaaaagttaattaagttccttagttrcaagatgtaggtagtggtcaggcaaggttactcaaagcccagggaaaccttgttctggcatctgatttccagcattctaggctttgagcattttcttttgattgtaggggtcacaaagttccaacagattgtaaagagtccagaacttaaataygtstaatagtagtgtgttttacactaatacatctctagcacatctcttaagtcaatagttattctacaaccttctgtaaaacaggcttctggttcaagagcttcttcaggttcaatttctgcttgctctccctctccaggaggggcaatatcaactgtgctgccttcagatgaactggatgcatttagtttctgcaagtaaagttccacagaagaattttgtctcattagatacatattctgtaaaaattatactgaatcaagtcttgccagtctctgacttttgaaaacctctacattt

SEQ ID NO: 12145 - DNA, 600 bp, Chicken  19866894215540_3
acattcatatttttgaccactgatatttaatcattctttttgttgataaagtctcacagaaatgaagttctgaattttaagggctcgttcatgtaatgaaaatgcattttaagaatggaaaagttaattaagttccttagttrcaagatgtaggtagtggtcaggcaaggttactcaaagcccagggaaaccttgttctggcatctgatttccagcattctaggctttgagcattttcttttgattgtaggggtcacaaagttccaacagattgtaaagagtccagaacttaaataygtstaatagtagtgtgttttacactaatacatctctagcacatctcttaagtcaatagttattctacaaccttctgtaaaacaggcttctggttcaagagcttcttcaggttcaatttctgcttgctctccctctccaggaggggcaatatcaactgtgctgccttcagatgaactggatgcatttagtttctgcaagtaaagttccacagaagaattttgtctcattagatacatattctgtaaaaattatactgaatcaagtcttgccagtctctgacttttgaaaacctctacatttaca

SEQ ID NO: 12146 - DNA, 600 bp, Chicken  19866894215540_4
ttaagtcaatagttattctacaaccttctgtaaaacaggcttctggttcaagagcttcttcaggttcaatttctgcttgctctccctctccaggaggggcaatatcaactgtgctgccttcagatgaactggatgcatttagtttctgcaagtaaagttccacagaagaattttgtctcattagatacatattctgtaaaaattatactgaatcaagtcttgccagtctctgacttttgaaaacctctacatttacactgataagtatgcataagtaaaaccacagtaatgaggtgtacrttgtatatttctatttctccgtttaccttctcataggaaacaattaaatatgatttagctactgacctgatccacgtatatgacttctgaatttgaggctcagtggagttacaactggagatctcacatatacaacactcaagctattttctttttttttactatactagtttacattgcagaagtgcctcagatttcccaggaaaatgaactaacagaatgaactaaatgtactaaatgaattaatccccacatttatctacatatccactgcagatggtgttctcacaaacctaaacc

SEQ ID NO: 12147 - DNA, 600 bp, Chicken  19866894215540_5
actgcagatggtgttctcacaaacctaaaccatatctggatgaaagagttgtaaatttaatattaaatttctgtattagtttttccccagaaagcacaaattaccatctctgaaatctcttctttgaattctaatctcctgtgaatactgagagacctcctgaagtcccttccatcctgaatttttctgtcattctactgtttttatgtagtcaaatactacagtcctcactacggtaaaagcactcacagatgcaaaaactccaacaaagtagctcacgttacataaatcttcttagcragtaaaatatggatcaggaaaaaatgtatcagtcatgcaagactgcccataattttcttcatttaagaaagcatagttagaatggacaaacctactacagatgcatacaattaatgcaaaaactgagcacagaacttacaacttgttctcatttgtcagtattatttacgtattaaatttcttcatccaaaatacattttccttattgtgaaataagggttggtaaacagaaagcaacattaaaaagaagagcatggcactgaaattcttctggtttatactgtgtagcaataattcata

SEQ ID NO: 12148 - DNA, 600 bp, Chicken  19866894215547_1
atgtttatctgagatggaaacctaataccagataatcactttatttacgggaacacacaatggcattgctggcacagggagcacagctgctccccccagcaggagtaagcatccttatcagggaggcacagaggaggagaagggcagatgtggaggctgggagctgctgggtgattgcaggattgtcaggggacaccaggagggaggaggagccaccatctaacctcagagagggggttgaacactcctttagcaacacaagaccttcgcacaatcacagtttggcttggcctctcccarggctccggagctgctgtgactcccttgctttccacagccttcaaagcaaatcacgtctggaactgcagcagggaaaactggtctcacacagagatggaatgctgcgtgcaatgtgttcacagcatcatacagtccctcagactctgccattcatctgcagaagacagcaaacattggcactgccagctggcagagtgagcctgagggaagcagacactccgctcatccaacctggtgcaggaaggctgagcacatcagtgtgtgcaggcacactgctatccagctctgatggatatgcga

SEQ ID NO: 12149 - DNA, 600 bp, Chicken  19866894215547_2
tgctttccacagccttcaaagcaaatcacgtctggaactgcagcagggaaaactggtctcacacagagatggaatgctgcgtgcaatgtgttcacagcatcatacagtccctcagactctgccattcatctgcagaagacagcaaacattggcactgccagctggcagagtgagcctgagggaagcagacactccgctcatccaacctggtgcaggaaggctgagcacatcagtgtgtgcaggcacactgctatccagctctgatggatatgcgaccatgggtaattcatgaccagaagkccagcagcatgtcctggcacagacagagcagctggaccacctgtggtgctggacgtggaggaaaacctacatgtccacagcccatcctgacctgtctgtgttgctcctgctgtggctgctcttctctggagcttggcaatgagccttctgctctcccaacctgtattacggctgagaaccgtagaatcatagaactgagttggaaaggaccctttaaggtcatcaggcccaactcacctgcagtgatcagggacacctacatctcaatcaggtgctcagagcaccatccagcctgacctt

SEQ ID NO: 12150 - DNA, 600 bp, Chicken  19866894215551_1
ggaaccgacttaggaattcaaaacattgccgcagactttcccagcttaaaaataagacttccacaccatcggaggcatgtaggagctaaaaaaagcttctttatggaaaatgggagatctgccccagagggcacactgagtcagccctccattcttgaactgaattaaaaagaaatacagggctgctgctgttctccatcactgtgggcacagaagtaaatagcacggcagagccagccatcaaaccccagtaatgttgagagcttcgggagggaggacttgtgtacagcttgaagcacwggcatccttccattgcaggctggatcacctgcctttctctccaccccawggttgcatcagtgggaatcgagacatttctcacgctttggagaaagttgtattcaaggatatgatccaagcaagaaattccggatccgaccatcacaggcaggaaatgtcactggagcggagcactgcaagtttcatttttgcttgccattccctggggcactgtgaaccctttgaggtctttgtctggaggggagaaggaggaattaggttcctcaatatagagtggaaccctcagaaaggggaagagca

SEQ ID NO: 12151 - DNA, 600 bp, Chicken  19866894215551_2
aaataagacttccacaccatcggaggcatgtaggagctaaaaaaagcttctttatggaaaatgggagatctgccccagagggcacactgagtcagccctccattcttgaactgaattaaaaagaaatacagggctgctgctgttctccatcactgtgggcacagaagtaaatagcacggcagagccagccatcaaaccccagtaatgttgagagcttcgggagggaggacttgtgtacagcttgaagcacwggcatccttccattgcaggctggatcacctgcctttctctccaccccawggttgcatcagtgggaatcgagacatttctcacgctttggagaaagttgtattcaaggatatgatccaagcaagaaattccggatccgaccatcacaggcaggaaatgtcactggagcggagcactgcaagtttcatttttgcttgccattccctggggcactgtgaaccctttgaggtctttgtctggaggggagaaggaggaattaggttcctcaatatagagtggaaccctcagaaaggggaagagcaagtgagaggcagctcttggcttggagcttctccgttctgcttgcaagga

SEQ ID NO: 12152 - DNA, 600 bp, Chicken  19866894215556_1
agcttgagaagggtattaatattaaaacttattccttgattggccaaccaaagttcaaggtggtggtaacgcttcccatgacttggaaagaaaaggaagaagcaagtgggaggcctatgtcagagagtacaccttacaagatcttcctgctctcttcactgggctcaatttagtttagtgctcctctttatgtggactacagctacaaggcaaatttgaaagaccctggaattccagtacatgcaaaattctaggagcctgggatttcattcggtgtcaagcagtgaacattcagtgctrctagaatagtaagtgctcaccttygttaatctgcattcctcaacgttggccatacakatcaaccattgagtgattttcaagaatgtcacatcataacagacagcaataaaatcctgtttttccctcagctggccaaagcacattgtgaactgcaatcagtgtgagagctacagcatgtatgtttcctctgggctatgtctagtcttgaggttgaagttacaacagaaaaattaggcaaatccaagcggactgcattgtaaaattcccacagaagtttaataaatgagcaaaatgaataaa

SEQ ID NO: 12153 - DNA, 600 bp, Chicken  19866894215556_2
aaacttattccttgattggccaaccaaagttcaaggtggtggtaacgcttcccatgacttggaaagaaaaggaagaagcaagtgggaggcctatgtcagagagtacaccttacaagatcttcctgctctcttcactgggctcaatttagtttagtgctcctctttatgtggactacagctacaaggcaaatttgaaagaccctggaattccagtacatgcaaaattctaggagcctgggatttcattcggtgtcaagcagtgaacattcagtgctrctagaatagtaagtgctcaccttygttaatctgcattcctcaacgttggccatacakatcaaccattgagtgattttcaagaatgtcacatcataacagacagcaataaaatcctgtttttccctcagctggccaaagcacattgtgaactgcaatcagtgtgagagctacagcatgtatgtttcctctgggctatgtctagtcttgaggttgaagttacaacagaaaaattaggcaaatccaagcggactgcattgtaaaattcccacagaagtttaataaatgagcaaaatgaataaactagtgcttttccacttctaccca

SEQ ID NO: 12154 - DNA, 600 bp, Chicken  19866894215556_3
aggtggtggtaacgcttcccatgacttggaaagaaaaggaagaagcaagtgggaggcctatgtcagagagtacaccttacaagatcttcctgctctcttcactgggctcaatttagtttagtgctcctctttatgtggactacagctacaaggcaaatttgaaagaccctggaattccagtacatgcaaaattctaggagcctgggatttcattcggtgtcaagcagtgaacattcagtgctrctagaatagtaagtgctcaccttygttaatctgcattcctcaacgttggccatacakatcaaccattgagtgattttcaagaatgtcacatcataacagacagcaataaaatcctgtttttccctcagctggccaaagcacattgtgaactgcaatcagtgtgagagctacagcatgtatgtttcctctgggctatgtctagtcttgaggttgaagttacaacagaaaaattaggcaaatccaagcggactgcattgtaaaattcccacagaagtttaataaatgagcaaaatgaataaactagtgcttttccacttctacccatgagatgatgcaatctttcaaaccttggaggca

SEQ ID NO: 12155 - DNA, 600 bp, Chicken  19866894215567_1
tctttcagggataaaagagcgtaattcagctaaagataagaaagcaggggacattgatcattttccagatcagctgcaacctatcatgattttattatgcttgatttgtgcaacttagtagttatatctcactcaattttttacctttttggctgataaccaggccttgggtttttatagtatcagaaaatagtcagctaagacaaattgattcagacagttgtcacagaagtatttagctaaaattacttcaaaagttttacacttcttgacgctgcagtactgtctttgaagtgtgtwccctgaaaaatagttgctattaacaattccagacaggtgtttcaccaaagacatgtgaagatgtgtagaagagattaatattttgcagtaagtttagcctctggaggaaatatttgtctttcttgtttgacattccacttctcactttatcaaaagctttgttcacgttcaaattttcttctaaacaagtgaaattaagcaatatttggtcgaaagaattagtacagcgtgtgcttgggttttatttggatagctgctgtgataaggcagtctttcactggttctgcttttccgctgttg

SEQ ID NO: 12156 - DNA, 600 bp, Chicken  19866894215572_1
ccagagaggagatgccagtgggggaccttcattaatattcactgtaatgtacatctgtttgccccctcagccactgcatgaaaacaagggagagggggagggcagagggagtgcttcagaacgttttgcagctcaggcaatgatgctccctcagctgctctgtcagcctggcagggatggcaaacatttgccctcaatatgagccgctcttcctggccttatgagcactgaagcatctgaaattagagaggcactggctcttgctgaagcactgtaacagaactgagggtgataatgccyataaacactcagtrttaggcctggatcctgggtgtgggtgcgggtgacccacttaggatttcattgctgttgttcagaaagcctcccagtctcccttctgtcccattgagactcagstacgacagagtcatacttcatattcatctataggaacatctggcccatgtctaacatttaatttccacaccattagagtcaaacaatacgtgtacatcagtagataatgtaatgcattatcacgcaaggcagagagcagcaatttattagcctaatttaaaatagccttcagcaaaaaatagt

SEQ ID NO: 12157 - DNA, 600 bp, Chicken  19866894215572_2
ccagtgggggaccttcattaatattcactgtaatgtacatctgtttgccccctcagccactgcatgaaaacaagggagagggggagggcagagggagtgcttcagaacgttttgcagctcaggcaatgatgctccctcagctgctctgtcagcctggcagggatggcaaacatttgccctcaatatgagccgctcttcctggccttatgagcactgaagcatctgaaattagagaggcactggctcttgctgaagcactgtaacagaactgagggtgataatgccyataaacactcagtrttaggcctggatcctgggtgtgggtgcgggtgacccacttaggatttcattgctgttgttcagaaagcctcccagtctcccttctgtcccattgagactcagstacgacagagtcatacttcatattcatctataggaacatctggcccatgtctaacatttaatttccacaccattagagtcaaacaatacgtgtacatcagtagataatgtaatgcattatcacgcaaggcagagagcagcaatttattagcctaatttaaaatagccttcagcaaaaaatagtgcatcttaattcat

SEQ ID NO: 12158 - DNA, 600 bp, Chicken  19866894215572_3
agaacgttttgcagctcaggcaatgatgctccctcagctgctctgtcagcctggcagggatggcaaacatttgccctcaatatgagccgctcttcctggccttatgagcactgaagcatctgaaattagagaggcactggctcttgctgaagcactgtaacagaactgagggtgataatgccyataaacactcagtrttaggcctggatcctgggtgtgggtgcgggtgacccacttaggatttcattgctgttgttcagaaagcctcccagtctcccttctgtcccattgagactcagstacgacagagtcatacttcatattcatctataggaacatctggcccatgtctaacatttaatttccacaccattagagtcaaacaatacgtgtacatcagtagataatgtaatgcattatcacgcaaggcagagagcagcaatttattagcctaatttaaaatagccttcagcaaaaaatagtgcatcttaattcatggatctgaaaggaatgacatattttccggtaaaacgcaaaggtatgaatagagacatgcttttccacagtggtgcatatattatttctttttcctgtaaatct

SEQ ID NO: 12159 - DNA, 600 bp, Chicken  19866894215579_1
gagaccaacagccttttccactgtgcaatgactttgtctgtgtttgtaaggccatgcagctgtagagattagataaaccacttttagataaattctactgtcttgtagacattcccagatgcctgacaaagtctgcacctcacagtttctcagtgtcacaaagaaaaaatacctcttcagagatgttgtaggtaagtaggaagtttccagaaaacatttcatcatcagttcttccaggaaaaaaacttctggaatgatgtgggacatatttgagaattagaaggaaaatccaggtcctgycatagtggctctcatgcagaggcactgggtgggccctgggcactgtcctgatatctgtctctctgtagaaagggaaaattgacacaaatagttatatcatgagcactttgatgtctgaagtatgtcttatggtcttgcattcccccatctgtcagacatcagtggaggaacagaaaccattcatgacttccctggagtgagtgccaacacagataagaaatctctcatggctggctgagctggtgccccggaactggcagaggccacccaaagcagactggaggaggacccaccaaagaa

SEQ ID NO: 12160 - DNA, 600 bp, Chicken  19866894215579_2
atatctgtctctctgtagaaagggaaaattgacacaaatagttatatcatgagcactttgatgtctgaagtatgtcttatggtcttgcattcccccatctgtcagacatcagtggaggaacagaaaccattcatgacttccctggagtgagtgccaacacagataagaaatctctcatggctggctgagctggtgccccggaactggcagaggccacccaaagcagactggaggaggacccaccaaagaagactaagcaatgctgggatgtgttactgctgaaggttttaaacatgctgytgcagactgactctgctcaagccgtgtttccaaatctagcatgtaacaaagcaaacatctacccttgctgttctgttctgagagatatgacagcgacctacctccctagcaagggtgcaatccctcttcagaggaaaaggataaacaagcagcttgaggtaatttgtgctgcacacaggaagaatcatgtgctgcaacccctacagcaactccccaacatcctcactttgagagaggccctgaggtggggagctgagtgtggccaacactttttactctcttgggattgaaggaacaaca

SEQ ID NO: 12161 - DNA, 599 bp, Chicken  19866894215582_1
  misc_feature (1)..(46): n is any nucleotide
nnnnnnnnnnnnnnnnnnnnnnnnnnnnnnnnnnnnnnnnnnnnnntctgaaaaaaaaaaaatctgtgtttaattaaataggcaaaattgtcattcaagagagtggttggttagtatcacccatcaatgtagtccttaaaatataccaaaaaattaaaaccgaattaggcagctaaaagaaaacaagatttttcagagttcagcacttaaagttcaagctcagtggtcaattattgcaaaaatggagacaaaattcaacttctatttcttcaatataattttttgaaatcaacaagtagraagataaaagtaggattaatttcctaccastgtgatatacccttgaggctggaaatgaattttactggactgaatgtttccttctgatgagacagttacattttgcacatcctgtttgcaagtttgagcctgttttgtctcagattaaaacaaaacaaacaaacaaaagaaaaacacaatacaactgcaagagtatgtaaaggaaattactataatagaagtgctacagaaaagataatttagaaatcagaacttttcaatctattctcctgcatgacccttccagatatggcactgta

SEQ ID NO: 12162 - DNA, 599 bp, Chicken  19866894215582_2
  misc_feature (1)..(16): n is any nucleotide
nnnnnnnnnnnnnnnntctgaaaaaaaaaaaatctgtgtttaattaaataggcaaaattgtcattcaagagagtggttggttagtatcacccatcaatgtagtccttaaaatataccaaaaaattaaaaccgaattaggcagctaaaagaaaacaagatttttcagagttcagcacttaaagttcaagctcagtggtcaattattgcaaaaatggagacaaaattcaacttctatttcttcaatataattttttgaaatcaacaagtagraagataaaagtaggattaatttcctaccastgtgatatacccttgaggctggaaatgaattttactggactgaatgtttccttctgatgagacagttacattttgcacatcctgtttgcaagtttgagcctgttttgtctcagattaaaacaaaacaaacaaacaaaagaaaaacacaatacaactgcaagagtatgtaaaggaaattactataatagaagtgctacagaaaagataatttagaaatcagaacttttcaatctattctcctgcatgacccttccagatatggcactgtaagccaaggttggagagggtggaaaagaaat

SEQ ID NO: 12163 - DNA, 600 bp, Chicken  19866894215584_1
aatgtctgcaagtctccgagcattcacaaggagtcactgtggctaaggatcactacagctatggcagtaaactgtactgcttgagagagtgggcttagccttgtcttccatacagacgttctgtataatctcaaattccataaatagctcctggtgccatagcactccttcagcagctgtttgcaaaaagccagacactcagaccaaaaatgaggtcagctgggaccaacagcctgcagcatcttcagcaagcaaggtctggggtccagcactgcttcctgcttcccacagggcaaaacycctcacttaaagtctatgcagtgctaagacaaccccacagtaaagtccacataaaggtacattttatacagacagctggtctggtttcttcttcacctgcagcgtagacaagtctgaagtgggtttgttctcactggcattcattggaggagtgctgagaagcatctgctaccctttyyycccccccccccacaaataaaagctaggcccaagggtctttatgacctttaaacaactcagtcttgcttctgcatcccagctgcaggcaatccacctggttgagggtatttgcttgggagg

SEQ ID NO: 12164 - DNA, 600 bp, Chicken  19866894215584_10
tgtctccatgtgttcctaaatttattttcaggacagacatttattatttgtatatattccctctgtgctttttcagatattgaaggagctggataaagtccttaaattcaggggtgggagtggtgggatgaagctgtgtttggtttgtcagagacagcagtgcaaattccgtaataaagtaagatctatatcacacagttctttatttccactgatgtttctgattctgtgtggaggtcacatgatgtgacacctgcttggagctgccaaaatagtggcaagttcggagtcccacatccytgttggagtggagcccagattcccggccatgtgccgcgttggcatgctgcagggattcagccctgcttgcccttcagcccaagcatctgcttctgaccactgctggggataggcttctgggctacgtagtgctttgatctcaaacagtggagtctttctgctgcactcacacatcctcttctgggtcctttgcctccataactgtcacagtgtgtgttgctggttgtgctgtcactgatgtctgatatccagcccctctcaggtctggtgtctgctgtccaacccctctcggggctagca

SEQ ID NO: 12165 - DNA, 600 bp, Chicken  19866894215584_2
gtttgcaaaaagccagacactcagaccaaaaatgaggtcagctgggaccaacagcctgcagcatcttcagcaagcaaggtctggggtccagcactgcttcctgcttcccacagggcaaaacycctcacttaaagtctatgcagtgctaagacaaccccacagtaaagtccacataaaggtacattttatacagacagctggtctggtttcttcttcacctgcagcgtagacaagtctgaagtgggtttgttctcactggcattcattggaggagtgctgagaagcatctgctaccctttyyycccccccccccacaaataaaagctaggcccaagggtctttatgacctttaaacaactcagtcttgcttctgcatcccagctgcaggcaatccacctggttgagggtatttgcttgggaggaaagaccaccttctgcaaagagatctgagaggcttttgtttccccattgctacatcagagagatctgctgtttgagagtgcgtgcaacacctccatgaattctaaaagggaaaactacagcccctgcagaatgagcagagctataaatccagggaaaatcttcctgtgtcatttataa

SEQ ID NO: 12166 - DNA, 600 bp, Chicken  19866894215584_3
tttgcaaaaagccagacactcagaccaaaaatgaggtcagctgggaccaacagcctgcagcatcttcagcaagcaaggtctggggtccagcactgcttcctgcttcccacagggcaaaacycctcacttaaagtctatgcagtgctaagacaaccccacagtaaagtccacataaaggtacattttatacagacagctggtctggtttcttcttcacctgcagcgtagacaagtctgaagtgggtttgttctcactggcattcattggaggagtgctgagaagcatctgctaccctttyyycccccccccccacaaataaaagctaggcccaagggtctttatgacctttaaacaactcagtcttgcttctgcatcccagctgcaggcaatccacctggttgagggtatttgcttgggaggaaagaccaccttctgcaaagagatctgagaggcttttgtttccccattgctacatcagagagatctgctgtttgagagtgcgtgcaacacctccatgaattctaaaagggaaaactacagcccctgcagaatgagcagagctataaatccagggaaaatcttcctgtgtcatttataag

SEQ ID NO: 12167 - DNA, 600 bp, Chicken  19866894215584_4
ttgcaaaaagccagacactcagaccaaaaatgaggtcagctgggaccaacagcctgcagcatcttcagcaagcaaggtctggggtccagcactgcttcctgcttcccacagggcaaaacycctcacttaaagtctatgcagtgctaagacaaccccacagtaaagtccacataaaggtacattttatacagacagctggtctggtttcttcttcacctgcagcgtagacaagtctgaagtgggtttgttctcactggcattcattggaggagtgctgagaagcatctgctaccctttyyycccccccccccacaaataaaagctaggcccaagggtctttatgacctttaaacaactcagtcttgcttctgcatcccagctgcaggcaatccacctggttgagggtatttgcttgggaggaaagaccaccttctgcaaagagatctgagaggcttttgtttccccattgctacatcagagagatctgctgtttgagagtgcgtgcaacacctccatgaattctaaaagggaaaactacagcccctgcagaatgagcagagctataaatccagggaaaatcttcctgtgtcatttataagc

SEQ ID NO: 12168 - DNA, 600 bp, Chicken  19866894215584_5
tgcaaaaagccagacactcagaccaaaaatgaggtcagctgggaccaacagcctgcagcatcttcagcaagcaaggtctggggtccagcactgcttcctgcttcccacagggcaaaacycctcacttaaagtctatgcagtgctaagacaaccccacagtaaagtccacataaaggtacattttatacagacagctggtctggtttcttcttcacctgcagcgtagacaagtctgaagtgggtttgttctcactggcattcattggaggagtgctgagaagcatctgctaccctttyyyyccccccccccacaaataaaagctaggcccaagggtctttatgacctttaaacaactcagtcttgcttctgcatcccagctgcaggcaatccacctggttgagggtatttgcttgggaggaaagaccaccttctgcaaagagatctgagaggcttttgtttccccattgctacatcagagagatctgctgtttgagagtgcgtgcaacacctccatgaattctaaaagggaaaactacagcccctgcagaatgagcagagctataaatccagggaaaatcttcctgtgtcatttataagcc

SEQ ID NO: 12169 - DNA, 600 bp, Chicken  19866894215584_6
gcaaaaagccagacactcagaccaaaaatgaggtcagctgggaccaacagcctgcagcatcttcagcaagcaaggtctggggtccagcactgcttcctgcttcccacagggcaaaacycctcacttaaagtctatgcagtgctaagacaaccccacagtaaagtccacataaaggtacattttatacagacagctggtctggtttcttcttcacctgcagcgtagacaagtctgaagtgggtttgttctcactggcattcattggaggagtgctgagaagcatctgctaccctttyyycycccccccccacaaataaaagctaggcccaagggtctttatgacctttaaacaactcagtcttgcttctgcatcccagctgcaggcaatccacctggttgagggtatttgcttgggaggaaagaccaccttctgcaaagagatctgagaggcttttgtttccccattgctacatcagagagatctgctgtttgagagtgcgtgcaacacctccatgaattctaaaagggaaaactacagcccctgcagaatgagcagagctataaatccagggaaaatcttcctgtgtcatttataagcca

SEQ ID NO: 12170 - DNA, 600 bp, Chicken  19866894215584_7
caaaaagccagacactcagaccaaaaatgaggtcagctgggaccaacagcctgcagcatcttcagcaagcaaggtctggggtccagcactgcttcctgcttcccacagggcaaaacycctcacttaaagtctatgcagtgctaagacaaccccacagtaaagtccacataaaggtacattttatacagacagctggtctggtttcttcttcacctgcagcgtagacaagtctgaagtgggtttgttctcactggcattcattggaggagtgctgagaagcatctgctaccctttyyyccyccccccccacaaataaaagctaggcccaagggtctttatgacctttaaacaactcagtcttgcttctgcatcccagctgcaggcaatccacctggttgagggtatttgcttgggaggaaagaccaccttctgcaaagagatctgagaggcttttgtttccccattgctacatcagagagatctgctgtttgagagtgcgtgcaacacctccatgaattctaaaagggaaaactacagcccctgcagaatgagcagagctataaatccagggaaaatcttcctgtgtcatttataagccag

SEQ ID NO: 12171 - DNA, 600 bp, Chicken  19866894215584_8
gaaaggagttgcaagaaatagtatttaagtccttagatggtcaaacttcagaaattctgtttgttcttcacaggaaaaactggttagctacggtctgtcggctggatgtaggaagaaagtccattataatatcctgggcttagtattctaggaccaaacctaaaagcctttctctgctgtggattctctgatgcgggctctcctggcagctcttccattttgcctctccctatcagattactgataggtattttagcatagggatactgaagctagcttctgctagaaaagcagggttcyrcatcactcttgtctccatgtgttcctaaatttattttcaggacagacatttattatttgtatatattccctctgtgctttttcagatattgaaggagctggataaagtccttaaattcaggggtgggagtggtgggatgaagctgtgtttggtttgtcagagacagcagtgcaaattccgtaataaagtaagatctatatcacacagttctttatttccactgatgtttctgattctgtgtggaggtcacatgatgtgacacctgcttggagctgccaaaatagtggcaagttcggagt

SEQ ID NO: 12172 - DNA, 600 bp, Chicken  19866894215584_9
aaaggagttgcaagaaatagtatttaagtccttagatggtcaaacttcagaaattctgtttgttcttcacaggaaaaactggttagctacggtctgtcggctggatgtaggaagaaagtccattataatatcctgggcttagtattctaggaccaaacctaaaagcctttctctgctgtggattctctgatgcgggctctcctggcagctcttccattttgcctctccctatcagattactgataggtattttagcatagggatactgaagctagcttctgctagaaaagcagggttcyrcatcactcttgtctccatgtgttcctaaatttattttcaggacagacatttattatttgtatatattccctctgtgctttttcagatattgaaggagctggataaagtccttaaattcaggggtgggagtggtgggatgaagctgtgtttggtttgtcagagacagcagtgcaaattccgtaataaagtaagatctatatcacacagttctttatttccactgatgtttctgattctgtgtggaggtcacatgatgtgacacctgcttggagctgccaaaatagtggcaagttcggagtc

SEQ ID NO: 12173 - DNA, 600 bp, Chicken  19866894215593_1
caaatgctatgaattctgtgatgtgctctccaaatcccagataggaatgtgtcaggaggaaaggggtcagccgtgagtgtcatgttcctgagcaatcaaacaaataaagatcatgcatctttcccattgcccttgtgttcaggttaaaggctttctggttggtaacctgccacagatgaagagcaagtatgacaaggagagcaggcacttcttttcctgtggaagctgaagagggtggtgtttctataggctccagcttgagggagcaattgaaataaaaaagaacctccgaagaggggytgggttgggatcttgaaacatgctcattctgccgtacagcagaagaactatcactgatgatgagaatacatgacatcctaggacatcactaagccctgcagttttaatgttcacgctcctggagcccttctgttgctgtggggatgatttactgatgttgctacggcaggaagagctcctcaggctctttatagctagcatttctaccttagagctgctttgtcaagtcattcctgtgactgctggtgtcaagaaggaggttctgaagctctggtgctaacatatcccattccatttaag

SEQ ID NO: 12174 - DNA, 600 bp, Chicken  19866894215600_1
tcatactgctcagaaggaagaggataaatctccttagtgcccttacaaaacacacacctcacctttcttccagaaggctgctggcaaggtctctggccccaagcaaattacaaatggacaaaacccctggaagccccttaaggtcttaccctaggacagccatgaagatcctcctcattattaaaatccctcccttgaagtaattttgaggattaatagaaccagctcttcacgtaagtttgtttttttttttccctccagtaaaactgtgttataagaatgtcagtgtggaatgctacrctcagtgtcccagctactccagctatccactaagtgtcacgtttcattctacaataaaacttgcatttcacatgtttttcacattgttctttgcaaacatcacctgatggcacttttaaacagcaagaccaaagcgtgaaacacttcctacgtgcccttctaggtctttcaaggctcccggagccctttttgggggggtttcagcaactctgtacattttctggggcttaattcacttttgagatctgaacagataacacggagtaacatgaaaggagacagagaaacaggctgcaggga

SEQ ID NO: 12175 - DNA, 600 bp, Chicken  19866894215603_1
tcctatcactatccaccctcataatgagctactccccttcctgtttatacgctcccttcaagtactggaaggccacagtgaggtctcatgatgaaaagtactagcaaagatacacaatctgcattaaatttaaatggctgatctcaaggtgaaaggtgactcatgacgtagtcaatcttcaaagctcatttttatgcaaaaggtgacagattaatcctctgctaagctaggtgtatggaaagaagcaattttcaactccagtttagatggaactaattgtccagtacatagtcccaaagrttagatctcaaagtatggtgtgtgtatttgccctcaaagatagttttacaattagagccaagcctagctcataataaataaataaataaataaaatctgttttggtagctgctattagttaataggaagcagcaggcttattgagtaagttaatggttaatgactcctgactgtgcttaatcacagactttctttaaaaaggtgcatctgacagtctccaattaacaactgggtaaataaaaccagtccaaacaataaaatagcttatggtaaaactgttttcctctctttaagacttaa

SEQ ID NO: 12176 - DNA, 600 bp, Chicken  19866894215604_1
aatctcatggcatcattgggtgtccttcggcaccactagggtgccctatggcatcattggaagtcctatggcaccaatgggtgtcctatggcatgatctggagtcctttgacacaaccgaatgccccacagcacccctgagagtcccatggcaccattgaatgataaaggctggaaaagaccactaagaccttgtccaccaccatgcccatagccatgtccataaaccataaatcagaccccagtttggggcacccgggagatggatgtgcgtgcaaaagccaaaagtcaactcctgcarcagggaaaggaggagtggaggctttgcaaacgttttccaccccagcaccatggcacagtgacacccatgaagaccccaaatcctgcaggcagccctggcacgctccctggcagygctgcacagccccaggctcagccggccccacatcgttacagccacttcattacaatcttttaataagagatgtgctagttttacattcatttttcatttcagataacgttctgtcctatataacagcactattatccttggcgaggtgaggggaagaatatatttgctaaaagacggacgrcatta

SEQ ID NO: 12177 - DNA, 600 bp, Chicken  19866894215604_2
aaccgaatgccccacagcacccctgagagtcccatggcaccattgaatgataaaggctggaaaagaccactaagaccttgtccaccaccatgcccatagccatgtccataaaccataaatcagaccccagtttggggcacccgggagatggatgtgcgtgcaaaagccaaaagtcaactcctgcarcagggaaaggaggagtggaggctttgcaaacgttttccaccccagcaccatggcacagtgacacccatgaagaccccaaatcctgcaggcagccctggcacgctccctggcagygctgcacagccccaggctcagccggccccacatcgttacagccacttcattacaatcttttaataagagatgtgctagttttacattcatttttcatttcagataacgttctgtcctatataacagcactattatccttggcgaggtgaggggaagaatatatttgctaaaagacggacgrcattaatttttcagtcagtaccataagagatttaatctccaactcctcttttgttaatgggattagtataacttatttactgatttaattaattggcgtatcttccgctcggctgggtg

SEQ ID NO: 12178 - DNA, 600 bp, Chicken  19866894215604_3
tgcarcagggaaaggaggagtggaggctttgcaaacgttttccaccccagcaccatggcacagtgacacccatgaagaccccaaatcctgcaggcagccctggcacgctccctggcagygctgcacagccccaggctcagccggccccacatcgttacagccacttcattacaatcttttaataagagatgtgctagttttacattcatttttcatttcagataacgttctgtcctatataacagcactattatccttggcgaggtgaggggaagaatatatttgctaaaagacggacgrcattaatttttcagtcagtaccataagagatttaatctccaactcctcttttgttaatgggattagtataacttatttactgatttaattaattggcgtatcttccgctcggctgggtgcagcagctcagaaactgactgctattggaataaccgcgcttcattctcttttaggggctgcagagcgcacacggctgtgagctttataacatcgacatcatttctgatggggctcgttgagcagaggggaaaaaaaggagctccatctcccctccaacccatgaactggtggcgtttccta

SEQ ID NO: 12179 - DNA, 600 bp, Chicken  19866894215608_1
aggcctctctcccaactgtcaagaacagtctttaaacctttgttaaaaatctcatatgccaaaaactgccagaacaagaagaaagatgcagaacattggcaatgccttagatcagcaataacagggaatttaccattgagagttgattctgctccccgtttcattcctctattaacaatccccagaaccttcagacttttctgagagatgttggatacagtgaaatcagtaagcatctgagtgagcaaggaaatactttagaacgtgatccctgcatttcaggtctgaaacttaacagaytgagctasagctactttttcttttctgggtatgtaagagcccttcagtcttcaggggcactcagactctttcctttacaattctgggattttctcttaaaggtggaaaaaaaccctaaaaccaaacaactttctaagtaaatataatttgccacatttaaagcagggtcttgcagtacagagaaattatcaaaaagaccaactatttttagaggcctcatgtgggcaactgtaaaatactttattggcctttcatggaattagatgtaaacatgttgtgttaaaaagctcctgcagttag

SEQ ID NO: 12180 - DNA, 600 bp, Chicken  19866894215608_2
ctcccaactgtcaagaacagtctttaaacctttgttaaaaatctcatatgccaaaaactgccagaacaagaagaaagatgcagaacattggcaatgccttagatcagcaataacagggaatttaccattgagagttgattctgctccccgtttcattcctctattaacaatccccagaaccttcagacttttctgagagatgttggatacagtgaaatcagtaagcatctgagtgagcaaggaaatactttagaacgtgatccctgcatttcaggtctgaaacttaacagaytgagctasagctactttttcttttctgggtatgtaagagcccttcagtcttcaggggcactcagactctttcctttacaattctgggattttctcttaaaggtggaaaaaaaccctaaaaccaaacaactttctaagtaaatataatttgccacatttaaagcagggtcttgcagtacagagaaattatcaaaaagaccaactatttttagaggcctcatgtgggcaactgtaaaatactttattggcctttcatggaattagatgtaaacatgttgtgttaaaaagctcctgcagttagaaaagtgc

SEQ ID NO: 12181 - DNA, 599 bp, Chicken  19866894215609_1
  misc_feature (1)..(120): n is any nucleotide
nnnnnnnnnnnnnnnnnnnnnnnnnnnnnnnnnnnnnnnnnnnnnnnnnnnnnnnnnnnnnnnnnnnnnnnnnnnnnnnnnnnnnnnnnnnnnnnnnnnnnnnnnnnnnnnnnnnnnnnnttctattctattctgttctgttctgttccgttctgttctattctattcaaaatgcctgaaaagttttgatttcgctttctcagtgtaaaggacagcaaatggctcctgggagtgttggcgtggctgttgatgcaccccagcccctcagcagtccttctgcccgttcatccttatggatcycttccagtttgggacgttctatgattctatggtcccatgatcccacagggctttacagagaggacagtgaaggctcttggtggcttgacccaacagcaaagccagaaccacgtcctacttgccatttcctcaggccagccagtctctcgatgaccattccaaccacacagagataccacgagtatgctgtgagctggcacctgaacacccagcttggctgagacaccccatggatgcacccatgcacccattgctgagcaaggcgtgatgccgcycggagcgaggaccggctcctggag

SEQ ID NO: 12182 - DNA, 600 bp, Chicken  19866894215609_2
tctgcccgttcatccttatggatcycttccagtttgggacgttctatgattctatggtcccatgatcccacagggctttacagagaggacagtgaaggctcttggtggcttgacccaacagcaaagccagaaccacgtcctacttgccatttcctcaggccagccagtctctcgatgaccattccaaccacacagagataccacgagtatgctgtgagctggcacctgaacacccagcttggctgagacaccccatggatgcacccatgcacccattgctgagcaaggcgtgatgccgcycggagcgaggaccggctcctggaggaccccctgcctggggacagcacagaattggtcaccagcatccccgtcccggactctcctccccagtccggctgctccctgtcctttggggatggcagcagctcctcacctgattgaatttccaggccatcactcgctctccctgcagctgcgaggcatgatcgccctcccggcaaccccacgctcaccccgcggaaggaggggctaattcagttagcccggtggcattagctgccgtgaagaataacccgccaacaagggcctgcaagcctgaca

SEQ ID NO: 12183 - DNA, 473 bp, Chicken  19866894215623_1
ttttcctgtgaataatatctgtgcttgtatccttggctaagatttgagggtatgtgcagtcattttaataaactatccttatatatataaacacaatgattattgacttttaaatatgtttgtatatatataaattaatccttgcatacataactttacaatcactgtgtctgtacatatttacatgcacgcacacagacacagatcttaagactgtgcctttatttgggaagtgaccattgtagccctcagaagattgcattttgcaagatgtgagtggcagacaagactaagaagtawgatccagagtggctggaagactgtgtagaggaaatggacctgcgggtgttgattgacgctagattgaacatgatccagcagtgtgcccagttggccaagaaggccaatggcattctggcttgtatcagaaatagtgtggccagcaggaatagggaagtagttgtcctactgta

SEQ ID NO: 12184 - DNA, 600 bp, Chicken  19866894215624_1
ggattcccttatgtaaaatgtatcattgtcatgcttgtgtcttgactcagctgaacgttgtctgcagagctaattgattaccagtggctttggtggagaaaacaaagcagggtagggtttacaggtgtgacattattagagctgcctgctggtgtttggatagtacttgaagtttacagtgtttcaaagcactaacatcagtaagaatggtgagaatgtttaggggaaaagttgctatgagtttgtcctaaatagcttttactttgaaagtgtgtcagtaagtgtgctttgcttggagarggctgtgagatgactatgttgctcataaatggctcattaaataacgagtgttctgggtagcatgagactgtgagktattctagctggcaaggagcatcttttcttccaattgattttatgaaagaaattgagtttcaaggtgttctacaaactgcattcatccacatcatctctacctcttttgtttgcaaagtttgtctctctgtttgtatccagtggagtttaatcaaacagcagtgacatttaagaactattttctcaaaattctttataggcaggcaacttcttcaatttagtagt

SEQ ID NO: 12185 - DNA, 600 bp, Chicken  19866894215624_2
gattaccagtggctttggtggagaaaacaaagcagggtagggtttacaggtgtgacattattagagctgcctgctggtgtttggatagtacttgaagtttacagtgtttcaaagcactaacatcagtaagaatggtgagaatgtttaggggaaaagttgctatgagtttgtcctaaatagcttttactttgaaagtgtgtcagtaagtgtgctttgcttggagarggctgtgagatgactatgttgctcataaatggctcattaaataacgagtgttctgggtagcatgagactgtgagktattctagctggcaaggagcatcttttcttccaattgattttatgaaagaaattgagtttcaaggtgttctacaaactgcattcatccacatcatctctacctcttttgtttgcaaagtttgtctctctgtttgtatccagtggagtttaatcaaacagcagtgacatttaagaactattttctcaaaattctttataggcaggcaacttcttcaatttagtagtctgctgtgtgtgctattctttttaatcttttctttaagaatgtataaattatttagttgaatataatatctattc

SEQ ID NO: 12186 - DNA, 599 bp, Chicken  19866894215626_1
  misc_feature (1)..(26): n is any nucleotide
nnnnnnnnnnnnnnnnnnnnnnnnnntaaagtcatctgtaaaagaaaatgaaaaaatcattggctattaagcatggtgctcaaaattaatcccatgcaatctgaaaaaaaatctattaaaaaaaataaaagaatgctcataagaggaaatggcttgaagcttaaagagggtagatttatgttggatagaaggaaaaagtcttttacatgttgcccagagaggtggtagatgccccatccccagagacactcaaggctagactgggtcaggacctgagcaacctgatctagctgtgcatgyccctattcattgcaggggagctggactagatggcctttaaaggttccttccaactctaaggattctatgattctatattcaccaacagagagcaatgcttgcttcaataaacactacatggatgtaccatcactacaactcaacaaaacgcatcttctgactgccagtccttagrgctcccttaggttccattaaaaccataaggaaaatatagtaacacttctcagtagtagaaacaacattgtatttctcacttcctaactccagtcttgataaacatccccycaaaaacatctctt

SEQ ID NO: 12187 - DNA, 600 bp, Chicken  19866894215626_2
ttatgttggatagaaggaaaaagtcttttacatgttgcccagagaggtggtagatgccccatccccagagacactcaaggctagactgggtcaggacctgagcaacctgatctagctgtgcatgyccctattcattgcaggggagctggactagatggcctttaaaggttccttccaactctaaggattctatgattctatattcaccaacagagagcaatgcttgcttcaataaacactacatggatgtaccatcactacaactcaacaaaacgcatcttctgactgccagtccttagrgctcccttaggttccattaaaaccataaggaaaatatagtaacacttctcagtagtagaaacaacattgtatttctcacttcctaactccagtcttgataaacatccccycaaaaacatctcttcatatctaaaagaaaagaactmtcgcttctctctacacgcaggttttagaaaaggcttttaacagtcagaaaatctgtcatggttcccctgttattaacaatcttctttccctctcaagggactttatcagtgcacatacttacatggcaggatatttgtgtagcgatttttgcag

SEQ ID NO: 12188 - DNA, 600 bp, Chicken  19866894215626_3
tctagctgtgcatgyccctattcattgcaggggagctggactagatggcctttaaaggttccttccaactctaaggattctatgattctatattcaccaacagagagcaatgcttgcttcaataaacactacatggatgtaccatcactacaactcaacaaaacgcatcttctgactgccagtccttagrgctcccttaggttccattaaaaccataaggaaaatatagtaacacttctcagtagtagaaacaacattgtatttctcacttcctaactccagtcttgataaacatccccycaaaaacatctcttcatatctaaaagaaaagaactmtcgcttctctctacacgcaggttttagaaaaggcttttaacagtcagaaaatctgtcatggttcccctgttattaacaatcttctttccctctcaagggactttatcagtgcacatacttacatggcaggatatttgtgtagcgatttttgcagcgattcatgggaagatcagcggcaaagtgaggtatatcaagcccaatcagttttagctcctgagttaagagagataaaaatgccaaggtcaaactcaccaagactctgaa

SEQ ID NO: 12189 - DNA, 600 bp, Chicken  19866894215626_4
tggactagatggcctttaaaggttccttccaactctaaggattctatgattctatattcaccaacagagagcaatgcttgcttcaataaacactacatggatgtaccatcactacaactcaacaaaacgcatcttctgactgccagtccttagrgctcccttaggttccattaaaaccataaggaaaatatagtaacacttctcagtagtagaaacaacattgtatttctcacttcctaactccagtcttgataaacatccccycaaaaacatctcttcatatctaaaagaaaagaactmtcgcttctctctacacgcaggttttagaaaaggcttttaacagtcagaaaatctgtcatggttcccctgttattaacaatcttctttccctctcaagggactttatcagtgcacatacttacatggcaggatatttgtgtagcgatttttgcagcgattcatgggaagatcagcggcaaagtgaggtatatcaagcccaatcagttttagctcctgagttaagagagataaaaatgccaaggtcaaactcaccaagactctgaaaatgaatctttgtgaagtgaatgcttgctgtttgta

SEQ ID NO: 12190 - DNA, 600 bp, Chicken  19866894215630_1
aaataaagaggtttattggcgcggggtaaagcgcgacctcagctgagttcggcgctcggaacgcataaagtgatgagaaaagccccgcactgagctggggggcaaagaggagaatctgcaacccggaaccgccccgagtggggttaggatacaaaaccgtacaaagacctctgaaaagagaacgtcagaaaccgtcggatcatttacagtttgcagtgatacacagcgggctgatgggggctgcagagggccaacagctgctgggtttggatcagcccggacccacagctttgctttggracgggagtggggatggagaagggctgagcgctgcggcacggcccggaatcccgctgggctgcagcagtggggatgaggagaggggtggggaggacggaaggcacgcgaggccgggctctgccctgmgtgagccraagcacagctcctgcagggctgcttctgaagggactacaaaggggacaacgggacgcggtcactgcactgacgctgccatggggacaccttctattccccgctccacaccagaaatgctccttggatcygaaggaggaaactacacccggttgggtctcctcctct

SEQ ID NO: 12191 - DNA, 600 bp, Chicken  19866894215630_2
aaccgccccgagtggggttaggatacaaaaccgtacaaagacctctgaaaagagaacgtcagaaaccgtcggatcatttacagtttgcagtgatacacagcgggctgatgggggctgcagagggccaacagctgctgggtttggatcagcccggacccacagctttgctttggracgggagtggggatggagaagggctgagcgctgcggcacggcccggaatcccgctgggctgcagcagtggggatgaggagaggggtggggaggacggaaggcacgcgaggccgggctctgccctgmgtgagccraagcacagctcctgcagggctgcttctgaagggactacaaaggggacaacgggacgcggtcactgcactgacgctgccatggggacaccttctattccccgctccacaccagaaatgctccttggatcygaaggaggaaactacacccggttgggtctcctcctctctgaaggaccctcccaggctctgaaggacggcagtgttcctgcagtgacacctcacagcctccttatgcctctggctttgctgccgtcctcactgcacacgaggctaaaaggagtttaactgtaaa

SEQ ID NO: 12192 - DNA, 600 bp, Chicken  19866894215630_3
cgagtggggttaggatacaaaaccgtacaaagacctctgaaaagagaacgtcagaaaccgtcggatcatttacagtttgcagtgatacacagcgggctgatgggggctgcagagggccaacagctgctgggtttggatcagcccggacccacagctttgctttggracgggagtggggatggagaagggctgagcgctgcggcacggcccggaatcccgctgggctgcagcagtggggatgaggagaggggtggggaggacggaaggcacgcgaggccgggctctgccctgmgtgagccraagcacagctcctgcagggctgcttctgaagggactacaaaggggacaacgggacgcggtcactgcactgacgctgccatggggacaccttctattccccgctccacaccagaaatgctccttggatcygaaggaggaaactacacccggttgggtctcctcctctctgaaggaccctcccaggctctgaaggacggcagtgttcctgcagtgacacctcacagcctccttatgcctctggctttgctgccgtcctcactgcacacgaggctaaaaggagtttaactgtaaaaagaaaag

SEQ ID NO: 12193 - DNA, 508 bp, Chicken  19866894215630_4
ggtttggatcagcccggacccacagctttgctttggracgggagtggggatggagaagggctgagcgctgcggcacggcccggaatcccgctgggctgcagcagtggggatgaggagaggggtggggaggacggaaggcacgcgaggccgggctctgccctgmgtgagccraagcacagctcctgcagggctgcttctgaagggactacaaaggggacaacgggacgcggtcactgcactgacgctgccatggggacaccttctattccccgctccacaccagaaatgctccttggatcygaaggaggaaactacacccggttgggtctcctcctctctgaaggaccctcccaggctctgaaggacggcagtgttcctgcagtgacacctcacagcctccttatgcctctggctttgctgccgtcctcactgcacacgaggctaaaaggagtttaactgtaaaaagaaaagacagccttgagctgtgcagagaatagggcatcccggc

SEQ ID NO: 12194 - DNA, 599 bp, Chicken  19866894215636_1
  misc_feature (1)..(107): n is any nucleotide
nnnnnnnnnnnnnnnnnnnnnnnnnnnnnnnnnnnnnnnnnnnnnnnnnnnnnnnnnnnnnnnnnnnnnnnnnnnnnnnnnnnnnnnnnnnnnnnnnnnnnnnnnnnttccctcaacctttcctcacaggagaggtgctccagccctctgatcatcttagtggccctcctctggacccactacaagcattcccaagttacttatccttcccagtgctaaagcagtaaagttttatcagcagcaaaagcccaagccatattaggaccaaactatgctaatctacgtcctctgcaagaggayttgaagaatctgagaaatgttttctaaatgctccaggtctatctcaaaggcactgatggacaggtagaaagtaaaaatagttcacacactgattttaatacaagttgacagcctatttttccacaaaaatattccaattatccattgtacaaactgaaaattaaggcaaaagcttcaagtgatttgaagatccactacacagaatgttataaagctgaaaaagcctgatgcaaaacactgttctcattttatactgctaggtacacaacatacttcaaggtagattttttcttacatag

SEQ ID NO: 12195 - DNA, 600 bp, Chicken  19866894215636_2
ttttctaaatgctccaggtctatctcaaaggcactgatggacaggtagaaagtaaaaatagttcacacactgattttaatacaagttgacagcctatttttccacaaaaatattccaattatccattgtacaaactgaaaattaaggcaaaagcttcaagtgatttgaagatccactacacagaatgttataaagctgaaaaagcctgatgcaaaacactgttctcattttatactgctaggtacacaacatacttcaaggtagattttttcttacatagctaaagccaataaaattatytttatgcttcttcaaatgcattttatttactcaaaactcagataatctttattatgaaggaatcagaccccaaaaatcagccctggttgcatggtgagggtgatgattcctagaaacatcctgtgccttacatcccagaagaaaatattgtttcaggaaaagcaggtatgcttaaagatacttagagtttgatcctaaaatttccaatggcactctgtatgcgctttgaaccaagcagagttcaaaacaccaagtcagacataaatagacctttttaatgatgagtttaagtccctttct

SEQ ID NO: 12196 - DNA, 600 bp, Chicken  19866894215636_3
aggtatgcttaaagatacttagagtttgatcctaaaatttccaatggcactctgtatgcgctttgaaccaagcagagttcaaaacaccaagtcagacataaatagacctttttaatgatgagtttaagtccctttctccaacagatctcttcatctttacaagggatctcatcagtgataattagtaaaacattttaggccccccagtgaaatccagtagtacgcagcttttcagcacacaaagtgttacttgtcttcttcaccagatctttcaagtaggcatagataaacctacaatgsgctttatctaatgctcagttttcagatcaaatggcaagatctttatgcaataaaaaaamtagctaattgttcttgtgaagcatcctacaaagaacacactgatttgagcagattaaaagtttgkatgatgaaggtaaagatttaattccwtaatgacagaagggaaagtgactctgagaatatgggatgtatcatatgagatacttaacactgggaggagttcaagtgcccagggtttccagagccaatcaaaggtgcaagaatgtcagtcttgccataactagtgatttatttgcacgg

SEQ ID NO: 12197 - DNA, 600 bp, Chicken  19866894215636_4
gctttgaaccaagcagagttcaaaacaccaagtcagacataaatagacctttttaatgatgagtttaagtccctttctccaacagatctcttcatctttacaagggatctcatcagtgataattagtaaaacattttaggccccccagtgaaatccagtagtacgcagcttttcagcacacaaagtgttacttgtcttcttcaccagatctttcaagtaggcatagataaacctacaatgsgctttatctaatgctcagttttcagatcaaatggcaagatctttatgcaataaaaaaamtagctaattgttcttgtgaagcatcctacaaagaacacactgatttgagcagattaaaagtttgkatgatgaaggtaaagatttaattccwtaatgacagaagggaaagtgactctgagaatatgggatgtatcatatgagatacttaacactgggaggagttcaagtgcccagggtttccagagccaatcaaaggtgcaagaatgtcagtcttgccataactagtgatttatttgcacgggttatatttcctctgcctcaaatatcacatttatagtgtatatacaactatagtgtata

SEQ ID NO: 12198 - DNA, 594 bp, Chicken  19866894215636_5
taagtccctttctccaacagatctcttcatctttacaagggatctcatcagtgataattagtaaaacattttaggccccccagtgaaatccagtagtacgcagcttttcagcacacaaagtgttacttgtcttcttcaccagatctttcaagtaggcatagataaacctacaatgsgctttatctaatgctcagttttcagatcaaatggcaagatctttatgcaataaaaaaamtagctaattgttcttgtgaagcatcctacaaagaacacactgatttgagcagattaaaagtttgkatgatgaaggtaaagatttaattccwtaatgacagaagggaaagtgactctgagaatatgggatgtatcatatgagatacttaacactgggaggagttcaagtgcccagggtttccagagccaatcaaaggtgcaagaatgtcagtcttgccataactagtgatttatttgcacgggttatatttcctctgcctcaaatatcacatttatagtgtatatacaactatagtgtatacacataacatctacgttattatcactgacactacattgtgactccctttaatggcaggg

SEQ ID NO: 12199 - DNA, 568 bp, Chicken  19866894215636_6
tcatctttacaagggatctcatcagtgataattagtaaaacattttaggccccccagtgaaatccagtagtacgcagcttttcagcacacaaagtgttacttgtcttcttcaccagatctttcaagtaggcatagataaacctacaatgsgctttatctaatgctcagttttcagatcaaatggcaagatctttatgcaataaaaaaamtagctaattgttcttgtgaagcatcctacaaagaacacactgatttgagcagattaaaagtttgkatgatgaaggtaaagatttaattccwtaatgacagaagggaaagtgactctgagaatatgggatgtatcatatgagatacttaacactgggaggagttcaagtgcccagggtttccagagccaatcaaaggtgcaagaatgtcagtcttgccataactagtgatttatttgcacgggttatatttcctctgcctcaaatatcacatttatagtgtatatacaactatagtgtatacacataacatctacgttattatcactgacactacattgtgactccctttaatggcaggg

SEQ ID NO: 12200 - DNA, 600 bp, Chicken  19866894215641_1
caacaaaaccaaagcagtaaatttatatttctacaatattcacacaaacaaaagctttatctgtaattcatttttaattagaaagcattctatgataaactgatctttcttcatgtgtccgagcttatattcactaagctttatggatttactattccctaagagcactacctaacactgaaataacatctgaagtgtgcaagtaatcagagcttctgttttcaaaccttatgagatggcataaaactctgtgttaatattcagccgttgtatttattatacatgacaagagataataargtgttattaatacataataagtatcatatattaggaatgtaatgaagatgcagtgtctgactctaaaatcagttataccactgcactgtttcattcggtaaaatttacctgaattttcctaagagttcaaaaggagtagaacaaatactcaaatattttgttccgtagatctgctcataatgttgccagtctttctcgtaagtctcagcagtattttctattgaactcctaaggatacatgatatatcatgaatccatctttttgtttaacaaaaaggatagttttgccaaaaggaggat

SEQ ID NO: 12201 - DNA, 600 bp, Chicken  19866894215642_1
tttctgatacctcatgctgatcatcattcagaaggagcctgctcttatgtactacagtcacaaagcgactacagagggtgtttcttaactatgagcaatttatgttcagtaatcaggattttcagactggaattagcatatataaagcaaatccatatgttacaggacttcaaaagactcatcggaggacaaaattacagtatctaaattacaaaaaagaattaaaaagtatttgggatgtcagcatgtgcctcgatgcaaatgtatttacagggaggcagctctcttagacccaagcaytttctcatttgttcataccaracaccctcttttgtccctttttaaaaatggcaacatatattctatatgaccatgcctccagaacatttgcacttgtgtcttcctgtgtatttgagcaagttgctatctattgcactatgattttttttccttttaatatactgtcgttagtagcaattcgtaacagaagagaatatatagcatcatttatgtcagaaataaattagaaaacatgaatcattaatgtctgttctcagataactaatctagcagtagaaggcttttatacctatcaggata

SEQ ID NO: 12202 - DNA, 600 bp, Chicken  19866894215642_2
catcattcagaaggagcctgctcttatgtactacagtcacaaagcgactacagagggtgtttcttaactatgagcaatttatgttcagtaatcaggattttcagactggaattagcatatataaagcaaatccatatgttacaggacttcaaaagactcatcggaggacaaaattacagtatctaaattacaaaaaagaattaaaaagtatttgggatgtcagcatgtgcctcgatgcaaatgtatttacagggaggcagctctcttagacccaagcaytttctcatttgttcataccaracaccctcttttgtccctttttaaaaatggcaacatatattctatatgaccatgcctccagaacatttgcacttgtgtcttcctgtgtatttgagcaagttgctatctattgcactatgattttttttccttttaatatactgtcgttagtagcaattcgtaacagaagagaatatatagcatcatttatgtcagaaataaattagaaaacatgaatcattaatgtctgttctcagataactaatctagcagtagaaggcttttatacctatcaggataaacactgctacttttaatttt

SEQ ID NO: 12203 - DNA, 600 bp, Chicken  19866894215646_1
ggtaccattaagagaaaaagagagtgagtaaaagtagaaaggctttgctcagtgcagaggattatatgtgtgtatttatgtgtgtgaacctgcactataaataaacaagtaaataaatgaagggcgagactggaaattgcaaaagctgatcagcaaaatgggaagccaagagtgtgtgtctgtgagtgtgtgtgtcaatgagagaaactaagcaagccggaaaaagagaaaaagatcaggagaatatataactactcacatctaggaagttaaatgctgctactgctgtaagactgattygaagtttgagagactcactgagagaagctgttcactgccttttcctgccagctgcccaaaaatcatggaactgaaaatctgagacaatgatgtctgaagaatgatgtctgaactgctggatttgtaaaaagtgatgatgggtgatgatggggaatactacggtaattttgtaaacgtcaagtttggtgtttttaccatgttactcttttgggttatgtcagtctgaactgaaacatttgtcttgtcacattgagctgaaattttctgtgtcaattcactatctgcagccctctggacatc

SEQ ID NO: 12204 - DNA, 600 bp, Chicken  19866894215646_2
gtaaaaagtgatgatgggtgatgatggggaatactacggtaattttgtaaacgtcaagtttggtgtttttaccatgttactcttttgggttatgtcagtctgaactgaaacatttgtcttgtcacattgagctgaaattttctgtgtcaattcactatctgcagccctctggacatccacctgcatggaagatgaaggtcactaactcttacactcagtaaatattacaggtaaggttcttggcctgaatcacattcacagaatgctagaatacactgacctgctttgtttgaaccctgragcgataagattatggtgtatcctggatttgtggtccatctggaaagtcaaagccacagaaaagattaagagcctgaagcactcaaagcaaaactcccgtgaggcactccagctgtcaaggaagctgatgagcgttgggccatggtggaacaacatgttttgacatttccaaagcacattttaattgaatgctcttcaatgcacacacacatagatatatgtatctattagtctatgttggctcagttgaggctgaaaagaaataygtatctacttaaacgttccttctgattttaacca

SEQ ID NO: 12205 - DNA, 600 bp, Chicken  19866894215646_3
tagaatacactgacctgctttgtttgaaccctgragcgataagattatggtgtatcctggatttgtggtccatctggaaagtcaaagccacagaaaagattaagagcctgaagcactcaaagcaaaactcccgtgaggcactccagctgtcaaggaagctgatgagcgttgggccatggtggaacaacatgttttgacatttccaaagcacattttaattgaatgctcttcaatgcacacacacatagatatatgtatctattagtctatgttggctcagttgaggctgaaaagaaataygtatctacttaaacgttccttctgattttaaccagtctggtagggttggataacatgaaatgtgctgccagtatgttgttcactctgtgtgcatataattgcacataatttatttggaggagagagtaatgaggaaaaatcttgatgcatcagtagcctttcccccttttctgtttctctgccccaaaacaacagatcacttaagatctacagaggcagagagataccttttaatagcatttatgcatctcagaacactctgttttgtcctttgtgaatgtagaaaatactgtttgctga

SEQ ID NO: 12206 - DNA, 600 bp, Chicken  19866894215646_4
aaccagtctggtagggttggataacatgaaatgtgctgccagtatgttgttcactctgtgtgcatataattgcacataatttatttggaggagagagtaatgaggaaaaatcttgatgcatcagtagcctttcccccttttctgtttctctgccccaaaacaacagatcacttaagatctacagaggcagagagataccttttaatagcatttatgcatctcagaacactctgttttgtcctttgtgaatgtagaaaatactgtttgctgaagtggcatccagggaattacatacaacartctgaacaaaatatcacgaggatgtagaaaawtttagaaagatttgcacatcgtgatcttgatcagcaagcaaatgcaatgtttgtatgcgtgtgctagatgcatttgattaccattataaattgacctcaaaaggtcaaattgaaaagtgatcatctatttcctttcaggaggtaatggatttttaagtttggaaaaaaaaagtgtgcattacacacacccttttagcttgatatttcacatctaggtattatttaaataataacataaaataacagataataggatatgtatttcata

SEQ ID NO: 12207 - DNA, 600 bp, Chicken  19866894215646_5
gtgctgccagtatgttgttcactctgtgtgcatataattgcacataatttatttggaggagagagtaatgaggaaaaatcttgatgcatcagtagcctttcccccttttctgtttctctgccccaaaacaacagatcacttaagatctacagaggcagagagataccttttaatagcatttatgcatctcagaacactctgttttgtcctttgtgaatgtagaaaatactgtttgctgaagtggcatccagggaattacatacaacartctgaacaaaatatcacgaggatgtagaaaawtttagaaagatttgcacatcgtgatcttgatcagcaagcaaatgcaatgtttgtatgcgtgtgctagatgcatttgattaccattataaattgacctcaaaaggtcaaattgaaaagtgatcatctatttcctttcaggaggtaatggatttttaagtttggaaaaaaaaagtgtgcattacacacacccttttagcttgatatttcacatctaggtattatttaaataataacataaaataacagataataggatatgtatttcatagaatcatagaattttgggggttgaaagggacc

SEQ ID NO: 12208 - DNA, 600 bp, Chicken  19866894215649_1
cttcacttgtacaggtttgatttttggactgtctcacttgttgtgctctttagggataagtgttcacccactgtctctcaagtctccacatctggggtcatcttctctgattatagaacacttacccctgctgtaagcctgcgtacaatctgctctactccatgtgctacaggaggctgtcttgtactacacagtgcttatattcatctttctcttcctcacttgtgaggccctgtatgtgcattcagacagtatctagctgtagtgtttgctttgtgttctatataatgcactgggcartaagtgtcttggagttggtgtacctctgtaatagacaggatgtgtttgattaagcatgtgtgcagttttcagtactgacccagctgtgccccggagctgtaggcctgtttgtaaggtgcctttgactacagagtttaatacaaatatccagaggcacagcaaaacatctgtgtcctgttcaagtctacacaagacactttgcttacaaaagtgaagctttacaagcatttctcacagatacctcaaatttgctactcaatcttgtggcttgacaccacttatcttcagtgtaataaaaca

SEQ ID NO: 12209 - DNA, 600 bp, Chicken  19866894215655_1
atgcttcagtagaatagatttctaccagaccaattacttatgttaatctatgaccataatgggttaagtagataattaaactagcattcttttaaattcataccaagcttacagtaccttagaaataataaaatgcagtgtttattatacactcattttggccaatgtaattgcttttgaaatttcagctgaaatataacagtttattgctaatgtatcacttttatggttacaactccattttcatacagatctatggacggaaaagtaacagcctgagggaagatgcctttatgtctstgtatctgaagatgtagtttcagatagactgataaggtcaatagtaataggaagatctaaatgagacgggaagggaactgagtctgcttatagaaaggagtccaaaatcgattacagagagcctggaaagacagtgtttgctcttcctattggtaatgacagatgggtcggggacagctgagacatgatcttggctgaggggtcacacacctggttgttcaggcaagacagaagtcagccttcccaagaagtctgcacatgcaaacaactgttactgtccccaagtaacgcgtctcacaa

SEQ ID NO: 12210 - DNA, 600 bp, Chicken  19866894215658_1
gggcattaatgttttccagttgaaatctgtaattgtgcatcaacaaacacaaaatcgcatttcagctcctcagtatgtctgtttccatgtatttttttcctgagtcagagaagaaacatatttttctgaagttctgctttcagtattttgttaataactgatagcattttgcctgctaagaaatggcatcctaacaggaataatgcatgggtaaccacaactcatgaaatcaacggtctaactttgttatttgttagaaacaccatcttaaggatgatgggaggaaaatgagaatttatmatagtgaagatgtcttccaggagaggtctcattgtttttcagtttcacattgagatgtgctctatccctgaagtgttaatggaggtcactgttgttgctctcctttactgtgtcaaagcaagggagtttctccatagttgactactgagaaacaaaatgatgctccttccagtatatcaccttcagcttatgagcctcgagaacagcagtgattaacaggacttttacaaagtttctgtgtagttacaaggacagcttcaatcttctgtcatttttttgcattagctatgattatgcttt

SEQ ID NO: 12211 - DNA, 600 bp, Chicken  19866894215660_1
gcaatctcatttctttgaacttttccaatgacggagaggtaagcctgagccctttgctttcctgccacaaggcagacagtgcgtaatctgtacctgaaatctgagttttgcagacaaagtaaaaagaaacagtctgacttctgagtaactcttcaaaagttctatggtgcacacagacggtgcctcttaaataaccttttgcagcagccacgcaacctattcaaaggttttcacaagaagctggcattttgctggggagcacagcctcttctgaacactaagtgctaaatttcaatgagstctttcttgcctggtggttaaaccacagctctacaagtcccaacacagtggtcccgtgcctgccctttgttagcctcctctctgacctcagataagacctctgcaccatcagcactaacattttaagtattcatccatctctgctgctcagctgaagtcactttgcagaacactttggctttgttggatgagagacattattcttagtgtaatttctgatttcagttccacccacacaacctgctgcttcctgcgtcatagcatcatttctctgacttcctttctgcacaaaggtttggt

SEQ ID NO: 12212 - DNA, 600 bp, Chicken  19866894215668_1
acaattgctgtgttagtaaacatttccaagtgtctctcagatgagaacaccaacagttcaaagacaacttcccactgatctgttcagaaatagaactctgccctagtgttgctaaaattcaatacacgctgtctggaagtgtttcccaccacaaaatgtaatttatgcggcctctggtatttactagagagcagtaacacaactgaggagcacacagcttcacacaccggacacttcaccttatcctaaggctgacagtttgaggccagatcctaaggccatgagcaatgccctgcagcrccagccccaaataacacgaagggttctgatgcagtccatsagccatagtggcccaagggattgtttttccttttagaatcacagtgaaggagaacctgttctcaaatcctcatcgcagcagtcacaagagtaagagtcactcattgcatggatccttcttctaacagccagacacaaaataaataaatcaaaaggttctcctatctgtcagggccagtgcaaacctsggagaaaaagcactgcaattctgcgctgagccccagatacctttctctgctctctgaaaataggggatatcag

SEQ ID NO: 12213 - DNA, 600 bp, Chicken  19866894215668_2
atgagaacaccaacagttcaaagacaacttcccactgatctgttcagaaatagaactctgccctagtgttgctaaaattcaatacacgctgtctggaagtgtttcccaccacaaaatgtaatttatgcggcctctggtatttactagagagcagtaacacaactgaggagcacacagcttcacacaccggacacttcaccttatcctaaggctgacagtttgaggccagatcctaaggccatgagcaatgccctgcagcrccagccccaaataacacgaagggttctgatgcagtccatsagccatagtggcccaagggattgtttttccttttagaatcacagtgaaggagaacctgttctcaaatcctcatcgcagcagtcacaagagtaagagtcactcattgcatggatccttcttctaacagccagacacaaaataaataaatcaaaaggttctcctatctgtcagggccagtgcaaacctsggagaaaaagcactgcaattctgcgctgagccccagatacctttctctgctctctgaaaataggggatatcagtagggactgatctgctggacaccagtgggtatcaaatggg

SEQ ID NO: 12214 - DNA, 600 bp, Chicken  19866894215668_3
cggacacttcaccttatcctaaggctgacagtttgaggccagatcctaaggccatgagcaatgccctgcagcrccagccccaaataacacgaagggttctgatgcagtccatsagccatagtggcccaagggattgtttttccttttagaatcacagtgaaggagaacctgttctcaaatcctcatcgcagcagtcacaagagtaagagtcactcattgcatggatccttcttctaacagccagacacaaaataaataaatcaaaaggttctcctatctgtcagggccagtgcaaacctsggagaaaaagcactgcaattctgcgctgagccccagatacctttctctgctctctgaaaataggggatatcagtagggactgatctgctggacaccagtgggtatcaaatgggtactgcacacccaccagagctcaggaactgatgacaccattaactgacatgctgcacatggcttctgtgttccaagtaccatatgcatagcttgtgttttatggtactgattccaaaaatcaaagaaaagctgtggggaagagggggagggggaaatatcagggagaaattaaagttctccagagca

SEQ ID NO: 12215 - DNA, 408 bp, Chicken  19866894215671_1
gtctcctttaacttcatggtgacagcagggaagatggttctttgtaccagtcagtcagtttggagtcagtcaaggcagaagatatgtctgtcaattacccacattactgagcatgaaaacactcaacaatcttcttttcttcacaggagctgaatgaactgacaatatccattaaaacataagaaacaaatgaaacataacgaggtactagaatgctaaggataaagtagtggagccatggggcaagcactagaaaaggctatgctctcaacaacacagtgcagtgaagggaagcatttsagcagaaattgcagaagctccctcactaacagcaagatgcactagaacattcccaaggctaatcagtagtgagaattttttaacgctgagtagcatacaacccacaag

SEQ ID NO: 12216 - DNA, 600 bp, Chicken  19866894215678_1
actgctgtactttttttgtgcacaaaagccatggtttaaccccagataaatgctatctgctgcggggctttttgagtgtgctaaagatgtagaagcaagtgcagctgcaagcttccttctcaagcctcggagctacattaaactaatttaagtacctaggcaaatatgctgaaactcttctgctgaggagtgttcaggaggagaatggaatttctggttgagtatttgcacagcacttcctcagtctgaaacgagtgatcaagattataatcaggctgtgttagccaccactcagacctstctctattttaagagatgcataagaaagtgataaaagctctcaaagaagcaaattattgactcttggattggggtgtctttacccttcaggctgacatcagaccttcccatgagtcaataagaaaaagaaatccagcaagttttcagagctatttagaaaatayaaagtaaaataataaaaataataataataataataaaaaagcttatatgaaacaaagagatgtaactttccaagctactgaaggaaaattaaattgattacttggatacatgtaagaaagaaagkgaaagagagca

SEQ ID NO: 12217 - DNA, 600 bp, Chicken  19866894215678_2
tatgctgaaactcttctgctgaggagtgttcaggaggagaatggaatttctggttgagtatttgcacagcacttcctcagtctgaaacgagtgatcaagattataatcaggctgtgttagccaccactcagacctstctctattttaagagatgcataagaaagtgataaaagctctcaaagaagcaaattattgactcttggattggggtgtctttacccttcaggctgacatcagaccttcccatgagtcaataagaaaaagaaatccagcaagttttcagagctatttagaaaatayaaagtaaaataataaaaataataataataataataaaaaagcttatatgaaacaaagagatgtaactttccaagctactgaaggaaaattaaattgattacttggatacatgtaagaaagaaagkgaaagagagcaagtgagagtgcaaggctcaatgtctggatggagatcagtgacaagtggtgtcccccaggggtcagtgctggtaccgatactctttaaggtcttcatcagtgacactgatagtggggtcaaatgcaccctcggcaagtttgctgatgacaccaacctgtggggtg

SEQ ID NO: 12218 - DNA, 600 bp, Chicken  19866894215678_3
actcagacctstctctattttaagagatgcataagaaagtgataaaagctctcaaagaagcaaattattgactcttggattggggtgtctttacccttcaggctgacatcagaccttcccatgagtcaataagaaaaagaaatccagcaagttttcagagctatttagaaaatayaaagtaaaataataaaaataataataataataataaaaaagcttatatgaaacaaagagatgtaactttccaagctactgaaggaaaattaaattgattacttggatacatgtaagaaagaaagkgaaagagagcaagtgagagtgcaaggctcaatgtctggatggagatcagtgacaagtggtgtcccccaggggtcagtgctggtaccgatactctttaaggtcttcatcagtgacactgatagtggggtcaaatgcaccctcggcaagtttgctgatgacaccaacctgtggggtgcagtcaacacaccagagggacaggatgccatccagagggacctagacagccttgagcagtgggccaaggtgaacctcatgagggtcaacaaatccaaatgcaagatcttgcacctgggttgaggc

SEQ ID NO: 12219 - DNA, 600 bp, Chicken  19866894215678_4
accatggaagcagtgcagcactgggaaaatgaggtaaatgcagtgagagtgtttccccagatttcacccagtgaccacatagctgtgggtcaggcccacctagctctggaacacccatcctatatggagcccaagaggggcttcctctgtgcatggaaaccacccagtacatcaagggcatcgtcactgctagccaaacagtgatgaacaaagcctacagctaagagaaaagaaacccaaatattatgtctagaggatacaaacagtatgttcagttattaaagtgcatgaatgaaagcmaagcctgcaagaaggcacctgtcagcaggtgatgccagccaaatcaggagttgcacwtcatttctgtggtgagaggtctttaagggctgaagaaaaaaaatcacattttcacatttttaagacagtgtcataaagctatttccacacacacctaactcattgcaaaccagacagctgggaaggtcttgattgtatccctatggtatgtactgctaacacaggttgggcagggaggtgagtctgactgtcccctcccagcacgtgtctttgcaccctgggaggaaacggatgagaagatca

SEQ ID NO: 12220 - DNA, 600 bp, Chicken  19866894215678_5
cagatttcacccagtgaccacatagctgtgggtcaggcccacctagctctggaacacccatcctatatggagcccaagaggggcttcctctgtgcatggaaaccacccagtacatcaagggcatcgtcactgctagccaaacagtgatgaacaaagcctacagctaagagaaaagaaacccaaatattatgtctagaggatacaaacagtatgttcagttattaaagtgcatgaatgaaagcmaagcctgcaagaaggcacctgtcagcaggtgatgccagccaaatcaggagttgcacwtcatttctgtggtgagaggtctttaagggctgaagaaaaaaaatcacattttcacatttttaagacagtgtcataaagctatttccacacacacctaactcattgcaaaccagacagctgggaaggtcttgattgtatccctatggtatgtactgctaacacaggttgggcagggaggtgagtctgactgtcccctcccagcacgtgtctttgcaccctgggaggaaacggatgagaagatcaagcccttgatggcttgtcactgctatcacggcatgacaggtctcatatcttctccca

SEQ ID NO: 12221 - DNA, 600 bp, Chicken  19866894215682_1
tacattgtacttaattacaaaaaaacaaaacttgacaaactttagtcttgtgagcctgaggcacagaagtagtgtcagatcatttgcttaattatgaaagctgaaaagcagttaaaaatgaaattataaagagagctaagaaataccaagtctggcaaagcagaaagctgaatttttatgtcgtccataagtacttcataaatctgctgtgaactgaaatgaaagctaaaatttcaaacgagtgaatgaaaacagataagaaaaaatgatgaagtcagtagtccataggaaaaatgagayggtgttgttgttttggtgtagattccattttgccgggttaaatttttggaaaacctttgaagattgcagtgaaacattttataagaaggagttctgaatgctatcaaagaactagtcagaataccttraagagctatgtcattatctcaaaatttacagtgattaaaatttttcccagttttatatttttgcttttcatcagtgtttttttccattctatcttatcattcattttcagtctgccattaaaatgtttattaaatgaaagctatgtgactatgtaatgagaatgtgtctaat

SEQ ID NO: 12222 - DNA, 600 bp, Chicken  19866894215682_2
aagagagctaagaaataccaagtctggcaaagcagaaagctgaatttttatgtcgtccataagtacttcataaatctgctgtgaactgaaatgaaagctaaaatttcaaacgagtgaatgaaaacagataagaaaaaatgatgaagtcagtagtccataggaaaaatgagayggtgttgttgttttggtgtagattccattttgccgggttaaatttttggaaaacctttgaagattgcagtgaaacattttataagaaggagttctgaatgctatcaaagaactagtcagaataccttraagagctatgtcattatctcaaaatttacagtgattaaaatttttcccagttttatatttttgcttttcatcagtgtttttttccattctatcttatcattcattttcagtctgccattaaaatgtttattaaatgaaagctatgtgactatgtaatgagaatgtgtctaataaaaatgcgttcaattacctttttaaactgcaaaatatcaaattactgctgtgtgaagatactccatcggaagctctaagattaggagagaggtcattatgtttccctactacatgactttgtaatat

SEQ ID NO: 12223 - DNA, 600 bp, Chicken  19866894215685_1
gaaataacctcgccgttcatttctgaacagtgagcagtctgcttgctctgcacagacgttggaaagcaggtttcaatagcatcaatagcaatgacacccaggaatattcagtactactgaacagaagaaactttctgaaaatccaggggcttgctccaagatcctcaggtcaaaattcctgctccctttcatggacctggtcaaaaccagctgcaagagagtgacggaaagccaaggagcgagagaagacagcacaggtaaatcagcctgtagccagagtgacgggggacatcgggtgtrcccatgccactgcagcctaacttacacagcagaagtcacgctgatgaagaaactacatggctgctttaagaaaaaaatggaactcccatatgttgagcctatcaccactcagaccctttctcatacgcctgtctgtgtcctgttccccaccctccgggcatgtttttatcttaccactcacaggactacgcagggactccattttcatatcactgtacagcaccttgatgtagcaaacagcatttcagccccagatgggaactgtaagcactactgaaatacaagtcataacctcagtgc

SEQ ID NO: 12224 - DNA, 600 bp, Chicken  19866894215693_1
tggtgttttgggtggggaagattgctggttgtatcaaagctttgtcagtaaaggctgaaagaagggagcaggttttgcacagttatgccgcaaagctaatgaaggacagtgacaatctgttcactgacttaattaagttctgggtaaatcttgtaaagaagtagtatttaggaatggtttggaagtaagcagtgatttcaatgaaaaggaaggaaggcaagcaagctagaacatttttctgtttcatgtcaggagatttaggttctcaaaaacttacatagtggttctagttgtataatytatttgtatagttcttttgtatttcttatatatgtaaataatgttcataatgattaccattcagtttaagtcagtgtaatgagcatgtttttctccctctggcttggtttgctttaactcagaaccatctttcctatgcttttcttgtacttctgttttatgtctctattactttccagtatttcttagattcctctgcaagctytttgttcatagctatcttaaaagttaggacttcaatagcttctcttgattttagtcccttctggtaccagaagctttccttatttgcaagaatca

SEQ ID NO: 12225 - DNA, 600 bp, Chicken  19866894215693_2
aaggaaggaaggcaagcaagctagaacatttttctgtttcatgtcaggagatttaggttctcaaaaacttacatagtggttctagttgtataatytatttgtatagttcttttgtatttcttatatatgtaaataatgttcataatgattaccattcagtttaagtcagtgtaatgagcatgtttttctccctctggcttggtttgctttaactcagaaccatctttcctatgcttttcttgtacttctgttttatgtctctattactttccagtatttcttagattcctctgcaagctytttgttcatagctatcttaaaagttaggacttcaatagcttctcttgattttagtcccttctggtaccagaagctttccttatttgcaagaatcatagtgcttgcaycaaagcagatcacgttactgaagtatggccatatgtgcagcagtgacaggtgttttttactgtgtgtctacttttaaatctgtcactgggaatattataaactgtgcctacaaatctgtaacctcttatgctcattggaattttctgaaagaatctttctgttaatgctggtatctaactggttacagaagag

SEQ ID NO: 12226 - DNA, 571 bp, Chicken  19866894215693_3
tcttttgtatttcttatatatgtaaataatgttcataatgattaccattcagtttaagtcagtgtaatgagcatgtttttctccctctggcttggtttgctttaactcagaaccatctttcctatgcttttcttgtacttctgttttatgtctctattactttccagtatttcttagattcctctgcaagctytttgttcatagctatcttaaaagttaggacttcaatagcttctcttgattttagtcccttctggtaccagaagctttccttatttgcaagaatcatagtgcttgcaycaaagcagatcacgttactgaagtatggccatatgtgcagcagtgacaggtgttttttactgtgtgtctacttttaaatctgtcactgggaatattataaactgtgcctacaaatctgtaacctcttatgctcattggaattttctgaaagaatctttctgttaatgctggtatctaactggttacagaagaggtccttttagacttcttttttgttggatgtgtatgccttaatgatctcaaaagggggaaagcaaagtctgtaattggt

SEQ ID NO: 12227 - DNA, 599 bp, Chicken  19866894215706_1
  misc_feature (1)..(86): n is any nucleotide
nnnnnnnnnnnnnnnnnnnnnnnnnnnnnnnnnnnnnnnnnnnnnnnnnnnnnnnnnnnnnnnnnnnnnnnnnnnnnnnnnnnnnnttgattcagtgtttcccggagtagagaattctggatttatgcagattcctacttgtaactttgtttccctttgagtagagcacacattattaacaccgggggacattattctggctgcagatatctcacttgaaagttattttcgaagtacgtaaaattgctgagcaccttcaacgtaagctaaagtaaaaggcaaatgtttttaatgcttttmtttttcttttcttttttttttttaatgtgttatctaaccatgactcttaatttggatgagtgatatacaggacttttaaaaatttgccactgaggcatacagcacaatttaagactttatgatgtctgcgtaaagccatctggtggtgtaagcgaaggcttgccagatatggaaggtgacctactttggacatggctggcagcgggcacagggaaaggacttgaatgtagaattaactgtctggaatgcgttctaagctggaggcagtcttccgtaatggcttgcagttttttgttctg

SEQ ID NO: 12228 - DNA, 599 bp, Chicken  19866894215709_1
  misc_feature (1)..(147): n is any nucleotide
nnnnnnnnnnnnnnnnnnnnnnnnnnnnnnnnnnnnnnnnnnnnnnnnnnnnnnnnnnnnnnnnnnnnnnnnnnnnnnnnnnnnnnnnnnnnnnnnnnnnnnnnnnnnnnnnnnnnnnnnnnnnnnnnnnnnnnnnnnnnnnnnnnnttctcttttccttaatcagagctgactgcgagttcgtggagcgggatgccttgggaagggatgggacatctccacctgagcgaggagaggtgagtccctgggagtcatgccaaaagtccctctgtgcaatgggagagcagctcttttacctgwtccctccctcccacagccaaatttcccagcgaggctattgaaccagggccagttgttagctgctgttagagaaggccagyrgtgataacccagtgagcctgtatggagctggaggcaagcagccaaggtggactgtgcaaagcctacctgcttcccagagccaagcagcgctctttgccacacgccaacaaggctgtggccagcaaacaccctcctgagctgggagagagggtgggtgaaaacctgtgcaagcaggaaaagcagcagggaggaagaaagccttcctcaagcaaaaacag

SEQ ID NO: 12229 - DNA, 599 bp, Chicken  19866894215709_2
  misc_feature (1)..(67): n is any nucleotide
nnnnnnnnnnnnnnnnnnnnnnnnnnnnnnnnnnnnnnnnnnnnnnnnnnnnnnnnnnnnnnnnnnnttctcttttccttaatcagagctgactgcgagttcgtggagcgggatgccttgggaagggatgggacatctccacctgagcgaggagaggtgagtccctgggagtcatgccaaaagtccctctgtgcaatgggagagcagctcttttacctgwtccctccctcccacagccaaatttcccagcgaggctattgaaccagggccagttgttagctgctgttagagaaggccagyrgtgataacccagtgagcctgtatggagctggaggcaagcagccaaggtggactgtgcaaagcctacctgcttcccagagccaagcagcgctctttgccacacgccaacaaggctgtggccagcaaacaccctcctgagctgggagagagggtgggtgaaaacctgtgcaagcaggaaaagcagcagggaggaagaaagccttcctcaagcaaaaacagaaggtttgaatggcgtagctgggaggtggtatgagaggtgtagctgggagtcattgaggcgggcagttggtttggcattt

SEQ ID NO: 12230 - DNA, 599 bp, Chicken  19866894215709_3
  misc_feature (1)..(66): n is any nucleotide
nnnnnnnnnnnnnnnnnnnnnnnnnnnnnnnnnnnnnnnnnnnnnnnnnnnnnnnnnnnnnnnnnnttctcttttccttaatcagagctgactgcgagttcgtggagcgggatgccttgggaagggatgggacatctccacctgagcgaggagaggtgagtccctgggagtcatgccaaaagtccctctgtgcaatgggagagcagctcttttacctgwtccctccctcccacagccaaatttcccagcgaggctattgaaccagggccagttgttagctgctgttagagaaggccagyrgtgataacccagtgagcctgtatggagctggaggcaagcagccaaggtggactgtgcaaagcctacctgcttcccagagccaagcagcgctctttgccacacgccaacaaggctgtggccagcaaacaccctcctgagctgggagagagggtgggtgaaaacctgtgcaagcaggaaaagcagcagggaggaagaaagccttcctcaagcaaaaacagaaggtttgaatggcgtagctgggaggtggtatgagaggtgtagctgggagtcattgaggcgggcagttggtttggcatttt

SEQ ID NO: 12231 - DNA, 600 bp, Chicken  19866894215709_4
tggaggcaagcagccaaggtggactgtgcaaagcctacctgcttcccagagccaagcagcgctctttgccacacgccaacaaggctgtggccagcaaacaccctcctgagctgggagagagggtgggtgaaaacctgtgcaagcaggaaaagcagcagggaggaagaaagccttcctcaagcaaaaacagaaggtttgaatggcgtagctgggaggtggtatgagaggtgtagctgggagtcattgaggcgggcagttggtttggcattttgcttttgttggttgttcctcggtttagaygcaggcaggaagaataagcagagaaaagggtgttgcttgtctgcacccaccaagcacagccactgcatacaacgccttgtgtacggcctttgcttcccaccgcagtcacatctgacccttattacttctgcaaggtagaacaaggcaggaaaaatggctgtgcagtgagtttcttcatgcgccaggatttattaagaacaataggggaaatcaatccatctatgtagaatacatcgcaggctgcaatgggataaagcatttattccgctcttgaagggtagagctataactcatgggagg

SEQ ID NO: 12232 - DNA, 599 bp, Chicken  19866894215721_1
  misc_feature (1)..(206): n is any nucleotide
nnnnnnnnnnnnnnnnnnnnnnnnnnnnnnnnnnnnnnnnnnnnnnnnnnnnnnnnnnnnnnnnnnnnnnnnnnnnnnnnnnnnnnnnnnnnnnnnnnnnnnnnnnnnnnnnnnnnnnnnnnnnnnnnnnnnnnnnnnnnnnnnnnnnnnnnnnnnnnnnnnnnnnnnnnnnnnnnnnnnnnnnnnnnnnnnnnnnnnnnnnnnnntttgtaggacagataatctctgcttttgcctgacttaaccagatttagaaggtgcctggcttactagataaaagttctcgatagatttctggtrtgcactgtgaaacattttacagagaatatacttttttttttttctctttaaagcaatttagctttgatattgctgagaaagcagctcatgtgtgccttgctcatctcttcacataccaagattttgatatgggaacacttggactggcttacgttggttctcccagacctaacagccatggtggcatttgtcctaaaggcaagacttccttttcttcctttccaactgtgacttgaaagttactttttgttgtttctatttaatcctgttctagctttcatggagcatgacgtgttatt

SEQ ID NO: 12233 - DNA, 599 bp, Chicken  19866894215725_1
  misc_feature (1)..(129): n is any nucleotide
nnnnnnnnnnnnnnnnnnnnnnnnnnnnnnnnnnnnnnnnnnnnnnnnnnnnnnnnnnnnnnnnnnnnnnnnnnnnnnnnnnnnnnnnnnnnnnnnnnnnnnnnnnnnnnnnnnnnnnnnnnnnnnnnngagcactacagtgctgacatcctggttgccctgtggcttgtgtgactattggtttcatgacttgaatctagcatcctcctatccagagggaaaaatttagactatactggctttgtagtaacaaagatttcctacagtaatgaaatacttacctggtggcttgtagcaaarttaacactttattttctgctgaagtagtatgaataattaccagagtgggtctggagctgaccttgcttttctccccagatattattttctcctcctgttgtccaatctggctgttggagatttgactcataggctgccattcaacctccctacccaagaccataaaattaattgaacatgccygtctccatgtgtgttcactaaagagaccgtccattccagcataagtcagtacagcattggcatcaatatgaacaggaaatatctaaakagagggcatgaaatttgtgcactcagcc

SEQ ID NO: 12234 - DNA, 600 bp, Chicken  19866894215725_2
tcatgacttgaatctagcatcctcctatccagagggaaaaatttagactatactggctttgtagtaacaaagatttcctacagtaatgaaatacttacctggtggcttgtagcaaarttaacactttattttctgctgaagtagtatgaataattaccagagtgggtctggagctgaccttgcttttctccccagatattattttctcctcctgttgtccaatctggctgttggagatttgactcataggctgccattcaacctccctacccaagaccataaaattaattgaacatgccygtctccatgtgtgttcactaaagagaccgtccattccagcataagtcagtacagcattggcatcaatatgaacaggaaatatctaaakagagggcatgaaatttgtgcactcagcctgctatacaaaccagctcattgcacatcctctccttgtcctatatgtgtagccttttgtctcccrtgtcctttccacttaattttagtttgccctctactttcacctccattaccgtgttatacatgggcaattggccatgtgactcaatcatatcagcctcctcctgctgttttacttcaatc

SEQ ID NO: 12235 - DNA, 600 bp, Chicken  19866894215725_3
aaatacttacctggtggcttgtagcaaarttaacactttattttctgctgaagtagtatgaataattaccagagtgggtctggagctgaccttgcttttctccccagatattattttctcctcctgttgtccaatctggctgttggagatttgactcataggctgccattcaacctccctacccaagaccataaaattaattgaacatgccygtctccatgtgtgttcactaaagagaccgtccattccagcataagtcagtacagcattggcatcaatatgaacaggaaatatctaaakagagggcatgaaatttgtgcactcagcctgctatacaaaccagctcattgcacatcctctccttgtcctatatgtgtagccttttgtctcccrtgtcctttccacttaattttagtttgccctctactttcacctccattaccgtgttatacatgggcaattggccatgtgactcaatcatatcagcctcctcctgctgttttacttcaatcatctccaacctttctccactgagctgacaaagatactttctcctgtgccatggaaaaacatgatctaaacaatatgataatgttagca

SEQ ID NO: 12236 - DNA, 541 bp, Chicken  19866894215725_4
gcttttctccccagatattattttctcctcctgttgtccaatctggctgttggagatttgactcataggctgccattcaacctccctacccaagaccataaaattaattgaacatgccygtctccatgtgtgttcactaaagagaccgtccattccagcataagtcagtacagcattggcatcaatatgaacaggaaatatctaaakagagggcatgaaatttgtgcactcagcctgctatacaaaccagctcattgcacatcctctccttgtcctatatgtgtagccttttgtctcccrtgtcctttccacttaattttagtttgccctctactttcacctccattaccgtgttatacatgggcaattggccatgtgactcaatcatatcagcctcctcctgctgttttacttcaatcatctccaacctttctccactgagctgacaaagatactttctcctgtgccatggaaaaacatgatctaaacaatatgataatgttagcattctgcacgcatgatttcaatcacgtctcatgtg

SEQ ID NO: 12237 - DNA, 599 bp, Chicken  19866894215726_1
  misc_feature (1)..(87): n is any nucleotide
nnnnnnnnnnnnnnnnnnnnnnnnnnnnnnnnnnnnnnnnnnnnnnnnnnnnnnnnnnnnnnnnnnnnnnnnnnnnnnnnnnnnnnnttacccagataggattttaatgtctcagaagtttaatccacttcagaatgatgatctgccattactactatacatgtaaattgtaggtagagtctttttaaatctctttaatctcttaacccatctccccacatctcaactgatggaaactgagaaaaagttcttcactttttgaattttaaaaaataactgactttttactctgcattgccwtaycatttccattatttcattttggtcacaagcaagagttaaaagatgtgcctaaatgaagatgaaattgattaaggtgatttgggatgaaaggcacaatagaaatgtcaaatattgctactattcacttcattagtgaatgaaatcagcaatgtctgtctgcagtcaccttctcatttaagatatttgattgcttacttaattctttaaaaaaagagaaagagagagagacatgagatatgacatcaatgacatcactccagatgagctgggagtttgatttgagtttgtaatttcaa

SEQ ID NO: 12238 - DNA, 599 bp, Chicken  19866894215726_2
  misc_feature (1)..(84): n is any nucleotide
nnnnnnnnnnnnnnnnnnnnnnnnnnnnnnnnnnnnnnnnnnnnnnnnnnnnnnnnnnnnnnnnnnnnnnnnnnnnnnnnnnnnttacccagataggattttaatgtctcagaagtttaatccacttcagaatgatgatctgccattactactatacatgtaaattgtaggtagagtctttttaaatctctttaatctcttaacccatctccccacatctcaactgatggaaactgagaaaaagttcttcactttttgaattttaaaaaataactgactttttactctgcattgccwtaycatttccattatttcattttggtcacaagcaagagttaaaagatgtgcctaaatgaagatgaaattgattaaggtgatttgggatgaaaggcacaatagaaatgtcaaatattgctactattcacttcattagtgaatgaaatcagcaatgtctgtctgcagtcaccttctcatttaagatatttgattgcttacttaattctttaaaaaaagagaaagagagagagacatgagatatgacatcaatgacatcactccagatgagctgggagtttgatttgagtttgtaatttcaagct

SEQ ID NO: 12239 - DNA, 600 bp, Chicken  19866894215726_3
atttcattttggtcacaagcaagagttaaaagatgtgcctaaatgaagatgaaattgattaaggtgatttgggatgaaaggcacaatagaaatgtcaaatattgctactattcacttcattagtgaatgaaatcagcaatgtctgtctgcagtcaccttctcatttaagatatttgattgcttacttaattctttaaaaaaagagaaagagagagagacatgagatatgacatcaatgacatcactccagatgagctgggagtttgatttgagtttgtaatttcaagcttatggtggggkttttatttttatttattttattcctggggacattaagccttctgtgagtacaggtgaaactcccatgtgcatttcagaaaacaaagagcaaaaacaaacaagcagacaaaaaccaaaaccaaagcttgctggcactcatatggctcttgagagattaactgaagttccatagattttcctagaacaccaactgtaaatggttaatggtttattgacggcatcactctaattatgggtaattttccctctcttttcaaaatagctgtctttggtttacttctgagaaatgtgtcaatttat

SEQ ID NO: 12240 - DNA, 600 bp, Chicken  19866894215732_1
ggcaaccctcccctatccagccatgcccctgggcagcgccgtggagatcctggctacggatgatcctgattttgcacaggaggaggaacaggagcttcaagtgtatgaaaaacacgatgacctcctgcatgggcccaaccgccgcaagtgagtctcctgtccctggtgccatgtagctctctgggggtttccatggtgatgagctgatgcttaaatgctctggatttggctggagcatcagggtgctggctcattgctggggacagtgatgctgtagattgtccacagcaaggtgtgtgrgtgggatgcaaagggagcctgctttgggtacgctgttctcaaatgccaggcaggtgggggaacatctggagcacaattctgtattgtaactggatgctcctaagaatagcactctccctgggtgcagyctgcacgtgccctctgcttgtcccctgtgctcccctcaaggacacgggcatgtgtgcatcccctgcagggagaagatcgtcagcatggagttcatgaggaagtacatccatgtggcaaaaatgatcaagcctgtcttgacccaggagtcagcagattacatagcagaggagt

SEQ ID NO: 12241 - DNA, 600 bp, Chicken  19866894215732_2
atgggcccaaccgccgcaagtgagtctcctgtccctggtgccatgtagctctctgggggtttccatggtgatgagctgatgcttaaatgctctggatttggctggagcatcagggtgctggctcattgctggggacagtgatgctgtagattgtccacagcaaggtgtgtgrgtgggatgcaaagggagcctgctttgggtacgctgttctcaaatgccaggcaggtgggggaacatctggagcacaattctgtattgtaactggatgctcctaagaatagcactctccctgggtgcagyctgcacgtgccctctgcttgtcccctgtgctcccctcaaggacacgggcatgtgtgcatcccctgcagggagaagatcgtcagcatggagttcatgaggaagtacatccatgtggcaaaaatgatcaagcctgtcttgacccaggagtcagcagattacatagcagaggagtactcaagcctgcgcagccagaaccagatgaactcagacattgccagggtgagctccctcttccctccaatcacaccaggggggaaactgaggcacacactcctctttcacattacagggtgttttcct

SEQ ID NO: 12242 - DNA, 486 bp, Chicken  19866894215736_1
tacaatcaactcaagattcaaagaaccattattctcttctaaagatgtagattgataaaaaaatataccattctatactgtaagttatgggaatgtaaggaggctgtattacaaaaatgctctctctacgaattttggtaagtaagaatctgagtagtacaggataaaaaaggttcaaaatgctggtaatgacaagtcatcaaatctgccctgctgaatgctttttggaatgcatcacgcatttttctccccagaaagaaaggtgtacttgcatgatgaagagcgaagctaaggaggatycttagcgaagctaaggagacccacaggatcacccagtccaaccatccacccatcaccaatagttctcactawaccatgtccctcaacacaacatcyaaacattccttgaacacctccaggggtgttcaaaataatgttaacaagttgatatggaactcttgtgctgatagtaacagctgaagcata

SEQ ID NO: 12243 - DNA, 414 bp, Chicken  19866894215736_2
ctatactgtaagttatgggaatgtaaggaggctgtattacaaaaatgctctctctacgaattttggtaagtaagaatctgagtagtacaggataaaaaaggttcaaaatgctggtaatgacaagtcatcaaatctgccctgctgaatgctttttggaatgcatcacgcatttttctccccagaaagaaaggtgtacttgcatgatgaagagcgaagctaaggaggatycttagcgaagctaaggagacccacaggatcacccagtccaaccatccacccatcaccaatagttctcactawaccatgtccctcaacacaacatcyaaacattccttgaacacctccaggggtgttcaaaataatgttaacaagttgatatggaactcttgtgctgatagtaacagctgaagcata

SEQ ID NO: 12244 - DNA, 390 bp, Chicken  19866894215736_3
aaggaggctgtattacaaaaatgctctctctacgaattttggtaagtaagaatctgagtagtacaggataaaaaaggttcaaaatgctggtaatgacaagtcatcaaatctgccctgctgaatgctttttggaatgcatcacgcatttttctccccagaaagaaaggtgtacttgcatgatgaagagcgaagctaaggaggatycttagcgaagctaaggagacccacaggatcacccagtccaaccatccacccatcaccaatagttctcactawaccatgtccctcaacacaacatcyaaacattccttgaacacctccaggggtgttcaaaataatgttaacaagttgatatggaactcttgtgctgatagtaacagctgaagcata

SEQ ID NO: 12245 - DNA, 600 bp, Chicken  19866894215737_1
aactatttatcacctagatctaatcttgatcacattttcttcttagctcgtagaatattctgaaacagatggttttaaccagctttccagtaccaaaataaaaaactgctttaattaacgtgtaagcagtcatggctgtgcactccctgcatgtgcagctccccacagcacatctctcctttgtcagtggagcactgctgaaattctcccattcccattacttctgcaaacttttaggacagaccttcaattgatatgaatcaaagtagctccactgacttcatggagttgtgccagtgyatagaagccgaggctcagtgttcatatcttagttctcattttttttttcctgccaaatgtgctaagaaaataggggaatacagaggaaattacaaaagctgttgtagcattcattcatggtttgtccctttcagcaaatgcaaatgcaccagaatgtttttttcttttctgagtattgttctcatttaaatgtacactttgaaataaaacaggagatgtgctaatggaatgaagtattaagaagcacactcttacagaatctacataaaggagaacaacagagagaatgactttcaataa

SEQ ID NO: 12246 - DNA, 600 bp, Chicken  19866894215742_1
gcctcactttcactttttttttttaacctgtttgacattcctctttcttcccccatagttctaatgttctaattccaagatgagctgtaattactcgttcagcgtttcagtgtgtttcagcacagtatatatgtactgaaacaaactgaggaactgaggtgaaaatattccattctcagggttcagctccactttcacaacacctgtagtaaacaggtgagtatgaagaggaaaaaaaaaccaaaacaaaacggaaaaactaacagcaagaaaccataagcacactgctgtccctcctcratacacactacttgtcacatgaattttaaaaatatacacataaaagagaaaatgcactttcttttgtggtatcactaagcagcctaagaaaggaagtcaatgcaaacactagagatttacatctctaaatctgcaaaatgtggtctgtggctaggctagctctgcttgcccaccattccctcttccgttccccaaatcagtcattgcagcctttgcaactttgagcagaaatcacagtgaagccctgacctgtagagctctggcaagtgataggtcacccacaaaagccctaggtcggct

SEQ ID NO: 12247 - DNA, 600 bp, Chicken  19866894215744_1
gctcccagtacaagagatatggacatactggagagagtccagtgaagatagtgaagagacaggagcacctaccctatgaggagaggctgagagagctggggctgttcaggctggagaaggagtgggagtgcaaatacctgaaggaagggtgcaaaggggtcagagccaggctccttgcagtggtgctcagtgccagtacaagaggcaacagttacaaactggaacacagtttccctctgaatactgggagtcagcaaccaaaaccaagcctgttcagcagcacagatgcagacccaaagytctgtccctcctccttctcaggcaccctgtgatgcatatatccttctgtatttttttctaaagactgtagaaaatattgtctctaaaaaaactgtcactctgaatgagttttactgattatttaaaagtgggtggagggtggagcgggagagagcagtgtatgttcattttactctcaaagtgcaaagtatcccagtatgagaatgattacagattggtggatatttaagtttaatgatagaggataaaattttataattgtcctttggggcattccagagaatgcactcatatactgaa

SEQ ID NO: 12248 - DNA, 600 bp, Chicken  19866894215750_1
gaaacctaaaccaatttggcttggagaaatggataatcagtatcttagcgctttctttctaatgtgcccctcatgcttttcagtgagagcaggaaatcactgagatgagaataaatctacattctgattgtttacagagcataatgagggcctcaagaaaagaactgcatcaattgctttatgcctgtgcctgaactgccacacacgccattaaatacacactaaataataccattcaagaggtgtagcaaaatgccatatttttttatgaacatcgccttattctattattatttgccrggaartttaaaactgtccattctggagagtgwttctgctttttgtttggtttggctttttttattcatattgtatcatgggagcctcagatttcagtttgctcgttttcttcctcaatcttctgtatgactcaytccgatccagatgtaacttgctacctttatttctcttggtgcccacctcctccaagtcttacttctttacctttttctccttgttttggagagggagatctgcaactttgatagcaccccccaccagaaatgtgatcactttggtcactcaagctgtatgttctta

SEQ ID NO: 12249 - DNA, 600 bp, Chicken  19866894215750_2
ctaaaccaatttggcttggagaaatggataatcagtatcttagcgctttctttctaatgtgcccctcatgcttttcagtgagagcaggaaatcactgagatgagaataaatctacattctgattgtttacagagcataatgagggcctcaagaaaagaactgcatcaattgctttatgcctgtgcctgaactgccacacacgccattaaatacacactaaataataccattcaagaggtgtagcaaaatgccatatttttttatgaacatcgccttattctattattatttgccrggaartttaaaactgtccattctggagagtgwttctgctttttgtttggtttggctttttttattcatattgtatcatgggagcctcagatttcagtttgctcgttttcttcctcaatcttctgtatgactcaytccgatccagatgtaacttgctacctttatttctcttggtgcccacctcctccaagtcttacttctttacctttttctccttgttttggagagggagatctgcaactttgatagcaccccccaccagaaatgtgatcactttggtcactcaagctgtatgttcttagaagc

SEQ ID NO: 12250 - DNA, 600 bp, Chicken  19866894215750_3
ataatcagtatcttagcgctttctttctaatgtgcccctcatgcttttcagtgagagcaggaaatcactgagatgagaataaatctacattctgattgtttacagagcataatgagggcctcaagaaaagaactgcatcaattgctttatgcctgtgcctgaactgccacacacgccattaaatacacactaaataataccattcaagaggtgtagcaaaatgccatatttttttatgaacatcgccttattctattattatttgccrggaartttaaaactgtccattctggagagtgwttctgctttttgtttggtttggctttttttattcatattgtatcatgggagcctcagatttcagtttgctcgttttcttcctcaatcttctgtatgactcaytccgatccagatgtaacttgctacctttatttctcttggtgcccacctcctccaagtcttacttctttacctttttctccttgttttggagagggagatctgcaactttgatagcaccccccaccagaaatgtgatcactttggtcactcaagctgtatgttcttagaagcagcctctccaggtctctgacagctcca

SEQ ID NO: 12251 - DNA, 600 bp, Chicken  19866894215750_4
cagagcataatgagggcctcaagaaaagaactgcatcaattgctttatgcctgtgcctgaactgccacacacgccattaaatacacactaaataataccattcaagaggtgtagcaaaatgccatatttttttatgaacatcgccttattctattattatttgccrggaartttaaaactgtccattctggagagtgwttctgctttttgtttggtttggctttttttattcatattgtatcatgggagcctcagatttcagtttgctcgttttcttcctcaatcttctgtatgactcaytccgatccagatgtaacttgctacctttatttctcttggtgcccacctcctccaagtcttacttctttacctttttctccttgttttggagagggagatctgcaactttgatagcaccccccaccagaaatgtgatcactttggtcactcaagctgtatgttcttagaagcagcctctccaggtctctgacagctccagagtcccactccatattgctgtctgctcttttcctatggtgaattcccattctctctctcacctcagtgtttctcaccctcaaatcccaagcctattttgcc

SEQ ID NO: 12252 - DNA, 600 bp, Chicken  19866894215750_5
cttgggttcacacaccagagttcatatataatttcccttataaaattgaatcttccttatcctcactcttaagattctttgaagcttttatctgacaatatctcaactgtagtttccctctgttcccctcatctctctccagatattgcaaagatttaactttgtctctctctgtcctggcaatctccagcctgcttcaaaaaagtttatttttccttccttcttttttatcgactttctcttttcaccttgacctttaaaacacaaacattttactttatattggactcaactattaasaacaacaacaacaacaacaaaaactaacataaaaaatggtcaaatttatgtctttgacttctggtatgcacagtgcaagaggaggaggagagagctgttcattagatktcaagacaagaagaaaatgcattgctgtttggttttgtacaaggtgccacaaagcatttctgtcagtggtattatccatgctaaatccaccgcagtagagatctatcaacgagactttaatttctcctatactacactaattttcttaaaatcttgatccagcagcaaagcacttaaacatatgcttttgca

SEQ ID NO: 12253 - DNA, 600 bp, Chicken  19866894215750_6
gtagtttccctctgttcccctcatctctctccagatattgcaaagatttaactttgtctctctctgtcctggcaatctccagcctgcttcaaaaaagtttatttttccttccttcttttttatcgactttctcttttcaccttgacctttaaaacacaaacattttactttatattggactcaactattaasaacaacaacaacaacaacaaaaactaacataaaaaatggtcaaatttatgtctttgacttctggtatgcacagtgcaagaggaggaggagagagctgttcattagatktcaagacaagaagaaaatgcattgctgtttggttttgtacaaggtgccacaaagcatttctgtcagtggtattatccatgctaaatccaccgcagtagagatctatcaacgagactttaatttctcctatactacactaattttcttaaaatcttgatccagcagcaaagcacttaaacatatgcttttgcacagactttgagtgaccttgcagaagacacccaaattatacacctcatagacttacagttaagcacaagaccaattattctaccaaattagtgctttaagctagcttag

SEQ ID NO: 12254 - DNA, 600 bp, Chicken  19866894215753_1
gcaatcctgcacagtgtcaggatgggttgccctgcaaagggaggcagggttttacctcaagtactggaaaaagacacttcctccgcctgtgatcacttggcatagcaccacctggaaatgaggtgtgatggaaaaaataagccacgaagaacaaagcctacagcaaaggcaggaatgtgtaagtgagaggttcgggcatgtggctcccagcttgtggctgcgtcagctcgcttcccttggtcaaaataaaggtgtctgagtttctctgcctctgtttgctgtgatgggaggatgctcacwgcttcttttctgyrtcatcttggcctccctgttcctctgtgcccggagcccttttctttggctgctcatggtgtcggatgctcgtggttcgtgctgtaggatacagccaagccctcctggtgcaggckctggtggatggcaccgagtgccaaaaacgagccctggggaaacatctgaggacaaattgctaatgaagagagaggagtgcttttctggagggacccgcctggggaaaggraggcctttggggagctaaatattgtgtttaaarcataaaggcaggaacatgcttcccagcgt

SEQ ID NO: 12255 - DNA, 600 bp, Chicken  19866894215753_2
gtgtcaggatgggttgccctgcaaagggaggcagggttttacctcaagtactggaaaaagacacttcctccgcctgtgatcacttggcatagcaccacctggaaatgaggtgtgatggaaaaaataagccacgaagaacaaagcctacagcaaaggcaggaatgtgtaagtgagaggttcgggcatgtggctcccagcttgtggctgcgtcagctcgcttcccttggtcaaaataaaggtgtctgagtttctctgcctctgtttgctgtgatgggaggatgctcacwgcttcttttctgyrtcatcttggcctccctgttcctctgtgcccggagcccttttctttggctgctcatggtgtcggatgctcgtggttcgtgctgtaggatacagccaagccctcctggtgcaggckctggtggatggcaccgagtgccaaaaacgagccctggggaaacatctgaggacaaattgctaatgaagagagaggagtgcttttctggagggacccgcctggggaaaggraggcctttggggagctaaatattgtgtttaaarcataaaggcaggaacatgcttcccagcgtgcagacaagtggc

SEQ ID NO: 12256 - DNA, 600 bp, Chicken  19866894215753_3
tgtcaggatgggttgccctgcaaagggaggcagggttttacctcaagtactggaaaaagacacttcctccgcctgtgatcacttggcatagcaccacctggaaatgaggtgtgatggaaaaaataagccacgaagaacaaagcctacagcaaaggcaggaatgtgtaagtgagaggttcgggcatgtggctcccagcttgtggctgcgtcagctcgcttcccttggtcaaaataaaggtgtctgagtttctctgcctctgtttgctgtgatgggaggatgctcacwgcttcttttctgyrtcatcttggcctccctgttcctctgtgcccggagcccttttctttggctgctcatggtgtcggatgctcgtggttcgtgctgtaggatacagccaagccctcctggtgcaggckctggtggatggcaccgagtgccaaaaacgagccctggggaaacatctgaggacaaattgctaatgaagagagaggagtgcttttctggagggacccgcctggggaaaggraggcctttggggagctaaatattgtgtttaaarcataaaggcaggaacatgcttcccagcgtgcagacaagtggca

SEQ ID NO: 12257 - DNA, 600 bp, Chicken  19866894215753_4
tggaaaaaataagccacgaagaacaaagcctacagcaaaggcaggaatgtgtaagtgagaggttcgggcatgtggctcccagcttgtggctgcgtcagctcgcttcccttggtcaaaataaaggtgtctgagtttctctgcctctgtttgctgtgatgggaggatgctcacwgcttcttttctgyrtcatcttggcctccctgttcctctgtgcccggagcccttttctttggctgctcatggtgtcggatgctcgtggttcgtgctgtaggatacagccaagccctcctggtgcaggckctggtggatggcaccgagtgccaaaaacgagccctggggaaacatctgaggacaaattgctaatgaagagagaggagtgcttttctggagggacccgcctggggaaaggraggcctttggggagctaaatattgtgtttaaarcataaaggcaggaacatgcttcccagcgtgcagacaagtggcatgcaagctgccttgttttgtggcacaccggtaggtgcaaaggaaatgctgtggctgatagaaagcaaaagggctggtggatgtgacatggaaagcagacgggctgtgaggaggt

SEQ ID NO: 12258 - DNA, 600 bp, Chicken  19866894215753_5
ggtcaaaataaaggtgtctgagtttctctgcctctgtttgctgtgatgggaggatgctcacwgcttcttttctgyrtcatcttggcctccctgttcctctgtgcccggagcccttttctttggctgctcatggtgtcggatgctcgtggttcgtgctgtaggatacagccaagccctcctggtgcaggckctggtggatggcaccgagtgccaaaaacgagccctggggaaacatctgaggacaaattgctaatgaagagagaggagtgcttttctggagggacccgcctggggaaaggraggcctttggggagctaaatattgtgtttaaarcataaaggcaggaacatgcttcccagcgtgcagacaagtggcatgcaagctgccttgttttgtggcacaccggtaggtgcaaaggaaatgctgtggctgatagaaagcaaaagggctggtggatgtgacatggaaagcagacgggctgtgaggaggtgtcttgctctgacacactgcacatctgaatccagctaggtcttcgtattgatttttgtaaaagcccttccaattacttttgcaatgagctcattccttctggcacatctc

SEQ ID NO: 12259 - DNA, 573 bp, Chicken  19866894215753_6
ctgtttgctgtgatgggaggatgctcacwgcttcttttctgyrtcatcttggcctccctgttcctctgtgcccggagcccttttctttggctgctcatggtgtcggatgctcgtggttcgtgctgtaggatacagccaagccctcctggtgcaggckctggtggatggcaccgagtgccaaaaacgagccctggggaaacatctgaggacaaattgctaatgaagagagaggagtgcttttctggagggacccgcctggggaaaggraggcctttggggagctaaatattgtgtttaaarcataaaggcaggaacatgcttcccagcgtgcagacaagtggcatgcaagctgccttgttttgtggcacaccggtaggtgcaaaggaaatgctgtggctgatagaaagcaaaagggctggtggatgtgacatggaaagcagacgggctgtgaggaggtgtcttgctctgacacactgcacatctgaatccagctaggtcttcgtattgatttttgtaaaagcccttccaattacttttgcaatgagctcattccttctggcacatctcctctcc

SEQ ID NO: 12260 - DNA, 600 bp, Chicken  19866894215756_1
tcaagctgtgctccccacaggttgcaaagtccaagaaaattccctgacctttcaatatagagtgaaatctgcatttagtttacaaacaaactgctacagaataaaagcaggtaaatcttcatgaagtagtatttacatataaatattcaagtgcttttagactacagagaagatgaaaaaaatcagcttgaaaaagtagcacaacactgacgttgtaaagagtttactgctgccaaattttatgccagtacgtccttcatcatcacttcagccattcccatttgtatgtccgtacagcawatctagcttaaatcaaagcttccatcctcctcttacctattattttgctatgcatcatgtagcttctgggctgtttaattgttccttcacactatgtaaaccacttaacttctctggcaccctacagaaattaagctcatcatggacccagtggcccaggtgacaacactttttcagaaggtactgtagggaactgtgttagtggtaagactcaaagaacagaatacattgcctgtgacagctgcaaagggaaaggaagaagaaagtgatttgttggattttagctgtaatgatcaggta

SEQ ID NO: 12261 - DNA, 600 bp, Chicken  19866894215759_1
ccaaatttcctgggggagggagaacaggaggaagaaaaagcagtagtttaatgggatttcatctttctgtcggcagtgttcagtgcagtgcccagtcagatgggaggggcagtgatgatgcagtcccacagtctgtggttgcattcatccctacagcacaatatgtctccataaacaactcttccctggccttgatcaaacactaattagtaaagagcactttaaacctgctccaatgggcaataaaattctactttattttttaatatattggatgaagcagcttatttgtaagtttcraacgataccgtataagagattgtggatgcttctgagaaaaattacattgcataaaagcctcagagaatctctttgtggccattaggatttaaatgtggaagatggaagaagaaaaaaagaaaagaacgacaaataatggatcgttatgtctcatgttctatcaattggatttttttttttgtttagatgatgttatgtgtatggctaataaattattttattattaaatttgggctgacttattatggtaaatttgagcttcaaaattaccaggctggtagccgcatgtaagaggacaar

SEQ ID NO: 12262 - DNA, 600 bp, Chicken  19866894215759_2
ataaacaactcttccctggccttgatcaaacactaattagtaaagagcactttaaacctgctccaatgggcaataaaattctactttattttttaatatattggatgaagcagcttatttgtaagtttcraacgataccgtataagagattgtggatgcttctgagaaaaattacattgcataaaagcctcagagaatctctttgtggccattaggatttaaatgtggaagatggaagaagaaaaaaagaaaagaacgacaaataatggatcgttatgtctcatgttctatcaattggarttttttttttgtttagatgatgttatgtgtatggctaataaattattttattattaaatttgggctgacttattatggtaaatttgagcttcaaaattaccaggctggtagccgcatgtaagaggacaartgtgtaaaargtgtaaaacattaataagaggacccgcgagggagaatagaacggttaagctattacagaattagtattttaggtgtatgttaaacctcaagacagagaaaaccactggggatttacctggaaaaaaaaatctcattaccaaaaaggaaaaaaatcctgcc

SEQ ID NO: 12263 - DNA, 600 bp, Chicken  19866894215759_3; identical to SEQ ID NO: 12262

SEQ ID NO: 12264 - DNA, 600 bp, Chicken  19866894215759_4
aacgataccgtataagagattgtggatgcttctgagaaaaattacattgcataaaagcctcagagaatctctttgtggccattaggatttaaatgtggaagatggaagaagaaaaaaagaaaagaacgacaaataatggatcgttatgtctcatgttctatcaattggatttttttttttgtttagatgatgttatgtgtatggctaataaattattttattattaaatttgggctgacttattatggtaaatttgagcttcaaaattaccaggctggtagccgcatgtaagaggacaartgtgtaaaargtgtaaaacattaataagaggacccgcgagggagaatagaacggttaagctattacagaattagtattttaggtgtatgttaaacctcaagacagagaaaaccactggggatttacctggaaaaaaaaatctcattaccaaaaaggaaaaaaatcctgcctgaagagaagtagcaagtgaaaaaagggacgtattttggacttacacacacatatgaaagaaaaaaatccaactgaaagttaggaatattgaattatggaagtattatttccacctagatctatttgaaa

SEQ ID NO: 12265 - DNA, 600 bp, Chicken  19866894215759_5
tataagagattgtggatgcttctgagaaaaattacattgcataaaagcctcagagaatctctttgtggccattaggatttaaatgtggaagatggaagaagaaaaaaagaaaagaacgacaaataatggatcgttatgtctcatgttctatcaattggatttttttttttgtttagatgatgttatgtgtatggctaataaattattttattattaaatttgggctgacttattatggtaaatttgagcttcaaaattaccaggctggtagccgcatgtaagaggacaartgtgtaaaargtgtaaaacattaataagaggacccgcgagggagaatagaacggttaagctattacagaattagtattttaggtgtatgttaaacctcaagacagagaaaaccactggggatttacctggaaaaaaaaatctcattaccaaaaaggaaaaaaatcctgcctgaagagaagtagcaagtgaaaaaagggacgtattttggacttacacacacatatgaaagaaaaaaatccaactgaaagttaggaatattgaattatggaagtattatttccacctagatctatttgaaatgcagtatta

SEQ ID NO: 12266 - DNA, 600 bp, Chicken  19866894215759_6
cccagatcctcaccagttgcagcaagtaatgatagtaataatagttgtggtagtagtagcagcggtaataatagtaatgatgagaataagaataatttgtatgctttctgcacaggctacccatcaccaggtcaacctgaatagagcctctctgtgttaccttctcggatccttctctatagtgccttcataatagatctaagtgccctattctatctatctctgtctagtgaaagctgcatcagtgctaatatgaaggttaaaagtgaagaaaggagcattatcgcaattatcattccrggcacgtggtgtaattktgctgctggctgccggccatgtggttcttgtggcagcaaacagtactttccctcagcagtcccaacagcgctgttttcatacgggctaggaaggttagaaaaatcaattagcaatatgggttgttaatgaaagccacgtccaaatgtgacttcagaaacacttttctgaaagattaatgtatctttaaaaaacaaatggatatttgtatcatttttcaaagctgaatgttttcactgctcctactaaaaaaaaaaacattgttctctctctgtacagcagtgc

SEQ ID NO: 12267 - DNA, 600 bp, Chicken  19866894215759_7
tgcagcaagtaatgatagtaataatagttgtggtagtagtagcagcggtaataatagtaatgatgagaataagaataatttgtatgctttctgcacaggctacccatcaccaggtcaacctgaatagagcctctctgtgttaccttctcggatccttctctatagtgccttcataatagatctaagtgccctattctatctatctctgtctagtgaaagctgcatcagtgctaatatgaaggttaaaagtgaagaaaggagcattatcgcaattatcattccrggcacgtggtgtaattktgctgctggctgccggccatgtggttcttgtggcagcaaacagtactttccctcagcagtcccaacagcgctgttttcatacgggctaggaaggttagaaaaatcaattagcaatatgggttgttaatgaaagccacgtccaaatgtgacttcagaaacacttttctgaaagattaatgtatctttaaaaaacaaatggatatttgtatcatttttcaaagctgaatgttttcactgctcctactaaaaaaaaaaacattgttctctctctgtacagcagtgctgttattttgctcccat

SEQ ID NO: 12268 - DNA, 600 bp, Chicken  19866894215760_1
attcatgtaacagcccttgatcagcatcagggtttggagcatggtcacgctggggcaggaggcctgcctggcaccagccaggaccccctcatgtactcttatttttccttcaatttatccatcagtagctagccctcagaaatgtaataccaggagcatttctgaaatgaccagctgaatatatgtgatatatgcccctttatatgagccattcttgggtttcattcttcagctcagacctgctttggggattaatacagcaaagctgagttcaagggaaacaaatatgttggtagacaraagatactgattttgagattatactcataggtayagagacacatacagaaatacctagaggtagcactttctaccarggcaggtagaagacttcatcaaaatatatgtacttttctatttgaactcaaaataggctgtgtttcatacctctaatctaaacytagagtccccctttcaccccactgcaatcctgtaggtgtcagactgaatttttaatgggctgttcacctggattacagttcaggataaatgtctgacctgaaggtctctgtgctcacatcaaaccttcaagcttgaagc

SEQ ID NO: 12269 - DNA, 600 bp, Chicken  19866894215760_2
tggagcatggtcacgctggggcaggaggcctgcctggcaccagccaggaccccctcatgtactcttatttttccttcaatttatccatcagtagctagccctcagaaatgtaataccaggagcatttctgaaatgaccagctgaatatatgtgatatatgcccctttatatgagccattcttgggtttcattcttcagctcagacctgctttggggattaatacagcaaagctgagttcaagggaaacaaatatgttggtagacaraagatactgattttgagattatactcataggtayagagacacatacagaaatacctagaggtagcactttctaccarggcaggtagaagacttcatcaaaatatatgtacttttctatttgaactcaaaataggctgtgtttcatacctctaatctaaacytagagtccccctttcaccccactgcaatcctgtaggtgtcagactgaatttttaatgggctgttcacctggattacagttcaggataaatgtctgacctgaaggtctctgtgctcacatcaaaccttcaagcttgaagcctatgtctggacattggctattggtatgtataca

SEQ ID NO: 12270 - DNA, 600 bp, Chicken  19866894215760_3
ccaggaccccctcatgtactcttatttttccttcaatttatccatcagtagctagccctcagaaatgtaataccaggagcatttctgaaatgaccagctgaatatatgtgatatatgcccctttatatgagccattcttgggtttcattcttcagctcagacctgctttggggattaatacagcaaagctgagttcaagggaaacaaatatgttggtagacaraagatactgattttgagattatactcataggtayagagacacatacagaaatacctagaggtagcactttctaccarggcaggtagaagacttcatcaaaatatatgtacttttctatttgaactcaaaataggctgtgtttcatacctctaatctaaacytagagtccccctttcaccccactgcaatcctgtaggtgtcagactgaatttttaatgggctgttcacctggattacagttcaggataaatgtctgacctgaaggtctctgtgctcacatcaaaccttcaagcttgaagcctatgtctggacattggctattggtatgtatacagacatatacatgtctggatatcagttattggtacaactggagt

SEQ ID NO: 12271 - DNA, 600 bp, Chicken  19866894215760_4
ctgaaatgaccagctgaatatatgtgatatatgcccctttatatgagccattcttgggtttcattcttcagctcagacctgctttggggattaatacagcaaagctgagttcaagggaaacaaatatgttggtagacaraagatactgattttgagattatactcataggtayagagacacatacagaaatacctagaggtagcactttctaccarggcaggtagaagacttcatcaaaatatatgtacttttctatttgaactcaaaataggctgtgtttcatacctctaatctaaacytagagtccccctttcaccccactgcaatcctgtaggtgtcagactgaatttttaatgggctgttcacctggattacagttcaggataaatgtctgacctgaaggtctctgtgctcacatcaaaccttcaagcttgaagcctatgtctggacattggctattggtatgtatacagacatatacatgtctggatatcagttattggtacaactggagtggaaatacttccacacaaagtactttgcaaactccaagtagtaagaagcgctctgtctttactaataaggccaaaaagactcta

SEQ ID NO: 12272 - DNA, 599 bp, Chicken  19866894215763_1
  misc_feature (1)..(53): n is any nucleotide
nnnnnnnnnnnnnnnnnnnnnnnnnnnnnnnnnnnnnnnnnnnnnnnnnnnnnttctccgagaggatgccagatggacaggtggccatgggctgtacgtagttcagagggatgtctggtggagtgcatgaagtgctttgcttctcccaagcacatgtgcatcttacctatcttgtttatctcactgagcaagggcagagctctgctctcatttgggataaacacgtggcagactatataaaacactccagggagagagggacagcaattgcgagcatcagtagaagaaatgaggaaggayagtgggcaggggtaacatctccagggacaccagtatgctgaggactgactttcccagcagtgtgtctraggagctgtagaagtagcatcagaagggactttagaagaaatttgccatgagtcaaccaacgagatcactcctcatagctccaaatctgtttgctggaagtggaagagccttccaggtttgaatgacttcttaaagatgggaataaatggccatttttcacatcagagagtggtgattgtggagtgccaaaagaatgtgtgttgggaggggactcctcggcagaatcaccg

SEQ ID NO: 12273 - DNA, 600 bp, Chicken  19866894215763_2
ccagatggacaggtggccatgggctgtacgtagttcagagggatgtctggtggagtgcatgaagtgctttgcttctcccaagcacatgtgcatcttacctatcttgtttatctcactgagcaagggcagagctctgctctcatttgggataaacacgtggcagactatataaaacactccagggagagagggacagcaattgcgagcatcagtagaagaaatgaggaaggayagtgggcaggggtaacatctccagggacaccagtatgctgaggactgactttcccagcagtgtgtctraggagctgtagaagtagcatcagaagggactttagaagaaatttgccatgagtcaaccaacgagatcactcctcatagctccaaatctgtttgctggaagtggaagagccttccaggtttgaatgacttcttaaagatgggaataaatggccatttttcacatcagagagtggtgattgtggagtgccaaaagaatgtgtgttgggaggggactcctcggcagaatcaccgtggaagggggctgatgattcaaaatggctaaagcagtcagaagtaaatcttcctccaaaaatttgcaga

SEQ ID NO: 12274 - DNA, 600 bp, Chicken  19866894215763_3
aagggactttagaagaaatttgccatgagtcaaccaacgagatcactcctcatagctccaaatctgtttgctggaagtggaagagccttccaggtttgaatgacttcttaaagatgggaataaatggccatttttcacatcagagagtggtgattgtggagtgccaaaagaatgtgtgttgggaggggactcctcggcagaatcaccgtggaagggggctgatgattcaaaatggctaaagcagtcagaagtaaatcttcctccaaaaatttgcagaagactcttcatgctgaatgcatraaagataacaccagattaaattcaacatcagaaaatgcaagtaattcatatagtgggaaaaaggacctctttgtgcatccccacactcctgagccctgcattagcagttccaggtcaggaaagagagactggagtcacttcagacttgagaaatgttgtccccatgtccagtggctgccaaagtgagtatatttcagtgtccttctcaagagagcacagaggggactccaccagacagctccaacaccaccyggtcgggcatctgtacagagagcagcaccagacaacaaggtcatctgg

SEQ ID NO: 12275 - DNA, 600 bp, Chicken  19866894215763_4
aaatcttcctccaaaaatttgcagaagactcttcatgctgaatgcatraaagataacaccagattaaattcaacatcagaaaatgcaagtaattcatatagtgggaaaaaggacctctttgtgcatccccacactcctgagccctgcattagcagttccaggtcaggaaagagagactggagtcacttcagacttgagaaatgttgtccccatgtccagtggctgccaaagtgagtatatttcagtgtccttctcaagagagcacagaggggactccaccagacagctccaacaccaccyggtcgggcatctgtacagagagcagcaccagacaacaaggtcatctggaagaaactatggtttaaccagattgtgacattctaggtgaaatcatatatgggtgaaatcatcacatataaatctaggtgcaccagataaagcaccttcattaggtacttcagtcttcgtgcttttgtccttttcatttttagtgtcattcagcagagtgcccccacaaagagtattgggatctgggaatttaggaaaaggacaatgataggccagcaggctttagctgatatatatatatacatacacata

SEQ ID NO: 12276 - DNA, 600 bp, Chicken  19866894215774_1
tgctccattgcagcgatcttcttgggatgccaatagactcagaaatgacaggaatcaaaaagttgtttcttgtatcactgaacaaatgtacttgtttcttaagaaggacagaaacattctgctagttttaaaagtttttctagcacttccctgctatctccaatctactcacttcagcaaagttaatgtaaagttaagtctatgtagggcagaaatgaaacattactgcaaatgttcttgctcagtaaatcagcaaatcccccccctctcctaaaagcaagatttcacagtcaatttaarctgatctgagactgcgctgctcctgaacagagcaatccaacttccttttatctccagctgcgtgttcccaccacttcccttgcgcaggctctagagatcatactgctgaaagataaacaagatcagctccctgatcctactgaaaactaacactgaaaatacttagtttttagccattttctaaagagttgaaagcaaccctttctgtagcaatttgcagttaaccctcacataaactgatttygaaacctcagcattacagagaaagagaactgaaaaataaaccatcaaatccaagaa

SEQ ID NO: 12277 - DNA, 600 bp, Chicken  19866894215774_2
gtaaatcagcaaatcccccccctctcctaaaagcaagatttcacagtcaatttaarctgatctgagactgcgctgctcctgaacagagcaatccaacttccttttatctccagctgcgtgttcccaccacttcccttgcgcaggctctagagatcatactgctgaaagataaacaagatcagctccctgatcctactgaaaactaacactgaaaatacttagtttttagccattttctaaagagttgaaagcaaccctttctgtagcaatttgcagttaaccctcacataaactgatttygaaacctcagcattacagagaaagagaactgaaaaataaaccatcaaatccaagaagtattaatatttgagcaagaagtgagagaggacagaaaaacagttagtctcttactggtaattacagcagttaaaaaggacaatttttattccagtttcaaaaaatccctagtctgcacagacccttatgtacaagaactgaactgctaaagtgaaacaaactatggcaaaactcagcttatatgagaaacataatccaagggaaaaagtcatctctaaagtgttattttccttttcatttctt

SEQ ID NO: 12278 - DNA, 600 bp, Chicken  19866894215775_1
ctttgcaatatgctgtgtcatgtctatacaggttgctcgtaaaaaaaaaaaaaaaaaagcaggggcaaatataggaattcatcaatttctgttgcattcatttcaagctatctggtgtcttcagttacgtttaaaaagtataaacatcaaaaattcaaatggcaatttgctgtctaaacatcttttcaagttctggaccactcacaattcgggaaaattctcagtgatctgggagatgctgtacttctaccacagcagaaagtagattttgtcctgcaatgactccaatcgaggatcctstttcctgcacttcagaactttgagcagatgctctgaacttcacagctgaccctaattcctaccccttagtctccaggtgaccacaagcttagaagcaatgaactccaaaaataggaatggtgagtctataagaggactgggctgctcactgtagggataaggaaggtcttcaggaaacagcaacaaaaaaaaaaaaatgggtatacaaacataacagagcgtaactatagaccctaatataataatcactgcgattctacaacaaactgtactgtgatgaataccgaaaaacacatccac

SEQ ID NO: 12279 - DNA, 600 bp, Chicken  19866894215782_1
catgggtttgcttggctgagagaatgagctgtaggctgagatagctggggcttttcagcctggagaagagaaggctccaaggtgacttgacaatagccttccagtatgtaaaggggggaaacgagaaagaaggggacagactttagcagtgtttgtgatgataggaaacagggaatggtttcagactaaaagaagggagatggaggctggatataaagaaagtcttatacagtgagggtggtgaggtgttggaacaggtcatttctaagcctactctcccgcccatggagagggctctcrtactgctgtagcagagatttccatccttgggctgaaaacctcttcagagaatagggaagctttcaaaattcctaaaaaattatgctggagcaaagcaaatttggtctttcaatgggaagcataactrcaggctgcagttcacctgcctgcccttgctcatccgtatctagcagctgaacaggaggactgatccaagtcttgatgtaaaaaaggcatctgctgcagaagcaggaccagggcactgcagagggagcacttgtgctgcttccctgctgctggggtttgcacctccatgccagc

SEQ ID NO: 12280 - DNA, 600 bp, Chicken  19866894215782_2
agaaggggacagactttagcagtgtttgtgatgataggaaacagggaatggtttcagactaaaagaagggagatggaggctggatataaagaaagtcttatacagtgagggtggtgaggtgttggaacaggtcatttctaagcctactctcccgcccatggagagggctctcrtactgctgtagcagagatttccatccttgggctgaaaacctcttcagagaatagggaagctttcaaaattcctaaaaaattatgctggagcaaagcaaatttggtctttcaatgggaagcataactrcaggctgcagttcacctgcctgcccttgctcatccgtatctagcagctgaacaggaggactgatccaagtcttgatgtaaaaaaggcatctgctgcagaagcaggaccagggcactgcagagggagcacttgtgctgcttccctgctgctggggtttgcacctccatgccagcaggtgccatgtaactgctttgaaggagaaacaagaagcacagaagccttcagtgcagctgagcagggtgcagccttcagccagcagcacccagaagagggtgctgtcaggcagagaatggcaagcac

SEQ ID NO: 12281 - DNA, 600 bp, Chicken  19866894215782_3
aaggcatctgctgcagaagcaggaccagggcactgcagagggagcacttgtgctgcttccctgctgctggggtttgcacctccatgccagcaggtgccatgtaactgctttgaaggagaaacaagaagcacagaagccttcagtgcagctgagcagggtgcagccttcagccagcagcacccagaagagggtgctgtcaggcagagaatggcaagcacagggaaagggttctgtgttaactcttgaggttcccattgcgctgcagccctgctcctccagcacagcactactctggtgctstttgctaattcagtggttggaaatactgcctaggccygggtatggatgcgagaagaaagccttgggaatagggtgtgttgtggggagcacacagtgggggtatgagtgaggttggcaccaccccatccccatccgctcgtggagtgggggtgggtctgcctgattaaagacaattaatttacaacgtggattgctcaagcttcctgggcagcccctgtgatcagcgaggtctcaggcatgatgtggctgaaattttaggcagggattatgaagggggacctcagaagtgcctgttttgct

SEQ ID NO: 12282 - DNA, 600 bp, Chicken  19866894215782_4
gagggagcacttgtgctgcttccctgctgctggggtttgcacctccatgccagcaggtgccatgtaactgctttgaaggagaaacaagaagcacagaagccttcagtgcagctgagcagggtgcagccttcagccagcagcacccagaagagggtgctgtcaggcagagaatggcaagcacagggaaagggttctgtgttaactcttgaggttcccattgcgctgcagccctgctcctccagcacagcactactctggtgctstttgctaattcagtggttggaaatactgcctaggccygggtatggatgcgagaagaaagccttgggaatagggtgtgttgtggggagcacacagtgggggtatgagtgaggttggcaccaccccatccccatccgctcgtggagtgggggtgggtctgcctgattaaagacaattaatttacaacgtggattgctcaagcttcctgggcagcccctgtgatcagcgaggtctcaggcatgatgtggctgaaattttaggcagggattatgaagggggacctcagaagtgcctgttttgctctcctggtggatgggacactggggaggggagtgcagc

SEQ ID NO: 12283 - DNA, 600 bp, Chicken  19866894215798_1
agctggcctggggcacgggtggttgtcagggtctatcaggagctcaggtaacactgcatgagtttgttgggttcgttctggtccttcttgtttggcaataatgtcggttagaggctgaaacctccaaaacctagcacctctgtcctgctggttggtgctttgtgcctttcattagagcgttaatcaaaacagattaaacaaacatgaaaatgaaatgtggatgatggcctctcagagatttgcctctgtatgaaccatgtgctgtctctataaagtccagagatcaggccctagccttgrctctcccctgggtctgttcctgggttgtgctctgtcccttaaccctctggctgatgttttaaaaggcagttaatggccaactgcaactaaacatcccgggtgatgggatcccctgagcagctttcaactcctggaccttgaaagcatgaggacagcagtgctccctggacaggccaagctgagtgaccacagctgagctttgttatcattccagagtgtgaggttcacctacccaaagcagtatctggttgctgggagggccatgcagacacccataaatctttggtgtaactttgatgc

SEQ ID NO: 12284 - DNA, 600 bp, Chicken  19866894215798_2
tctcccctgggtctgttcctgggttgtgctctgtcccttaaccctctggctgatgttttaaaaggcagttaatggccaactgcaactaaacatcccgggtgatgggatcccctgagcagctttcaactcctggaccttgaaagcatgaggacagcagtgctccctggacaggccaagctgagtgaccacagctgagctttgttatcattccagagtgtgaggttcacctacccaaagcagtatctggttgctgggagggccatgcagacacccataaatctttggtgtaactttgatgcrtataagcggctttgctgacaaattggcacccacctccctccccctcgcaacgtgactctcacactgcaggctgctaagagctatttcagaccctggaacaaatgaagtatttgtctctcccttgccctggcggttgcctcaacaccatcgttttccctcccccccaatcgtgtgcttcagtacagaagccccaagccagcagcagcagctgcaaagggtgggagcaggctgggtgagtgccacgtccatccagccaccctttgcatcactgagtgctggcccagccacctttcctctccc

SEQ ID NO: 12285 - DNA, 600 bp, Chicken  19866894215809_1
aaacagcatttgggtattcctcatctatggcactgcacctggatctcctgctcccttttctacctaggatttgctctgtgagcctgaatgactcgtttatcctcttgattgctagagagctgagttactcatgacttcatctgcagatgaaggagatgaatttgataagcactgctgtagactattctgggaaagtgttttatagacctttatggctttcatttgtttatcctttggagagttatcagttgcattttgaagaaagcagggtaatagattgtcttctcttgagtgtgcagrggatggttcactgccattacaacccaggaaatagagatgcatatctcatttggtggatcctatacttcttcacagtgccctctatcagtgtgcacaaacaatgtgcacaaaagtcaggggttgaagacacttatttaaactgtacctgattctgttttaatttagattaatgctactaattaagacaaagcattaaatcattatatctatttaatgtaaggatcaattcactgttaaacagcaaaataaaattttcccctaaaatatattttctatctgtaaatcaccattgcatgtgta

SEQ ID NO: 12286 - DNA, 600 bp, Chicken  19866894215809_2
cacaaaagtcaggggttgaagacacttatttaaactgtacctgattctgttttaatttagattaatgctactaattaagacaaagcattaaatcattatatctatttaatgtaaggatcaattcactgttaaacagcaaaataaaattttcccctaaaatatattttctatctgtaaatcaccattgcatgtgtaaagcacactgtgtgcctgagacatccgtatgtgcttagaaacatggcttgtgaaggtctctgtgttaaacccagtacttttgtttttccataaggaagatggctytggttgggattaaagcccttgagatttcactgcacttctgagttccaaatgaactggaagcttctgtgagtcactcagttactttgcttcttatctttaagtggatgttaatgtatctttgttggcttggtttatttaggttgtaggacctttgagacactgacctttactgtctgcacatcactgaacttaatgatagtcttatatcacgtagagcttttaattgctgctgtaatttaagcaatagcagtttcagtgttgttctccttgtagcacaggaattggttgcacacaaaggaa

SEQ ID NO: 12287 - DNA, 600 bp, Chicken  19866894215812_1
agttcggtaaccagttattgcattgagcactaaatacaaaactgcatgcttttctctgcttaagtagatgcattttgtgtaggagattcttgggttgctttctccaatttaactgtggataatggcaccaatgtgtctaataaaagtgttttcaccctaatattaatacacattaaataaggctattgaaaggcttgcactttctgtctagcaaacattttcttctgcttttccaaagcagtaaaaccaagagctggctgctgcattgctgccatttcagaggaagtactgcctgcaccycatccttgtggtcagcctcatgccacccagtgctccctgccctgatcacagaggtgtgagtggtgaaggaggtgtgaatggagtgtggccactggtgcaagtgtcccttgggaacattggtaacttgggaattaaagcaagcagtcctctgcttcatggtctggtctggggtacaggggcacgcaggaggattttgcctccctgtccttctccagccacactgagcactcgcaagctgttgttaggaaatcagggccaacagctgaaaccacaggaaagacttttgccaggattatgcta

SEQ ID NO: 12288 - DNA, 600 bp, Chicken  19866894215814_1
gatgcttcctgttccaaagctgaccacaatgagtccttgcagggctgaggtggaagctctgtttactctggtacacactccatcatcatctgtcattaattaatctagcgttactgcaaagtgttagtgatccttgccctgccaaaatgcatttctccctcagctactctttagccaatgtaagcagaatcatattggcacggtgattaaggattatgaagaggagacattatcatctctgaataatttaatgaatgcacacttaacatgaattgtagctgtaaaatcagactggctgcrcgtcgggaaagaattctttgttaacacatttatggcttctttactgctttctgatagctccaggtagggctatcataaaggcttaagaatattatcataattcaccaccaaaaagtgtcattaatgcggatttagtgacacttttcctgtgctgctctctgcctgttcagacacagactgcaaacagaagcgatgcgccccagccccctcctctcacacctccctgctcctgggacagggatgcagctggagctgcaggtagagctgcagctctgtgaggcattcgttttatggttcact

SEQ ID NO: 12289 - DNA, 600 bp, Chicken  19866894215818_1
ctgcaataaattgtatttttccttcactttccatcactaactccttctctttgttatgcttcatgtataaaaatgtgaaaaaaacaacagtatacagcaattaacaacaactaatactatactgacaaacaatatctgagcttccagttgtgagccatgcccacattaaagagattcagctcaattctgagcaatttgctgaaggagaaggactgctgtaatcactatttctaactccttctccggttagtaataaaaatcaaatatgcttaaactgtgatttaccatatcgtgaggatyctattctgcatgtattttagcacaaaatgattaaatcagcacactcacactcaatagtctgttgttggaaataacactaacattcaaatcagaatacaggaaaggaagaatacgaagaggcttttctcattcttattcatatacattaacttgcagaaatgtattaaacttcttataacttgtttattatgtttcattaaatatgacctactgtttcatttcattaaaaataaatgtcttgaaagcaaacatcagtatactaatcagtgtaattaatgtaagtaaaacaaaataattaaa

SEQ ID NO: 12290 - DNA, 600 bp, Chicken  19866894215820_1
tttctgtttctttcagcaattttctttctttcaggtaagctaatttagttaattttgttttcctctccaaagagttaagctgtactagagttggcctgagtccacctacgtcaacatcctaatatcagcatggctagaagcttccagaagaactttgagatgcttctatttgaagtatatgagggttgctccaaaagtaatgcctcatattttattacattgatctacaacataagaggtgaatgttgatgttatggcagtagaaattgaaccctcccatcagtattccattacattttsttgccaagtgacagatgtcagtagaggggtagtttgacaaaatgatatcagacatggaagtgtggataaagcaaaggtctgtgattgaatttcctcagctggaaaaagaattgtacccactgatattcatcagtgcttgctgaatatttgtggagatcaaacagcagatgtgagcacagtraagaagtgggtggggcatctcaacagtgccaacagtgacagtgggtcacttctgatggtgcagattttcacaagtgtggctcttcttcactgttggtgaaaaagtatagttaacggtgg

SEQ ID NO: 12291 - DNA, 600 bp, Chicken  19866894215820_2
agggttgctccaaaagtaatgcctcatattttattacattgatctacaacataagaggtgaatgttgatgttatggcagtagaaattgaaccctcccatcagtattccattacattttsttgccaagtgacagatgtcagtagaggggtagtttgacaaaatgatatcagacatggaagtgtggataaagcaaaggtctgtgattgaatttcctcagctggaaaaagaattgtacccactgatattcatcagtgcttgctgaatatttgtggagatcaaacagcagatgtgagcacagtraagaagtgggtggggcatctcaacagtgccaacagtgacagtgggtcacttctgatggtgcagattttcacaagtgtggctcttcttcactgttggtgaaaaagtatagttaacggtggcggctgcattctaaaatagtgtcttctagctgagaatttgctccatcaaataatactatggtttatgtaattgccatggaaatcaacaggaggtatttatttcagagcaacctacataactattcaggacagtctgcaatgttgagttttttcctaacatctgagaagtttttaaaaaaag

SEQ ID NO: 12292 - DNA, 600 bp, Chicken  19866894215826_1
ctgcaactttggggtaaaaagcatgatttcctgtattactcttttttctgaggatgtttgaaaaaggacagaaatatattgaacttcattttcttctcaatttttgtttctttcccaatactttataaatccagacatcaactattcctttttccttactcatcaacttagctaagaagtaatcaactatctcttaggaagaggtaaaataattttcacttgggctcatcaaaaccctatatttgtcaggtaggagtgtctgaggagccacataacagaggtgctgctgaagactccacrctcgcaccctggtttatttaaaaggcactgacctttttctgggtctcccaaagaggccatcagctcacaaacaagaacaacttaaccccagcatacaaaccaggcagaaagtgctcagtgcaacaagttagaccttctctttggcacagatcaaagtacaaatacatttccctcttgaaatttagcaaaaatgtacagtacactgactgaaaatctgatcctaaactattcacaattatggtaaaatctccagctgaycacactcatacctacactaggaagaaagagaagctgggagca

SEQ ID NO: 12293 - DNA, 600 bp, Chicken  19866894215826_2
tctgaggagccacataacagaggtgctgctgaagactccacrctcgcaccctggtttatttaaaaggcactgacctttttctgggtctcccaaagaggccatcagctcacaaacaagaacaacttaaccccagcatacaaaccaggcagaaagtgctcagtgcaacaagttagaccttctctttggcacagatcaaagtacaaatacatttccctcttgaaatttagcaaaaatgtacagtacactgactgaaaatctgatcctaaactattcacaattatggtaaaatctccagctgaycacactcatacctacactaggaagaaagagaagctgggagcaggaggcagacagggttgagtgcatcagaacagagcagggcagatgtatgtgcrtgttcttgtccctgggtgcagtgtctgcaatgctccagtatgtattctgccctgggtcagatctgggatcatactggtctcctctggtcttaataaaccatgaatcacacatctgaaagtagggctgtagtcaaaatggaatgcaatgattgtgtaacrccaatcccttctccaaaacttcttccaatgagtttactgcaggtca

SEQ ID NO: 12294 - DNA, 600 bp, Chicken  19866894215826_3
aggccatcagctcacaaacaagaacaacttaaccccagcatacaaaccaggcagaaagtgctcagtgcaacaagttagaccttctctttggcacagatcaaagtacaaatacatttccctcttgaaatttagcaaaaatgtacagtacactgactgaaaatctgatcctaaactattcacaattatggtaaaatctccagctgaycacactcatacctacactaggaagaaagagaagctgggagcaggaggcagacagggttgagtgcatcagaacagagcagggcagatgtatgtgcrtgttcttgtccctgggtgcagtgtctgcaatgctccagtatgtattctgccctgggtcagatctgggatcatactggtctcctctggtcttaataaaccatgaatcacacatctgaaagtagggctgtagtcaaaatggaatgcaatgattgtgtaacrccaatcccttctccaaaacttcttccaatgagtttactgcaggtcacgtaaaactatcatccctatctcttccrtgcagacccgtaacaagaaatatacagcacctacctccataggtttcatggtaaatctgctcatttg

SEQ ID NO: 12295 - DNA, 600 bp, Chicken  19866894215826_4
atctgatcctaaactattcacaattatggtaaaatctccagctgaycacactcatacctacactaggaagaaagagaagctgggagcaggaggcagacagggttgagtgcatcagaacagagcagggcagatgtatgtgcrtgttcttgtccctgggtgcagtgtctgcaatgctccagtatgtattctgccctgggtcagatctgggatcatactggtctcctctggtcttaataaaccatgaatcacacatctgaaagtagggctgtagtcaaaatggaatgcaatgattgtgtaacrccaatcccttctccaaaacttcttccaatgagtttactgcaggtcacgtaaaactatcatccctatctcttccrtgcagacccgtaacaagaaatatacagcacctacctccataggtttcatggtaaatctgctcatttgcctgcagtgaagtgtagaacataattagtaattaagtgcaaaagcagcaaggaaagcaaagtttacatgtataaatcaaagaaaagaggttctggaacatgtacccttttaaatccttcatgcatgaatgtgtctcctccaggcacttcatactgaaga

SEQ ID NO: 12296 - DNA, 600 bp, Chicken  19866894215826_5
agaagctgggagcaggaggcagacagggttgagtgcatcagaacagagcagggcagatgtatgtgcrtgttcttgtccctgggtgcagtgtctgcaatgctccagtatgtattctgccctgggtcagatctgggatcatactggtctcctctggtcttaataaaccatgaatcacacatctgaaagtagggctgtagtcaaaatggaatgcaatgattgtgtaacrccaatcccttctccaaaacttcttccaatgagtttactgcaggtcacgtaaaactatcatccctatctcttccrtgcagacccgtaacaagaaatatacagcacctacctccataggtttcatggtaaatctgctcatttgcctgcagtgaagtgtagaacataattagtaattaagtgcaaaagcagcaaggaaagcaaagtttacatgtataaatcaaagaaaagaggttctggaacatgtacccttttaaatccttcatgcatgaatgtgtctcctccaggcacttcatactgaagaatttcaagccctcttcttatggcttccctttagataaagagaaagaaagaattttattagaagtatttttgggt

SEQ ID NO: 12297 - DNA, 599 bp, Chicken  19866894215828_1
  misc_feature (1)..(96): n is any nucleotide
nnnnnnnnnnnnnnnnnnnnnnnnnnnnnnnnnnnnnnnnnnnnnnnnnnnnnnnnnnnnnnnnnnnnnnnnnnnnnnnnnnnnnnnnnnnnnnnnctctttcttctcctttgttcagcaaggaaatgttggtaggtttcaaatatgaataaaatactgtagaaggggtacaggttattacaggtagccttttgagatttctagttgaaggctggactcctttatttctggttaagaattgtttcagctcattaggttcccaggcatagcatgaactgaatttgtttctaagtatgaacyccatgctgagttcagtgggtgtctgtaaagcaaaggagagayctttgccccagggggtgacacaggttctaagccyatgtgcagcatgaagttatgcaagttgtcagccaatttacccccacccccaacaaacacacgtacttaaatgcaatgttgtacagagcaaagaagcagagcaggcaaaggtgtgtacaaactggggagactgagggaaacaagtggcaaaaagccacragattgagataggggacatgttatggttttatgattagagcatctgtgacagcaaccaaagcatg

SEQ ID NO: 12298 - DNA, 599 bp, Chicken  19866894215828_2
  misc_feature (1)..(54): n is any nucleotide
nnnnnnnnnnnnnnnnnnnnnnnnnnnnnnnnnnnnnnnnnnnnnnnnnnnnnnctctttcttctcctttgttcagcaaggaaatgttggtaggtttcaaatatgaataaaatactgtagaaggggtacaggttattacaggtagccttttgagatttctagttgaaggctggactcctttatttctggttaagaattgtttcagctcattaggttcccaggcatagcatgaactgaatttgtttctaagtatgaacyccatgctgagttcagtgggtgtctgtaaagcaaaggagagayctttgccccagggggtgacacaggttctaagccyatgtgcagcatgaagttatgcaagttgtcagccaatttacccccacccccaacaaacacacgtacttaaatgcaatgttgtacagagcaaagaagcagagcaggcaaaggtgtgtacaaactggggagactgagggaaacaagtggcaaaaagccacragattgagataggggacatgttatggttttatgattagagcatctgtgacagcaaccaaagcatgtaaaatcttttgccatgtcagccacaggcttgggatgtggcc

SEQ ID NO: 12299 - DNA, 599 bp, Chicken  19866894215828_3
  misc_feature (1)..(20): n is any nucleotide
nnnnnnnnnnnnnnnnnnnnctctttcttctcctttgttcagcaaggaaatgttggtaggtttcaaatatgaataaaatactgtagaaggggtacaggttattacaggtagccttttgagatttctagttgaaggctggactcctttatttctggttaagaattgtttcagctcattaggttcccaggcatagcatgaactgaatttgtttctaagtatgaacyccatgctgagttcagtgggtgtctgtaaagcaaaggagagayctttgccccagggggtgacacaggttctaagccyatgtgcagcatgaagttatgcaagttgtcagccaatttacccccacccccaacaaacacacgtacttaaatgcaatgttgtacagagcaaagaagcagagcaggcaaaggtgtgtacaaactggggagactgagggaaacaagtggcaaaaagccacragattgagataggggacatgttatggttttatgattagagcatctgtgacagcaaccaaagcatgtaaaatcttttgccatgtcagccacaggcttgggatgtggcctcaagtgaagtctcttcctctccacatgcctcag

SEQ ID NO: 12300 - DNA, 600 bp, Chicken  19866894215828_4
agaattgtttcagctcattaggttcccaggcatagcatgaactgaatttgtttctaagtatgaacyccatgctgagttcagtgggtgtctgtaaagcaaaggagagayctttgccccagggggtgacacaggttctaagccyatgtgcagcatgaagttatgcaagttgtcagccaatttacccccacccccaacaaacacacgtacttaaatgcaatgttgtacagagcaaagaagcagagcaggcaaaggtgtgtacaaactggggagactgagggaaacaagtggcaaaaagccacragattgagataggggacatgttatggttttatgattagagcatctgtgacagcaaccaaagcatgtaaaatcttttgccatgtcagccacaggcttgggatgtggcctcaagtgaagtctcttcctctccacatgcctcagttctttttccacacagactaaaagaatatggtgaatttaaatttaaatggccctaagaatatggtaaatttaaagctyagaaggcaaagatttagaacccctcaacaagtgctgattagtaattcttgtaagtgaagaaaagtgcagtgtaaaaggact

SEQ ID NO: 12301 - DNA, 442 bp, Chicken  19866894215828_5
ttgtacagagcaaagaagcagagcaggcaaaggtgtgtacaaactggggagactgagggaaacaagtggcaaaaagccacragattgagataggggacatgttatggttttatgattagagcatctgtgacagcaaccaaagcatgtaaaatcttttgccatgtcagccacaggcttgggatgtggcctcaagtgaagtctcttcctctccacatgcctcagttctttttccacacagactaaaagaatatggtgaatttaaatttaaatggccctaagaatatggtaaatttaaagctyagaaggcaaagatttagaacccctcaacaagtgctgattagtaattcttgtaagtgaagaaaagtgcagtgtaaaaggactgtgtctggacagagaactgaacaggtgatggcaaggggggtttctcttcctgccctcatct

SEQ ID NO: 12302 - DNA, 600 bp, Chicken  19866894215830_1
gcagacacacctgcagctttccttaccctcagcccaccctgctgttatcagtgccgggatcttctttccccttttcaagcctttctgtgtgagtggtagctctgccattgtgtccccagcatggtcagtcacttcagccatctccacccacctgtgaaaacttaatactcccagctgttcctttgagtttctgccagcttaaggtttccaaagagcctaccatatcagcatcttcctttaaagtaaggaaggagataacttttgttttttctctgaattgacttgagtgaggttcaccargttgtcttatgagtctggatgacccaactggcttctccaagcaggtggcaaggggcactatttggttgttcaaaatgctgcgactaaactctagtagagacaatcatggaatcacagaactgttatgatcacgcagtccaaccatcagcccatccccaccatgcccactgaccacgtcctcagtgccacatccacacagctctggaacacctccgaggacggcgactccaccaccaccccgggcagcctgtgccacagcagcactgctcttcctgagaagaaatttctcctcttcctcta

SEQ ID NO: 12303 - DNA, 600 bp, Chicken  19866894215830_2
gtggcaaggggcactatttggttgttcaaaatgctgcgactaaactctagtagagacaatcatggaatcacagaactgttatgatcacgcagtccaaccatcagcccatccccaccatgcccactgaccacgtcctcagtgccacatccacacagctctggaacacctccgaggacggcgactccaccaccaccccgggcagcctgtgccacagcagcactgctcttcctgagaagaaatttctcctcttcctctaagcctttgtgcttctcaggatgatgccatttttagtaagcattytgtaaaactgcacatgtttgcacaccaagaggtcatttgatcatgccccatctttatggcttccgctcatgtttttgggcgtatctgcagatgcacggcagtacattctctcacaggtttcctttcctcccttccatgttctgatcaggagggtgttaggaaacagaacaaacccattcaagtcaagagctgctgaccatcttcgtttgctctttaaactgtttcagggacattgggcagcggagtgcatagtacacatctgaaccaggagccggggagaagtgccaagtgccagtcccc

SEQ ID NO: 12304 - DNA, 599 bp, Chicken  19866894215832_1
  misc_feature (1)..(83): n is any nucleotide
nnnnnnnnnnnnnnnnnnnnnnnnnnnnnnnnnnnnnnnnnnnnnnnnnnnnnnnnnnnnnnnnnnnnnnnnnnnnnnnnnnnaggtcctaacccagagagctgaatattcaggtaacatgatgaaattgtgcaacttatgaataataagagaatctcatcctctgttggacatttgattccaaagagagggaatacttttcattacataaatagataaacctacaaaattctgctgatttgggatatctctattttctgtttgcttattctgcagtagtgtaaaggaatctggtttggrggaaatgatgaggaccagtcctctgaaaatctctctctgaatgatgcaaaccaaatrtaagaatcagattaatgtatcgggtggagaatactctccacaatacaataagcatttgctggggagtcccttaaatcctttatccattgaataactgtagagaatatttgtccctctggacatatgctgaattataatttgctcacagccttgaatctatgtttggaaaatatattctaaaaaatgtaagaattgaaaatatttaggttcttagaagttcactactgattggacatctgtga

SEQ ID NO: 12305 - DNA, 599 bp, Chicken  19866894215832_2
  misc_feature (1)..(26): n is any nucleotide
nnnnnnnnnnnnnnnnnnnnnnnnnnaggtcctaacccagagagctgaatattcaggtaacatgatgaaattgtgcaacttatgaataataagagaatctcatcctctgttggacatttgattccaaagagagggaatacttttcattacataaatagataaacctacaaaattctgctgatttgggatatctctattttctgtttgcttattctgcagtagtgtaaaggaatctggtttggrggaaatgatgaggaccagtcctctgaaaatctctctctgaatgatgcaaaccaaatrtaagaatcagattaatgtatcgggtggagaatactctccacaatacaataagcatttgctggggagtcccttaaatcctttatccattgaataactgtagagaatatttgtccctctggacatatgctgaattataatttgctcacagccttgaatctatgtttggaaaatatattctaaaaaatgtaagaattgaaaatatttaggttcttagaagttcactactgattggacatctgtgatcattattctactcctagcagttaactattgctatacactagaactgattaagaaaa

SEQ ID NO: 12306 - DNA, 600 bp, Chicken  19866894215836_1
gcccaaactcgcaaccacctgagaatcttcacatgggacctgctttgagaaaatgctgcatgcccccctgatgaagtctgggccccttcgagatgtcacacgtcagacgttcaacgttcaactgcctttgaagaccaaggagcccctcaccattctcctcccatgtgtttattttctgcagaagtcagctgctgagcttgcaggagaaagatcaaataacaacaaaaagaagttttaagttgcacacccgctgccatttatcacatttgaaacatcattcctcattaagccttacaaatrcttgtttccagaccccagccagcccactccctacaaagacaggtacagtgtccaccagggaaactatttatatggaaaaaataaatcaacaggtatggagaatcattcccctacccaacrcagtcatcaactcagggcaaccgtgccagaaggaaagcagagggaagtgacggttcagtcctgcccaaattggctctgaggccagaagagaaaggaaggcaagagactgctctggccctcaggctacatgaagggcttttggttggccatttggctcctccagccatgcgagtgctcatt

SEQ ID NO: 12307 - DNA, 600 bp, Chicken  19866894215836_2
actgcctttgaagaccaaggagcccctcaccattctcctcccatgtgtttattttctgcagaagtcagctgctgagcttgcaggagaaagatcaaataacaacaaaaagaagttttaagttgcacacccgctgccatttatcacatttgaaacatcattcctcattaagccttacaaatrcttgtttccagaccccagccagcccactccctacaaagacaggtacagtgtccaccagggaaactatttatatggaaaaaataaatcaacaggtatggagaatcattcccctacccaacrcagtcatcaactcagggcaaccgtgccagaaggaaagcagagggaagtgacggttcagtcctgcccaaattggctctgaggccagaagagaaaggaaggcaagagactgctctggccctcaggctacatgaagggcttttggttggccatttggctcctccagccatgcgagtgctcatttagggtcctggtgctgaagctgagctcgccctgagagcctggtgatgtttcaggacccttcacatctagataggcaaagcagctgccttcagaagtaatcttccttctttaaggtccagc

SEQ ID NO: 12308 - DNA, 600 bp, Chicken  19866894215839_1
cgaggtaaacatttcctactcctcttctaaaaaggctggaagctgttgtttaagtggaaattgccagagttaccaattaaaacaatttcaattgagaaaggcaatgtgatataaacgctgtgtcctctgtaaggtgaccaaagcacaagataacagggaggaaatgatcaaggcaatctaaaagttcccaatttaagggtaagctacaagatgctccatcagtgggacagaggaacctttaaatttttaacgatggtggttttaaatgcagattggactctattttcctggcattgcaarttttttttccatttcaaggctagcaaacctcctggaatcttaccaatatccatgaaagattcaaaaattgagtaactgtggtaagaatgtgcatagctggtaaacaggaagaaaacacttggactctcttacagttagtcctagtggttcacaaatttctttatctaaaattatggcaactggaaaatctaagctaacattaaaatgtttagcttagagttcagatacacatattttatccagagatagtaatacgtctttgacccagtggagctcacaatgttaggttgcttacaacca

SEQ ID NO: 12309 - DNA, 600 bp, Chicken  19866894215840_1
atgtctgttctcacttccagaaaagtattgatggaaaatgtttacctttcaggctaacaaacatgtgactcttagaacccggtatcatatcagatggtctgctgacgtccactgtatggaatcttactgtaaataaatagggttcaacattcaaactctttaagcatagaaatatagtgcaattttagaacacacttctcactgaatgtcttacagttgatgacaattacagcagaaattttattagaaatgttaaatggaaacatatgaagaaaggtacttataattcttaaatttagyttgtggtcaataatttttttttgtttttaatttcaattctttgttgttctctttcttatccccttttatacacattaattaataaaatagaaacctacttaataagaatgctaccgttaaacacaaatgtaatacaaatcagttataagcatctatacaaaaattagtatttcctgagtctttttgctatgttttggctgaagaatgtttttaacttaagaagtatttcaccatattcacagcaggcttcataatycctattcctgcacaagatttcatctatgtctaaatcataagtgt

SEQ ID NO: 12310 - DNA, 600 bp, Chicken  19866894215840_2
ttccagaaaagtattgatggaaaatgtttacctttcaggctaacaaacatgtgactcttagaacccggtatcatatcagatggtctgctgacgtccactgtatggaatcttactgtaaataaatagggttcaacattcaaactctttaagcatagaaatatagtgcaattttagaacacacttctcactgaatgtcttacagttgatgacaattacagcagaaattttattagaaatgttaaatggaaacatatgaagaaaggtacttataattcttaaatttagyttgtggtcaataayttttttttgtttttaatttcaattctttgttgttctctttcttatccccttttatacacattaattaataaaatagaaacctacttaataagaatgctaccgttaaacacaaatgtaatacaaatcagttataagcatctatacaaaaattagtatttcctgagtctttttgctatgttttggctgaagaatgtttttaacttaagaagtatttcaccatattcacagcaggcttcataatycctattcctgcacaagatttcatctatgtctaaatcataagtgtaacttacagttgct

SEQ ID NO: 12311 - DNA, 600 bp, Chicken  19866894215840_3
atggaaacatatgaagaaaggtacttataattcttaaatttagyttgtggtcaataatttttttttgtttttaatttcaattctttgttgttctctttcttatccccttttatacacattaattaataaaatagaaacctacttaataagaatgctaccgttaaacacaaatgtaatacaaatcagttataagcatctatacaaaaattagtatttcctgagtctttttgctatgttttggctgaagaatgtttttaacttaagaagtatttcaccatattcacagcaggcttcataatycctattcctgcacaagatttcatctatgtctaaatcataagtgtaacttacagttgctattaatgcaaattgtctgttcttctctttgtaaaacaccttcagcctgtacaaatgaagaaagaaaagtaaaaacgtttgcaatttcacacctgaaattaagttgcatgaaatccatgatcttcacatctgcttcagatcagcagatggcagaaataggttattttggagtgaaatttctttccaggtaaaaacgaagcttgaaaccagaattaaagtgtcctagttgaaaaactaatcatt

SEQ ID NO: 12312 - DNA, 600 bp, Chicken  19866894215841_1
atgaaaatatggcattccatccccatctcaacatctactccaaaaacttctctgtattacataattaacataaaaataggggaaacatttttacagacaaataattgaatgaaataaagtttgcaagaaagaaaactaactttcattatgtggagagagaagtttctttagggtcaacatttcttcatgtagtccattgagaataaatcccaagtattcttcagcatcctcttgtctgccctgaataaaatgtttcttcaataattgaaagcacgaaaatgccatataatgtaaaagcakatataagacatgcaacttctggctttcccattaattttgcaaatttataacctactcaggttacagtgttttatgaaagtcaaagaatatttaagttttactgtaatatctgttgattcctatttcaaaaagaaccaacacaagacagtaacctaccaggacagcaaattcttaataaatgtaacacacaagttcctatttgtgcaacttcctttggaattaacacaaacagttgcaatcaagcccaaaccaaaagatggtttgagttattatctgtcattcaaattgaaactaaccctg

SEQ ID NO: 12313 - DNA, 600 bp, Chicken  19866894215858_1
tgtttctgtctttcttcacctgatcacattgcttctcctgctgtgcttgcaggcagggactgcaacggtgcagaacacacaggtgacatgttgtgccttgaaagaggatatcccaggctctcccaaagcccccacgtgctcttctgaagcccttgcaaaataccttctctgcatatatcccaaatttgcaccagatgggaatgcaattttttaattgttacctaattgtgtgaatggcaggaacaacacacactgtcctccctcccctctgcatgctgaaaacccaatggcagacgcacrccacacattttattttcagaaatgaaagctgccatctgcagcatatccccctgtttatgtctgctgcatctccccagactgaaagctgttgtgtgtgtcaaagcggagtctctccagttgatggacttttttttttttacagggatgactcacaccataacgcatcaagaaagccatttccaaccacaaggctatttctgaaagagtgcttggcaccggtgggggaatcttggctacaagtggttggttgtagtggcacatgcaatacccaaaggcagacatcctgatgaatttctgaca

SEQ ID NO: 12314 - DNA, 600 bp, Chicken  19866894215858_10
atatatataactttctcccataagggagcatccattctgtagtgactgactacatttacataattaaaacaaacaactcattaatgacttcttacaccatttacaaccagccaccacccgtcatttataaaggaagttggttttccaactgacttcaccctttattagaatctattattttttatttccatggcagaaggtactttctggttcccaagacaatttgtgatgaacaaatcaagtagtacagaaaaatgttagatgccattattgcctagaataacgagtattgctgccatrtgcctggaaaaagttgcagttctgcagagcaccacgcctggatatcccaaccctatttgatgctccatctactgcctcacttggattgcctgcaaggagccaatcctcccctcctgtgggayttccttctcatattctgaacctccactmacacctggaactcacctcaacttctgcattccttatggagctgtttggaaataattcctatttccaaatttccaaaaagtaatttcctatttctgctgttctttcaacagcaatccctccagacttttccagtctgtatggaaagattsg

SEQ ID NO: 12315 - DNA, 600 bp, Chicken  19866894215858_11
atttataaaggaagttggttttccaactgacttcaccctttattagaatctattattttttatttccatggcagaaggtactttctggttcccaagacaatttgtgatgaacaaatcaagtagtacagaaaaatgttagatgccattattgcctagaataacgagtattgctgccatrtgcctggaaaaagttgcagttctgcagagcaccacgcctggatatcccaaccctatttgatgctccatctactgcctcacttggattgcctgcaaggagccaatcctcccctcctgtgggayttccttctcatattctgaacctccactmacacctggaactcacctcaacttctgcattccttatggagctgtttggaaataattcctatttccaaatttccaaaaagtaatttcctatttctgctgttctttcaacagcaatccctccagacttttccagtctgtatggaaagattsgttgcttccccgtgactcactgttgttgtttttgtgcatttcttccttggcgtgggtgtgtgttggacgttacctggcacagaagcaggaaggaatgggaarggattgggcagtgggtccaaa

SEQ ID NO: 12316 - DNA, 600 bp, Chicken  19866894215858_12
gacttcaccctttattagaatctattattttttatttccatggcagaaggtactttctggttcccaagacaatttgtgatgaacaaatcaagtagtacagaaaaatgttagatgccattattgcctagaataacgagtattgctgccatrtgcctggaaaaagttgcagttctgcagagcaccacgcctggatatcccaaccctatttgatgctccatctactgcctcacttggattgcctgcaaggagccaatcctcccctcctgtgggayttccttctcatattctgaacctccactmacacctggaactcacctcaacttctgcattccttatggagctgtttggaaataattcctatttccaaatttccaaaaagtaatttcctatttctgctgttctttcaacagcaatccctccagacttttccagtctgtatggaaagattsgttgcttccccgtgactcactgttgttgtttttgtgcatttcttccttggcgtgggtgtgtgttggacgttacctggcacagaagcaggaaggaatgggaarggattgggcagtgggtccaaagtgggagcagagtgaggctctgtacgtg

SEQ ID NO: 12317 - DNA, 545 bp, Chicken  19866894215858_13
rtgcctggaaaaagttgcagttctgcagagcaccacgcctggatatcccaaccctatttgatgctccatctactgcctcacttggattgcctgcaaggagccaatcctcccctcctgtgggayttccttctcatattctgaacctccactmacacctggaactcacctcaacttctgcattccttatggagctgtttggaaataattcctatttccaaatttccaaaaagtaatttcctatttctgctgttctttcaacagcaatccctccagacttttccagtctgtatggaaagattsgttgcttccccgtgactcactgttgttgtttttgtgcatttcttccttggcgtgggtgtgtgttggacgttacctggcacagaagcaggaaggaatgggaarggattgggcagtgggtccaaagtgggagcagagtgaggctctgtacgtggtacagaccttgaagatcatcaagtccaaccgyaacctaaccatactacactgatggtttcatcaggagatgaaactggagatcatggcacccc

SEQ ID NO: 12318 - DNA, 443 bp, Chicken  19866894215858_14
aatcctcccctcctgtgggayttccttctcatattctgaacctccactmacacctggaactcacctcaacttctgcattccttatggagctgtttggaaataattcctatttccaaatttccaaaaagtaatttcctatttctgctgttctttcaacagcaatccctccagacttttccagtctgtatggaaagattsgttgcttccccgtgactcactgttgttgtttttgtgcatttcttccttggcgtgggtgtgtgttggacgttacctggcacagaagcaggaaggaatgggaarggattgggcagtgggtccaaagtgggagcagagtgaggctctgtacgtggtacagaccttgaagatcatcaagtccaaccgyaacctaaccatactacactgatggtttcatcaggagatgaaactggagatcatggcacccc

SEQ ID NO: 12319 - DNA, 361 bp, Chicken  19866894215858_15
tatggagctgtttggaaataattcctatttccaaatttccaaaaagtaatttcctatttctgctgttctttcaacagcaatccctccagacttttccagtctgtatggaaagattsgttgcttccccgtgactcactgttgttgtttttgtgcatttcttccttggcgtgggtgtgtgttggacgttacctggcacagaagcaggaaggaatgggaarggattgggcagtgggtccaaagtgggagcagagtgaggctctgtacgtggtacagaccttgaagatcatcaagtccaaccgyaacctaaccatactacactgatggtttcatcaggagatgaaactggagatcatggcacccc

SEQ ID NO: 12320 - DNA, 600 bp, Chicken  19866894215858_2
tatctgctcttagatgttgatcttctaagatgctgactcttggatgttgactctgccatcctgggttcaaatgctaatgctattttgctcgcagcaacttacacgtcgatttgattttattatatattgaacaaaatataggcaatatcctagaaaatgataaatattctaattatactttcataaagacataatggtttagtaatgtcaatgagctgtcagctttgtagacattgtttgccatttacatcatggcttcaggcttgaagagtacaggctgaagaagaatggaagcctacrctttcctcatgtttattagcttgagattgttaacgaggctggaagctgaaaagggcagatactccccacaatgaactttcagcaacccttacgaaatcttctggaaattctataaatagtcttcagtcgaacctcattgagggcaggtccaacttctctgtggcttttttaaagcaaattattctaaacagcattttggaygttatttyttgcaagcaaatgatccttgcagcctttttcattatctcaggcctggaattcatttcagatttggcaagtcctctcctcaaattcatgagc

SEQ ID NO: 12321 - DNA, 600 bp, Chicken  19866894215858_3
gtaatgtcaatgagctgtcagctttgtagacattgtttgccatttacatcatggcttcaggcttgaagagtacaggctgaagaagaatggaagcctacrctttcctcatgtttattagcttgagattgttaacgaggctggaagctgaaaagggcagatactccccacaatgaactttcagcaacccttacgaaatcttctggaaattctataaatagtcttcagtcgaacctcattgagggcaggtccaacttctctgtggcttttttaaagcaaattattctaaacagcattttggaygttatttyttgcaagcaaatgatccttgcagcctttttcattatctcaggcctggaattcatttcagatttggcaagtcctctcctcaaattcatgagcatgagctccacagacatacctcaaaaggaaaatgtgtaaataatgtctacagtggctttttatttttgttttattttacttcattttttaaaaaattattattattgttaagataagattacgtttcttctattcctttgcatcttttccttctggatttgttctgtgctgggatagtcccaactatagagcaacaggtaa

SEQ ID NO: 12322 - DNA, 600 bp, Chicken  19866894215858_4
aatgagctgtcagctttgtagacattgtttgccatttacatcatggcttcaggcttgaagagtacaggctgaagaagaatggaagcctacrctttcctcatgtttattagcttgagattgttaacgaggctggaagctgaaaagggcagatactccccacaatgaactttcagcaacccttacgaaatcttctggaaattctataaatagtcttcagtcgaacctcattgagggcaggtccaacttctctgtggcttttttaaagcaaattattctaaacagcattttggaygttatttyttgcaagcaaatgatccttgcagcctttttcattatctcaggcctggaattcatttcagatttggcaagtcctctcctcaaattcatgagcatgagctccacagacatacctcaaaaggaaaatgtgtaaataatgtctacagtggctttttatttttgttttattttacttcattttttaaaaaattattattattgttaagataagattacgtttcttctattcctttgcatcttttccttctggatttgttctgtgctgggatagtcccaactatagagcaacaggtaattaaaatt

SEQ ID NO: 12323 - DNA, 600 bp, Chicken  19866894215858_5
gcatgagctccacagacatacctcaaaaggaaaatgtgtaaataatgtctacagtggctttttatttttgttttattttacttcattttttaaaaaattattattattgttaagataagattacgtttcttctattcctttgcatcttttccttctggatttgttctgtgctgggatagtcccaactatagagcaacaggtaattaaaatttggaggtcctgcaaatgctgtgtgttccttgtaaaatcaagataatagtaaatcccctggataccaaatgaaaattaaagtcttttgartaaaatgcatcataaaattgctataattaaaatgtttgtcttccagtgggtagtctgccggaagcaatttcacctacagtggagtacagtggagctggaaattatcctttctgtgacttcttaaggccttatgagraaatccattgcgatcagtacaaaaagatttaaagccagcatcmcacagaggtttggacatcccatgkcagtgttccgggatgcccacaacagctgagcagttgtggtttgatgcccatttgataaacagaactcaaagtgttgttcaacctctgctgatctggc

SEQ ID NO: 12324 - DNA, 600 bp, Chicken  19866894215858_6
cctttgcatcttttccttctggatttgttctgtgctgggatagtcccaactatagagcaacaggtaattaaaatttggaggtcctgcaaatgctgtgtgttccttgtaaaatcaagataatagtaaatcccctggataccaaatgaaaattaaagtcttttgartaaaatgcatcataaaattgctataattaaaatgtttgtcttccagtgggtagtctgccggaagcaatttcacctacagtggagtacagtggagctggaaattatcctttctgtgacttcttaaggccttatgagraaatccattgcgatcagtacaaaaagatttaaagccagcatcmcacagaggtttggacatcccatgkcagtgttccgggatgcccacaacagctgagcagttgtggtttgatgcccatttgataaacagaactcaaagtgttgttcaacctctgctgatctggcagaaagtatgcaaaaccccttcccaccaaaaagtccgggtggtctttcagataacgagtggtaggtcagcaaaatggaattaattaatagcataaatatgatgcgatcaaagttcatttagaactactcaacagaa

SEQ ID NO: 12325 - DNA, 600 bp, Chicken  19866894215858_7
tcccaactatagagcaacaggtaattaaaatttggaggtcctgcaaatgctgtgtgttccttgtaaaatcaagataatagtaaatcccctggataccaaatgaaaattaaagtcttttgartaaaatgcatcataaaattgctataattaaaatgtttgtcttccagtgggtagtctgccggaagcaatttcacctacagtggagtacagtggagctggaaattatcctttctgtgacttcttaaggccttatgagraaatccattgcgatcagtacaaaaagatttaaagccagcatcmcacagaggtttggacatcccatgkcagtgttccgggatgcccacaacagctgagcagttgtggtttgatgcccatttgataaacagaactcaaagtgttgttcaacctctgctgatctggcagaaagtatgcaaaaccccttcccaccaaaaagtccgggtggtctttcagataacgagtggtaggtcagcaaaatggaattaattaatagcataaatatgatgcgatcaaagttcatttagaactactcaacagaactcgtttcagccccttacaagggaaactaccattcaaagcttg

SEQ ID NO: 12326 - DNA, 600 bp, Chicken  19866894215858_8
ttaaaatttggaggtcctgcaaatgctgtgtgttccttgtaaaatcaagataatagtaaatcccctggataccaaatgaaaattaaagtcttttgartaaaatgcatcataaaattgctataattaaaatgtttgtcttccagtgggtagtctgccggaagcaatttcacctacagtggagtacagtggagctggaaattatcctttctgtgacttcttaaggccttatgagraaatccattgcgatcagtacaaaaagatttaaagccagcatcmcacagaggtttggacatcccatgkcagtgttccgggatgcccacaacagctgagcagttgtggtttgatgcccatttgataaacagaactcaaagtgttgttcaacctctgctgatctggcagaaagtatgcaaaaccccttcccaccaaaaagtccgggtggtctttcagataacgagtggtaggtcagcaaaatggaattaattaatagcataaatatgatgcgatcaaagttcatttagaactactcaacagaactcgtttcagccccttacaagggaaactaccattcaaagcttgtactttctaacttgaagattcctt

SEQ ID NO: 12327 - DNA, 600 bp, Chicken  19866894215858_9
aaggaggtcttgaacaaaaggcatgggatgtcaaggccttgctcatgggctaaattgttatttgtattgtcaactggtgagtagtgcagtggtttcttttattcagccctcaattagaggcctatactcttaacagtgagctgtctggtaacctaagaaagccgtgtttagaaattatttcacagcaggaacaccatttgggattgtcactcaagtgttttgaaatactgtaggtttcctgtccgttatttttaagcctcctctctgcttggctgtgtaaatgtgccattggcagtggtmcttgacatggaggaagtaccaggggagagaagatgtggaaccctcaggttttcctaacctcccctggaagcttccctcttcctgttagggtttctgattcaggctcttaaaaaccaacggtgaatattattaaagtggtgaagatattatatatatatatgtgcatatatatatataactttctcccataagggagcatccattctgtagtgactgactacatttacataattaaaacaaacaactcattaatgacttcttacaccatttacaaccagccaccacccgtcatttataaag

SEQ ID NO: 12328 - DNA, 600 bp, Chicken  19866894215863_1
tttcctcctcctctccatttctaatttttaccatcttagtccttcaaactgtcatatgcaattgtacacaagattatgcatatcattcctatttcatttgcagtggtgcttatcctgcttgccaaactattccagtttcttgtctttctgctcggtacatatgaagacattgttgtttacaataattaatgttaaactgttgctttagattacaaagattcacatacagttccttcttctgccagaaaagagattgactggtccattcctccgccttctgtgccaatgtaacgttcactyttggtgcaaatttctgcaagttccacctgaaaaagaaaacaytaaatgtgaaccttcagccaacattaatgatgatacttttgcactgcttgcatatgaactagagagaaagtgaaggagataatgacagctctgagaccattctcacacactgagtagtagaagctggtatcaaccaggatgtcacatggcctctttttccttttattttaaagaaaaagagaatcaactgtgcagcctccactggacccaccacagccagcttttcaaagtaactttatttagattcttaacactagt

SEQ ID NO: 12329 - DNA, 600 bp, Chicken  19866894215863_2
ttcaaactgtcatatgcaattgtacacaagattatgcatatcattcctatttcatttgcagtggtgcttatcctgcttgccaaactattccagtttcttgtctttctgctcggtacatatgaagacattgttgtttacaataattaatgttaaactgttgctttagattacaaagattcacatacagttccttcttctgccagaaaagagattgactggtccattcctccgccttctgtgccaatgtaacgttcactyttggtgcaaatttctgcaagttccacctgaaaaagaaaacaytaaatgtgaaccttcagccaacattaatgatgatacttttgcactgcttgcatatgaactagagagaaagtgaaggagataatgacagctctgagaccattctcacacactgagtagtagaagctggtatcaaccaggatgtcacatggcctctttttccttttattttaaagaaaaagagaatcaactgtgcagcctccactggacccaccacagccagcttttcaaagtaactttatttagattcttaacactagtagctgtcctcacccaccttcctcattcacctcacactcctcc

SEQ ID NO: 12330 - DNA, 331 bp, Chicken  19866894215863_3
ctttaattcatcatggctccatttcctcaataaaatgaggagtatcttccctttcttggtaattagcaattactacttgggattctaataaatacatttgatcattcctagaaactgaaaaaaaaaaaaaaaagaaaaaaaaggaaagaaaaaaaagagtatatcttggtacttgagttctctgacttaaggcatccacataaaactgctctaaggaagaaaagtgccagaaccttgcagtgaggggaactagcttgtgcctgtctcagagcaatgcctcgtttctattcaactcgcaamacccaaaccttagcagggctgtttcaatcct

SEQ ID NO: 12331 - DNA, 600 bp, Chicken  19866894215876_1
cagcatggagcctgtcctagctctccgttctcagtcacagtcctaactcctgtgtcacagtcctacctgcctcttttaactgcatgggtagcacgtgtgaggctttttgactgttcagcctctgacagatttatgctgcatgtgaacgaatcctggtcaaacaaccacagctctatctcctgttcctgaatatcagtcacactcagaggcatgcaaaggcagtgtttcccagtagattttatgtatgatttgttttcatacactgcaatcctcagtaaagcaggagggcctagcttttgyaaagactcccaaaccaggaaagggtctagcagtatgagtgtaagcgcaacttaagcagatgcttatgtgcagtcttaaataaggatggatttacmtgcaggtttgtgtgttttcctggagctgggctgtagcagggtgaaaactgatgtggaaaaatatagattaagtattttggagtttgtttgattaacaatttcatccacaaattgggttcttaggcagtatggtcataagtgagccccagaaaatgcctttagaacaccagatatttgactgtttctttaccaaggattcaaagag

SEQ ID NO: 12332 - DNA, 600 bp, Chicken  19866894215876_2
tgtgaggctttttgactgttcagcctctgacagatttatgctgcatgtgaacgaatcctggtcaaacaaccacagctctatctcctgttcctgaatatcagtcacactcagaggcatgcaaaggcagtgtttcccagtagattttatgtatgatttgttttcatacactgcaatcctcagtaaagcaggagggcctagcttttgyaaagactcccaaaccaggaaagggtctagcagtatgagtgtaagcgcaacttaagcagatgcttatgtgcagtcttaaataaggatggatttacmtgcaggtttgtgtgttttcctggagctgggctgtagcagggtgaaaactgatgtggaaaaatatagattaagtattttggagtttgtttgattaacaatttcatccacaaattgggttcttaggcagtatggtcataagtgagccccagaaaatgcctttagaacaccagatatttgactgtttctttaccaaggattcaaagagcactgaacttgttgccttctagaagacaggaaaaagattaattcaataagatactgaattaccttctgttcctttactctttcttcactgatgca

SEQ ID NO: 12333 - DNA, 600 bp, Chicken  19866894215881_1
tctcacaggttttgtttgtaactgtgttacccctgaaaaacaaatgccttttccttctttgtatgttttataaatggagcctgttgtgtgagctccaagggcgttttgttactaatgctgctatattcaaaatcacttctgtcaaagagggagggggcagcattttgtttttctaagaactgcaaattttgccgctcttgtgttcctgcactaaacccaaacatgccaatatttgaataccagctccgagcaaacatgctttgcctttaactgtctgttcctggtacctcacacctggaytggccccccctccccgctgccttcgctccctgtctcccaggagctcagctcagccagaagatgcccacccgctgtgctgagcggatggcagygctgttgcctttttgtgggacgtgctgtgctgttctgcgcctcgcgtggctgtgtgcstatcgctgaggttccgttccccttccccttccttcaggctggcacttctgcctctgtttggtttgtgctcgccgtgccgataagctgcgggaggacggggctcagtgacgttgccaggggctgatcaatgcctgcaggaatgaggcggcc

SEQ ID NO: 12334 - DNA, 600 bp, Chicken  19866894215881_2
ctccaagggcgttttgttactaatgctgctatattcaaaatcacttctgtcaaagagggagggggcagcattttgtttttctaagaactgcaaattttgccgctcttgtgttcctgcactaaacccaaacatgccaatatttgaataccagctccgagcaaacatgctttgcctttaactgtctgttcctggtacctcacacctggaytggccccccctccccgctgccttcgctccctgtctcccaggagctcagctcagccagaagatgcccacccgctgtgctgagcggatggcagygctgttgcctttttgtgggacgtgctgtgctgttctgcgcctcgcgtggctgtgtgcstatcgctgaggttccgttccccttccccttccttcaggctggcacttctgcctctgtttggtttgtgctcgccgtgccgataagctgcgggaggacggggctcagtgacgttgccaggggctgatcaatgcctgcaggaatgaggcggcccgggaggcgctcggggagctccgtgcccccgctgtcctcccctccgcggggatgtttgaacagagttcagagcaagccttcgctgtcataaa

SEQ ID NO: 12335 - DNA, 600 bp, Chicken  19866894215881_3
gagggggcagcattttgtttttctaagaactgcaaattttgccgctcttgtgttcctgcactaaacccaaacatgccaatatttgaataccagctccgagcaaacatgctttgcctttaactgtctgttcctggtacctcacacctggaytggccccccctccccgctgccttcgctccctgtctcccaggagctcagctcagccagaagatgcccacccgctgtgctgagcggatggcagygctgttgcctttttgtgggacgtgctgtgctgttctgcgcctcgcgtggctgtgtgcstatcgctgaggttccgttccccttccccttccttcaggctggcacttctgcctctgtttggtttgtgctcgccgtgccgataagctgcgggaggacggggctcagtgacgttgccaggggctgatcaatgcctgcaggaatgaggcggcccgggaggcgctcggggagctccgtgcccccgctgtcctcccctccgcggggatgtttgaacagagttcagagcaagccttcgctgtcataaaagctctttgccatacggcatttgtccgctttgttttttccttccttgctcctgccacg

SEQ ID NO: 12336 - DNA, 600 bp, Chicken  19866894215881_4
ttcctgcactaaacccaaacatgccaatatttgaataccagctccgagcaaacatgctttgcctttaactgtctgttcctggtacctcacacctggaytggccccccctccccgctgccttcgctccctgtctcccaggagctcagctcagccagaagatgcccacccgctgtgctgagcggatggcagygctgttgcctttttgtgggacgtgctgtgctgttctgcgcctcgcgtggctgtgtgcstatcgctgaggttccgttccccttccccttccttcaggctggcacttctgcstctgtttggtttgtgctcgccgtgccgataagctgcgggaggacggggctcagtgacgttgccaggggctgatcaatgcctgcaggaatgaggcggcccgggaggcgctcggggagctccgtgcccccgctgtcctcccctccgcggggatgtttgaacagagttcagagcaagccttcgctgtcataaaagctctttgccatacggcatttgtccgctttgttttttccttccttgctcctgccacgggtttcagtgggcctcaaggattcgagtatccgaaaccccttcagctcaatg

SEQ ID NO: 12337 - DNA, 599 bp, Chicken  19866894215882_1
  misc_feature (1)..(175): n is any nucleotide
nnnnnnnnnnnnnnnnnnnnnnnnnnnnnnnnnnnnnnnnnnnnnnnnnnnnnnnnnnnnnnnnnnnnnnnnnnnnnnnnnnnnnnnnnnnnnnnnnnnnnnnnnnnnnnnnnnnnnnnnnnnnnnnnnnnnnnnnnnnnnnnnnnnnnnnnnnnnnnnnnnnnnnnnnnnnnnngatcttttaatgatatgcttatcgtaattttcccaggttagtgtttccaagtcatcattatggatctgttaatctctggacctctcctaattttcctctccagagctgggatcacctttgccacrttttattccctgaacacctgttaagtggtaggttgtgcactgcagctagcgggtcttttacagccctggggaaatataatacagtcctgctgattaattactgcttattttattgatctgttctaaatctttctctactaaatttgagttactcctattttcttctcaccaggaaagcccatgctatgggaatctccctgaaatgctcttcagtatttagagcccacttaacttttccctttctgaaagccccctgggccttatcgattacctatcaggctgctggcttccattgtgtt

SEQ ID NO: 12338 - DNA, 600 bp, Chicken  19866894215890_1
tgcttccattttattttatttagtgtaatcactggcttattgactcttgcctctgtttttgctttcctcctcttcgtggaggcaggtcagagaaaacagcaaagatttcatttaacttctcactagagaccacactttaaccataaagtcctcaaaagcccagaacaagctggagaaacactgtccatcccaaatcatacccaaggtgtaagtccagaatcacaaataaaggaaaacctccatccttccctgaattcaccccctagtatcctttcaagtgtttgccatgggtcccctcayaccagtgtgagagtggatgatcatctttagtagcacatagcttcaccctcccagcagcttgaaaaaaagagtcagatgactcaaaagtagtgacaggacactgagaaacctctctccctcttgcaggtgaagggaaaacctgaaccccagtgctactggtacagccaggaaagatggaagaatttgtggatatcagagcttttgttctgcagctgcttcacagagattaacccagtttttgcctagaaggggaaagattgtcacccactgaaaacaagatcaccatggaggaggcggaag

SEQ ID NO: 12339 - DNA, 600 bp, Chicken  19866894215895_1
atgcagatatgtcacccattggaaaaggggaaatgtcttactctgcttttattctcgctccagctgagtagctaaatttaaagaggagcattgaaaatacaacttcctcattgcaaaatgactggaattgttggctaaattcagttgcaattactaaagcaaaaagttctccgcagcgccgtttcatgttcagacctcaagattggatttcatatacagatcatcactgcagtagttctacttaaattcagaaaaaaagaattcccacctcctagaaataccaataggatctcagcataygttagcgccaacaaaagaaaagcccaaattaaggtggatttctttgaagttcccttatcaaaaggtaaagtggtgattgattcccattcttttacacatgtcaaaagaaccttgaactctgtttcactggggctctgttactttgcaatagctaaaagaaaatcttgcatagaaatgaggaaaaccaaaccagtatacctaacattcgtctctggtctctcaatttctttgtgagcagacacagaataagtatgaatggtcgccactgttctgtggcaaatccttttccatacctgcctt

SEQ ID NO: 12340 - DNA, 600 bp, Chicken  19866894215896_1
gtatgatggtattccctgacccatttcattgcatagatcacacttctgttactagctttatagttttggaatgacacatggctggcctgctaccaaacaaccaaagaggctgtcttgtcttctggccaagacaaaattatgtcttagaaaggtgctttgtgtaaaggtcatttcttccatgagtttcaagccctgagataattaactgaagctagagaggtcaacctgtttctctttggatccagacataataattttgagcaaatggtgaccagaaaagctagtatgaatcactggctyttgctttggcacatcttgtagatttatgtggctgaaagaaggtcctgtggctgctgatagtttgcaccactgattttgatgctgaccaattcaacagtagataaatgctaagcacttccaatcttatgtgtaacagcggcaccagcttgcagagcattggtactcattaagctgattctgaattctagagccaatttgcttctgcaaagctacaaagagagaaaccccaaatgaactttttcaaaataattgctcttaaaaaactacacaaagtgaartaataagtgtctaagatgagag

SEQ ID NO: 12341 - DNA, 600 bp, Chicken  19866894215896_2
agctagtatgaatcactggctyttgctttggcacatcttgtagatttatgtggctgaaagaaggtcctgtggctgctgatagtttgcaccactgattttgatgctgaccaattcaacagtagataaatgctaagcacttccaatcttatgtgtaacagcggcaccagcttgcagagcattggtactcattaagctgattctgaattctagagccaatttgcttctgcaaagctacaaagagagaaaccccaaatgaactttttcaaaataattgctcttaaaaaactacacaaagtgaartaataagtgtctaagatgagagttacctgtgatgggcagtccatagcttctccaattctacagcctgttctaatcttygaatgtctattaagaaaaagaaattataatcttgatatataactctaatttttctcgttacatcttgtctattgatttctcatcgyttttctgcatacttctgagaagaatctagtctgtcttctctatatcctcccacgaggtagttaaatagagatgaatgttctcctaccacctattcttaagactgaataagttcacttctctcagcttctccttaca

SEQ ID NO: 12342 - DNA, 600 bp, Chicken  19866894215896_3
atagtttgcaccactgattttgatgctgaccaattcaacagtagataaatgctaagcacttccaatcttatgtgtaacagcggcaccagcttgcagagcattggtactcattaagctgattctgaattctagagccaatttgcttctgcaaagctacaaagagagaaaccccaaatgaactttttcaaaataattgctcttaaaaaactacacaaagtgaartaataagtgtctaagatgagagttacctgtgatgggcagtccatagcttctccaattctacagcctgttctaatcttygaatgtctattaagaaaaagaaattataatcttgatatataactctaatttttctcgttacatcttgtctattgatttctcatcgyttttctgcatacttctgagaagaatctagtctgtcttctctatatcctcccacgaggtagttaaatagagatgaatgttctcctaccacctattcttaagactgaataagttcacttctctcagcttctccttacacatcaggtattccagccctgagaacctggtgcccctttactcaattcactccagtgtcagtacttttttagtgcttga

SEQ ID NO: 12343 - DNA, 600 bp, Chicken  19866894215896_4
cagcttgcagagcattggtactcattaagctgattctgaattctagagccaatttgcttctgcaaagctacaaagagagaaaccccaaatgaactttttcaaaataattgctcttaaaaaactacacaaagtgaartaataagtgtctaagatgagagttacctgtgatgggcagtccatagcttctccaattctacagcctgttctaatcttygaatgtctattaagaaaaagaaattataatcttgatatataactctaatttttctcgttacatcttgtctattgatttctcatcgyttttctgcatacttctgagaagaatctagtctgtcttctctatatcctcccacgaggtagttaaatagagatgaatgttctcctaccacctattcttaagactgaataagttcacttctctcagcttctccttacacatcaggtattccagccctgagaacctggtgcccctttactcaattcactccagtgtcagtacttttttagtgcttgaatgtccacagctagatacagtactccatatatggtttcacatgccttaaatagaaaggaaaaatcacctctttggacccactgtct

SEQ ID NO: 12344 - DNA, 600 bp, Chicken  19866894215896_5
acctattcttaagactgaataagttcacttctctcagcttctccttacacatcaggtattccagccctgagaacctggtgcccctttactcaattcactccagtgtcagtacttttttagtgcttgaatgtccacagctagatacagtactccatatatggtttcacatgccttaaatagaaaggaaaaatcacctctttggacccactgtctaccatttttctaaggcaatacagtgcattcttaatctatgaattcatctggtgtttttctgaacctttgctcagtactagagagagrgccctgtaagtgctagatgtatccaggattttgcatttttatcttcattgtgcagaatctcaaactgagcagtggtcccctctctctagatgtgcccaagcattccaaatgtcagtccaaatcatcacaaaaatcacaggcgttattctctgcctgctttaagtctgtgccaggatgagtgaattggaagacggggtgtgctggagcagttgaccccacgtctaacaccatgtcatctctgcagcagccaggtctagcagacttgctggtgtactgctgtagtcatgcagctgaaacact

SEQ ID NO: 12345 - DNA, 600 bp, Chicken  19866894215901_1
aagagaatactttttttcctatgatggaattaaaacaaataaatttagtggtagtgaaaagcaactttgaaagaggatcttgcaaagcttttctttttaattatttttttaataaatcaattatagaaataatcttcaaatatttctgcattcatgcattataaattctttgcaagtaatccacatttactgggcacagatgcatgttccctgaaagttttgcatggttctaaactattaggacacactctgagatagcacagatagtgatgccaaaaccctccatgctgtgactgatgracatacttcagaattttttttatgctaagcttgtcttgtttttctgagtgttttttggttttgtctgttgatctaggcaatgtaagaagtcatcaggtttgttcctgttatgtgccatacattgaggtagcctttccatgacccatcatattgatttcacccatccacagcagtttagaggtgctgccattgggacggatcaggtctgaactggaattcagtttttctccaaagccataagtactgcacatagaatttagagtgagctactattccctattttaatttaaacgacatttt

SEQ ID NO: 12346 - DNA, 600 bp, Chicken  19866894215904_1
tgcctgtgtatttgtctaggtcactggggacaggtgtgtgtggctcacatgcgatcagccagggtaggtaatattgattaaacgtgatcccaggggactgctaggcatggatcaaatatctggttgcatgagctggcaggcttgaaggctgtggccctctggataagactgtgttgcttctctccatggaaagatttgacatcgctgctataaaataacagagatcaaaccattaaaagccgcttacactctgaatttcttttgcagcaccctctcacaatgataatgttattcagtggrgatctctacagcctcctgaatttcctcagttttgccaggtggctttttattggactggtagttgctggcttgatttatctcagatataaacgtcctgatatgcctcgtcctttcaaggtaaccttctctctatactgttctacatgaatttttctcccttgtatctattgtctagtcagatcgcaaagcagcatttgctgakgtaaagttagcctattttgagaaaaaacaggatttaatagaaaatagtcttttacattgaagagtctcctcgtgttttccttcaagttcttcagtgct

SEQ ID NO: 12347 - DNA, 600 bp, Chicken  19866894215904_2
cgctgctataaaataacagagatcaaaccattaaaagccgcttacactctgaatttcttttgcagcaccctctcacaatgataatgttattcagtggrgatctctacagcctcctgaatttcctcagttttgccaggtggctttttattggactggtagttgctggcttgatttatctcagatataaacgtcctgatatgcctcgtcctttcaaggtaaccttctctctatactgttctacatgaatttttctcccttgtatctattgtctagtcagatcgcaaagcagcatttgctgakgtaaagttagcctattttgagaaaaaacaggatttaatagaaaatagtcttttacattgaagagtctcctcgtgttttccttcaagttcttcagtgctatcctggctgagctctcttctgaaagacagtttttgttaattccctggtggctgtaggggagcgattgagcttgctgtgcaaaaggcaaggtgtttgctcagttttgcctgtcgtgttgaggcagtgtgaggcaagctaaggtctttatgctctgccaagttgtgtgaaaatacctccagtctggtgtagtttcataagctt

SEQ ID NO: 12348 - DNA, 599 bp, Chicken  19866894215905_1
  misc_feature (1)..(24): n is any nucleotide
nnnnnnnnnnnnnnnnnnnnnnnnaccccaaagctttagggttccatctgctgaagaggtggctaaaatctgatccacgggagagaactgcacacaccagattccacgcttatgtccagtgaagacacccaagcaaagagcaatcaggacaggaccacagcttggccagccgatcctgcgagcccgtggcaatgagcttgtcatttggagacactgccacactgtttatgtcctagtaaagtcacagaaacagagagagcaaagcagttcaagtctttgcttttgctgtcaaagagctaygaattgcagggtataaaacaggagagcacttaaggactaaaaatacgctctcacatcaggtggaactttaccttgtcatgacctctctcagtcatttgtgcatgaagggtttctggaccggagatcaaggctgcttttgctttggaagtgagagattctgggatattccacacttttattgtgcagtcctggctgctggtcactacaaagctctctttcaacctgaaagggggaaaaaaacatgtgaagtataagaaagcaaaacagtggtttccactgcactgagaaaaggccctctc

SEQ ID NO: 12349 - DNA, 600 bp, Chicken  19866894215905_2
aaaatctgatccacgggagagaactgcacacaccagattccacgcttatgtccagtgaagacacccaagcaaagagcaatcaggacaggaccacagcttggccagccgatcctgcgagcccgtggcaatgagcttgtcatttggagacactgccacactgtttatgtcctagtaaagtcacagaaacagagagagcaaagcagttcaagtctttgcttttgctgtcaaagagctaygaattgcagggtataaaacaggagagcacttaaggactaaaaatacgctctcacatcaggtggyactttaccttgtcatgacctctctcagtcatttgtgcatgaagggtttctggaccggagatcaaggctgcttttgctttggaagtgagagattctgggatattccacacttttattgtgcagtcctggctgctggtcactacaaagctctctttcaacctgaaagggggaaaaaaacatgtgaagtataagaaagcaaaacagtggtttccactgcactgagaaaaggccctctccccaactggaatctacacagtcgctctgctgtgacattaaacagagcgtgagggcttttttcgag

SEQ ID NO: 12350 - DNA, 600 bp, Chicken  19866894215905_3
tcctggctgctggtcactacaaagctctctttcaacctgaaagggggaaaaaaacatgtgaagtataagaaagcaaaacagtggtttccactgcactgagaaaaggccctctccccaactggaatctacacagtcgctctgctgtgacattaaacagagcgtgagggcttttttcgagttgtctttccttttacttaagtccctgggataacctccatctattcagccattagcccagagcactgctagctttcctcatttacacactaaggcatatggcaacttttgaacaagctggamttccagactgttaggaagcacaaagaaaggagaagagctgataaacagatatgctattaaagcaagcaccttcataggcacactccctccattccccagtcatttcctccatattacttgagcttcatctagcaaattaaacagctgctgtcctttaagccaaatggaaggtagactgacaaagaaatgcaagcttcacagctgatgggcaaatgtgcatccaagaaagaaaacgacattcttccttcaactcagagcaccatgacaagctaaactcaaacattacaaacaatattattc

SEQ ID NO: 12351 - DNA, 600 bp, Chicken  19866894215905_4
tttaagccaaatggaaggtagactgacaaagaaatgcaagcttcacagctgatgggcaaatgtgcatccaagaaagaaaacgacattcttccttcaactcagagcaccatgacaagctaaactcaaacattacaaacaatattattcagaagcagacattcaccaaaacattcaccgaggaccagcaaagcagccatgactcatgcttgcaaaggtaaaactttgtttgactttcattaccttgagcaagagacagcgcctaccccatgagcatgacccaatccttgggccacacacacyacccttccatctttattcatccgccacactcgaatgcttttgtcctgtaatgggaaagaacagacaagtgatcagccctctgcacatctactacatccataagcctagctattcaatggcttttaagcctgtatctttgcctgcattcatcagagcaagggagcaacatttaaaaggaataatggaagactcctgtattttagggatgtagcagtcgtaaacaccatctcaacagaagcgctttctgccacacaggaatataacaactctatccataaagatcactagcaatgaagagtt

SEQ ID NO: 12352 - DNA, 599 bp, Chicken  19866894215911_1
  misc_feature (1)..(78): n is any nucleotide
nnnnnnnnnnnnnnnnnnnnnnnnnnnnnnnnnnnnnnnnnnnnnnnnnnnnnnnnnnnnnnnnnnnnnnnnnnnnnnctgaaactgcagtttgcttgtctcctggcagaaggaatttctctgaaagtacagttcactttacatctaagtaatgattatcttgctgtctccctttcattatgccattgttcttgggagccagaggttttgtaagttataagaaaaagatgttgccaaggatgtgggtggagaaaggtgttgacgtgatttcaatgggtttagattccagctttaaaaaamgagggtaataaaccaggcaaagaataggctttcctaggctgcccccgaaattaatgcaattatgattttgatgttgtaaatcttttttttttttttgaaacaattatttgatataacttttaaaaaaggcactttcctgtacagagaataaatatggtctgttactttttgcctaatcttctggccattgtttctaatgaaactcttcttaatttagtggaaaatgggaaattcagaaagccaatacagtcttcagggatcaaaaaatcatgctgctgcttcaactggttccaagcaga

SEQ ID NO: 12353 - DNA, 600 bp, Chicken  19866894215918_1
attctgtctcagcttattgatttgaataaattctaatggacattgaaacaggtgataaaacatactctcactcaagaataccatcactttcactaatagcttgattatgtagagtgatttggtattactcacaggagaattttaaataatcttagttgtggcttctgtgtagatttcaacagagtaaatacaaatttactaatggaatcgtgaaagacacctatgcacatctgcaacagaatcacataatggtttgggtcggaagggactttagagcccacccagttccaaccccatgcygtgagttgtcataggtcatcacccactagatcaggctgcccagggtcccatccagcctggccttgaatatgtccagggatgggccatctaagaagaccgtgaagaaaaaattgaagagtattctctcctattcacaactaccttgttagttttactttaaaatatttagctcaacatcatgtggtggtctgtttaatgtcacacacagtgtgcccatcaccctgagtcattcatctataaatgcatggagatccttgttcataacatagaattatataaaagggcagaacaacatattaa

SEQ ID NO: 12354 - DNA, 600 bp, Chicken  19866894215920_1
atgttcttttcctaagcctaatgatataggttctgtcaacttctgcctatccatattattttataatgagatattggaagatctgtagcttaataacagtaacaaaaagtgactaacaagtaagctgagaattcttcagatttgtttaccctcacaaagataattttcagtatgaatgcatgattctcaccttttcttttttcaagtatcatttttcagtttacaaaaatttttgcactgaatccagaatacaatttgtgaatacagaatgttctctatgcgcaaattaggacaaagaamttgcttgcattctttatgtttaaaatgaactgccttgaaaaaattctcccagcttaaaagcagaaaatattaagmagttgagaaggtgttccctgaaataattaatttccttgttatttttaagtggtaccttgctgtagaattttacaattaccttaacttcaatgccatgcaagcacatcaaaaaactgataaaatgatgcagctcttttcttgatatcatgcttacatgcacagtgattatagcatcctattcagctgtctcttagaatgcacatattgattaaaattgtatattct

SEQ ID NO: 12355 - DNA, 600 bp, Chicken  19866894215920_2
ggaagatctgtagcttaataacagtaacaaaaagtgactaacaagtaagctgagaattcttcagatttgtttaccctcacaaagataattttcagtatgaatgcatgattctcaccttttcttttttcaagtatcatttttcagtttacaaaaatttttgcactgaatccagaatacaatttgtgaatacagaatgttctctatgcgcaaattaggacaaagaamttgcttgcattctttatgtttaaaatgaactgccttgaaaaaattctcccagcttaaaagcagaaaatattaagmagttgagaaggtgttccctgaaataattaatttccttgttatttttaagtggtaccttgctgtagaattttacaattaccttaacttcaatgccatgcaagcacatcaaaaaactgataaaatgatgcagctcttttcttgatatcatgcttacatgcacagtgattatagcatcctattcagctgtctcttagaatgcacatattgattaaaattgtatattctcattaatacggaatgattacattttccttcagttctcatacagacatatcaagaatttccaaaccatacaacata

SEQ ID NO: 12356 - DNA, 600 bp, Chicken  19866894215921_1
tgcctctgatctgtacaagtatcagaatgatagaatcatgaaggttggaaaagacctctaagatcatctagtctaatattccacctatcattactattgcccactaaaccacatccctgagtcctacatctacattttccttaaacagggagatggctccaccacctccctgtagctgcctggagctgttgtgaccaaagctcagcacccagctcttggtcttgttgaacttcatcctgttggcctcagcccagtgatccagactgtccagatccctctgtagggccttcctaccctcaratggatcaacacttcctcccagcttggtttctatctgcaggaacattrggagaaccaagccaaaaagccacggcagagcatgcatcagtggaagttagagggacacgtaggcagtgtcaatgtattactacatctgtcctcatgacttggggatacactgatgcaagcattgcaatgttgcaaagcaaatattactagtttcagtctcaccagacctctggtatgacagagctgtcactgcttcaacacagctgtcaccaccttgctaagcaaccatcacaacatggcagaggcctgcca

SEQ ID NO: 12357 - DNA, 600 bp, Chicken  19866894215921_2
aaaagacctctaagatcatctagtctaatattccacctatcattactattgcccactaaaccacatccctgagtcctacatctacattttccttaaacagggagatggctccaccacctccctgtagctgcctggagctgttgtgaccaaagctcagcacccagctcttggtcttgttgaacttcatcctgttggcctcagcccagtgatccagactgtccagatccctctgtagggccttcctaccctcaratggatcaacacttcctcccagcttggtttctatctgcaggaacattrggagaaccaagccaaaaagccacggcagagcatgcatcagtggaagttagagggacacgtaggcagtgtcaatgtattactacatctgtcctcatgacttggggatacactgatgcaagcattgcaatgttgcaaagcaaatattactagtttcagtctcaccagacctctggtatgacagagctgtcactgcttcaacacagctgtcaccaccttgctaagcaaccatcacaacatggcagaggcctgccaatagatggcaaaaaggtcacaaggtcaaattttcagtagcagcatcag

SEQ ID NO: 12358 - DNA, 599 bp, Chicken  19866894215923_1
  misc_feature (1)..(81): n is any nucleotide
nnnnnnnnnnnnnnnnnnnnnnnnnnnnnnnnnnnnnnnnnnnnnnnnnnnnnnnnnnnnnnnnnnnnnnnnnnnnnnnnntgatctgtttcctttgtgtgccttaagatggaagttctgttgaaacggaaaatactaatcatatagttcttaagatataaacatggctgtgctgtgaactaatgtgtgaaaatgaatccaaaagcaactgaaattgctgactcaaggcaccaaaacctgtcagtcctttccccttaaggtagggtggggagggtggtaaatgttggctggctagctggratctaccttgtatttggatgccctggaaacgtaatcttgggtgtctgctcatgcacaatatattataactcttagctgttcacttaatgctcctctgtgaagaattagtgmctacttgatgtatgcaaaccagagatgcatcmtgttaagcttttcactctgtcattttgttgcattgatctgtagtatcttgagcacaaagctttgttgctgagcttcaaagcctgaagttctgcttcccttgcacattttgcccaggttgcatggtggcttttccwtttgacatcctgaggcttttt

SEQ ID NO: 12359 - DNA, 600 bp, Chicken  19866894215923_2
gaagttctgttgaaacggaaaatactaatcatatagttcttaagatataaacatggctgtgctgtgaactaatgtgtgaaaatgaatccaaaagcaactgaaattgctgactcaaggcaccaaaacctgtcagtcctttccccttaaggtagggtggggagggtggtaaatgttggctggctagctggratctaccttgtatttggatgccctggaaacgtaatcttgggtgtctgctcatgcacaatatattataactcttagctgttcacttaatgctcctctgtgaagaattagtgmctacttgatgtatgcaaaccagagatgcatcmtgttaagcttttcactctgtcattttgttgcattgatctgtagtatcttgagcacaaagctttgttgctgagcttcaaagcctgaagttctgcttcccttgcacattttgcccaggttgcatggtggcttttccwtttgacatcctgaggcttttttttttttaactgagaacagcctcctgagggaatttgtgggacactgccctggaaatgttgtggcaaggtgtcctgctttagatgatgtcagttgtacaacctgaatgctgct

SEQ ID NO: 12360 - DNA, 600 bp, Chicken  19866894215923_3
atagttcttaagatataaacatggctgtgctgtgaactaatgtgtgaaaatgaatccaaaagcaactgaaattgctgactcaaggcaccaaaacctgtcagtcctttccccttaaggtagggtggggagggtggtaaatgttggctggctagctggratctaccttgtatttggatgccctggaaacgtaatcttgggtgtctgctcatgcacaatatattataactcttagctgttcacttaatgctcctctgtgaagaattagtgmctacttgatgtatgcaaaccagagatgcatcmtgttaagcttttcactctgtcattttgttgcattgatctgtagtatcttgagcacaaagctttgttgctgagcttcaaagcctgaagttctgcttcccttgcacattttgcccaggttgcatggtggcttttccwtttgacatcctgaggcttttttttttttaactgagaacagcctcctgagggaatttgtgggacactgccctggaaatgttgtggcaaggtgtcctgctttagatgatgtcagttgtacaacctgaatgctgctgctgtctaggctgcagaacctacttgttggta

SEQ ID NO: 12361 - DNA, 600 bp, Chicken  19866894215923_4
aaatgttggctggctagctggratctaccttgtatttggatgccctggaaacgtaatcttgggtgtctgctcatgcacaatatattataactcttagctgttcacttaatgctcctctgtgaagaattagtgmctacttgatgtatgcaaaccagagatgcatcmtgttaagcttttcactctgtcattttgttgcattgatctgtagtatcttgagcacaaagctttgttgctgagcttcaaagcctgaagttctgcttcccttgcacattttgcccaggttgcatggtggcttttccwtttgacatcctgaggcttttttttttttaactgagaacagcctcctgagggaatttgtgggacactgccctggaaatgttgtggcaaggtgtcctgctttagatgatgtcagttgtacaacctgaatgctgctgctgtctaggctgcagaacctacttgttggtaaaatggatactaggatttttttgccctttyttctgtatcttcacatttgtcttgttcagcctgttcaaattgcatggaagcacctgaaattactagaagagctgatataacaacttcattgtttatctgttcttt

SEQ ID NO: 12362 - DNA, 600 bp, Chicken  19866894215923_5
ctggratctaccttgtatttggatgccctggaaacgtaatcttgggtgtctgctcatgcacaatatattataactcttagctgttcacttaatgctcctctgtgaagaattagtgmctacttgatgtatgcaaaccagagatgcatcmtgttaagcttttcactctgtcattttgttgcattgatctgtagtatcttgagcacaaagctttgttgctgagcttcaaagcctgaagttctgcttcccttgcacattttgcccaggttgcatggtggcttttccwtttgacatcctgaggcwtttttttttttaactgagaacagcctcctgagggaatttgtgggacactgccctggaaatgttgtggcaaggtgtcctgctttagatgatgtcagttgtacaacctgaatgctgctgctgtctaggctgcagaacctacttgttggtaaaatggatactaggatttttttgccctttyttctgtatcttcacatttgtcttgttcagcctgttcaaattgcatggaagcacctgaaattactagaagagctgatataacaacttcattgtttatctgttcttttaatttccagataaatt

SEQ ID NO: 12363 - DNA, 600 bp, Chicken  19866894215923_6
cattgatctgtagtatcttgagcacaaagctttgttgctgagcttcaaagcctgaagttctgcttcccttgcacattttgcccaggttgcatggtggcttttccwtttgacatcctgaggcttttttttttttaactgagaacagcctcctgagggaatttgtgggacactgccctggaaatgttgtggcaaggtgtcctgctttagatgatgtcagttgtacaacctgaatgctgctgctgtctaggctgcagaacctacttgttggtaaaatggatactaggatttttttgccctttyttctgtatcttcacatttgtcttgttcagcctgttcaaattgcatggaagcacctgaaattactagaagagctgatataacaacttcattgtttatctgttcttttaatttccagataaattaagtgtatcagttgcagagaacagctttatgcacttgaaagtttggcctgaatttcctttagagcgctctagtggctgtatacccagtagtggtctcagaagttgggaataatctggtaggaggattctgaagctttcttacctgaaagattaggcagtcatcttttgctctgttctt

SEQ ID NO: 12364 - DNA, 600 bp, Chicken  19866894215926_1
gctcttcttgattaaaattaaaagacattttctgcaatacattatagtttgaaatgccagtagctatagtcatatctcactgacttactttcagtgtgtattaagaatctgggtatggggatattaaataagtgtcattatgttaatactttggcagaagaatgttaaaacagcacagaaaaattacaaaaatacacatgagaactttctgtaagagcaaagaatatttataaaaaaattgggttggttttgtctatgtcattgaatttttcattaattttatgaagaagaaatctattytttttatatgtgttaaacaaactagtccatttaacggcaatatagttttattacctgttcctcaaggaaaactgtcttgcatgataagtgagaaccatgtttgattcagtctaagctggtgatgtctttccctatccacactaaamccctatgttcagtgactggaaaaaatcatacaagaatgcctcaggaccactagccatctttgtaccaactraaggttctttatagtatagatattgttatatttcttgtgaawtaattaatttattaggaaagaatttctcacatcacaaaagc

SEQ ID NO: 12365 - DNA, 600 bp, Chicken  19866894215926_2
tactttggcagaagaatgttaaaacagcacagaaaaattacaaaaatacacatgagaactttctgtaagagcaaagaatatttataaaaaaattgggttggttttgtctatgtcattgaatttttcattaattttatgaagaagaaatctattytttttatatgtgttaaacaaactagtccatttaacggcaatatagttttattacctgttcctcaaggaaaactgtcttgcatgataagtgagaaccatgtttgattcagtctaagctggtgatgtctttccctatccacactaaamccctatgttcagtgactggaaaaaatcatacaagaatgcctcaggaccactagccatctttgtaccaactraaggttctttatagtatagatattgttatatttcttgtgaawtaattaatttattaggaaagaatttctcacatcacaaaagctcattcatgaatcaccatcagttcttcatgaggttacttcgaaaataataataataataataatagatacacggaataaaagtacttgtggtatttttatagaactctgttccaggttgaggtaaggcatggtggagaaagcacag

SEQ ID NO: 12366 - DNA, 600 bp, Chicken  19866894215926_3
caaagaatatttataaaaaaattgggttggttttgtctatgtcattgaatttttcattaattttatgaagaagaaatctattytttttatatgtgttaaacaaactagtccatttaacggcaatatagttttattacctgttcctcaaggaaaactgtcttgcatgataagtgagaaccatgtttgattcagtctaagctggtgatgtctttccctatccacactaaamccctatgttcagtgactggaaaaaatcatacaagaatgcctcaggaccactagccatctttgtaccaactraaggttctttatagtatagatattgttatatttcttgtgaawtaattaatttattaggaaagaatttctcacatcacaaaagctcattcatgaatcaccatcagttcttcatgaggttacttcgaaaataataataataataataatagatacacggaataaaagtacttgtggtatttttatagaactctgttccaggttgaggtaaggcatggtggagaaagcacagactcacagttaaagtacctatcatattgctgattaagatattaatggaaaaaaacaagcttctgtcaaaat

SEQ ID NO: 12367 - DNA, 600 bp, Chicken  19866894215926_4
cattgaatttttcattaattttatgaagaagaaatctattytttttatatgtgttaaacaaactagtccatttaacggcaatatagttttattacctgttcctcaaggaaaactgtcttgcatgataagtgagaaccatgtttgattcagtctaagctggtgatgtctttccctatccacactaaamccctatgttcagtgactggaaaaaatcatacaagaatgcctcaggaccactagccatctttgtaccaactraaggttctttatagtatagatattgttatatttcttgtgaawtaattaatttattaggaaagaatttctcacatcacaaaagctcattcatgaatcaccatcagttcttcatgaggttacttcgaaaataataataataataataatagatacacggaataaaagtacttgtggtatttttatagaactctgttccaggttgaggtaaggcatggtggagaaagcacagactcacagttaaagtacctatcatattgctgattaagatattaatggaaaaaaacaagcttctgtcaaaataggctttttgcacacatatttccacagtgtctgagctttaaa

SEQ ID NO: 12368 - DNA, 600 bp, Chicken  19866894215929_1
aaatctaaagccacagaagaattcatctcccaagcagatataatagacagagaaattggatttattgcagctagaagtgatgatagttttttttttccttttcttttttaaatagagtaatcctataaaatacactaattcaattaatccaggatacagttcacaagtttatgaagttgttcttcaaattattaatgtaatctcatacaagcctgtactgaaacgtacactgaatgcactgaattgaacagtcttcattttaaagaagtaattgcttcatgcagcagatcagtcccagakgagtacgtgctaatgctccgattcctcactcagctgccacttagctacccttgaaaaaaatgtcacttgagtatatttgtgacaggacctattctaccgctatcttacagacgtttcaaacattaattatagagttttacagttaaattaagccactttctcacctgggtatttgtcctatagcaagtcatgttcttgcaaacccctcatgcttttgagctttggtttctgtgtgtgtatcttcctaaacttttaaagttcattgccagctgacctccctattttagcaatcagttcaga

SEQ ID NO: 12369 - DNA, 599 bp, Chicken  19866894215930_1
  misc_feature (1)..(94): n is any nucleotide
nnnnnnnnnnnnnnnnnnnnnnnnnnnnnnnnnnnnnnnnnnnnnnnnnnnnnnnnnnnnnnnnnnnnnnnnnnnnnnnnnnnnnnnnnnnnnngcacaaactggtccagagcagctcctccagccccacgtgcccgtaagatacaagtggcagtggtgcaggagctgcttccccattggctgccctgagagctgggacctgtagcagggcatagctgatgcacagtggtgatgaacagggtggcattcagcccccttagcctggctctgctcccagccagcgcttgtgtgtgtggggcrggggtggcctccatccccaggatggtggtaggctgcctgatggccaggcacatcatttccctctggatgccatcagaccgagcctttgctctttgtggctcgggggtgagtgctagaacgttcctgtgctgggggacttatttactggtggaaaaggaactgccatggtgtgtccttcataattcttctcactgttctcatgtctggacagcttttaaagcccacacggtcaagccagaactctgaatrgcttgatttgttgacagagagaatgagtgatataattgcacaatacagct

SEQ ID NO: 12370 - DNA, 600 bp, Chicken  19866894215930_2
agcccccttagcctggctctgctcccagccagcgcttgtgtgtgtggggcrggggtggcctccatccccaggatggtggtaggctgcctgatggccaggcacatcatttccctctggatgccatcagaccgagcctttgctctttgtggctcgggggtgagtgctagaacgttcctgtgctgggggacttatttactggtggaaaaggaactgccatggtgtgtccttcataattcttctcactgttctcatgtctggacagcttttaaagcccacacggtcaagccagaactctgaatrgcttgatttgttgacagagagaatgagtgatataattgcacaatacagctgtaaactgaattackgaacctactggagcaccataaaaccagtgaactataagttaacattgtctccaaatcccaggcagagaatcaggctgggcacagtcctgcttgctacacaaagtgagggggtggtccttcgtggtgccctggggcccaggctctgctctgaggtcagtcttatgactgctgctgcttctgagacctccagcccattacaacctttcttcctccttccccagaccaaggactgagg

SEQ ID NO: 12371 - DNA, 600 bp, Chicken  19866894215930_3
ccccaggatggtggtaggctgcctgatggccaggcacatcatttccctctggatgccatcagaccgagcctttgctctttgtggctcgggggtgagtgctagaacgttcctgtgctgggggacttatttactggtggaaaaggaactgccatggtgtgtccttcataattcttctcactgttctcatgtctggacagcttttaaagcccacacggtcaagccagaactctgaatrgcttgatttgttgacagagagaatgagtgatataattgcacaatacagctgtaaactgaattackgaacctactggagcaccataaaaccagtgaactataagttaacattgtctccaaatcccaggcagagaatcaggctgggcacagtcctgcttgctacacaaagtgagggggtggtccttcgtggtgccctggggcccaggctctgctctgaggtcagtcttatgactgctgctgcttctgagacctccagcccattacaacctttcttcctccttccccagaccaaggactgaggtgctcctgggctgttgttagcctttacttggtttgcctcatcacgaggatgcacggcttcccacc

SEQ ID NO: 12372 - DNA, 600 bp, Chicken  19866894215935_1
gtttttaaacacagtgaaaaattccacctttcattcttgacaatgaggctggggcacttgaatgtagacttagtgtgggaatataaatagtagctaggatgtatttttccatcacctagaacatgcaatttaatctgtggtgctctccagctattctgtccctgaaaatatccttcccctaagaactgggtaaaggaggcaggaatggttatctatgagatgtacagtgctgaagtatagcttaattaaatccaactgtggtaccacatttcaaaacagtgtatctttggtagctctatytgttgatggagtggtagataaaggcaagtgatttcctgcctgaaaagacttgggggctctttagggttctaggctacatytgaggtagggcagcagcccctgctgcctgcactgaggggggatagrgagagttgagggcaggctgccttctgctgtgtgtggtgctctgggcacaagagggagygactgtaggaattcatacattacaaaccagtttcagctgtcttagctttgttcaaattgatttccagcttttcttttcaatggtaagtggtactacattaggaagccttgaaacct

SEQ ID NO: 12373 - DNA, 575 bp, Chicken  19866894215935_2
atataaatagtagctaggatgtatttttccatcacctagaacatgcaatttaatctgtggtgctctccagctattctgtccctgaaaatatccttcccctaagaactgggtaaaggaggcaggaatggttatctatgagatgtacagtgctgaagtatagcttaattaaatccaactgtggtaccacatttcaaaacagtgtatctttggtagctctatytgttgatggagtggtagataaaggcaagtgatttcctgcctgaaaagacttgggggctctttagggttctaggctacatytgaggtagggcagcagcccctgctgcctgcactgaggggggatagrgagagttgagggcaggctgccttctgctgtgtgtggtgctctgggcacaagagggagygactgtaggaattcatacattacaaaccagtttcagctgtcttagctttgttcaaattgatttccagcttttcttttcaatggtaagtggtactacattaggaagccttgaaaccttgaagtaatgttctgcccggtacaaacaaacgccctaggaatacatccataatga

SEQ ID NO: 12374 - DNA, 529 bp, Chicken  19866894215935_3
aatttaatctgtggtgctctccagctattctgtccctgaaaatatccttcccctaagaactgggtaaaggaggcaggaatggttatctatgagatgtacagtgctgaagtatagcttaattaaatccaactgtggtaccacatttcaaaacagtgtatctttggtagctctatytgttgatggagtggtagataaaggcaagtgatttcctgcctgaaaagacttgggggctctttagggttctaggctacatytgaggtagggcagcagcccctgctgcctgcactgaggggggatagrgagagttgagggcaggctgccttctgctgtgtgtggtgctctgggcacaagagggagygactgtaggaattcatacattacaaaccagtttcagctgtcttagctttgttcaaattgatttccagcttttcttttcaatggtaagtggtactacattaggaagccttgaaaccttgaagtaatgttctgcccggtacaaacaaacgccctaggaatacatccataatga

SEQ ID NO: 12375 - DNA, 471 bp, Chicken  19866894215935_4
actgggtaaaggaggcaggaatggttatctatgagatgtacagtgctgaagtatagcttaattaaatccaactgtggtaccacatttcaaaacagtgtatctttggtagctctatytgttgatggagtggtagataaaggcaagtgatttcctgcctgaaaagacttgggggctctttagggttctaggctacatytgaggtagggcagcagcccctgctgcctgcactgaggggggatagrgagagttgagggcaggctgccttctgctgtgtgtggtgctctgggcacaagagggagygactgtaggaattcatacattacaaaccagtttcagctgtcttagctttgttcaaattgatttccagcttttcttttcaatggtaagtggtactacattaggaagccttgaaaccttgaagtaatgttctgcccggtacaaacaaacgccctaggaatacatccataatga

SEQ ID NO: 12376 - DNA, 600 bp, Chicken  19866894215938_1
ctgcaggtaaccaatagaggggccctgccctcagtcaggagtggggggggaagggataatagagtttattggactgtgtggattcgatgacatggcacatcagaaccacaggaatataaggcactggtggacactggtgcccagtgcaatctgatgcccttgtgttataaagggacagaacggaactgatttatatttctggagtgactgggggctctcaggaattgtctgtgttggaggcagaaagaagcctcactggtaaagactggcagaagcatcctatagtgactggacaggggkctccatgcctactcagtatagatatagtatagtatacctcagaagggggtatttcaaggatcccaagggataccgatgggcttttggaatagctgctgtagatacagacaacattaagccactgtctgtcttttctggcctgccagaagacccgtctgttgtggggttactacaggtagaagagcaacaggtaccaattgctacaaaaacggtacacagacggcagtaccgcaccaacagggattgcttgctccccattcataagttgatttgtcagctagagagtcagggagtgatcag

SEQ ID NO: 12377 - DNA, 600 bp, Chicken  19866894215948_1
ccaatgcattaccattctttctgagaattatttttgctaatatgcaacctgaacctcccctggtgcaacttgaggacattatcccttgtcctattgctattacctgggagaagaggctgactcccaccttgccacagcttcctctcagggagttgtagaaaactatagtttcccctgatcccctctcttctctaggctaaaaaatcccagttccctcagccactgcccacaagacttgtgctccagaacattcacagcttcattgcccttcttcggacatgcttctgggcctcaatatcyttgttgtagtgaggggcacaaaactgagcataggtctcaaggtgtggactcaccagtgctgagtacagagggatgatcacctcyctgctcctgctggtaacactatttctgtcacaagccaggatacctttagcttccatagcctcctggacacattgctggctcctgttcagctggctgtcaactaacacccccagatccttttcctctgtgcagctttccagcaactttgccccaggtattgctaactaatgcttgataattatttgaggaaaatattggttgttcataacagtgatg

SEQ ID NO: 12378 - DNA, 600 bp, Chicken  19866894215948_2
cttgtcctattgctattacctgggagaagaggctgactcccaccttgccacagcttcctctcagggagttgtagaaaactatagtttcccctgatcccctctcttctctaggctaaaaaatcccagttccctcagccactgcccacaagacttgtgctccagaacattcacagcttcattgcccttcttcggacatgcttctgggcctcaatatcyttgttgtagtgaggggcacaaaactgagcataggtctcaaggtgtggactcaccagtgctgagtacagagggatgatcacctcyctgctcctgctggtaacactatttctgtcacaagccaggatacctttagcttccatagcctcctggacacattgctggctcctgttcagctggctgtcaactaacacccccagatccttttcctctgtgcagctttccagcaactttgccccaggtattgctaactaatgcttgataattatttgaggaaaatattggttgttcataacagtgatgctgtagcatctcacaagagcctctcccatcagactctttccttgcagctatgttaatcttcacacagctgtcccttaaatcata

SEQ ID NO: 12379 - DNA, 406 bp, Chicken  19866894215951_1
tcatcatcattttcgtttatcaattaccgccttcctaaacatgtagctccagtttgctgagacagaagggcatatcaaattgtggctgttagctcattcatttagattaactctcctgggcatgcacttcgaggtctgaaagactaaccataccacctaggtgcctgagcataaagaagagaaggccagtaaatgtttatgggagaaaagactattaaagtaaggaccaggcaagcttctggaaatccaggtcagctctgatacttcaacatgcttctctgtagtgttgcaggccacatrctggcaatggatattagagcataagggcaaaaatacatgcatttcctgcaatatggacttccaggtcaaaccactaaggtctgtttctccatcactgatcaggaaa

SEQ ID NO: 12380 - DNA, 600 bp, Chicken  19866894215955_1
gagattcataaatccacaggttttttcattgaaatgacacacacttagactctaagtgttctaccatcattcctctataaacagaaaaagaaaagatgttactctgaaacaagttactgcacctcctccttggcaggtagacagcctcttaaactaggtggtgacaccttgacagtgtttcttcagtcaggctatttagtgctgtgcacgcgtatgttattacatacaacgtataacaaagaagaaccaaataatcctcacagagtaaataacctatataatacccatggtggttagctrgtaccagtttttttttcagcctggagagtaagctgatcctttccagaaagcagctaaaacttaaattttcataagcaagagtactaacaggatctttggtaagatatgctattgaaaagtccatcatttgcaataatagctattaagagccataaactaattgtagataatggcctacaattcagtggcagtaattcagccactttattaagttatatggatttaagatcattttaataccttggtatgcatgaagaaaagggaatagattgtgaaastcttgttaaaagtagcaaagat

SEQ ID NO: 12381 - DNA, 583 bp, Chicken  19866894215955_2
taatacccatggtggttagctrgtaccagtttttttttcagcctggagagtaagctgatcctttccagaaagcagctaaaacttaaattttcataagcaagagtactaacaggatctttggtaagatatgctattgaaaagtccatcatttgcaataatagctattaagagccataaactaattgtagataatggcctacaattcagtggcagtaattcagccactttattaagttatatggatttaagatcattttaataccttggtatgcatgaagaaaagggaatagattgtgaaastcttgttaaaagtagcaaagatgatcctcggttgtctacctataatggcactggaatagtctagatttcaagtgaacctttcagtgacctcctgttgcaaacagggcagtgatgcaaaacaatcagtcggccatgaagggctcaggcagtagaacagcatcagatgagcaaatgggaactctggtcccacgtggggsttcctatgcagagaaacaagacctgggctgtactgcaccatgcaaggcagagagccctggaggaacatgggtttatttggcaagta

SEQ ID NO: 12382 - DNA, 386 bp, Chicken  19866894215955_3
tacaattcagtggcagtaattcagccactttattaagttatatggatttaagatcattttaataccttggtatgcatgaagaaaagggaatagattgtgaaastcttgttaaaagtagcaaagatgatcctcggttgtctacctataatggcactggaatagtctagatttcaagtgaacctttcagtgacctcctgttgcaaacagggcagtgatgcaaaacaatcagtcggccatgaagggctcaggcagtagaacagcatcagatgagcaaatgggaactctggtcccacgtggggsttcctatgcagagaaacaagacctgggctgtactgcaccatgcaaggcagagagccctggaggaacatgggtttatttggcaagta

SEQ ID NO: 12383 - DNA, 599 bp, Chicken  19866894215957_1
  misc_feature (1)..(92): n is any nucleotide
nnnnnnnnnnnnnnnnnnnnnnnnnnnnnnnnnnnnnnnnnnnnnnnnnnnnnnnnnnnnnnnnnnnnnnnnnnnnnnnnnnnnnnnnnnnnacaggagacacaatattaggatcacagaatggtttgggttggaagggaccttttagatcatctagttccatcccccttgctacaggcagggagatctctcactagatcaggttgctcaaagtcccatccagcctggcctggaatgccttgaacgcctccagggatggggcatccacaaactctctgggcaacctgaatgagaattatrtgtttgcctcacaaacaggaatccagtctcaaagctagcatgactgaatatcagcatgggaagggttcagcagtagtaagaaacagaaaatcctcacaagcagaactgtaaggaagtcaactctgatgtgctttccacaggaactggatgcctaactgccctttgtgtctctgtatgatgaaatttgattaagaacagcaaatatttcagctactgttactcttgtttacaattttacaacttacgagtcacaggtcatgaacactgagccatgcatggttgtaaatacaagcagactt

SEQ ID NO: 12384 - DNA, 600 bp, Chicken  19866894215963_1
gtgtttaacttccttgaagtgcgattatctataggaacgtgttagataaagcagatattgaaagaaacaactgacggtaggtactttttgatgtatgagctgaatgcagtatattcatttgtaaaaatgcatgcgtattgttgaattttctcctggaatatctgttgtgttatacttaggtaaaatgggaatttaattaagtgacatatttctccttttaagatgcactattggaagaggaattaagaacaggaagtcagccccacattgctgttttgctgtctttaaatgattgatgtktttcatagattattctggtaaatgtcttgggatcattctacagagtcttcatagaagtccagttctggtcacaaagttgtattggaacattacaaattggtttcaagaagactgaaacatctcagtaaaatctccttgggacacgtgacagatttgtcgtatgtcctaccacaatggtagcatttcattgtttgtatggacacatacaggatataaagaagtggagaattaggcatttggttttggtaccagactcatctaagtgttgtactcctgtctagttattctatctatctagtg

SEQ ID NO: 12385 - DNA, 599 bp, Chicken  19866894215964_1
  misc_feature (1)..(130): n is any nucleotide
nnnnnnnnnnnnnnnnnnnnnnnnnnnnnnnnnnnnnnnnnnnnnnnnnnnnnnnnnnnnnnnnnnnnnnnnnnnnnnnnnnnnnnnnnnnnnnnnnnnnnnnnnnnnnnnnnnnnnnnnnnnnnnnnnnctggggagcaggactaagtgcatcccaccccactgctgcttgcagactgggggtgatgcgtcccaggcagaggatagagggggaaacactgcagggtacagctcacccagacaccttgagactcagttcctggggcaggaactgcactctgaacacctcctgctccccaygactacagagggagtgtgggacatcagctcagatgcagtgccgacgcagcagacatctaaattgggacaggcgaatgccaccatgggacacttacggcagttcttctcatcgctcatgtccccgcagtcattgttgttgtcacactgccaaatgctgttgatgcagttcccattgaagcatctgtactggttgggcagacacgtgttttctggtgcagaggggaaaacaaaaagaagctggcgtgaggcatgacgccacgttcttggctatcagatgtgctccttgtcccaagggcagc

SEQ ID NO: 12386 - DNA, 600 bp, Chicken  19866894215964_2
gcagtgccgacgcagcagacatctaaattgggacaggcgaatgccaccatgggacacttacggcagttcttctcatcgctcatgtccccgcagtcattgttgttgtcacactgccaaatgctgttgatgcagttcccattgaagcatctgtactggttgggcagacacgtgttttctggtgcagaggggaaaacaaaaagaagctggcgtgaggcatgacgccacgttcttggctatcagatgtgctccttgtcccaagggcagctgggaaggtcgtcgtcagtggaagaagctgccacstctaacaacaacggcaggaaccaagcctagtgttaccttccttcacacaggtgttgttcttcatgctgtagccatgaggacagtcacacttcacctcccctgaaggcagcacggtgctggaaacgccctcagggcacttgcagctccggccattgttggacttgggcaaacagagcaggctgcaggggtgggcaatgcaggcattctgtcctggcacaaggggagggaaggggacaccatcaacaggggctgtaggcaagcaggaagccccaccccacccccatcccagcttttgaggtt

SEQ ID NO: 12387 - DNA, 600 bp, Chicken  19866894215968_1
tatggtttttatttcagtattactttcttctgatgttcagatagaggtaatctatttagctttttttttttgaaagcaagtgtcaaggctagttgtaatattcaaagtaaatctgagatgacagaaaatgtattttttgagaattttaatcaatatttacattcgccatattgatattaaactggagttgttaacttgatatatagaacttattaggtgaggcagttttcaaggctaaaaatggggttttcaaaaacagttgagatatatggaagcagaaattctgtggaaagtcaagakaatttctctatttcattattaytccactacagtgctgcattcttgagctgctaaaatggtatttctaggagtagcttaatgctgttagtaattattcatatacgattttcaccctttgctcacaagtctggagaatgctctttttgttatgactgcataataaaatctaatcttttctctctaatagatgcagcaacaagaacttgcacaaatgaggcagagagatgccaatctaactgcattggcagctatcggtccccggaagaaacggaaacttgattcacctggactgcttaccat

SEQ ID NO: 12388 - DNA, 600 bp, Chicken  19866894215968_2
ctttcttctgatgttcagatagaggtaatctatttagctttttttttttgaaagcaagtgtcaaggctagttgtaatattcaaagtaaatctgagatgacagaaaatgtattttttgagaattttaatcaatatttacattcgccatattgatattaaactggagttgttaacttgatatatagaacttattaggtgaggcagttttcaaggctaaaaatggggttttcaaaaacagttgagatatatggaagcagaaattctgtggaaagtcaagakaatttctctatttcattattaytccactacagtgctgcattcttgagctgctaaaatggtatttctaggagtagcttaatgctgttagtaattattcatatacgattttcaccctttgctcacaagtctggagaatgctctttttgttatgactgcataataaaatctaatcttttctctctaatagatgcagcaacaagaacttgcacaaatgaggcagagagatgccaatctaactgcattggcagctatcggtccccggaagaaacggaaacttgattcacctggactgcttaccataggaggagaggtatttgtttgt

SEQ ID NO: 12389 - DNA, 600 bp, Chicken  19866894215972_1
catcagcaacaagacagacatggatctctcatttcatgtctgctgagcatctgcaaagccatctctgctggaagttattgaacagttctgctttgcaataaacacaaactgcttttgttactcagcagtagcctcctgcagagtcccccctcaccccgtggagttgccctgtgtggtcttcagccaaaatccactctgccagaaaagcccagagggaaacccagtgggttcctggtctccataccaggggaataaaataaaccagtggagtctacacagcagcccccaggaaggcctttytaagctgcatttggtggatttgaccgagcaatgggttgccagcatggctctctagcagccctgttgcacgcctgcatccctctgtgcactgtgagtggaaatcagagctacactgagacctcagagcatctaacacagcacccctgtgtaaacagctggcacacatacagtgactcagtctgcttatatgcagtactacaacataagggagggatgggggggggggttaataaaactgggaaacaaatccaggtgtaaaacacaggaatgagcctccctcttcctcttgtgcagccacct

SEQ ID NO: 12390 - DNA, 600 bp, Chicken  19866894215979_1
aggaggtctgcctgaaagccagctaattttaccttttctgcttcttatatctaatactcatttacatgcatgtcttgacttcactacaaattttgctgcagactcaggtaaaatatttgattaatttttccctgcatccctgcacttctgatgtacaaatactgtaagaagaggaaatagagtgtgggggaaaatcttccatcacaaatctaaacagaagtgctttatagttaagttttcgggtttagaggttccatgtctatgtttctctccactgctgataccaaatttgagctattrtgaggggatcatatgggtctcacttccagcaggtttaaattctgggagagtttgtgctttgagcagccacaggattcctgtacacatctcccattccccttttaataggcaaacctaccctgggttacgtagtgtttgttttataactgaatatttgctgttcttcttttgttatttttatcattttttgatacatgcttccatattgcaaagtaaatacaaaatgctatccagagaacatttcaggtaatgaaacagagctaagtgacttcaaatgtgattcttgtaattccagttcct

SEQ ID NO: 12391 - DNA, 600 bp, Chicken  19866894215980_1
gataataagatgccagtgggtggacgtagaggcaacatctgtatgtctgatctcatgtgctgatctcgtgtactggcagggacgtgcatgacactttgttattccagaagtatctcaaggacataaaattccgacagctggaacctggtctggagcgtctgcgttataaaaccgctctctcctgcagctatgttggggctttctggcattagcagaagaggaaaaaacgtccttactttttcttcagttaacttagtaggcagcatgggtgtatgtggtgcttgagaaagacgtgtgcaygtgtgtctgtatgcatacaaatatgtgtgcatgtagattccccattttactgcagctggctggcgtggaccattacctgagagtaagacaagcaagagtttcctttatgtggatgaaacactattccacctggaacaaaaacactgccaagaaggaaaacatactgctggccatgtgagttggatggcccccatccatgggtatggttcaatggctttgcactattccagcacctggaaaagcaacttgacagtcttccttgagcgtcctcctgcctaaaggaaagaaaaaggccttgga

SEQ ID NO: 12392 - DNA, 600 bp, Chicken  19866894215980_2
gcccccatcaccctgccgtcacctcacagagctgggacaccaagcgatgggtgggcaggagaaatgggcctctggagggggaggctaaagcactgctgcttctccacagggaaaaaggattttgtccaagctgcccagtggagagttgaccatactcatggccccagcaaccgggagggatgtttctggccttcctatgtgggaatcagaaagctgccttgacccaagctctgtggtaacttccagagcaagagggaagaagttattaataggaaaatactgagctctctgcaaatactstgctcctctgaggtgccagtgacagatactatgtgggattttgtgcgtgagatggtgggttttgtgatggaaaaaaactggggagttatttaaatataggccatgctgtgaaaaaagtttgagatgccagcactgaatcagccttccaaagccatgctgtcccctcacttgtttctgctgagaagtgttccccgctcaggatggaaggagtgcttgatgggtgcctcctgtgtacttggcatcaatgggcttgagctgctagctgtactggcaagggttaagcagacaaagaatctgacc

SEQ ID NO: 12393 - DNA, 599 bp, Chicken  19866894215984_1
  misc_feature (1)..(68): n is any nucleotide
nnnnnnnnnnnnnnnnnnnnnnnnnnnnnnnnnnnnnnnnnnnnnnnnnnnnnnnnnnnnnnnnnnnngcattccatgtgactgacggcaagcacaggtgcccaccaggataaaatagagatgcatagaagaggcaaaaaaataatttttaatgaaatgaggtttctctccagaagtgttttaccagctgttttcagcaaacactgtgctgtgcgctgtacagggaattcacagctgtgctgagggatctatagattgaagggagagagaaatagagaatgattctgcagttgcagcacrgagcagtgctggtttctgctgatttcagcagacccagtctcaggaaacactgtkcttttgaaaacaaagatactctacctttatccacccaaggcaatgccaccatcagtagtgggaatcagacaagacctctggtttcctctctttcacctcctttcttcctccttgccaaactaggctggcagagtgggcrctggtatctacagtccccttcccaaaggtctgcataggaagcacggtgcagagggaggcacagcaaatcatgtgagcaagttaaagcaacrttcaaccttgagcag

SEQ ID NO: 12394 - DNA, 599 bp, Chicken  19866894215984_2
  misc_feature (1)..(14): n is any nucleotide
nnnnnnnnnnnnnngcattccatgtgactgacggcaagcacaggtgcccaccaggataaaatagagatgcatagaagaggcaaaaaaataatttttaatgaaatgaggtttctctccagaagtgttttaccagctgttttcagcaaacactgtgctgtgcgctgtacagggaattcacagctgtgctgagggatctatagattgaagggagagagaaatagagaatgattctgcagttgcagcacrgagcagtgctggtttctgctgatttcagcagacccagtctcaggaaacactgtkcttttgaaaacaaagatactctacctttatccacccaaggcaatgccaccatcagtagtgggaatcagacaagacctctggtttcctctctttcacctcctttcttcctccttgccaaactaggctggcagagtgggcrctggtatctacagtccccttcccaaaggtctgcataggaagcacggtgcagagggaggcacagcaaatcatgtgagcaagttaaagcaacrttcaaccttgagcagatcttgcccagcagccttacagctggctgaatgaaagcaatgttaaaaatctct

SEQ ID NO: 12395 - DNA, 600 bp, Chicken  19866894215984_3
tcagcaaacactgtgctgtgcgctgtacagggaattcacagctgtgctgagggatctatagattgaagggagagagaaatagagaatgattctgcagttgcagcacrgagcagtgctggtttctgctgatttcagcagacccagtctcaggaaacactgtkcttttgaaaacaaagatactctacctttatccacccaaggcaatgccaccatcagtagtgggaatcagacaagacctctggtttcctctctttcacctcctttcttcctccttgccaaactaggctggcagagtgggcrctggtatctacagtccccttcccaaaggtctgcataggaagcacggtgcagagggaggcacagcaaatcatgtgagcaagttaaagcaacrttcaaccttgagcagatcttgcccagcagccttacagctggctgaatgaaagcaatgttaaaaatctctgctcgatgccagctactctccaggccgcctcctgttgcctgctgtgggctgtggagcatagctcatcttctgcctcagccttggccattaacaccctgtgcatgttgccaataatgctgtccaggctactggcagggaca

SEQ ID NO: 12396 - DNA, 600 bp, Chicken  19866894215984_4
ctgcagttgcagcacrgagcagtgctggtttctgctgatttcagcagacccagtctcaggaaacactgtkcttttgaaaacaaagatactctacctttatccacccaaggcaatgccaccatcagtagtgggaatcagacaagacctctggtttcctctctttcacctcctttcttcctccttgccaaactaggctggcagagtgggcrctggtatctacagtccccttcccaaaggtctgcataggaagcacggtgcagagggaggcacagcaaatcatgtgagcaagttaaagcaacrttcaaccttgagcagatcttgcccagcagccttacagctggctgaatgaaagcaatgttaaaaatctctgctcgatgccagctactctccaggccgcctcctgttgcctgctgtgggctgtggagcatagctcatcttctgcctcagccttggccattaacaccctgtgcatgttgccaataatgctgtccaggctactggcagggacaattttgttcggtcatctttctaggaatctttaggctgaagacagctacactcctgtcattgggaaggtgcctttagaaacttaaacacctt

SEQ ID NO: 12397 - DNA, 600 bp, Chicken  19866894215984_5
taaatgaacagttagtctgtgcgacatccacatggcttcacaaagaccaaaggggctgtccgggaagggacatttgcagtgggagatctgtccctctggtaagctgttgaactgggcaaccttcaggcccctgggtgcactgtgaagcagtgcctcccactgcgtggcagcttcctgatggggtctggcaaacaccacctctgccttgtggtgaagcctctgcaggtgaccatggagaaagggagagtagcagcagcagcaggaccccttctggaaggtgcctagttgtccattaatacrttctgaaaaaacatcccttgaggtactaacatgattttccattccactacacactaatgaagtacagatgaaggagttttccccttttttattgcctttccatcctgcagcgtggccgtaatcaatccaaggctagagatcaggaaacatttttgcataattttttctccttagccttcccctccccagtgaatgattgtacattaagtcagcataaaggttgggagatggatggtggattacataggaaacaggtgagctgctgtgcaatgggttcccagctgagcacaatgaccgcaa

SEQ ID NO: 12398 - DNA, 600 bp, Chicken  19866894215985_1
aatactttaaagggggaagagagcgctggagggctcccctgtgtgtttgtgtatgaaggttttccagcacagtgacaaagcacagtagtgctgaagttagaagttttatctccacagataaagaatccagaaacacccaaaaatagatactgtcagagaaggtttgccatgctggtttccacttgttaattaaatgctctcaggatgtttcaaattgaaggactgcattgcgtggaatttaacaggtgtattttgtgagtttaatcccattcagtctttcagtttgtgactcggatgatrgaacagagatttactaattgctatggcagagctcagggtggggggaatacaggcactgcagtgtgaaatgatctcaacaaattggacagatgatctgaaggaaatacatgggatgcatttcagtaaggggaaatgtaaaataatatgtttgggtagcaacaataaacttgaaatgagaaacaactggcagggcaacagatctgcaaataagtagctgtatcacaaaatgaacacaaatgagtcatgctagctttaaaaaaagacaccaggagtcactctgggatataggagctggattgt

SEQ ID NO: 12399 - DNA, 600 bp, Chicken  19866894215990_1
cagcacacctcaaaataccagcaatgccaggcaaaatccaacacaaaacccagccactgctgaagtcttattcacacacggcagccatcagcattacccttcattttacacctacactgaaactgtaaggcatgcgtatttctagcaacatccttctgttgcattacccaactttgaagtaactcatggcagagcccacctctgctgttcccttcatggggaggaagcaatggaagcagcatccctgactcgctcccaggctgcacttctgcacatctcaggctcgctaggaagcactcrcacttctaaggccaagtgtttataaggtgttygtgctggagcctgtgcctcacctccctgttttatttttaatcttcatttcatggagctcaagcagttctttcaaggttcccgtgaatgatctttatcccttttgcagctcattccattctgtgaacaaaatccctgggaggtcctggaagaagaagagaaaaaggatgacatttgaaatggaataagaaattgaaaacagaacatacttttttttttttcttaaagaaaattcacaactctaaatctagcaagctgtaaacaagcatg

SEQ ID NO: 12400 - DNA, 600 bp, Chicken  19866894215990_2
aaaatccaacacaaaacccagccactgctgaagtcttattcacacacggcagccatcagcattacccttcattttacacctacactgaaactgtaaggcatgcgtatttctagcaacatccttctgttgcattacccaactttgaagtaactcatggcagagcccacctctgctgttcccttcatggggaggaagcaatggaagcagcatccctgactcgctcccaggctgcacttctgcacatctcaggctcgctaggaagcactcrcacttctaaggccaagtgtttataaggtgttygtgctggagcctgtgcctcacctccctgttttatttttaatcttcatttcatggagctcaagcagttctttcaaggttcccgtgaatgatctttatcccttttgcagctcattccattctgtgaacaaaatccctgggaggtcctggaagaagaagagaaaaaggatgacatttgaaatggaataagaaattgaaaacagaacatacttttttttttttcttaaagaaaattcacaactctaaatctagcaagctgtaaacaagcatgtttggtgttcgtagagccccaaatcttttgta

SEQ ID NO: 12401 - DNA, 600 bp, Chicken  19866894215994_1
cttgagaactctttggaggaattgcaatattgaggtggtggaggagggtgattccaggaggggggaggatcaggatggtgccgtgaataacatctgtgccccagagatgatggctcaataggctttcttgttgttgcaagcagatctctttggctgtttattcatcttctttttcattcccagctaaagctaggtcagtgtacagagctgcacaggagatgcccatatcaggattcacaagcttgcttgttttctgcagaggtgtgcacaggtgtgaacatactggaaaatgaggctttsccctgcattgccactgtgggcaccttaacccgatgtctgtgacccagacgctcccaggggagagagctctcttccaagatctttccaaacagcaaccgcttcacagcgacccaggagaagctggatggaaaggaagagagcccttgtctgtctctactggttgtgtgggcctgaaagtagcagactgaagtgccactgctttcatcacctcactgctttctggaccaacccaagtgcaatgccacgcgtgcgggttctgggacttcttttgatacgtcattgcgacacatcttatgatta

SEQ ID NO: 12402 - DNA, 600 bp, Chicken  19866894216000_1
caactgctcagccaataccgatcacatggatttgataatataagtgcattcagtgctctgtatttatttcttgctttatgctgttcttggcatttggccctcccagaaacaattaactgaagctataattgggacaaagaaggcagtccaaggctaaaacttagacttagctcaccagcaagccaacataataaaacatcttaatagagctgctgcactaatgtgcgtgcacatgcacttctggacttcagatgcaaacaacaggagcaattctactcaagcaacctggtgctgctatgyccrtttgaagaaaggacctccacccgttaagtgctacgcacrcaggcatgcagtgtccttgcatcgagcaagaacaaggacacccatacagactggacactggagtatataaatcactgactttctgcagcactgagtaacacaaaagctcraaagtactgtttacctaagtccatagtacttacaactggtagcagtacagtaaagctatatcagcatatactttggcattctgtgaaactcctctgactatgcacctctgaccattagcctacttagtatttattaggatgcctgctg

SEQ ID NO: 12403 - DNA, 600 bp, Chicken  19866894216000_2
ctgctcagccaataccgatcacatggatttgataatataagtgcattcagtgctctgtatttatttcttgctttatgctgttcttggcatttggccctcccagaaacaattaactgaagctataattgggacaaagaaggcagtccaaggctaaaacttagacttagctcaccagcaagccaacataataaaacatcttaatagagctgctgcactaatgtgcgtgcacatgcacttctggacttcagatgcaaacaacaggagcaattctactcaagcaacctggtgctgctatgyccrtttgaagaaaggacctccacccgttaagtgctacgcacrcaggcatgcagtgtccttgcatcgagcaagaacaaggacacccatacagactggacactggagtatataaatcactgactttctgcagcactgagtaacacaaaagctcraaagtactgtttacctaagtccatagtacttacaactggtagcagtacagtaaagctatatcagcatatactttggcattctgtgaaactcctctgactatgcacctctgaccattagcctacttagtatttattaggatgcctgctgaaa

SEQ ID NO: 12404 - DNA, 600 bp, Chicken  19866894216000_3
agtgcattcagtgctctgtatttatttcttgctttatgctgttcttggcatttggccctcccagaaacaattaactgaagctataattgggacaaagaaggcagtccaaggctaaaacttagacttagctcaccagcaagccaacataataaaacatcttaatagagctgctgcactaatgtgcgtgcacatgcacttctggacttcagatgcaaacaacaggagcaattctactcaagcaacctggtgctgctatgyccrtttgaagaaaggacctccacccgttaagtgctacgcacrcaggcatgcagtgtccttgcatcgagcaagaacaaggacacccatacagactggacactggagtatataaatcactgactttctgcagcactgagtaacacaaaagctcraaagtactgtttacctaagtccatagtacttacaactggtagcagtacagtaaagctatatcagcatatactttggcattctgtgaaactcctctgactatgcacctctgaccattagcctacttagtatttattaggatgcctgctgaaacttaccgtacactagttcattattcactataaagcgaac

SEQ ID NO: 12405 - DNA, 495 bp, Chicken  19866894216000_4
gctaaaacttagacttagctcaccagcaagccaacataataaaacatcttaatagagctgctgcactaatgtgcgtgcacatgcacttctggacttcagatgcaaacaacaggagcaattctactcaagcaacctggtgctgctatgyccrtttgaagaaaggacctccacccgttaagtgctacgcacrcaggcatgcagtgtccttgcatcgagcaagaacaaggacacccatacagactggacactggagtatataaatcactgactttctgcagcactgagtaacacaaaagctcraaagtactgtttacctaagtccatagtacttacaactggtagcagtacagtaaagctatatcagcatatactttggcattctgtgaaactcctctgactatgcacctctgaccattagcctacttagtatttattaggatgcctgctgaaacttaccgtacactagttcattattcactataaagcgaacatcag

SEQ ID NO: 12406 - DNA, 600 bp, Chicken  19866894216004_1
tgacaatcccatacaaaactaatatttaactgggaaatgtaacatagatatacctgaggtttcattattcactgttttcaactctgaatggcaaaaacagacacatccaatgagcatgttgttacagttaagtgcaagatggaaacctgacgtatgaagatgctgctacaccaattctaaacatctttttcctcataattcctttaaaaagagagttaacgctgttgctgaagtaaaacaactgaagactcagatttcacagaatgtattttctgggagcaagccagaagaatttaacaygctcacgaaaccagcctccatatctggatttatattacatatcggtaaaaactaggtcgagacaactatgagtcagcacagcactgcaatacagycaaaactatttgcaaaagcttttcaaattcaccatgcaaatagacacaataaattctcatttcatcagtatatgcacttcaatctggctaactagagaaacattttcttatccaactgcaaaagctgagcagtgccataatgcagacaggctgctctccaccatcattatttaagctgcatacctgcctggctgtttgcagtgga

SEQ ID NO: 12407 - DNA, 600 bp, Chicken  19866894216004_2
aacagacacatccaatgagcatgttgttacagttaagtgcaagatggaaacctgacgtatgaagatgctgctacaccaattctaaacatctttttcctcataattcctttaaaaagagagttaacgctgttgctgaagtaaaacaactgaagactcagatttcacagaatgtattttctgggagcaagccagaagaatttaacaygctcacgaaaccagcctccatatctggatttatattacatatcggtaaaaactaggtcgagacaactatgagtcagcacagcactgcaatacagycaaaactatttgcaaaagcttttcaaattcaccatgcaaatagacacaataaattctcatttcatcagtatatgcacttcaatctggctaactagagaaacattttcttatccaactgcaaaagctgagcagtgccataatgcagacaggctgctctccaccatcattatttaagctgcatacctgcctggctgtttgcagtggactcacttccacatctatttggtaagcatgaattcatccaacattgaaggcatcccacaaacttctgttttagaagattcatgagatcctactctt

SEQ ID NO: 12408 - DNA, 600 bp, Chicken  19866894216004_3
caaacttctgttttagaagattcatgagatcctactcttcctttctgtaacccttatccacgtgcaatgtcatactggtacagacttttgcaggcagggtaatcaaacagtatataatggaatatgagaggagtgataacaacataattctgaacatcacaacaatttcaatattcattaaacactgaggaaaggagggagagcagacagtttctagacctatcagaacatagggtgaggtatagggactccatcaccaaccaaccacgcacaggcaccccaggtatgcagtagcatcgytgcaggtataggcagtsaccccacacacagggagcctgctctacttactgggataaactaggcgagaaagaaggggctaccgctttacaattgcttgtgactttaaaacatggaaagatcttgggagcaacagtttaaccagtgcaaggctaggcatgccctcacccaacacaatgtagtactgactcaaaatgcctttcatacctgggtttgtaaaatgagcaagactgaagaaaacactcaggaagcacaggcccacaaaaagagaaacacaaaacaaatgcatgatatcccccaagc

SEQ ID NO: 12409 - DNA, 600 bp, Chicken  19866894216004_4
agattcatgagatcctactcttcctttctgtaacccttatccacgtgcaatgtcatactggtacagacttttgcaggcagggtaatcaaacagtatataatggaatatgagaggagtgataacaacataattctgaacatcacaacaatttcaatattcattaaacactgaggaaaggagggagagcagacagtttctagacctatcagaacatagggtgaggtatagggactccatcaccaaccaaccacgcacaggcaccccaggtatgcagtagcatcgytgcaggtataggcagtsaccccacacacagggagcctgctctacttactgggataaactaggcgagaaagaaggggctaccgctttacaattgcttgtgactttaaaacatggaaagatcttgggagcaacagtttaaccagtgcaaggctaggcatgccctcacccaacacaatgtagtactgactcaaaatgcctttcatacctgggtttgtaaaatgagcaagactgaagaaaacactcaggaagcacaggcccacaaaaagagaaacacaaaacaaatgcatgatatcccccaagctagcatttagaccacaa

SEQ ID NO: 12410 - DNA, 600 bp, Chicken  19866894216005_1
gagcaggagcttgctcggggcagctgtgcaaagcctgcagggtgtccatgccaagaggaggaggaggatgctgaacgtagtcactgtgaacacagcatttatgcagcacagggcccgcatgagcacagcaaggcaggaattggtgctcacagcactgctagcttttaaagggtttttaaatgggaaacagcgcctgataaaggcatcatcatttctggcatgtcatgacaggaaatttgctacaggcagccagctttgcaaggcatgcaaaatataatagcagtttggcttaatttttcyagaagtgcgggaaagatgatttgtcaagatcttagtcccatcatccttgaaagggcctacttaggcagcacacgtgttgtgtgaggctgtgacccattctaattccacagctaggggcacagggagaagccatgccaggcayggccctgtacctgggcagcactggtagacacagcagagccacgtggggaggaaaaggcctagcaaggagcagctcccagctccagggatctaattctgctcaccaggacctcctcagcagcaatttgaggttgcagtctgagggaagatggagaggac

SEQ ID NO: 12411 - DNA, 541 bp, Chicken  19866894216005_2
gtgctcacagcactgctagcttttaaagggtttttaaatgggaaacagcgcctgataaaggcatcatcatttctggcatgtcatgacaggaaatttgctacaggcagccagctttgcaaggcatgcaaaatataatagcagtttggcttaatttttcyagaagtgcgggaaagatgatttgtcaagatcttagtcccatcatccttgaaagggcctacttaggcagcacacgtgttgtgtgaggctgtgacccattctaattccacagctaggggcacagggagaagccatgccaggcayggccctgtacctgggcagcactggtagacacagcagagccacgtggggaggaaaaggcctagcaaggagcagctcccagctccagggatctaattctgctcaccaggacctcctcagcagcaatttgaggttgcagtctgagggaagatggagaggacaaaaaaaaaaccaaccaaccacctgaaacactatatggaatgggcagaaaacaccgagcaataaaaatggggggaaagaaaaa

SEQ ID NO: 12412 - DNA, 600 bp, Chicken  19866894216006_1
acaaagcttctattgaaggcaatagaaactttggctgcttgacgtctttgaaaatctgttcatgtatttttatttgttcagtacccacttcaaacataaataataataaacataaaccctgcaaaaagaaggaacactgtccagacaagaatgtaaataaacagaacaaacctttacagactctctgaattgatagaaaatacatttaaatgtaacacacaataagaaacataggtataaatactgaatacatcgctgaaatcagctataagaatcagtgagttttgacagaagaaaaawtaaggagtctataatagaaaaaaggggtaggtagggaaacaaagtaaagaaagccctcactgtgtggaaaatttgctgaaatgctaagttttctgcagaaattctactgttgtaaaatactatccttttatcttcatagtaaatcttacttcagaagaaggtataaacaagttgctactgcataatccaagattctattaattctcttttcctcaataatcaaataacttacagcttgctgaattatttcttgttttaaatctgcatggatttatcagtagattatcagtaaaagaccct

SEQ ID NO: 12413 - DNA, 600 bp, Chicken  19866894216008_1
cactttaaaataccttttgtcaatgttgaggggaagttaggcatagtgagttgcaacaccaaataaatgaatctaagccctttttactgcctccttttgaaatgtggaaaaataattccatttccatgctcgctcagtcttcatttcttgttctgataacgccaattagagcagcccttttagtgaggtgggcatctgtctcctagaaattctacccatctgtttacatgccaggaggtactaacagctgtagaacaaatttgatatagatcatataactattcccaaccaccagtgagsagagaagctacagactgcctagcaaatactctgcaaaggcattgatgctgtttctgccctgctatgttcttttcctgtactatgagatacagagtacatagacctgattttatatatatataatatgtacatgaaatacaaactctagaaatttccattaaatctgaacaatattttgaactgcctttactgcagctacacacgctgtcacacgtgtgataaattcatgatgagagaactacaaataagatatgattacacacacacaaacacaaaactgcagtattatttttacttcta

SEQ ID NO: 12414 - DNA, 599 bp, Chicken  19866894216010_1
  misc_feature (1)..(25): n is any nucleotide
nnnnnnnnnnnnnnnnnnnnnnnnnaatataaatatgagcattagaatagactatacatcctatctataattcctctcatattgttccattatgtctttttttcctatattggagtcttctatagatgttttcagaataacaaaaaaaccctacccacatagccagtgtcctgtacaggtaaaaaatgatatggtacttattatcaacataagtaactgtaacaaagctgtgattattttcttggaggaatatactaatccagcactattttgtcacatggaatcttaaatcagagactrcactattccctcaagcaataaattcagtgcagacagccaagaayattgaataattcacttcttcaacactttctatatgttaaaatrcaacagagaagtttcaaggcacagttttggacaagttccttaaaaataaatccaacagtcttgagaacaatagtatattgatcaaagtagacraaaagaaaaacacagaacaaacagatcctattactgccaaaggaggatgggggaaaggagccattttagaagctctcaattcttcagtgcaagaacgcagcaagcatttttcataatcc

SEQ ID NO: 12415 - DNA, 600 bp, Chicken  19866894216010_2
gaatagactatacatcctatctataattcctctcatattgttccattatgtctttttttcctatattggagtcttctatagatgttttcagaataacaaaaaaaccctacccacatagccagtgtcctgtacaggtaaaaaatgatatggtacttattatcaacataagtaactgtaacaaagctgtgattattttcttggaggaatatactaatccagcactattttgtcacatggaatcttaaatcagagactrcactattccctcaagcaataaattcagtgcagacagccaagaayattgaataattcacttcttcaacactttctatatgttaaaatrcaacagagaagtttcaaggcacagttttggacaagttccttaaaaataaatccaacagtcttgagaacaatagtatattgatcaaagtagacraaaagaaaaacacagaacaaacagatcctattactgccaaaggaggatgggggaaaggagccattttagaagctctcaattcttcagtgcaagaacgcagcaagcatttttcataatccatccaaccttcagccatgttcccctaccatgggtcttacttacag

SEQ ID NO: 12416 - DNA, 600 bp, Chicken  19866894216010_3
cattatgtctttttttcctatattggagtcttctatagatgttttcagaataacaaaaaaaccctacccacatagccagtgtcctgtacaggtaaaaaatgatatggtacttattatcaacataagtaactgtaacaaagctgtgattattttcttggaggaatatactaatccagcactattttgtcacatggaatcttaaatcagagactrcactattccctcaagcaataaattcagtgcagacagccaagaayattgaataattcacttcttcaacactttctatatgttaaaatrcaacagagaagtttcaaggcacagttttggacaagttccttaaaaataaatccaacagtcttgagaacaatagtatattgatcaaagtagacraaaagaaaaacacagaacaaacagatcctattactgccaaaggaggatgggggaaaggagccattttagaagctctcaattcttcagtgcaagaacgcagcaagcatttttcataatccatccaaccttcagccatgttcccctaccatgggtcttacttacagcatcctcaccttctcgtagaagaaagcatgagaaagacagcaa

SEQ ID NO: 12417 - DNA, 600 bp, Chicken  19866894216010_4
aaaaaatgatatggtacttattatcaacataagtaactgtaacaaagctgtgattattttcttggaggaatatactaatccagcactattttgtcacatggaatcttaaatcagagactrcactattccctcaagcaataaattcagtgcagacagccaagaayattgaataattcacttcttcaacactttctatatgttaaaatrcaacagagaagtttcaaggcacagttttggacaagttccttaaaaataaatccaacagtcttgagaacaatagtatattgatcaaagtagacraaaagaaaaacacagaacaaacagatcctattactgccaaaggaggatgggggaaaggagccattttagaagctctcaattcttcagtgcaagaacgcagcaagcatttttcataatccatccaaccttcagccatgttcccctaccatgggtcttacttacagcatcctcaccttctcgtagaagaaagcatgagaaagacagcaatccatacctctcaccagacagacctcatcaacctatcaagttacktaatgttacctgcatctcttgtcttctttctaaacgatgacaaaaatc

SEQ ID NO: 12418 - DNA, 522 bp, Chicken  19866894216010_5
ataaatccaacagtcttgagaacaatagtatattgatcaaagtagacraaaagaaaaacacagaacaaacagatcctattactgccaaaggaggatgggggaaaggagccattttagaagctctcaattcttcagtgcaagaacgcagcaagcatttttcataatccatccaaccttcagccatgttcccctaccatgggtcttacttacagcatcctcaccttctcgtagaagaaagcatgagaaagacagcaatccatacctctcaccagacagacctcatcaacctatcaagttacktaatgttacctgcatctcttgtcttctttctaaacgatgacaaaaatctacccaacttgtaacttctaatacacaactcacatacagctacctttcctggtcaagcagcaaatgcttgcacagttccactgcacacctgcagtcagattccctgcaagagccaaatagaaaatttgttgcaagactgttactggagctctctcaagaaaaggctaaagaaca

SEQ ID NO: 12419 - DNA, 599 bp, Chicken  19866894216018_1
  misc_feature (1)..(119): n is any nucleotide
nnnnnnnnnnnnnnnnnnnnnnnnnnnnnnnnnnnnnnnnnnnnnnnnnnnnnnnnnnnnnnnnnnnnnnnnnnnnnnnnnnnnnnnnnnnnnnnnnnnnnnnnnnnnnnnnnnnnnnngaagagtaatttaaacttccactgttctgtgtttgtggatcaggttaaatacactgggatttccagtgaattaaatgggagctggactgagcccaagagtgtgttcagtttacatctattatatggccacaggattcttttttttctttatcttcttgtcaaaccacaatgcatctccatycaaaagcatactctcaggaatactaccagtcctaagcagcctcaatttcagcagcaaaatatttctttgaatgacttcaggctgacattagctttyatccgagacatgtcctactgttgacaaacagtaaayagtttgagtaacagaaacaaaaaagtcacccaattcattcatgggctcaactcacgaaggctctgcctagagcccgttactatttatggacagattttggtctttaaaagagaggactgttaaaagaaagaagaaaaagatttttgtataggaatgaagctagaraa

SEQ ID NO: 12420 - DNA, 599 bp, Chicken  19866894216018_2
  misc_feature (1)..(23): n is any nucleotide
nnnnnnnnnnnnnnnnnnnnnnngaagagtaatttaaacttccactgttctgtgtttgtggatcaggttaaatacactgggatttccagtgaattaaatgggagctggactgagcccaagagtgtgttcagtttacatctattatatggccacaggattcttttttttctttatcttcttgtcaaaccacaatgcatctccatycaaaagcatactctcaggaatactaccagtcctaagcagcctcaatttcagcagcaaaatatttctttgaatgacttcaggctgacattagctttyatccgagacatgtcctactgttgacaaacagtaaayagtttgagtaacagaaacaaaaaagtcacccaattcattcatgggctcaactcacgaaggctctgcctagagcccgttactatttatggacagattttggtctttaaaagagaggactgttaaaagaaagaagaaaaagatttttgtataggaatgaagctagaraaatccttcacagagaacgctgcaaggcaggagatcagatgatctctttgtgtgtttctttagaaggaaaaagcagttatgcaatcccaagcagtcat

SEQ ID NO: 12421 - DNA, 600 bp, Chicken  19866894216018_3
aacttccactgttctgtgtttgtggatcaggttaaatacactgggatttccagtgaattaaatgggagctggactgagcccaagagtgtgttcagtttacatctattatatggccacaggattcttttttttctttatcttcttgtcaaaccacaatgcatctccatycaaaagcatactctcaggaatactaccagtcctaagcagcctcaatttcagcagcaaaatatttctttgaatgacttcaggctgacattagctttyatccgagacatgtcctactgttgacaaacagtaaayagtttgagtaacagaaacaaaaaagtcacccaattcattcatgggctcaactcacgaaggctctgcctagagcccgttactatttatggacagattttggtctttaaaagagaggactgttaaaagaaagaagaaaaagatttttgtataggaatgaagctagaraaatccttcacagagaacgctgcaaggcaggagatcagatgatctctttgtgtgtttctttagaaggaaaaagcagttatgcaatcccaagcagtcatgtggcacggcagctgctaaggttactgctaattttta

SEQ ID NO: 12422 - DNA, 600 bp, Chicken  19866894216018_4
atycaaaagcatactctcaggaatactaccagtcctaagcagcctcaatttcagcagcaaaatatttctttgaatgacttcaggctgacattagctttyatccgagacatgtcctactgttgacaaacagtaaayagtttgagtaacagaaacaaaaaagtcacccaattcattcatgggctcaactcacgaaggctctgcctagagcccgttactatttatggacagattttggtctttaaaagagaggactgttaaaagaaagaagaaaaagatttttgtataggaatgaagctagaraaatccttcacagagaacgctgcaaggcaggagatcagatgatctctttgtgtgtttctttagaaggaaaaagcagttatgcaatcccaagcagtcatgtggcacggcagctgctaaggttactgctaatttttattagagctggccggagccagagaaagatctgctttataagcaagaccttttgagaaataaactaaatcttcctgagctgggaagcctgcagaactgacagagaagaaaaaatagcactgaaaagcttttttttttttttccccaaatgattcaggaaacattttc

SEQ ID NO: 12423 - DNA, 600 bp, Chicken  19866894216021_1
agaatcacgggatggttggagttggaagggatccctaaaggccatctggtgccagccctgcactgagcagggacacccacagctccagcagtgctcacagcccatcccctgacctcggctgtctgcagggatggggcaccaccgcctctctgtgcaacctgtgccactgcctcagcgtacatcagggctgtgcagagcagagatgagtcaccacatctcacccacaggtcccgacacgttatttatttcccttcctcaggcccaaatttctgaaatcaggactcttattaaaccccagcrcgctgtggatcacagccataattcttcttccccccaccttcccaccacaaatccattcaaagtgagtgacatttgcaaagtgtattttcacggccctccgtaatcccttcagaatattaagactgcattactttgtctttggttacattaacttcaattttccttatgagtaagtatttggctaaaaattaatatagtgaagttgaaaagaatcttatgataggaaaaagactaatttcatctctggctgctcagataccagagtacactggggttaatgtaattaacttacaattttag

SEQ ID NO: 12424 - DNA, 599 bp, Chicken  19866894216025_1
  misc_feature (1)..(62): n is any nucleotide
nnnnnnnnnnnnnnnnnnnnnnnnnnnnnnnnnnnnnnnnnnnnnnnnnnnnnnnnnnnnnnattcctgcacatcatgcataaagtatatgtctatgttattaacttattttgagtatctggctgtgtagttgttttggctggttcatcctgaatttggagttagttgcatatacatgggaatgcttacactctaattacatgtcaagatatccaaaatagtatttttcaacttgaaagcagaggtaccctagccttggagtttgatgtttaatttatttattccagttctgtcattagytgtatattatagcattactgctttattcccaaaggatcctttaagaaaatatctttccaatgatggttggtaatcattaatttacatgaaatccaagaataattttttatttaacaaaacaaagatagtaaaataagtcttacacttagctcagtgtctttgtcttaggtcccaagtgggcttgttacttgtctggctttcagaataaatgctatagaaattctgctttgttcaggagtgtaaatctgaaactcatattcctctgggtatatttcttcatctgatgttaacaaacccct

SEQ ID NO: 12425 - DNA, 600 bp, Chicken  19866894216029_1
tgatgttttgtggtatgtgaaatatattccacttcagcaagaaagaactcaagctgtggttgatgtcagtattttttatactcaaaacccatactcagaggacttagaaacacaagtgctatcaaaaacaccatgatacactgaacattcaaaatcactcatattttccaaagcatgggagagttatgttataatccaaacatctcatttctacatgtagaatatttctgttccaattacttctgtgcttttcaatctatgtgttctgagtagaaaactctcaaaattggaaaaagtgcyctgtggccagtcagttcagcagttttcaaaactgtttctctcccaggtgtttttcttaaaaataaaaccaatgatttttcaaaacagacgtgtaaatgaggcagtttagatgaatgcagaactctggctcatccgtgactcagttttattctgttgttccacaggatatttggtaattcaccacttgcatttgtaaactgtctcaaacacagctccctyccaacccctaccaaataaataaatgataaaactaaataataataatttattttaacttagaactccaagccctgtaaccag

SEQ ID NO: 12426 - DNA, 600 bp, Chicken  19866894216029_2
gaatatttctgttccaattacttctgtgcttttcaatctatgtgttctgagtagaaaactctcaaaattggaaaaagtgcyctgtggccagtcagttcagcagttttcaaaactgtttctctcccaggtgtttttcttaaaaataaaaccaatgatttttcaaaacagacgtgtaaatgaggcagtttagatgaatgcagaactctggctcatccgtgactcagttttattctgttgttccacaggatatttggtaattcaccacttgcatttgtaaactgtctcaaacacagctccctyccaacccctaccaaataaataaatgataaaactaaataataataatttattttaacttagaactccaagccctgtaaccagtgtaacagaatgaaaagactaagggttttgtacaaaacacatcacataaaactggatgtagaatgtttcatattaaatcttaaaataagtgtgtgatgtaaatgttaaatgagtttacattaaataagtttagctctgtgtcccatcttaaaccagaatcctttcactcctccagaattggaccatatattttttgatagaactaaacaacaaacttgc

SEQ ID NO: 12427 - DNA, 600 bp, Chicken  19866894216031_1
gaacaactcattagcactaatccattcaataccactttaaattaatttttaattgtagctttacttgttgcccttagcttgggtatttagatcaaacatacattgaatgaagtaaaagagaaagccataatattgacatgtttaggctatcagctaagtctgcaactaaaaaaaaacccaccatacctaaacatagtttccagtgtcagtgactgaagtcagtagtctacaatacattcccaccaatgctgtagtttttcttccaaaagtaacaaacattatttatctcagtcatctgarsatcaactccagcatttctttcttttcctccaaactcttctgaaagatatcctgtttcagacagaactgtgttgtcagacctgttccagaacccattccatcttttcccgtcactcctatactttcwctgtygttgaggtctcctcaacttgacaaactttttgtcatatcattcttcatcaaaaagtcaagatgaatcaacaatcaaccaacaagtcaacaaggatgtccataatgtaaaagctctcactgtgaaagaaagtggacaggaactatcagatttgtccttgacatcttaag

SEQ ID NO: 12428 - DNA, 600 bp, Chicken  19866894216031_2
aacaactcattagcactaatccattcaataccactttaaattaatttttaattgtagctttacttgttgcccttagcttgggtatttagatcaaacatacattgaatgaagtaaaagagaaagccataatattgacatgtttaggctatcagctaagtctgcaactaaaaaaaaacccaccatacctaaacatagtttccagtgtcagtgactgaagtcagtagtctacaatacattcccaccaatgctgtagtttttcttccaaaagtaacaaacattatttatctcagtcatctgarsatcaactccagcatttctttcttttcctccaaactcttctgaaagatatcctgtttcagacagaactgtgttgtcagacctgttccagaacccattccatcttttcccgtcactcctatactttcwctgtygttgaggtctcctcaacttgacaaactttttgtcatatcattcttcatcaaaaagtcaagatgaatcaacaatcaaccaacaagtcaacaaggatgtccataatgtaaaagctctcactgtgaaagaaagtggacaggaactatcagatttgtccttgacatcttaagc

SEQ ID NO: 12429 - DNA, 600 bp, Chicken  19866894216031_3
taatattgacatgtttaggctatcagctaagtctgcaactaaaaaaaaacccaccatacctaaacatagtttccagtgtcagtgactgaagtcagtagtctacaatacattcccaccaatgctgtagtttttcttccaaaagtaacaaacattatttatctcagtcatctgarsatcaactccagcatttctttcttttcctccaaactcttctgaaagatatcctgtttcagacagaactgtgttgtcagacctgttccagaacccattccatcttttcccgtcactcctatactttcwctgtygttgaggtctcctcaacttgacaaactttttgtcatatcattcttcatcaaaaagtcaagatgaatcaacaatcaaccaacaagtcaacaaggatgtccataatgtaaaagctctcactgtgaaagaaagtggacaggaactatcagatttgtccttgacatcttaagctttgaggattttatttcagtaacaggcttccagtattgctgttggaggatctcacttttattaaatactgttgaagtctctgcttaaacctgcagtgaaggcacactccaaagaatttcatcagac

SEQ ID NO: 12430 - DNA, 600 bp, Chicken  19866894216031_4
ttgacatgtttaggctatcagctaagtctgcaactaaaaaaaaacccaccatacctaaacatagtttccagtgtcagtgactgaagtcagtagtctacaatacattcccaccaatgctgtagtttttcttccaaaagtaacaaacattatttatctcagtcatctgarsatcaactccagcatttctttcttttcctccaaactcttctgaaagatatcctgtttcagacagaactgtgttgtcagacctgttccagaacccattccatcttttcccgtcactcctatactttcwctgtygttgaggtctcctcaacttgacaaactttttgtcatatcattcttcatcaaaaagtcaagatgaatcaacaatcaaccaacaagtcaacaaggatgtccataatgtaaaagctctcactgtgaaagaaagtggacaggaactatcagatttgtccttgacatcttaagctttgaggattttatttcagtaacaggcttccagtattgctgttggaggatctcacttttattaaatactgttgaagtctctgcttaaacctgcagtgaaggcacactccaaagaatttcatcagacaacag

SEQ ID NO: 12431 - DNA, 600 bp, Chicken  19866894216045_1
ctctaattctgtaataatgtttgccaatttcaatgtcctgaaacttgactgacttcttaactgaaaaaaataatcagttctgcagttgtaattcttctgcagttttcatctttcttcattaatgtgtgtagcatttccctcgtctttaagtctaccaccattttctagcttctgaataaaaaagaaataaagaaatttttgtataaaagataaaggataattctgcaacaaaccatttagtgacatttgagaaacaggaattaagactaaatagctctaaacatgaagttaaaagtctcmtgagcctcaaacgttatgtctaccattaacattagtgagatgaaatggttgtttctctgagaggtattaaagcrcattggtatgaagtccaaatytgtaaacatgccctaaaggttaatgcagaggaaggggagctgctggcattcagttatctgctcatctgaggaaagcaacgaaggaaaaaccatcctcaagctatggaaggatccatgcaatgggagtgcctgggaaaggactctcctctcagattccagcacttgtgtttctagcaggaaaatgctctctgaataactcacagta

SEQ ID NO: 12432 - DNA, 600 bp, Chicken  19866894216045_2
cagttctgcagttgtaattcttctgcagttttcatctttcttcattaatgtgtgtagcatttccctcgtctttaagtctaccaccattttctagcttctgaataaaaaagaaataaagaaatttttgtataaaagataaaggataattctgcaacaaaccatttagtgacatttgagaaacaggaattaagactaaatagctctaaacatgaagttaaaagtctcmtgagcctcaaacgttatgtctaccattaacattagtgagatgaaatggttgtttctctgagaggtattaaagcrcattggtatgaagtccaaatytgtaaacatgccctaaaggttaatgcagaggaaggggagctgctggcattcagttatctgctcatctgaggaaagcaacgaaggaaaaaccatcctcaagctatggaaggatccatgcaatgggagtgcctgggaaaggactctcctctcagattccagcacttgtgtttctagcaggaaaatgctctctgaataactcacagtaccattgagcagaatttccccaaagctgacgaagtgaaaccaattaactgcagcaattggtggctgcctgggcaa

SEQ ID NO: 12433 - DNA, 600 bp, Chicken  19866894216045_3
tctgcagttttcatctttcttcattaatgtgtgtagcatttccctcgtctttaagtctaccaccattttctagcttctgaataaaaaagaaataaagaaatttttgtataaaagataaaggataattctgcaacaaaccatttagtgacatttgagaaacaggaattaagactaaatagctctaaacatgaagttaaaagtctcmtgagcctcaaacgttatgtctaccattaacattagtgagatgaaatggttgtttctctgagaggtattaaagcrcattggtatgaagtccaaatytgtaaacatgccctaaaggttaatgcagaggaaggggagctgctggcattcagttatctgctcatctgaggaaagcaacgaaggaaaaaccatcctcaagctatggaaggatccatgcaatgggagtgcctgggaaaggactctcctctcagattccagcacttgtgtttctagcaggaaaatgctctctgaataactcacagtaccattgagcagaatttccccaaagctgacgaagtgaaaccaattaactgcagcaattggtggctgcctgggcaataaagcgctcctcttagtcat

SEQ ID NO: 12434 - DNA, 600 bp, Chicken  19866894216048_1
ttcactctagatggattctggaataaatgtttagcatgtgcttggcaaaattatgttctgtgactgaaagcagtgattaagtaatggacaaatgacaacaactgctaagacgctgcttcgtagtggaaaaggagtcagaaataatatttgagaactagaaggatgttaattttacctgtgcttctaagttctgtgaattttgttgtagctcttgaaagccagcttatacagtctgagcctgaaattaagttagatattaaaataagcaggtcaaatagtgtcctttctgctcttagaatygaaatatgccattaccgaacctctctttaaactgtcagtctgaagcaggtttgtcagtgcatgttttttaatgtttttatgacagacttatgtatgtggcttcttgataagtgcaggagtcataatgaagttagggaagatcagaaatacattgcagtgctgttctcygtcttgcttttctaaggagatgcctataataataccgttttcttccttgtagaccgctgcttaattcaaggcttggtgcttgagcactgcgggcgcgttcccaggccaaaccatttcttggtgtgcacagaa

SEQ ID NO: 12435 - DNA, 600 bp, Chicken  19866894216048_2
attttacctgtgcttctaagttctgtgaattttgttgtagctcttgaaagccagcttatacagtctgagcctgaaattaagttagatattaaaataagcaggtcaaatagtgtcctttctgctcttagaatygaaatatgccattaccgaacctctctttaaactgtcagtctgaagcaggtttgtcagtgcatgttttttaatgtttttatgacagacttatgtatgtggcttcttgataagtgcaggagtcataatgaagttagggaagatcagaaatacattgcagtgctgttctcygtcttgcttttctaaggagatgcctataataataccgttttcttccttgtagaccgctgcttaattcaaggcttggtgcttgagcactgcgggcgcgttcccaggccaaaccatttcttggtgtgcacagaagagaacgtgatgcaagctaacacactctcatggcaatctatatttggtgaggctaaaatggagctctttcgtagagaaatgatataacaacgtgaggggaaatgcttcattttctttctttttttacttttgttggccttgtttaggaagataaacccttgtttctgt

SEQ ID NO: 12436 - DNA, 587 bp, Chicken  19866894216048_3
acgtgatgcaagctaacacactctcatggcaatctatatttggtgaggctaaaatggagctctttcgtagagaaatgatataacaacgtgaggggaaatgcttcattttctttctttttttacttttgttggccttgtttaggaagataaacccttgtttctgttccagaactatctgacacaagttgaagtgctacctgtggtttttaacatcataatggctttttttagtggtgtcgtttggcatgagaagctgtaggaacttgtgaaaactgcctcttcttcttgaggatgtaatgygtgttattgtgtgggggaagtagtttagttgtgatctacttgatctgtaactttaatgaaattacctcatcttaacgtgtaggatggagaaggtctcaagtacgcgcaggagatygggaaatgtgagttgcaaggtaggttatttaggtaackcttagaggaactccatgtgggaaatgggtcttctaaaactactctgggtgagcgattgacagcacttgaagttcaatggattcgtgttttaaaacatttgtttttatctcgaggtgtctgaaggccccctctaa

SEQ ID NO: 12437 - DNA, 472 bp, Chicken  19866894216048_4
ttttttacttttgttggccttgtttaggaagataaacccttgtttctgttccagaactatctgacacaagttgaagtgctacctgtggtttttaacatcataatggctttttttagtggtgtcgtttggcatgagaagctgtaggaacttgtgaaaactgcctcttcttcttgaggatgtaatgygtgttattgtgtgggggaagtagtttagttgtgatctacttgatctgtaactttaatgaaattacctcatcttaacgtgtaggatggagaaggtctcaagtacgcgcaggagatygggaaatgtgagttgcaaggtaggttatttaggtaackcttagaggaactccatgtgggaaatgggtcttctaaaactactctgggtgagcgattgacagcacttgaagttcaatggattcgtgttttaaaacatttgtttttatctcgaggtgtctgaaggccccctctaa

SEQ ID NO: 12438 - DNA, 434 bp, Chicken  19866894216048_5
cttgtttctgttccagaactatctgacacaagttgaagtgctacctgtggtttttaacatcataatggctttttttagtggtgtcgtttggcatgagaagctgtaggaacttgtgaaaactgcctcttcttcttgaggatgtaatgygtgttattgtgtgggggaagtagtttagttgtgatctacttgatctgtaactttaatgaaattacctcatcttaacgtgtaggatggagaaggtctcaagtacgcgcaggagatygggaaatgtgagttgcaaggtaggttatttaggtaackcttagaggaactccatgtgggaaatgggtcttctaaaactactctgggtgagcgattgacagcacttgaagttcaatggattcgtgttttaaaacatttgtttttatctcgaggtgtctgaaggccccctctaa

SEQ ID NO: 12439 - DNA, 600 bp, Chicken  19866894216052_1
gttctttttgtttatagtttcactttatcttgcaaactgataaaacatgctttgtattcattggcaaaaatcactacagcatgacctgagggtacatgtgacttccctatacttgaatgctgcgtatcttaatcaggttccacaaataagttgaactctttctggatgcattcatccctttatccctcagataatgaaaggtcttcaacaaatgaaagatgttacagtgttttttgtgactcccatacctgcccagcagacataggtttaacattagttttttgtagcttactggaaagycatcagttttcagatcgtttataagtcaaaagagtagtaaaaatatgcyttacagctggtacaaaaaggtattttcattatgcctacctttcttggtttcataagatgaaggtctaaggaacaggatttcttggtttgtctccatttagagtattgaagaagatgccaaaaactttattgataaatcttttaagactcttcgatcagcagaaactgcatttgacatgctgttgaacttcaaaaacacccgctgtcgtgaaacaattaataagcagctgatgatgaagttcaatgacatat

SEQ ID NO: 12440 - DNA, 600 bp, Chicken  19866894216052_2
ctttgtattcattggcaaaaatcactacagcatgacctgagggtacatgtgacttccctatacttgaatgctgcgtatcttaatcaggttccacaaataagttgaactctttctggatgcattcatccctttatccctcagataatgaaaggtcttcaacaaatgaaagatgttacagtgttttttgtgactcccatacctgcccagcagacataggtttaacattagttttttgtagcttactggaaagycatcagttttcagatcgtttataagtcaaaagagtagtaaaaatatgcyttacagctggtacaaaaaggtattttcattatgcctacctttcttggtttcataagatgaaggtctaaggaacaggatttcttggtttgtctccatttagagtattgaagaagatgccaaaaactttattgataaatcttttaagactcttcgatcagcagaaactgcatttgacatgctgttgaacttcaaaaacacccgctgtcgtgaaacaattaataagcagctgatgatgaagttcaatgacatattggaccaatactgtaaagaggtatttaatgagggtttctttatatrtga

SEQ ID NO: 12441 - DNA, 600 bp, Chicken  19866894216052_3
gcyttacagctggtacaaaaaggtattttcattatgcctacctttcttggtttcataagatgaaggtctaaggaacaggatttcttggtttgtctccatttagagtattgaagaagatgccaaaaactttattgataaatcttttaagactcttcgatcagcagaaactgcatttgacatgctgttgaacttcaaaaacacccgctgtcgtgaaacaattaataagcagctgatgatgaagttcaatgacatattggaccaatactgtaaagaggtatttaatgagggtttctttatatrtgaagtactttattgaaaaaaataaatctatgtatctctctacatatttcaacaaaagtatttaccgtctgaaagactgacaggttttaaaaaattaagaattgttcctgtttttgaacctgcatgcaagatagtatagtttatttgctgaaatgatgtacgtatctgaatctgtgtagcacagtatggcaagtgaaggatgtttgcctgtactctgaggcttgtggctgttcctttaccttgtgagcagcggtacaacagtagtcatccctgagaaaagctatcttttagctttctgat

SEQ ID NO: 12442 - DNA, 600 bp, Chicken  19866894216052_4
aagaacaccaagtttcacaacaaaatgtagtctcacaaagaacacaaagacaaaatagctgttccacaaggtacaggaaggaaaacattctctgtaatgcaattgatacaacaaagagatgaatgaggaataaaaaatcattgtttttgtcctgttgctggaattagcttcagagcttgtgttttgtaccaagctagatgctgatcgtggaacagtaaatagagaaattattcttaacagtgattcttttattctcttctaggttgaatatgttaaacaaatctttgttcaaaacctcayggatccacccttattcaagaatcatcctccactggctggagcaatatactggtcccgatcacttttctatcgcatcaaacacactattgttcgatttcaggaagtagaggggttgcttgctagtgaacgtggaaaagaagtatgttggtttctttgctgtttaatgaaggaagaaatactttcctcgcacctttcttctagggatgtgaaaatgctcttatgtgaatgaagtccgaagaacgtctttgcrcgtagtggtccatgttagtcatgaaaatttgattggaaaccttttcactg

SEQ ID NO: 12443 - DNA, 600 bp, Chicken  19866894216052_5
attctcttctaggttgaatatgttaaacaaatctttgttcaaaacctcayggatccacccttattcaagaatcatcctccactggctggagcaatatactggtcccgatcacttttctatcgcatcaaacacactattgttcgatttcaggaagtagaggggttgcttgctagtgaacgtggaaaagaagtatgttggtttctttgctgtttaatgaaggaagaaatactttcctcgcacctttcttctagggatgtgaaaatgctcttatgtgaatgaagtccgaagaacgtctttgcrcgtagtggtccatgttagtcatgaaaatttgattggaaaccttttcactgtttctcagagagagagtgacagaatcaatgacagaactcaaaaacctaaattcttcattgtctgcataaattacaaggcattacctaccctctcatttaatacagtttggaaacaaatcttattaagacaggatagtgaataatttttcctgatttttaagatgatacaaagttttcctttctaggtcaagcaaatatatcttaaagtggccaagaggatgaaagaatatgaagatcagaaatatgatca

SEQ ID NO: 12444 - DNA, 600 bp, Chicken  19866894216052_6
tgctgagatgccgatcaaatattaaaggcatttccaccagctttgaatgtcagccataccgtctgacttttacctaccatcttatcacatgtccccaaaagttaagtttttccttgcattggaactgtctggtgttgtttctctggtttctgctctttcttgtgttgtagacatcagtaaaagaggagtctatcaccacagagaaaagtgtccaattcctactgaatttttctcccagactccaagagattataactgaaacaaagtacatggaacagctggggtttccagtcccagaartagcaagaaacgtggcattacaggaagacagatatattaggtaaagctgtaactgcttgcatacacacttgcatcaatgtttcaagtgatttccctgcaaacctcagtgtgtcctgagtcctcaaattttggaaatatgagagctcttactgacctcttttaaagacgaaattgctaatggccataacacgctaacagtctgtcctctggtgctgtctacatccttcaccctgtaaagactgcgttttacaaatgaatatcagaagaaaatctgagggaaaaacaaagcatgaaagttag

SEQ ID NO: 12445 - DNA, 600 bp, Chicken  19866894216055_1
gccactgaaaatcacaggggaaatgccaccttctttccccaaaagttatcagccatctcgttataaccacaattcactacctgcagtctgaccacatgcttttaacctactacagacttgcagctgtgagctcaggatcactccgtggctgtttaacctcacccccgtgaaagtcaatggaaacagagatgtgttacaacaggaattctgttccatttgtaccagcatgggcagttcataccaccacaactactgtgcccaaatgcacgcacaatggtgcacgttttcctaaatagtatsttaggtctacaggagatttagaagtctctggacaatgcagacagcccaaagaacagatagcagacagaagaaactgtgctcaaagaaaatattacagtcattcatttattttaggaggaagggattaaaaggctccaaagttcactacgtccccraattcccacccataggtcttcctttgctctcctcccactctgaggtctgcatctgagccaaccaacagcaacgcagcagacaattagccttggtaattccccgggtatattagagcatctgaagggaaattaggcaaataaccac

SEQ ID NO: 12446 - DNA, 600 bp, Chicken  19866894216055_2
acctcacccccgtgaaagtcaatggaaacagagatgtgttacaacaggaattctgttccatttgtaccagcatgggcagttcataccaccacaactactgtgcccaaatgcacgcacaatggtgcacgttttcctaaatagtatsttaggtctacaggagatttagaagtctctggacaatgcagacagcccaaagaacagatagcagacagaagaaactgtgctcaaagaaaatattacagtcattcatttattttaggaggaagggattaaaaggctccaaagttcactacgtccccraattcccacccataggtcttcctttgctctcctcccactctgaggtctgcatctgagccaaccaacagcaacgcagcagacaattagccttggtaattccccgggtatattagagcatctgaagggaaattaggcaaataaccacttttaatttagaagcctggctcaattttaatactgaaggagtatgacttagttccagtcccaccagttctcccagaacctccaccccattaaacctgcccagcaaggtaatgactgacagcacacctccccagtgaaatgcaaggtaaaaaaaaa

SEQ ID NO: 12447 - DNA, 600 bp, Chicken  19866894216058_1
aaaaaccatatttatcagctgtgattttgttttgttttgtttttccttcagtaaggaaaattccttccttcaggtgaaggaagaataggcaaataggttcttcttttgtttgcactgtttcacctgtggttcttgtgcattgcctgtgacatctgtggtgcagcaaaacgaaagggatcgcctaaactcacaaaaagcagctgaaagaagctataaacactactgtaagaaagtacacatggtagctctttttccctgtggaaaatgggaggttggagtctgtcagattgggtgtatcaygaaggcactttgtctagcatcctctcctggagctaaaatcagcaccaggagaatcaaaaggcccayggatgtcttgctagcctgatgtgcttaagtctgaccctgtgttrgatgccttcctggcttgttacaaagagttggtgtagaagttgatgcattaccttggagatayggtgatgtacaggcacaggcagctcggggaggtggtggaatcactgcccctggtggtgttcaagaaacgtggagatgtggcactgagggacacgattagtgggcacggtggtggtgggttggtggatg

SEQ ID NO: 12448 - DNA, 595 bp, Chicken  19866894216058_2
ccttcaggtgaaggaagaataggcaaataggttcttcttttgtttgcactgtttcacctgtggttcttgtgcattgcctgtgacatctgtggtgcagcaaaacgaaagggatcgcctaaactcacaaaaagcagctgaaagaagctataaacactactgtaagaaagtacacatggtagctctttttccctgtggaaaatgggaggttggagtctgtcagattgggtgtatcaygaaggcactttgtctagcatcctctcctggagctaaaatcagcaccaggagaatcaaaaggcccayggatgtcttgctagcctgatgtgcttaagtctgaccctgtgttrgatgccttcctggcttgttacaaagagttggtgtagaagttgatgcattaccttggagatayggtgatgtacaggcacaggcagctcggggaggtggtggaatcactgcccctggtggtgttcaagaaacgtggagatgtggcactgagggacacgattagtgggcacggtggtggtgggttggtggatggactggatgatcgcagtggtctttccaaaccttttgcaaaccctcccgccgccatttgggg

SEQ ID NO: 12449 - DNA, 551 bp, Chicken  19866894216058_3
tgcactgtttcacctgtggttcttgtgcattgcctgtgacatctgtggtgcagcaaaacgaaagggatcgcctaaactcacaaaaagcagctgaaagaagctataaacactactgtaagaaagtacacatggtagctctttttccctgtggaaaatgggaggttggagtctgtcagattgggtgtatcaygaaggcactttgtctagcatcctctcctggagctaaaatcagcaccaggagaatcaaaaggcccayggatgtcttgctagcctgatgtgcttaagtctgaccctgtgttrgatgccttcctggcttgttacaaagagttggtgtagaagttgatgcattaccttggagatayggtgatgtacaggcacaggcagctcggggaggtggtggaatcactgcccctggtggtgttcaagaaacgtggagatgtggcactgagggacacgattagtgggcacggtggtggtgggttggtggatggactggatgatcgcagtggtctttccaaaccttttgcaaaccctcccgccgccatttgggg

SEQ ID NO: 12450 - DNA, 489 bp, Chicken  19866894216058_4
agggatcgcctaaactcacaaaaagcagctgaaagaagctataaacactactgtaagaaagtacacatggtagctctttttccctgtggaaaatgggaggttggagtctgtcagattgggtgtatcaygaaggcactttgtctagcatcctctcctggagctaaaatcagcaccaggagaatcaaaaggcccayggatgtcttgctagcctgatgtgcttaagtctgaccctgtgttrgatgccttcctggcttgttacaaagagttggtgtagaagttgatgcattaccttggagatayggtgatgtacaggcacaggcagctcggggaggtggtggaatcactgcccctggtggtgttcaagaaacgtggagatgtggcactgagggacacgattagtgggcacggtggtggtgggttggtggatggactggatgatcgcagtggtctttccaaaccttttgcaaaccctcccgccgccatttgggg

SEQ ID NO: 12451 - DNA, 600 bp, Chicken  19866894216061_1
accataattcatatattagggaatgtgtgctacacttgatgcatgacttcagacaagattaactgcaaataactaccagacagctgtacggcctgttttccagtatgtatggaaagatggacagtccataacatgacgtcttgaatttcagcaccagtataatagaagatttcctgctgattttacatcagcttgtggtacaggtgcaaaggacttaggttactggcaagcataaggagaattaatctagagaccagaagagcagcttttcacattccataaacagcgtataaaattaaytgcaatagcatacatatcaagtccggatgtgtaaccagctttgctatcattcacaaatgcaatcaaaatacatagaaaaagtcaaatatttccctccaaaggtaattaatactgacagttcagataaccagtaactgggaattagtccatccaagttgtttccagaaatttatatgtctcagaaaagaaacaaaaaaggtctgttttaatttaagaattaaaaaaaaaacgaaaaagatagagggaaaaccacagaaccacagaagggtttaggttggaagggacccttaagatgatcta

SEQ ID NO: 12452 - DNA, 599 bp, Chicken  19866894216064_1
  misc_feature (1)..(173): n is any nucleotide
nnnnnnnnnnnnnnnnnnnnnnnnnnnnnnnnnnnnnnnnnnnnnnnnnnnnnnnnnnnnnnnnnnnnnnnnnnnnnnnnnnnnnnnnnnnnnnnnnnnnnnnnnnnnnnnnnnnnnnnnnnnnnnnnnnnnnnnnnnnnnnnnnnnnnnnnnnnnnnnnnnnnnnnnnnnnntccccagtctccagctcgcacggcagaaaatgttctcaatggacacagaagcaaggctgctggtgagtcagcaaagaaagaagagatccctgagttagctggaccggccctctctgtagttccatcrgtgagcttaaaacccactacgagcggccggaagtgcttgttcagagtagaggaagatgaggaggaggatgaagaagacaagaagcctatttctctttctacccaagttgttctgcgccgtaagccttcagttacaaaccgtcttacttcacgaaagagtgcaccagtcctcaatcagatctttgaggaaggggagtcagatgatgagtttgacatggacgagaacttacccccaaagctcagcaggttaaaaatgaacatcgcttcgcctagcacagtacataagcgctaccacaggag

SEQ ID NO: 12453 - DNA, 600 bp, Chicken  19866894216065_1
aatcttcatttagatgttcattctaaaacttgaaatcattgtacctgggagattacagtatagtttactggacatattttgtatttctactttgaaatctcactttccaatatctagaaagcatgtaagccattaaaaactgtggtacaatggagtgtgttacttctgatcttttttacagttagacaggaagagaatatacggaaccaaaaaggaggcgcataaagaaaggatttatgctgatgttgatcctgttgtttttgttatttttgttgttatttattgttcattgtatttttwttttttttttttttgaaggggtagtagtgttctgagatggatagattagcacaggaaggtctaaacagcaaatctggatgaatttaacattattcactggtattcagtttgtagcgtaggggatctgaattaaatatggcattcaaaagctttttttcttttgtaaactcagtgatgctcattcatacatacaacagtagcattaaacctttcaatgtgcctgtatgccatttttttgattatgacactaagcatcctttagttacaagtagttccataatcaacctttttttgctacat

SEQ ID NO: 12454 - DNA, 600 bp, Chicken  19866894216065_2
acctttttttgctacattgatttgtatgtcattatttcatggagtttttccatctgcaataatcaaattatcataggaaaatagtacagatttgcagtaatatctgaggcaaagcagttaaaaccaagaagggcaagagcgtcttggtggaaagggaattttgtgtgggttggaagttcgatatgtaggcttagtcagtacccaagacagtaaggaaagcctggtcaactttatcagggagagttcaacttttatattaaagtcaacttttggagagtattttaatgggacaactattamaattattattatttttttttaataataacacttaaagtctaacagataaatgtttagacttgtatggctagcaaagaaatctgggttactttcaaaagaattgtgtaacacaagatctcagctagaaattgaattggcaaatttgaatttcagatgaatgagacaatcagtcaagggttcttgggtgaaggtacaagctcaaatgaagaggagtgaatgaaattgatcacccatcactcagaaagaatagtgataattaaaccactgtggagaaatctgatttatcacagcaccaaatct

SEQ ID NO: 12455 - DNA, 599 bp, Chicken  19866894216066_1
  misc_feature (1)..(74): n is any nucleotide
nnnnnnnnnnnnnnnnnnnnnnnnnnnnnnnnnnnnnnnnnnnnnnnnnnnnnnnnnnnnnnnnnnnnnnnnnnccgttattgctgctgctgctgtctaagatgatgagtaagaaagaaaaactaccctgcattttccacgtgatgtggcacgttttagtcactcatggttttaactggcagctcagtttggtaagctgtattctttgtactgcttaaagcattctgaaattcttccacatctcagtttcatttaaagccaagtttcatttgtctcctttaattacttttccctcaggartttattcctgtgcactcaataacaagtttagaaacagtatttttaggatttgtagtgataggccatcctcaaggaattctgcatagttgttctacttgtttattaaattaaacacttgaagaagtcagaaatattctactattaaatcacatttgctgagtttgcattcggaggtgcagaacttttatactgttattcactaatgtgcttcccagtgactgtattcttcaagttctgatctaattgtaaatacaacagcagtaataaattatcctaaaaggctgaagtataaaccagaa

SEQ ID NO: 12456 - DNA, 600 bp, Chicken  19866894216073_1
ttttcggaggcaggtaggtcatagatgaacatcaaagtcacctctgaaattaaacactagtccctccatatgagtgtgatgcagattttgggggaaaaagagtggatctcttagatgtttgaagtggattttctttctttcatgttttaaattctttatgcaaattaaagggtattcctcttaataattagggaataaatatgagtaagtaatatggagattgattgttgcattctaatatgctatattatagggtatatcatatagtggaatttcagagtctggagatcttctgtagarcagtctttagaaatttaatttgtattggagtctcttgggctgtgtatggtatcacagaattttttgcctgtattttgtgagtagagagtactgaatgtctttctttgtgaaaaatttatggaaagattaagaagggaacctaatctttttgaaagatttatgtagctttctttcctattcctaaagatagcggaatatatttgaacatttcacaatattttcataaatgctgtaattccagcaaataatcccaggctttaaggtaatgatgacaatctcaaaatcccatttaagtcagca

SEQ ID NO: 12457 - DNA, 600 bp, Chicken  19866894216073_2
tcacctctgaaattaaacactagtccctccatatgagtgtgatgcagattttgggggaaaaagagtggatctcttagatgtttgaagtggattttctttctttcatgttttaaattctttatgcaaattaaagggtattcctcttaataattagggaataaatatgagtaagtaatatggagattgattgttgcattctaatatgctatattatagggtatatcatatagtggaatttcagagtctggagatcttctgtagarcagtctttagaaatttaatttgtattggagtctcttrggctgtgtatggtatcacagaattttttgcctgtattttgtgagtagagagtactgaatgtctttctttgtgaaaaatttatggaaagattaagaagggaacctaatctttttgaaagatttatgtagctttctttcctattcctaaagatagcggaatatatttgaacatttcacaatattttcataaatgctgtaattccagcaaataatcccaggctttaaggtaatgatgacaatctcaaaatcccatttaagtcagcaagacggctttgtgaatcwgctgaattcaaacctgata

SEQ ID NO: 12458 - DNA, 600 bp, Chicken  19866894216073_3
tttgtattggagtctcttgggctgtgtatggtatcacagaattttttgcctgtattttgtgagtagagagtactgaatgtctttctttgtgaaaaatttatggaaagattaagaagggaacctaatctttttgaaagatttatgtagctttctttcctattcctaaagatagcggaatatatttgaacatttcacaatattttcataaatgctgtaattccagcaaataatcccaggctttaaggtaatgatgacaatctcaaaatcccatttaagtcagcaagacggctttgtgaatcwgctgaattcaaacctgatatctacaaaaagtctgaagaaaggatatgcaaggtgtctaagagctgtcaagggtggtagcttacttaattttgtgccttgttaatttaaatatttaagtcttcaagaaatgtagtcttcatagttgtcaagtgacttcgagagccaaccactgcagtttgcattcttcccaggtaccatgtcagtgccctaaaatttgtgatacctgtacagagctttgcttgttcatgctcaaggaagccttgatgcattttacccaaggttagcgttacrggcttgggg

SEQ ID NO: 12459 - DNA, 600 bp, Chicken  19866894216073_4
tgtgaatcwgctgaattcaaacctgatatctacaaaaagtctgaagaaaggatatgcaaggtgtctaagagctgtcaagggtggtagcttacttaattttgtgccttgttaatttaaatatttaagtcttcaagaaatgtagtcttcatagttgtcaagtgacttcgagagccaaccactgcagtttgcattcttcccaggtaccatgtcagtgccctaaaatttgtgatacctgtacagagctttgcttgttcatgctcaaggaagccttgatgcattttacccaaggttagcgttacrggcttggggcagagcggctggaagactgtgtagaggaaacggtcctgggagtattgatggacacttggctgaatatgagccagcagtgtgcccaagtggccaagaaggccaatggcatcgtggcttttatcaaaaatagtgttgctagcaggagcaaggatgcgatcgtccctctgtactcagcactgggtgaggttgcaccttcagtactgtgtttggttttaggcctctcactacaagaaagacactgaagccctgggccgtgtttagagaaaggcaatgagtctgatgaggggtctg

SEQ ID NO: 12460 - DNA, 600 bp, Chicken  19866894216076_1
ttctgtcagtaattcccattaaataagatacaatctagacatctttcttctatagaaaacagaatctccagtctaagcagaaacagatgggttgtttatcaaatgtgttggcctgtattattcagcttggactgaaaatgaatacatctttgtatctaaaactgaagatttctaccttatacacctttctgtcctttattttctagcatcctcactttctttctgattcattcactgtccaaaaaaaatcaaatctctggaacggatgacagtacggtgtgcttcattccttactttctwtgtacccaaacaactatctcatcagcagtctcagtattcctgataatgtataccgtatatttcacggtgtatatttcacagtatacccctgtgatccagatggcatgttttatccatacctatatttcaattttaagggtggtttgctttttttgrttgtggcctcatgttaatctgatgcacttggtatgcagagaggttcactacacctagcttycctcaactggcattttaatagtcagaaatcataaagattagaaaattttgtttaagcatgacttcttagacataacattattc

SEQ ID NO: 12461 - DNA, 600 bp, Chicken  19866894216076_2
taaaactgaagatttctaccttatacacctttctgtcctttattttctagcatcctcactttctttctgattcattcactgtccaaaaaaaatcaaatctctggaacggatgacagtacggtgtgcttcattccttactttctwtgtacccaaacaactatctcatcagcagtctcagtattcctgataatgtataccgtatatttcacggtgtatatttcacagtatacccctgtgatccagatggcatgttttatccatacctatatttcaattttaagggtggtttgctttttttgrttgtggcctcatgttaatctgatgcacttggtatgcagagaggttcactacacctagcttycctcaactggcattttaatagtcagaaatcataaagattagaaaattttgtttaagcatgacttcttagacataacattattcacactgaatagctcatctagtgaaagtaataatttctcctcttcttcacagattacccatttgtagttactcattagtaagttccatatgacagtttagtatcctagatgctctgggaagtgagtggtagacacttttatatctcctcaagcctgg

SEQ ID NO: 12462 - DNA, 555 bp, Chicken  19866894216076_3
tctttctgattcattcactgtccaaaaaaaatcaaatctctggaacggatgacagtacggtgtgcttcattccttactttctwtgtacccaaacaactatctcatcagcagtctcagtattcctgataatgtataccgtatatttcacggtgtatatttcacagtatacccctgtgatccagatggcatgttttatccatacctatatttcaattttaagggtggtttgctttttttgrttgtggcctcatgttaatctgatgcacttggtatgcagagaggttcactacacctagcttycctcaactggcattttaatagtcagaaatcataaagattagaaaattttgtttaagcatgacttcttagacataacattattcacactgaatagctcatctagtgaaagtaataatttctcctcttcttcacagattacccatttgtagttactcattagtaagttccatatgacagtttagtatcctagatgctctgggaagtgagtggtagacacttttatatctcctcaagcctgggtcactctcagaaaca

SEQ ID NO: 12463 - DNA, 599 bp, Chicken  19866894216079_1
  misc_feature (1)..(61): n is any nucleotide
nnnnnnnnnnnnnnnnnnnnnnnnnnnnnnnnnnnnnnnnnnnnnnnnnnnnnnnnnnnnnttttaagtaactaaaagttggctatactggaaatattcaacctatgacatgcatagaaaggacgggggtttctcctttcacaactccccagaaacataggaattctacctactcagaaatcatcagcaggatacacagtagaaatgcagcttgtgaagtaaatcaagtaacttgttagttaagaacgcatataaattgtttgttatgcactgtacctttttcagaggagaaataagcayrtaacacagaaatgcatcacactctcccaaggcttatatgatggttgtttatcttgtgtctttaaattatattctgaaagactgatggggccttagtgtcatttctgtccagaatctcactggctcaggtcagtctttgtggctgcagtacgtcaggttgatgagagaccayttgttaggaaaacagatctacttctgggcgtatggattaaaaatatgctaaatatgcattcccagatgacctcactaaaagttttgccctttagacaagaggagaagactgtgggctacactacaaa

SEQ ID NO: 12464 - DNA, 599 bp, Chicken  19866894216079_2
  misc_feature (1)..(60): n is any nucleotide
nnnnnnnnnnnnnnnnnnnnnnnnnnnnnnnnnnnnnnnnnnnnnnnnnnnnnnnnnnnnttttaagtaactaaaagttggctatactggaaatattcaacctatgacatgcatagaaaggacgggggtttctcctttcacaactccccagaaacataggaattctacctactcagaaatcatcagcaggatacacagtagaaatgcagcttgtgaagtaaatcaagtaacttgttagttaagaacgcatataaattgtttgttatgcactgtacctttttcagaggagaaataagcayrtaacacagaaatgcatcacactctcccaaggcttatatgatggttgtttatcttgtgtctttaaattatattctgaaagactgatggggccttagtgtcatttctgtccagaatctcactggctcaggtcagtctttgtggctgcagtacgtcaggttgatgagagaccayttgttaggaaaacagatctacttctgggcgtatggattaaaaatatgctaaatatgcattcccagatgacctcactaaaagttttgccctttagacaagaggagaagactgtgggctacactacaaat

SEQ ID NO: 12465 - DNA, 600 bp, Chicken  19866894216079_3
ctcagaaatcatcagcaggatacacagtagaaatgcagcttgtgaagtaaatcaagtaacttgttagttaagaacgcatataaattgtttgttatgcactgtacctttttcagaggagaaataagcayrtaacacagaaatgcatcacactctcccaaggcttatatgatggttgtttatcttgtgtctttaaattatattctgaaagactgatggggccttagtgtcatttctgtccagaatctcactggctcaggtcagtctttgtggctgcagtacgtcaggttgatgagagaccayttgttaggaaaacagatctacttctgggcgtatggattaaaaatatgctaaatatgcattcccagatgacctcactaaaagttttgccctttagacaagaggagaagactgtgggctacactacaaattaaaggcctagtttggagactgatttcttttctccctgaattttcaaggagaatgactagcattgtgtttccttttacatgcctgaatggttgcctgttcctacgcatgtgattcattctttgaagatgtcagagcagtattatttgaccaaatctgtgggagtatggccag

SEQ ID NO: 12466 - DNA, 600 bp, Chicken  19866894216079_4
aacagatctacttctgggcgtatggattaaaaatatgctaaatatgcattcccagatgacctcactaaaagttttgccctttagacaagaggagaagactgtgggctacactacaaattaaaggcctagtttggagactgatttcttttctccctgaattttcaaggagaatgactagcattgtgtttccttttacatgcctgaatggttgcctgttcctacgcatgtgattcattctttgaagatgtcagagcagtattatttgaccaaatctgtgggagtatggccagatcatcttgkttgagtcatccaaatggtaacattccattgggcaggcaggtttgcaatcagtgaaagtggcagagaaaagaaaggctgaagctgagtgctcttcgccctgttggtcctgttggctctgtgctacaagcagcactgtggtggggtggggargaggtgaccttttacagtctttggaagaactactggctaatgtaattgtttcctacaaaagtgtatcatcttaacattactgatatggatagagaggaaaccagagaatatcatttctgaagtgaatgatgagtccagtagcacagacta

SEQ ID NO: 12467 - DNA, 600 bp, Chicken  19866894216079_5
tccctgaattttcaaggagaatgactagcattgtgtttccttttacatgcctgaatggttgcctgttcctacgcatgtgattcattctttgaagatgtcagagcagtattatttgaccaaatctgtgggagtatggccagatcatcttgkttgagtcatccaaatggtaacattccattgggcaggcaggtttgcaatcagtgaaagtggcagagaaaagaaaggctgaagctgagtgctcttcgccctgttggtcctgttggctctgtgctacaagcagcactgtggtggggtggggargaggtgaccttttacagtctttggaagaactactggctaatgtaattgtttcctacaaaagtgtatcatcttaacattactgatatggatagagaggaaaccagagaatatcatttctgaagtgaatgatgagtccagtagcacagactagtgcttcagagcaaaattatcagatgcacgtgattagcttttttagtttacatttttgatagctgtgagttacttgattttgttttctcagtttcactacaagatcagggcttctgccaatgtctgaaacttcaggtttgaagggacatc

SEQ ID NO: 12468 - DNA, 599 bp, Chicken  19866894216081_1
  misc_feature (1)..(38): n is any nucleotide
nnnnnnnnnnnnnnnnnnnnnnnnnnnnnnnnnnnnnncaaaggagaggttcaaaacccaactaatgcatttatgagtctgccacaaggcatgattttcctattcagaactgtacagataacagattagtattccagatattggctgattttcagctcttctctgaaagcaacacatgcacttgtaccccagagagcaatataagagcaagactgtcaagcttcatctttgctgtagactaattacaaaacctaggagtctagtccacaaaacagagcttcatttgctacctatctgctwttttatgcattgtaacaacatggggggatattttaatcagtagaaaaagctggcaacgtactcaagtttacctaggattatttacctgctgaaatcacatcaacaattagtttgttgatttgattttacctaggatacaaacatgtaaaaagacaacaagaaaaagcaaaaagcagtaatggtgaaattggggtttggctgtcatctcttggacaggatacagcactagcagtccaacacaaacatacacgactttgattgaaagcccactgctctcaggaagacttgattgcattcca

SEQ ID NO: 12469 - DNA, 600 bp, Chicken  19866894216081_2
gtaacaacatggggggatattttaatcagtagaaaaagctggcaacgtactcaagtttacctaggattatttacctgctgaaatcacatcaacaattagtttgttgatttgattttacctaggatacaaacatgtaaaaagacaacaagaaaaagcaaaaagcagtaatggtgaaattggggtttggctgtcatctcttggacaggatacagcactagcagtccaacacaaacatacacgactttgattgaaagcccactgctctcaggaagacttgattgcattccaaagaaagaagcrtcattcctcaaaaaactgtcttccagtggatacctggggctttcacatcatcattcatttagggtagcagcttacaaccctgctggtcccacagcaacatcatatcaaacttcatttagagaatggttcaactgtatgtctgctgcctgagtacgctgaaaactgcctggagagctaatgatgtggtggtttaacacctaatgggcagctaagcaccaccagcgcccaccaaatattaaaccaccacaaacgactagtttaatgatcagactttaatattcttggactgccactacataa

SEQ ID NO: 12470 - DNA, 600 bp, Chicken  19866894216082_1
cagcagcctctaagaaaaagcacgtgatcacaattaaagaatgtgttgtgctgtatcggaaggtagcatttaaagcagggaaagactgaatattggctataactcattgtaattataccatctatttcaaacatgtaaatatgtttggtagcacttacatgtttatgtcagctattgggaaaagcagttttcctttttggtaaacttctgatgatgagagttttgttacttgcatttgaataagaacaaacagcaagtttaggcacattttcaggagagcagaagttgatcctctccccygtggctgcagtgtgcgaaggttgtttgtaataacgtggtgaataggagatggtaacggacaatgaagaacagacctgttttaatcggttacaccgtcaggatgttaaagttggtgtgatgcagagggctgaaggtgagcctggagtgaggtggccgggaacccatttctggctctcccagtcccagatgagcaccagcaaaccccatcctttaactgggaagagccgtactgagctcctttggagaaggctgcgcgatctgcacatcaagatgactccacaaacccaagcgctttgctaa

SEQ ID NO: 12471 - DNA, 600 bp, Chicken  19866894216083_1
aaatgctcaagaatacacttctatgcctttaaatttgaataaatgatggctcgtttcatgaaaagctcttctgtgaggactgaagggttgaaggagggatgactttgaatgtgccttctccagagccacctgatgtcaaaagtttgagcatcgtgtcatttcttcaatgcttgttatttctgcattgccagacttgtaggacagcactggagttaggccagttccacatggagagccgcctgctcagcccacagcatctccttccctcttctgctgtaggcacacacctagagctctggscacatatgatggtagtaaagatgatatatatatatatataaattcatgcatatacacatacgctatctgcaacattagtaagttaacggggaggatttgccaacctgccctcagtcctcccacggtgtgaagatccctcatgaaggggccctgagagaactcaaacctgggtgccacccacacagtgggcacatatcccccggttgggctgccatccccactcctgggtcgccctccctaaacgcaccagtgaaaaggccatcgatatgttctgatggccttctcgtcctgcttttcagt

SEQ ID NO: 12472 - DNA, 600 bp, Chicken  19866894216083_2
cctcagtcctcccacggtgtgaagatccctcatgaaggggccctgagagaactcaaacctgggtgccacccacacagtgggcacatatcccccggttgggctgccatccccactcctgggtcgccctccctaaacgcaccagtgaaaaggccatcgatatgttctgatggccttctcgtcctgcttttcagttgtttggctgccctgcattaaacaacttgggagcccaacgatttatacacaaacaacttgtgttgtttttgcagatctgttgccttttttcctccctcgtaaaggagygtttttctgcgtgagacatatttaaaactgaaaataaaaataacacattaatcctttccttcctctgcctcccggatgagcaagactgctggaggaaactcaaaactgttccttaatttatggagagatgcaggagcctaaatcaagctcagagatggttatatcacaaatttgctgcggaagaagttcagggagagcagttctgcaagatgttgaaagcgctgagttgtcgaccccccatctgaatggccacaggagcctcttcactccaggattagggtaaagggaattcctgtcttc

SEQ ID NO: 12473 - DNA, 600 bp, Chicken  19866894216085_1
aaaatgttaatacagattcattccctatcaaaacaagttggctacctgaggacgctctaggaggaaagagaatttgcatgtgttcaaaggtcttcctcttcactcacacgtctcagtgagacagctggcggccccatatgcaaataattctcagaaaacatgtatttctaaatatgcaaagcaggttggtttgtgacaaatactttctgactgtactgaagaatcaaattttgcacaacatttccagtaattccagctcagtttagaacttgctaaccttaggcatcgacccacgaatcrtgggcagcagaaccccgggtccctccatattgcccccacactttgcctggcctatgaccaggactctttggaatggaattcctattttgcagttggaattaaaggaaggtaccaaatgacatagataaagagggctagaagtgatcatgagtcccagaagcatttaatgtcttcctggtagccaaaaagatgtgctttttaaattaaattattttcagacttccttaacatgggagcagaaaaatgatcatggttttaaaagaaaaacatgtgaaaatggacagtatttatgtctgtata

SEQ ID NO: 12474 - DNA, 600 bp, Chicken  19866894216085_2
cccccacactttgcctggcctatgaccaggactctttggaatggaattcctattttgcagttggaattaaaggaaggtaccaaatgacatagataaagagggctagaagtgatcatgagtcccagaagcatttaatgtcttcctggtagccaaaaagatgtgctttttaaattaaattattttcagacttccttaacatgggagcagaaaaatgatcatggttttaaaagaaaaacatgtgaaaatggacagtatttatgtctgtatatatgagaaaataataatctggaattctagtaygcgtatttggttggcaaaagttaggacttgttacctggagctgaggggtctccacaccatgaaagcccatcaagcatataacccaggaacgtgtcctccaaggtaaggaaatgatgattgcattttgaataaagatgaacgaggtcatacgtcctgctccaaaacagtgactgtgaaataaggtacaatgtgcaataaataatacttatacttgagcttgtcgggaaattttcctggagaaaaacacaaagttttcttgattgtgacagagttctgttttcctattcaaatgctgcaagt

SEQ ID NO: 12475 - DNA, 599 bp, Chicken  19866894216087_1
  misc_feature (1)..(27): n is any nucleotide
nnnnnnnnnnnnnnnnnnnnnnnnnnnagtagcatgatttgtcaaaatgattctttttgccttactgatatgtgtttcttacccagtcgctgggaaagtgtgaaatcttctttctttcttttttttttttttgcaaacacagcaggtacaccgctcccctgctgctgtgtacagctgtaatctgcagcctgggagctcccggctcctgctgtgtgctccggacaggaatcacacagctttgggcatgaggcagaggatgcaggcagcgaggtgcccctcccatggctgagctcatggcakggctgggggctcgtgctgcaggaaggcaggggttacgtgtgagcaacacccacttgatgcaaacacagtgcttagttaaaagaatcacgtcctacgcagtggggcagagatgcttaaaggcatgctgatctgctgcatgcgcacttcctaaaccagccattgatttacagtgcagtgtattccctgccccraccactgcaagcctgggaggtgccaygacaacagggtgggcaccgggacttgggcagcatgcatgaggtttgttgtggcttttaaatacaggacaagggctggaaaaa

SEQ ID NO: 12476 - DNA, 600 bp, Chicken  19866894216087_2
ggagctcccggctcctgctgtgtgctccggacaggaatcacacagctttgggcatgaggcagaggatgcaggcagcgaggtgcccctcccatggctgagctcatggcakggctgggggctcgtgctgcaggaaggcaggggttacgtgtgagcaacacccacttgatgcaaacacagtgcttagttaaaagaatcacgtcctacgcagtggggcagagatgcttaaaggcatgctgatctgctgcatgcgcacttcctaaaccagccattgatttacagtgcagtgtattccctgccccraccactgcaagcctgggaggtgccaygacaacagggtgggcaccgggacttgggcagcatgcatgaggtttgttgtggcttttaaatacaggacaagggctggaaaaatacagkgggtgtctggggagcctgggaagagctttcctgcggcctgagttgggaaggagctgtctgctgagaaatgggacagcagggtgttccaggagtcctggaaacaaaacaaacgctgaaatgccttgtgacacagtggaagagagcagggcagagaagtcccacagctccactcgggtcttctccccc

SEQ ID NO: 12477 - DNA, 600 bp, Chicken  19866894216087_3
ccggacaggaatcacacagctttgggcatgaggcagaggatgcaggcagcgaggtgcccctcccatggctgagctcatggcakggctgggggctcgtgctgcaggaaggcaggggttacgtgtgagcaacacccacttgatgcaaacacagtgcttagttaaaagaatcacgtcctacgcagtggggcagagatgcttaaaggcatgctgatctgctgcatgcgcacttcctaaaccagccattgatttacagtgcagtgtattccctgccccraccactgcaagcctgggaggtgccaygacaacagggtgggcaccgggacttgggcagcatgcatgaggtttgttgtggcttttaaatacaggacaagggctggaaaaatacagkgggtgtctggggagcctgggaagagctttcctgcggcctgagttgggaaggagctgtctgctgagaaatgggacagcagggtgttccaggagtcctggaaacaaaacaaacgctgaaatgccttgtgacacagtggaagagagcagggcagagaagtcccacagctccactcgggtcttctcccccagcctggtgcttcccacggagcctcc

SEQ ID NO: 12478 - DNA, 600 bp, Chicken  19866894216087_4
ggggctcgtgctgcaggaaggcaggggttacgtgtgagcaacacccacttgatgcaaacacagtgcttagttaaaagaatcacgtcctacgcagtggggcagagatgcttaaaggcatgctgatctgctgcatgcgcacttcctaaaccagccattgatttacagtgcagtgtattccctgccccraccactgcaagcctgggaggtgccaygacaacagggtgggcaccgggacttgggcagcatgcatgaggtttgttgtggcttttaaatacaggacaagggctggaaaaatacagkgggtgtctggggagcctgggaagagctttcctgcggcctgagttgggaaggagctgtctgctgagaaatgggacagcagggtgttccaggagtcctggaaacaaaacaaacgctgaaatgccttgtgacacagtggaagagagcagggcagagaagtcccacagctccactcgggtcttctcccccagcctggtgcttcccacggagcctcctgccccgctgcccacactgggaatggccagtgctgggcggctctcgtctgctggtcactgagagcagtaggaggaaggcttcccaaaa

SEQ ID NO: 12479 - DNA, 600 bp, Chicken  19866894216090_1
ttaaacatattttacagctcaacaaaatattttccttctcttcataaggttaatcttcctggataacatagcagtcaccaatatattctttaatttgtgggttgaatctgtcttcctcagttctcgtattacagattttttcaatatgctgaaatgtcacaataaaatattactgtttacttttctccctacttgtttcctctgcataaactgatgttttcagctctgtaatgtgagaaggagttctttcttttatagagaaggtggagatggtctcttttcaagagtttatggggagaractrgggggagaatgcatacaagttgcctctgggaatatcctaactagacattaggaaaaaaawaaattaatgaagtcagtcagatattggtacatgctgctataaaaagtgtggaagatcatagaatcatagaatggcctgggctatctaatttcaacccccctgctatgtgcagggttgccaaccactagaccaggctgcycagagccacatccagcctggccttcaaagcctccggagatggggcatccacaacctctctgggcaacctgttccagtgtgtcaccactctctgtgtg

SEQ ID NO: 12480 - DNA, 600 bp, Chicken  19866894216090_2
acatattttacagctcaacaaaatattttccttctcttcataaggttaatcttcctggataacatagcagtcaccaatatattctttaatttgtgggttgaatctgtcttcctcagttctcgtattacagattttttcaatatgctgaaatgtcacaataaaatattactgtttacttttctccctacttgtttcctctgcataaactgatgttttcagctctgtaatgtgagaaggagttctttcttttatagagaaggtggagatggtctcttttcaagagtttatggggagaractrgggggagaatgcatacaagttgcctctgggaatatcctaactagacattaggaaaaaaawaaattaatgaagtcagtcagatattggtacatgctgctataaaaagtgtggaagatcatagaatcatagaatggcctgggctatctaatttcaacccccctgctatgtgcagggttgccaaccactagaccaggctgcycagagccacatccagcctggccttcaaagcctccggagatggggcatccacaacctctctgggcaacctgttccagtgtgtcaccactctctgtgtgaaaa

SEQ ID NO: 12481 - DNA, 600 bp, Chicken  19866894216090_3
aacatagcagtcaccaatatattctttaatttgtgggttgaatctgtcttcctcagttctcgtattacagattttttcaatatgctgaaatgtcacaataaaatattactgtttacttttctccctacttgtttcctctgcataaactgatgttttcagctctgtaatgtgagaaggagttctttcttttatagagaaggtggagatggtctcttttcaagagtttatggggagaractrgggggagaatgcatacaagttgcctctgggaatatcctaactagacattaggaaaaaaawaaattaatgaagtcagtcagatattggtacatgctgctataaaaagtgtggaagatcatagaatcatagaatggcctgggctatctaatttcaacccccctgctatgtgcagggttgccaaccactagaccaggctgcycagagccacatccagcctggccttcaaagcctccggagatggggcatccacaacctctctgggcaacctgttccagtgtgtcaccactctctgtgtgaaaaacttcctcctaatgtctaacctaaacttcccctgtctcagtttaaaacaattctccattg

SEQ ID NO: 12482 - DNA, 600 bp, Chicken  19866894216090_4
gcataaactgatgttttcagctctgtaatgtgagaaggagttctttcttttatagagaaggtggagatggtctcttttcaagagtttatggggagaractrgggggagaatgcatacaagttgcctctgggaatatcctaactagacattaggaaaaaaawaaattaatgaagtcagtcagatattggtacatgctgctataaaaagtgtggaagatcatagaatcatagaatggcctgggctatctaatttcaacccccctgctatgtgcagggttgccaaccactagaccaggctgcycagagccacatccagcctggccttcaaagcctccggagatggggcatccacaacctctctgggcaacctgttccagtgtgtcaccactctctgtgtgaaaaacttcctcctaatgtctaacctaaacttcccctgtctcagtttaaaacaattctccattgtcctattgctattcaccctcataaacagccgttcccctcctgtttatatgctcccttcaagtactggaaggctgcaatgaggtctccctggagccttctcttctccaatctaaacaagcccagtttcctcaatctttcc

SEQ ID NO: 12483 - DNA, 600 bp, Chicken  19866894216092_1
gccgcttcctgagcaccactcgtctgcaggaggctcttatctctgggtatgcattttttatgcgctatgctgagctgtgatcccacggaacaagcattccctgcttccggcgcaatggaaatgcggagcccgtgcctcgctgcaccgtgtgacagccgtggggctgcggggaccatcgctgccctatgggatgaaccaggtttgggcagcgccctccagaggcacttcgtatcgatcctgcctacggagatcggggctcacgcccaaagcacgacctgggcaatctgttttcagttgtgytttagtgatgcagagcagcgagtcactgctacttcagggggaaaaaaaggggggaagaaatccgcttgggcatctttgtgcctccttcagaaatagatgataagctcataaatcttgtaggtgtttgggataattttatcccgggcccccttcgccccatcccacagmcaaaagcggctgtgcctggaggagcagcgggacgaagcgggatcagcaggcagggagaaccccaacaacgggaaaggatctgcagagccctcctcgtcccctcctcctcgctgtgcccgtgctgctgcgtgc

SEQ ID NO: 12484 - DNA, 600 bp, Chicken  19866894216092_2
gggaccatcgctgccctatgggatgaaccaggtttgggcagcgccctccagaggcacttcgtatcgatcctgcctacggagatcggggctcacgcccaaagcacgacctgggcaatctgttttcagttgtgytttagtgatgcagagcagcgagtcactgctacttcagggggaaaaaaaggggggaagaaatccgcttgggcatctttgtgcctccttcagaaatagatgataagctcataaatcttgtaggtgtttgggataattttatcccgggcccccttcgccccatcccacagmcaaaagcggctgtgcctggaggagcagcgggacgaagcgggatcagcaggcagggagaaccccaacaacgggaaaggatctgcagagccctcctcgtcccctcctcctcgctgtgcccgtgctgctgcgtgccagcagctcagagcctgctcctggagctcctcctcccgctttgatcccactgcagccgccgtatcctgacgctgaggagcccacggacccctgtgtgggtttgtaggcaggcagacctgcccaacgttggggatgtcccagagcactgtgctgacctgaggagcaggg

SEQ ID NO: 12485 - DNA, 599 bp, Chicken  19866894216095_1
  misc_feature (1)..(29): n is any nucleotide
nnnnnnnnnnnnnnnnnnnnnnnnnnnnnatttgattgattttagctgaaagatccttccacagccctttgaacactaaaaaaaatgcagaagctctaccaggagaaacattctcctagattacaaaagaaagaaaggctgtgaatagacatatgatataaaaaataatatttggggctggtgtaaatgatgaaagactttaaatgtgaagacaaaagacagaataaatatgagtatggtaacaataacaagagcatgcccttgttatgagttctgagagaaaagatgttgaaaagaacraatttcaggagatgatccattcgtataaaagtagagcataatgcagtagcagtaagataagaaagttttgtatgagaaaggtgaaagagatataaataaagaaagagatttaaattcattttcaaaaccttatgactatgaatagtgctagtatgaagtttcagaaacacagctctgaaatgtacttcaaggtgtgaaagaacagtctcaaaaacagaatacttttacttatgatcaaagagaaactgcatgtgagctaatagtattcttgcaaataagaaacagtatcagaactcagt

SEQ ID NO: 12486 - DNA, 600 bp, Chicken  19866894216095_2
cattcgtataaaagtagagcataatgcagtagcagtaagataagaaagttttgtatgagaaaggtgaaagagatataaataaagaaagagatttaaattcattttcaaaaccttatgactatgaatagtgctagtatgaagtttcagaaacacagctctgaaatgtacttcaaggtgtgaaagaacagtctcaaaaacagaatacttttacttatgatcaaagagaaactgcatgtgagctaatagtattcttgcaaataagaaacagtatcagaactcagtcaaaattctagcagagasgttgcattcacatacactgatctaaccaaggaggatgcaattgctcaccctctctgggtcacacacccattctgctaagaacttatagaagtgaatatatgtgaaatgctttcaaagattcaaagtactcattcacatctttcatatgtgttccagttacattacccactttaaatattaatattgaaagtgagtatgagatataaaatgcaggaaaatcatcttaattataagacttcagaaatattttatgagatagtcccatgaaccactgctgaaacattgacttctctgtattta

SEQ ID NO: 12487 - DNA, 540 bp, Chicken  19866894216098_1
aaaccaccttagatttagattgataaatggatggcaaataaatttagcaaaataagcaatttcagcctatggaaggtcagcagagggctgtgcaatcacgacttccattaatatgttatatttcagtcaaaagcttttaaacgctgaaggttttcagagggaaaacctatagctttgatgaatgggtttcttctaatagctgaatggaaaatgaaaaccaaagcaagggaggatccaccttgctgctggctgcgtgcagcccagtgtgccatgctgcagtgagagcatggtgtgtcagcmtgtagaaccatttgaatattgttaattgctaactggcagagattattcttaattaccactgttattatgyacacggggcttgagcagaggacaggtaaaccaaagaggcattgctataaacagacccaaatggggagaggaaggggagctggatggcattaaccctttgtttcccaccagcagctcacctagcagcatcagtgaggtctgggtggaggatcagatctctctgaggaggta

SEQ ID NO: 12488 - DNA, 470 bp, Chicken  19866894216098_2
ggaaggtcagcagagggctgtgcaatcacgacttccattaatatgttatatttcagtcaaaagcttttaaacgctgaaggttttcagagggaaaacctatagctttgatgaatgggtttcttctaatagctgaatggaaaatgaaaaccaaagcaagggaggatccaccttgctgctggctgcgtgcagcccagtgtgccatgctgcagtgagagcatggtgtgtcagcmtgtagaaccatttgaatattgttaattgctaactggcagagattattcttaattaccactgttattatgyacacggggcttgagcagaggacaggtaaaccaaagaggcattgctataaacagacccaaatggggagaggaaggggagctggatggcattaaccctttgtttcccaccagcagctcacctagcagcatcagtgaggtctgggtggaggatcagatctctctgaggaggta

SEQ ID NO: 12489 - DNA, 600 bp, Chicken  19866894216112_1
gtctgctagaaatctaacaaacctctgtagaagatgtatgtgtgagctctgttgtgttgggtcagtgtccgtgtttgagtcagaacatcccaccaatgatacgtttaactagttgcagcagtcttaaatgctttatgtcatgacatcactaatgaaatcagctctggagaaaacataatcttggcatcctagaaaattgcctttagatctcaaatgactgacctcatagagatttggccatcaataggcttcttaaacttactgtgacagcaaatataaatattaaaataaatcattttrtgaaaagatatcacagcaaaattagtcttctttcccaacctttgtcagtctaggtttattacagcacttaccatggaacggcaaccagcttaataacactaaatcactgcattaaaattctagccactgtgccacggtcctgctatctatgtggggagactacataaaacctccctcatcattcaratgcccctaaattgaaatatagtgggaaacagtcaataggtcaactacttcacctagtaaaatgatgcacattgctgaaggatattgctgcayagctttcagcagctcatacaa

SEQ ID NO: 12490 - DNA, 600 bp, Chicken  19866894216112_2
tcctagaaaattgcctttagatctcaaatgactgacctcatagagatttggccatcaataggcttcttaaacttactgtgacagcaaatataaatattaaaataaatcattttrtgaaaagatatcacagcaaaattagtcttctttcccaacctttgtcagtctaggtttattacagcacttaccatggaacggcaaccagcttaataacactaaatcactgcattaaaattctagccactgtgccacggtcctgctatctatgtggggagactacataaaacctccctcatcattcaratgcccctaaattgaaatatagtgggaaacagtcaataggtcaactacttcacctagtaaaatgatgcacattgctgaaggatattgctgcayagctttcagcagctcatacaaggtttcgtaacttgccagacgaatagaaaaaaaatgagtaatccatacatagtgcttttttagtacttaaatgtgcatgggcaaagtaagtacacctgtctgtcacacacctgcaaagtacaggagcgatgtttgtgtactattcttgtaagtcttccaggagttgcatctttgtatgcaaccaaa

SEQ ID NO: 12491 - DNA, 600 bp, Chicken  19866894216112_3
atattaaaataaatcattttrtgaaaagatatcacagcaaaattagtcttctttcccaacctttgtcagtctaggtttattacagcacttaccatggaacggcaaccagcttaataacactaaatcactgcattaaaattctagccactgtgccacggtcctgctatctatgtggggagactacataaaacctccctcatcattcaratgcccctaaattgaaatatagtgggaaacagtcaataggtcaactacttcacctagtaaaatgatgcacattgctgaaggatattgctgcayagctttcagcagctcatacaaggtttcgtaacttgccagacgaatagaaaaaaaatgagtaatccatacatagtgcttttttagtacttaaatgtgcatgggcaaagtaagtacacctgtctgtcacacacctgcaaagtacaggagcgatgtttgtgtactattcttgtaagtcttccaggagttgcatctttgtatgcaaccaaaaatacttagtcaattaaaacattgttcttctatttgtaaaattagtatgtagtattacagtatgagagaacacaagtgttcaaaatgtcttct

SEQ ID NO: 12492 - DNA, 600 bp, Chicken  19866894216112_4
gctttcagcagctcatacaaggtttcgtaacttgccagacgaatagaaaaaaaatgagtaatccatacatagtgcttttttagtacttaaatgtgcatgggcaaagtaagtacacctgtctgtcacacacctgcaaagtacaggagcgatgtttgtgtactattcttgtaagtcttccaggagttgcatctttgtatgcaaccaaaaatacttagtcaattaaaacattgttcttctatttgtaaaattagtatgtagtattacagtatgagagaacacaagtgttcaaaatgtcttctrtactgtaaccctggcagtgcagaatctcctatctgtctcctggagtctcagtgagttttctagtccatgcagcacttttcccacaggttaactattatggaacagcataaaacctctctgtgtgatatgatttggcttagtaattgcaaaggtaacacagaaacttttaagaaataagtttttggttatgcatttttcagttttaactgaaaaattatatctacagtttagatggccacgggctgaataaaaataaactgtgttctgtggacattgcttattgtggagcacttcaatgtt

SEQ ID NO: 12493 - DNA, 600 bp, Chicken  19866894216118_1
gtaagactactggtattttcctgcagaaaaatccattctgtccagaatatgcatgcgcatatccttttgttttccacggatttttagttactgtcaaaaagtccaataaagctattagtcttttcttcactacaagttacaatgtgtattaatcattttcttgatgcatcttcagtgtaaatacaggaagagtacttttccatttaaattgcttcagcagaccatgcttagttctgttaggtaagtttgcttttctcctattttctcactgccttgtgaggttgtggatgtctcctcccmggaagcattcaaggccaggcaggatggggctttgagcaacctgagggatgtgtccttgcctacagcaggggggctggaactgaatgatcttagaggtcccttccamcccaaaccattctatgattctatattccctatatgctattattttaatgataaattataataaacctttatgaaacaacagtttaaacagaaagctcagaagtcccgatattcttctgggagctgataattcacataagtgattgaataattaaaattaagtgcctgaaatcaccagtagtaaataaagaaaac

SEQ ID NO: 12494 - DNA, 600 bp, Chicken  19866894216118_2
taaagctattagtcttttcttcactacaagttacaatgtgtattaatcattttcttgatgcatcttcagtgtaaatacaggaagagtacttttccatttaaattgcttcagcagaccatgcttagttctgttaggtaagtttgcttttctcctattttctcactgccttgtgaggttgtggatgtctcctcccmggaagcattcaaggccaggcaggatggggctttgagcaacctgagggatgtgtccttgcctacagcaggggggctggaactgaatgatcttagaggtcccttccamcccaaaccattctatgattctatattccctatatgctattattttaatgataaattataataaacctttatgaaacaacagtttaaacagaaagctcagaagtcccgatattcttctgggagctgataattcacataagtgattgaataattaaaattaagtgcctgaaatcaccagtagtaaataaagaaaacaaagctgtgcctgtatatttaaaaagacaaccatggtttttgttctttttagtagcaatacagataacaaacacattcacaaaatgagaagcaagaaatccaccta

SEQ ID NO: 12495 - DNA, 600 bp, Chicken  19866894216119_1
gtctattatcagctctgtcatcgcagcacaggctgattccagctgaagctacacattgctggtgggagctgagtttaggcatgcgactgtgccaaacggtgctggcatctctctagtgggacaatagcactgagccctttaaggcagctggcccagagctaaggcattttattgacagcaaatatctctgcaacaaagctccagctggcaaaccagtccaggaaaagcaggaaccgagtcacaggggaattcatttgccttttgtaacaattggggcattctcatgtgagcagcaggcaygactccgagatcccagggtggaaaatgtgaccttgtrcatttgcagtgttgtatctccttacctgatggtcacacctgctctgtcagagtcacccaggctccagcactgccttggtcttgcaycttgaaaacaaccagcaatgcaarcagtgacctcagaccactcaacctcagctaaatggctttttcacatggtgatgttcgcatttcctccaaagctgaaaaacatggcgagtctgttgttccccttgtagctccgggagcttgggaagmagatttagccacccatcatcacagagg

SEQ ID NO: 12496 - DNA, 600 bp, Chicken  19866894216119_2
tccagctgaagctacacattgctggtgggagctgagtttaggcatgcgactgtgccaaacggtgctggcatctctctagtgggacaatagcactgagccctttaaggcagctggcccagagctaaggcattttattgacagcaaatatctctgcaacaaagctccagctggcaaaccagtccaggaaaagcaggaaccgagtcacaggggaattcatttgccttttgtaacaattggggcattctcatgtgagcagcaggcaygactccgagatcccagggtggaaaatgtgaccttgtrcatttgcagtgttgtatctccttacctgatggtcacacctgctctgtcagagtcacccaggctccagcactgccttggtcttgcaycttgaaaacaaccagcaatgcaarcagtgacctcagaccactcaacctcagctaaatggctttttcacatggtgatgttcgcatttcctccaaagctgaaaaacatggcgagtctgttgttccccttgtagctccgggagcttgggaagmagatttagccacccatcatcacagaggagccacttcagggtgctgcagaggatgagggtgctgc

SEQ ID NO: 12497 - DNA, 600 bp, Chicken  19866894216119_3
atagcactgagccctttaaggcagctggcccagagctaaggcattttattgacagcaaatatctctgcaacaaagctccagctggcaaaccagtccaggaaaagcaggaaccgagtcacaggggaattcatttgccttttgtaacaattggggcattctcatgtgagcagcaggcaygactccgagatcccagggtggaaaatgtgaccttgtrcatttgcagtgttgtatctccttacctgatggtcacacctgctctgtcagagtcacccaggctccagcactgccttggtcttgcaycttgaaaacaaccagcaatgcaarcagtgacctcagaccactcaacctcagctaaatggctttttcacatggtgatgttcgcatttcctccaaagctgaaaaacatggcgagtctgttgttccccttgtagctccgggagcttgggaagmagatttagccacccatcatcacagaggagccacttcagggtgctgcagaggatgagggtgctgcagaaactcagctatgcttggagttatgcctatagagctactaagcagaaaggattcattctgggatggactgtagcactggagggg

SEQ ID NO: 12498 - DNA, 600 bp, Chicken  19866894216119_4
ctggcccagagctaaggcattttattgacagcaaatatctctgcaacaaagctccagctggcaaaccagtccaggaaaagcaggaaccgagtcacaggggaattcatttgccttttgtaacaattggggcattctcatgtgagcagcaggcaygactccgagatcccagggtggaaaatgtgaccttgtrcatttgcagtgttgtatctccttacctgatggtcacacctgctctgtcagagtcacccaggctccagcactgccttggtcttgcaycttgaaaacaaccagcaatgcaarcagtgacctcagaccactcaacctcagctaaatggctttttcacatggtgatgttcgcatttcctccaaagctgaaaaacatggcgagtctgttgttccccttgtagctccgggagcttgggaagmagatttagccacccatcatcacagaggagccacttcagggtgctgcagaggatgagggtgctgcagaaactcagctatgcttggagttatgcctatagagctactaagcagaaaggattcattctgggatggactgtagcactggaggggtaaggaaggtgcagcagatgtgtt

SEQ ID NO: 12499 - DNA, 600 bp, Chicken  19866894216119_5
gggcattctcatgtgagcagcaggcaygactccgagatcccagggtggaaaatgtgaccttgtrcatttgcagtgttgtatctccttacctgatggtcacacctgctctgtcagagtcacccaggctccagcactgccttggtcttgcaycttgaaaacaaccagcaatgcaarcagtgacctcagaccactcaacctcagctaaatggctttttcacatggtgatgttcgcatttcctccaaagctgaaaaacatggcgagtctgttgttccccttgtagctccgggagcttgggaagmagatttagccacccatcatcacagaggagccacttcagggtgctgcagaggatgagggtgctgcagaaactcagctatgcttggagttatgcctatagagctactaagcagaaaggattcattctgggatggactgtagcactggaggggtaaggaaggtgcagcagatgtgttccaggtgaagaacatgcctacaggtagggaggtgtggctgccctctaattgtctctaattagcccaccctaagtcagagccggttgcagccatggtttaggcgtactcggaggagagagaagggtg

SEQ ID NO: 12500 - DNA, 600 bp, Chicken  19866894216122_1
aatctccactcttttagtttaaagcagttctcctttgtcctgtcgctatcggaccacagagctgagttactattcatttggagactatcaccttctatttatatctcagtacttcagcaaaggaattatttagctgctcacagtacatgtaaagtggtatcaatatagtacatatatcaaccattcctgcctcaatgtactcaaactattcattttcccaaactactgatgtgctgtatatgagctgggagtaatgtcaggaatgagcagagtactctgctgatggaaaagaatgtcccrattttctgggctggtgtaattctggcactttgcaagaccatttccaattgcaaagtaagacagaaggactgaaaaagggatctactgcgtggtatttctattactgacatgcaccactgaaaactgcatgttttcccagagttaaagtgccactgcacagggacaagaacatgttggcttagcctcttccatgacagctttttgattgaatagtctcagcttttcccttacagactgtgagaatccaaagggctttttacattgtctggttggaataaaatcttgtccatgctgaaaatt

SEQ ID NO: 12501 - DNA, 600 bp, Chicken  19866894216122_2
tactgacatgcaccactgaaaactgcatgttttcccagagttaaagtgccactgcacagggacaagaacatgttggcttagcctcttccatgacagctttttgattgaatagtctcagcttttcccttacagactgtgagaatccaaagggctttttacattgtctggttggaataaaatcttgtccatgctgaaaattaattattgagagttctgctgctttataatatatttatgcgctcttggggacctctcctacagcacaggaagcactatcttaaacacagctcaggcaagagyagcaaccagctctgctttgtggtgcctttcctccaagaacagcaggacgtaatgctatccatagatagcgcttggctttgactgaaggtgaggcggaggtgaaagaacrggacagcacagactaaaagcttagcacactgctattccggtggctctctgaagagagaacaacaattaagaaagcaaaccgcacaaattcactgagctgggttaccccttcaattgctgtcacgctgttaacatgttttgtggtcttcctacactgacttacttcccttcttatacataactgaccgctaa

SEQ ID NO: 12502 - DNA, 600 bp, Chicken  19866894216122_3
tagtctcagcttttcccttacagactgtgagaatccaaagggctttttacattgtctggttggaataaaatcttgtccatgctgaaaattaattattgagagttctgctgctttataatatatttatgcgctcttggggacctctcctacagcacaggaagcactatcttaaacacagctcaggcaagagyagcaaccagctctgctttgtggtgcctttcctccaagaacagcaggacgtaatgctatccatagatagcgcttggctttgactgaaggtgaggcggaggtgaaagaacrggacagcacagactaaaagcttagcacactgctattccggtggctctctgaagagagaacaacaattaagaaagcaaaccgcacaaattcactgagctgggttaccccttcaattgctgtcacgctgttaacatgttttgtggtcttcctacactgacttacttcccttcttatacataactgaccgctaaggggggaaaaaaaaaagcctgacaacatccagtctggtgattcattccacaagttactgcagcttctaaaacacgatctactccaatagcttaattgcaggcttactga

SEQ ID NO: 12503 - DNA, 599 bp, Chicken  19866894216124_1
  misc_feature (1)..(120): n is any nucleotide
nnnnnnnnnnnnnnnnnnnnnnnnnnnnnnnnnnnnnnnnnnnnnnnnnnnnnnnnnnnnnnnnnnnnnnnnnnnnnnnnnnnnnnnnnnnnnnnnnnnnnnnnnnnnnnnnnnnnnnnnttatttgggggaaattcacaagttttgacagccagagttggaaggttatagtgttagtgatgtgagctcggcagtatgcttgaacactaaatctgtgtaaaaagagaaagaaattgaaaagattttagaagcatttcacaaatctagttcttgaactactaaaatagtgaatagcccccmaaaatgtcagaaacgtgctacattaagaagtactgcactgaagcttaatgttaatgtgcaataaaatacctcatcccaatactttttttgttctttatgatgagaaatttataacacgagtgtctgtggttctctgtagagrgaaccatgtttcaggrttcagttgatttggaggctgtgctgaccaagagataggaggcactcatataattgtggagaaataatgggaaatttgccactgttttcagcagggtctcaatttgctattatgtatttaaataagcccattttctgatagc

SEQ ID NO: 12504 - DNA, 600 bp, Chicken  19866894216124_2
ttttgacagccagagttggaaggttatagtgttagtgatgtgagctcggcagtatgcttgaacactaaatctgtgtaaaaagagaaagaaattgaaaagattttagaagcatttcacaaatctagttcttgaactactaaaatagtgaatagcccccmaaaatgtcagaaacgtgctacattaagaagtactgcactgaagcttaatgttaatgtgcaataaaatacctcatcccaatactttttttgttctttatgatgagaaatttataacacgagtgtctgtggttctctgtagagrgaaccatgtttcaggrttcagttgatttggaggctgtgctgaccaagagataggaggcactcatataattgtggagaaataatgggaaatttgccactgttttcagcagggtctcaatttgctattatgtatttaaataagcccattttctgatagcctgttaggttagacaaggctgagataccagcttgttagtgttgtttgtgcctgcttaatatacctgatggatgtgagcaatgctgtgcagtgtggaatagcamgaatgcyatggcaatgctggcgtgtgaggatacaaacatt

SEQ ID NO: 12505 - DNA, 600 bp, Chicken  19866894216124_3
tggaaggttatagtgttagtgatgtgagctcggcagtatgcttgaacactaaatctgtgtaaaaagagaaagaaattgaaaagattttagaagcatttcacaaatctagttcttgaactactaaaatagtgaatagcccccmaaaatgtcagaaacgtgctacattaagaagtactgcactgaagcttaatgttaatgtgcaataaaatacctcatcccaatactttttttgttctttatgatgagaaatttataacacgagtgtctgtggttctctgtagagrgaaccatgtttcaggrttcagttgatttggaggctgtgctgaccaagagataggaggcactcatataattgtggagaaataatgggaaatttgccactgttttcagcagggtctcaatttgctattatgtatttaaataagcccattttctgatagcctgttaggttagacaaggctgagataccagcttgttagtgttgtttgtgcctgcttaatatacctgatggatgtgagcaatgctgtgcagtgtggaatagcamgaatgcyatggcaatgctggcgtgtgaggatacaaacattgcatatatagggtacc

SEQ ID NO: 12506 - DNA, 600 bp, Chicken  19866894216124_4
agaaatttataacacgagtgtctgtggttctctgtagagrgaaccatgtttcaggrttcagttgatttggaggctgtgctgaccaagagataggaggcactcatataattgtggagaaataatgggaaatttgccactgttttcagcagggtctcaatttgctattatgtatttaaataagcccattttctgatagcctgttaggttagacaaggctgagataccagcttgttagtgttgtttgtgcctgcttaatatacctgatggatgtgagcaatgctgtgcagtgtggaatagcamgaatgcyatggcaatgctggcgtgtgaggatacaaacattgcatatatagggtacctaagaaaaaaaaaaaacataggaaaagggtgaaaaaagagactccactagataagtgtactgcataaatcaaaagggtttatgtcataacacgaacatgtgccattcctgctcatatattgaatttcagtagttggttgcataaagaagtaaagtgtaatgaaactggcaagcaaagtattccctagtcagccttatctttgttccatttgtccttcagatacagcttttcttgcctttttcaa

SEQ ID NO: 12507 - DNA, 600 bp, Chicken  19866894216124_5
tataacacgagtgtctgtggttctctgtagagrgaaccatgtttcaggrttcagttgatttggaggctgtgctgaccaagagataggaggcactcatataattgtggagaaataatgggaaatttgccactgttttcagcagggtctcaatttgctattatgtatttaaataagcccattttctgatagcctgttaggttagacaaggctgagataccagcttgttagtgttgtttgtgcctgcttaatatacctgatggatgtgagcaatgctgtgcagtgtggaatagcamgaatgcyatggcaatgctggcgtgtgaggatacaaacattgcatatatagggtacctaagaaaaaaaaaaaacataggaaaagggtgaaaaaagagactccactagataagtgtactgcataaatcaaaagggtttatgtcataacacgaacatgtgccattcctgctcatatattgaatttcagtagttggttgcataaagaagtaaagtgtaatgaaactggcaagcaaagtattccctagtcagccttatctttgttccatttgtccttcagatacagcttttcttgcctttttcaataaaatc

SEQ ID NO: 12508 - DNA, 600 bp, Chicken  19866894216131_1
actcacttcacaaggcagggtcaagtattgcactactgtggattgaagcaggttgaatctcagataatagcgctttccaagggacttctctttcattgtaaaagggtaggtgcagttcagagtcacttggaagtgattgctcgctgttcatgttggtaagtttgacagctgttttattctttaacgagccctggtctttaatctgttctttaatgagccttgtctagggcaacgaaagcagaatatgggccatgttcttgtacagaatagaagagctttgaaaataggtatcaactagartttacatacatgctaacaagtgcctcaatcacctgggttttgcagtgtgatgcagttaatttgtttgcatgtgtttcattttaaaagtactgcttggtcactctgaactgctttcagtcatgatggcactgacagaaaaggagcagcctcatccttaccttgccaagtgtgactcactgcaaaagcaacttctggcatatgcctggtttccccaaatagactgtgctaaactcccaggtaccccgtccttccacagcaagtcagagcctggtggaaaggcccgtgattcaccttcatggt

SEQ ID NO: 12509 - DNA, 600 bp, Chicken  19866894216150_1
agctctgccagccagcacttctcatgccctcgctgcccacccgtctatcccacaccatctcagcttacctacaaggcgctgcacaagacgggatgaagacgaacggactcagtagatgcacaagtgcaacaagccacgtactcacgccgagctcaagcgctccaatgaagggaagcagcacgcgctgctcctcccctcattctagccgcttatgacatcactaagggccacccggctgctccaccatggacggacaaggttgggaggcaagaccacgtcacaagaccacaggattccaamagggcaccccagcgttcgagaaatcagtgcgtggttggaatctcagccaaatcctggagaagctggcatgggcttgtcgggaccaaagtgcaggacacggcgcttggtgctgttgagcctcttgctgggcctatggcaaatccacactagggtccttctttgcacccaagggcggcttagagcagccatctcttgcacctggatggaaataaaggaacagaaacacagcactactaccagactgctttgccaatttctttcccgagcgcatttttgccctttggcttccatgacgacctc

SEQ ID NO: 12510 - DNA, 600 bp, Chicken  19866894216150_2
cttctttgcacccaagggcggcttagagcagccatctcttgcacctggatggaaataaaggaacagaaacacagcactactaccagactgctttgccaatttctttcccgagcgcatttttgccctttggcttccatgacgacctcatttcctcctccttttctttggggggaagctgccccccgtgcctgagcttcacaagacagcatgaaacatgacactaagacaaacgcttgccctgggtgcagggtggctgtgctttgccaggtatactagcgggctaggaagcgccacgtggcrgccccaggccaagtctgcattcagtcactgtggccacagctgctgcctcactgccagaacgtatccgagggtacagatggacgcagacactcctgctccttctgcaaagccctcctctgcacagcccgttagctgcttctcactgctgtgccaacggggctcccctttgcagcagccctgggataaacacgcctgtactcttccgtgcagcagcgagctccagggatgaagcagcacagaggaaaccaacagaatctactgctgctgaatccaccagcaccttctgcccaccaagagtaa

SEQ ID NO: 12511 - DNA, 600 bp, Chicken  19866894216159_1
ttaagagaaatttattttaagctttaaagggcaaaggacctgtatatttaaccacaggctaagtttgacttaagtacactgaagtcagcaatggctgttaccttggtgacataatatctcctactaggcaaagtccttctgctcctgcagactgcgttctgatgctcctcagtaaaacaaccttgggaagaaggaatggagcttgattatgagtgaatgagtggttattagtggcagctgaacacttaccaatgtagtgagaaacactgcaccatcatttctgatgtgttaggaactcarttgtgcactgaatgaagagtggggcacccaagactggtaccaacatcatccatcttgctgagaaagtcgagaaaggctaccaagagcaatgtcagagaggagaggttgtckgaaagacttcctacgacattacttcaggttaatcaacattaactgctggctagatttaaccaacttgggcttcacagcagtctggtgtatgggtggtgcctgaggtgctccattgtgtgtgtgggttttctgttagaatatagtcagacagggtcacaacagtgacatcattctgtgacacaggcctca

SEQ ID NO: 12512 - DNA, 600 bp, Chicken  19866894216159_2
taatatctcctactaggcaaagtccttctgctcctgcagactgcgttctgatgctcctcagtaaaacaaccttgggaagaaggaatggagcttgattatgagtgaatgagtggttattagtggcagctgaacacttaccaatgtagtgagaaacactgcaccatcatttctgatgtgttaggaactcarttgtgcactgaatgaagagtggggcacccaagactggtaccaacatcatccatcttgctgagaaagtcgagaaaggctaccaagagcaatgtcagagaggagaggttgtckgaaagacttcctacgacattacttcaggttaatcaacattaactgctggctagatttaaccaacttgggcttcacagcagtctggtgtatgggtggtgcctgaggtgctccattgtgtgtgtgggttttctgttagaatatagtcagacagggtcacaacagtgacatcattctgtgacacaggcctcaagttatagcatttagtagagaggtaagcttcagaccttttttagcccaaagaatttccaatatacctattcagtttcacgttggaagataacttgggatgaccaaagatgt

SEQ ID NO: 12513 - DNA, 599 bp, Chicken  19866894216164_1
  misc_feature (1)..(76): n is any nucleotide
nnnnnnnnnnnnnnnnnnnnnnnnnnnnnnnnnnnnnnnnnnnnnnnnnnnnnnnnnnnnnnnnnnnnnnnnnnnnaaaaaaatgtcatgtacttttctgagtctactgtagtttctaactgcatttctaatgaattatgaactccgagatgacttatttcttctttcttcaatctaatctaggccctgacactgtgatacatcggtacagagccctgctccttgacatgtgcttttgttggatatgcaggatttttttcttgagtaagataaaatacatatgatcaggatttctatgcratgtatatgctttgttgcatttgttttccatgttctggacatggttgttctctctgtgatcatcattatttgctgagtaacttattttggtgattctaaacttggtgattctatgtttctatgagattttcagctctcccttacatttctcttgggctccacttagcttgggtttctcactggtgttgcagatcatatcctagaagcttgacccaaatcccaaagaaataaataagaatatttcttgggccttgaataactgagagtctggtctgtacctcagcacagctctgctccac

SEQ ID NO: 12514 - DNA, 599 bp, Chicken  19866894216173_1
  misc_feature (1)..(257): n is any nucleotide
nnnnnnnnnnnnnnnnnnnnnnnnnnnnnnnnnnnnnnnnnnnnnnnnnnnnnnnnnnnnnnnnnnnnnnnnnnnnnnnnnnnnnnnnnnnnnnnnnnnnnnnnnnnnnnnnnnnnnnnnnnnnnnnnnnnnnnnnnnnnnnnnnnnnnnnnnnnnnnnnnnnnnnnnnnnnnnnnnnnnnnnnnnnnnnnnnnnnnnnnnnnnnnnnnnnnnnnnnnnnnnnnnnnnnnnnnnnnnnnnnnnnnnnnnnnnnnnnncaggcccagaacgacgtatgttgctttgttgccagcagatggwgccagatgctcacagttttaaagggattttttttccctctgctctgcagaactgcccatggagcagtcagtgcttaggcgctgctcccttaccttacatgaacttgcttttttcactgygcatacgtatagagccaacccggtgcatgccttaccctgtgtcagctgccttcctctgatgtttctgtaacaactgcttgttacttatcgcagatacatttgcttaaattgcttttggtgccaaaatgtcatcaggaaacaaccaaactaagctaggcatttccaactgctaaaatacca

SEQ ID NO: 12515 - DNA, 599 bp, Chicken  19866894216173_2
  misc_feature (1)..(138): n is any nucleotide
nnnnnnnnnnnnnnnnnnnnnnnnnnnnnnnnnnnnnnnnnnnnnnnnnnnnnnnnnnnnnnnnnnnnnnnnnnnnnnnnnnnnnnnnnnnnnnnnnnnnnnnnnnnnnnnnnnnnnnnnnnnnnnnnnnnnnnnnnncaggcccagaacgacgtatgttgctttgttgccagcagatggwgccagatgctcacagttttaaagggattttttttccctctgctctgcagaactgcccatggagcagtcagtgcttaggcgctgctcccttaccttacatgaacttgcttttttcactgygcatacgtatagagccaacccggtgcatgccttaccctgtgtcagctgccttcctctgatgtttctgtaacaactgcttgttacttatcgcagatacatttgcttaaattgcttttggtgccaaaatgtcatcaggaaacaaccaaactaagctaggcatttccaactgctaaaataccatacctttcatttccctcacaaagagatatagtctatgaagaagtcatacatatcccagagccatccatgtaaaattgttaactcttcatcttgttaaaggccaaatacatctcaatata

SEQ ID NO: 12516 - DNA, 600 bp, Chicken  19866894216173_3
ttccaactgctaaaataccatacctttcatttccctcacaaagagatatagtctatgaagaagtcatacatatcccagagccatccatgtaaaattgttaactcttcatcttgttaaaggccaaatacatctcaatataatgtttattgtgtcctaaagttcaaaactgtatgctcagaagagagaacaggtgaggagagtgctctgcaaacccttcaccatgcagtgagacatgcagcacgaccaggtgcgagcaaggccgggcacagctggttctgctcagtgtaatgcaggccaacrgccctcctgttctgcttctgcagctacttgcaaaaagagaagcaggagatactgcaacaacgctcctcaggtgctactccagggcagctctcctcacaccctcactgcagggctgcagcagtgcctatgggagctgctggctggcagggcagcacggagctggcaaagcccctttagccaacagtgcacctgtgtcccactgtactgagccaccctcacagtatggtaagatgaaatgagcatttataagtgacaaacagctgaggggacaagaaactctttgctgaaaggtattaaact

SEQ ID NO: 12517 - DNA, 600 bp, Chicken  19866894216177_1
taataaaatgggaggcattactgtcagagcagtcctcacagtaaaatcaaaagggacaatgttagccacgctgaactctgattaacagattacaaaatgtatatttaagtagagttatatatattcttaaagtgatgataccaagatatgtgttcctttccatctgatggtggcaaattaagaataagattggtgatcttaaaaaaaatatagatcatttttggcaactgtagatggcaaaaacaaacaaacaaacaaacaaaactggcaaggcaaacacacaaatattcctcaggacawgatttggtatttcttctgtataacagaaatatagtaattcaactggaagaaaccacagtctcctcacttcaagaggatgttgaaaaatttggaaaaaaatgagaagagctgagttctgaagttgcgcaacggacctagaatgcagtctcaccatagttgacatatatgtacaagcacccaatactgctgtttttggtaggagtgtgaaagcacaggagcagaagtcaaggttctagggattttaaaaaatgacttagcaggcatgtactggaattcaaagaaaaggagaactggctttca

SEQ ID NO: 12518 - DNA, 600 bp, Chicken  19866894216182_1
tacattcatcagtatgtagcatcaaggtaatttttcttcaaacaatgctcaaggctgattacgtatgaaaggcaaatcattctctcatccaacagaagatggtctctgcagattggaatatcaacagagaactgtggtaaaactctttagttgtcaaagactatattatacatgggctgtaaattaatggatcttgcttctaaatacagacactcttcccattcacagaaaattgaactttttcaaaaaaggagagatattgagtattcactttctttctaaaattgtctgacagcctgycrttcctcagaaagactatgaaacaacatcagccatgttatctaaagatttctaatgtactgttcacataactgataaagccatacggatggactgaactttattggaagcaacatccgcatacgcaaaagcttgtttcctgttcacttatgatacattgccgatggctgtgactaagacgagtacatattagctatgtctgtgcatctgagtcaaggctggatatgctaatatgacatttccttaacttttgacttcctagctcttcatccataatatttttgtaacagattttttaaa

SEQ ID NO: 12519 - DNA, 600 bp, Chicken  19866894216182_2
cattcatcagtatgtagcatcaaggtaatttttcttcaaacaatgctcaaggctgattacgtatgaaaggcaaatcattctctcatccaacagaagatggtctctgcagattggaatatcaacagagaactgtggtaaaactctttagttgtcaaagactatattatacatgggctgtaaattaatggatcttgcttctaaatacagacactcttcccattcacagaaaattgaactttttcaaaaaaggagagatattgagtattcactttctttctaaaattgtctgacagcctgycrttcctcagaaagactatgaaacaacatcagccatgttatctaaagatttctaatgtactgttcacataactgataaagccatacggatggactgaactttattggaagcaacatccgcatacgcaaaagcttgtttcctgttcacttatgatacattgccgatggctgtgactaagacgagtacatattagctatgtctgtgcatctgagtcaaggctggatatgctaatatgacatttccttaacttttgacttcctagctcttcatccataatatttttgtaacagattttttaaaag

SEQ ID NO: 12520 - DNA, 600 bp, Chicken  19866894216188_1
agacagcataaaagcaaatgaaattggtgtttcgaaaataggtgggccttctggttttgaaaatatatagctatgagtattatttttcaaaactgatcaagtgtcaactcactagtattatcaaaagtaaacttaatttcaatttttgtaaaaatctctgcataaaatgtcatgattgtctggggcagaaggcaggtggacgtgcatctcacttggggggcagttcaggtatgagtactagtgcctgtccagaccaaatggctttctgcaagattttccatacacatttttggtcaaatyggtgacagtagatattctcatcagtagcattagcattgtgtgccaggccataaaccccacygaaatcaccagagtcccattaatcagtactggggactgcagttctacagaacaaagccgtaagggtgaggctcagttagcttggagcttgcatccttcaaatcagctaggtagggcatatttattagtggcagagcctttgaaagcagcacctgccttgttagcagctttgtgggcaacttgaaaatttaattttcttagtacttttgctatgatatctcatgtgggtaattgttcata

SEQ ID NO: 12521 - DNA, 600 bp, Chicken  19866894216188_2
aatatatagctatgagtattatttttcaaaactgatcaagtgtcaactcactagtattatcaaaagtaaacttaatttcaatttttgtaaaaatctctgcataaaatgtcatgattgtctggggcagaaggcaggtggacgtgcatctcacttggggggcagttcaggtatgagtactagtgcctgtccagaccaaatggctttctgcaagattttccatacacatttttggtcaaatyggtgacagtagatattctcatcagtagcattagcattgtgtgccaggccataaaccccacygaaatcaccagagtcccattaatcagtactggggactgcagttctacagaacaaagccgtaagggtgaggctcagttagcttggagcttgcatccttcaaatcagctaggtagggcatatttattagtggcagagcctttgaaagcagcacctgccttgttagcagctttgtgggcaacttgaaaatttaattttcttagtacttttgctatgatatctcatgtgggtaattgttcataaatgcacaaatatctggatatactaacagaaggggaaaaaccttgtaagacataactggaa

SEQ ID NO: 12522 - DNA, 600 bp, Chicken  19866894216189_1
ccaaggactgaaaaaatgaaattatctgtcatcatgactcagtttgttgcatgtatcacgaggagagcttaatctgataattttatacaatggaaaaatagagggttttttttccagtggtaaaaattatcattcgttagtgatgaaaattgcctatgagcctaaatttattcagattacagcccagccgctcagacatgtcagttgaataagaggcattaattaataaggaaaaaacaagcagagtattcactaatactgtaacatctagatattcagaggggggtgcatatgtgcacygggaatatctgtgtgcattagtagtagatttgtgtttactggcagaaaacacacctgcgtatttccaggctgatgaacagttacacagcactcacgaagaaatgctaccaaagtttgcacacctgctttccaaatcaaacaaaaataacctatgagtggcttaattttaacacaaattgcattactttattgaatccgtgtctcagcccagactaagtggtaccccaaaatgcatgcacatttcctcccactcatggtcatgtgaatcatctcctccttctgaggaagcatgctagatac

SEQ ID NO: 12523 - DNA, 600 bp, Chicken  19866894216191_1
agtctcagcttaaacaacttggtctcccaagtatgataagtaatggccaactagccaaagtatccatggcttcttcaatcacacggactggagatgattctgcttcctctccagtgagccagcacatgtaggagaaaaggtcagcttgctgcgctcagtctgaaatccctcctgcacactggcaatctgcagagcagctcggaaggaggagatgtcgataaagaacttgactcctgcactcggtgactttccatctctcagtctgtgagcttccaagcaagcggcacagacagctcctcrctgtgttacgggctgctggraaagccacctgggagatggggaatctctcatggctctcttaggaaagctttttttctccttctctctagacctyccctttgatctgcggtctgggaaagcaaggggtgtaagggagaggtaagcattatctttgatctgatggctcctctccttctgggctactctctgggaaaaaaaaataaaattcccccttgggaaggcaacatttatcatggcagaggctctgtgtgcgggagcgctggagaagatgctgagcatgcctgacgggcgcttgacatt

SEQ ID NO: 12524 - DNA, 600 bp, Chicken  19866894216191_2
ggtctcccaagtatgataagtaatggccaactagccaaagtatccatggcttcttcaatcacacggactggagatgattctgcttcctctccagtgagccagcacatgtaggagaaaaggtcagcttgctgcgctcagtctgaaatccctcctgcacactggcaatctgcagagcagctcggaaggaggagatgtcgataaagaacttgactcctgcactcggtgactttccatctctcagtctgtgagcttccaagcaagcggcacagacagctcctcrctgtgttacgggctgctggraaagccacctgggagatggggaatctctcatggctctcttaggaaagctttttttctccttctctctagacctyccctttgatctgcggtctgggaaagcaaggggtgtaagggagaggtaagcattatctttgatctgatggctcctctccttctgggctactctctgggaaaaaaaaataaaattcccccttgggaaggcaacatttatcatggcagaggctctgtgtgcgggagcgctggagaagatgctgagcatgcctgacgggcgcttgacattttaacacagattcgacaaag

SEQ ID NO: 12525 - DNA, 600 bp, Chicken  19866894216191_3
tgattctgcttcctctccagtgagccagcacatgtaggagaaaaggtcagcttgctgcgctcagtctgaaatccctcctgcacactggcaatctgcagagcagctcggaaggaggagatgtcgataaagaacttgactcctgcactcggtgactttccatctctcagtctgtgagcttccaagcaagcggcacagacagctcctcrctgtgttacgggctgctggraaagccacctgggagatggggaatctctcatggctctcttaggaaagctttttttctccttctctctagacctyccctttgatctgcggtctgggaaagcaaggggtgtaagggagaggtaagcattatctttgatctgatggctcctctccttctgggctactctctgggaaaaaaaaataaaattcccccttgggaaggcaacatttatcatggcagaggctctgtgtgcgggagcgctggagaagatgctgagcatgcctgacgggcgcttgacattttaacacagattcgacaaagcaactttattcaggtaaacacttaggcacatgcttttcattacccatttgctcagaattttatctaagtcttct

SEQ ID NO: 12526 - DNA, 560 bp, Chicken  19866894216219_1
taacaaccttaaacaccctaagactgtgcagcaggtgttaaatctcttctgtggatcaaaggagagactcgaactgcagttcacacaaatgtccttccttccaggagatggataaatggacacagtccagactccgaagcttaagtctacccatacatccagcacaaacacatatcaaaaaggctctgggttctactgctgatggatttggaaatttcaagaattgtcacaagagggaactgctttcctcaggtgaaaacagaggcttgggaaacaaataacaccttgtgctgctcacartacagtccacagtaccatctggtgccaaaacagaatgccttcacagtagtgccagtttgatggaaacggcgtagagcacacctaaattaaacyatcctttaggatctcactcattaatttcttcttgagcatttytccccttcactctcttctccctcccttcaaggcactttaatcaccacagctgcaagtatagctgctagctaatgctgctgtagacactgtcctgctacccatttccagcagttatgcacagctag

SEQ ID NO: 12527 - DNA, 467 bp, Chicken  19866894216219_2
cttccttccaggagatggataaatggacacagtccagactccgaagcttaagtctacccatacatccagcacaaacacatatcaaaaaggctctgggttctactgctgatggatttggaaatttcaagaattgtcacaagagggaactgctttcctcaggtgaaaacagaggcttgggaaacaaataacaccttgtgctgctcacartacagtccacagtaccatctggtgccaaaacagaatgccttcacagtagtgccagtttgatggaaacggcgtagagcacacctaaattaaacyatcctttaggatctcactcattaatttcttcttgagcatttytccccttcactctcttctccctcccttcaaggcactttaatcaccacagctgcaagtatagctgctagctaatgctgctgtagacactgtcctgctacccatttccagcagttatgcacagctag

SEQ ID NO: 12528 - DNA, 425 bp, Chicken  19866894216219_3
gaagcttaagtctacccatacatccagcacaaacacatatcaaaaaggctctgggttctactgctgatggatttggaaatttcaagaattgtcacaagagggaactgctttcctcaggtgaaaacagaggcttgggaaacaaataacaccttgtgctgctcacartacagtccacagtaccatctggtgccaaaacagaatgccttcacagtagtgccagtttgatggaaacggcgtagagcacacctaaattaaacyatcctttaggatctcactcattaatttcttcttgagcatttytccccttcactctcttctccctcccttcaaggcactttaatcaccacagctgcaagtatagctgctagctaatgctgctgtagacactgtcctgctacccatttccagcagttatgcacagctag

SEQ ID NO: 12529 - DNA, 600 bp, Chicken  19866894216227_1
tttctattagtagagacccaggggaaaaaaaaaaaaaatagaagaaaattcagatgaataggaaactcagagagaaatgcagcagacaacgtgcaatggggagctccaggcggctttgccttgctgctgaccaccggagctcataaccatccgccccattgctctgctctccgtgcttggccacgccacgcgggagggctttgtgctgctttgctcctcgtgttgagtcgctcctgttgaacaggatggaggccgttgggttaaaaactggaagtgtggacggccataaagtatcaaatscgggagcgattacgctgtcctaaatctttatgggctttaaagattaactccaacgggcagctccgcttgtttctcctcggcaggagtcaggactttaatatggagataaattaatattgatcacagtgtgtatgattaagtgggattttttggaccatttcctttcatttttctttctttccgttgctcttttcctacagacaagccgacggcattgagctgctgcaggtgtcagcaggtatggtgtcacggcgccaatgggcaatgcaatgtcccaatgaaaaggggtcccaatccctt

SEQ ID NO: 12530 - DNA, 600 bp, Chicken  19866894216228_1
acaactagaaatcactagggcaagaagaggaggtaaccgcaccttttgtcattcattccttttctttaacagacttagaagtgtttgttgctttagaagaaatctggtcattcctcactgcttggcatctgattctattccagagtaagagttccctaagttgagtgatgttaaatgtaaaacatccggggaaagcaaaaaagaacacttctgcatcctttagctgagttatctgtggtacaaactacagagtttcacctatcctacctgcagttaaatccctgatgagaagttggctgwaattcattctctttarttctttaaaaatttcataaactcctaagaacccctgtcattgtgggaaacgaacaccaaccttctacagcgcgctcaagttcaccgtgtcaggctgcagcctgcacatcctgctttaatctgctcttccagcactgtgaaaggcctgcagctagactcagtaaataaatatataaaaacgtaaactcccggagcacaagacttaatcatgtcctttcccatcctacttctgctgcatgactgaggctgtctttggcacccctccctcattatcccctgggtacc

SEQ ID NO: 12531 - DNA, 600 bp, Chicken  19866894216228_2
agggcaagaagaggaggtaaccgcaccttttgtcattcattccttttctttaacagacttagaagtgtttgttgctttagaagaaatctggtcattcctcactgcttggcatctgattctattccagagtaagagttccctaagttgagtgatgttaaatgtaaaacatccggggaaagcaaaaaagaacacttctgcatcctttagctgagttatctgtggtacaaactacagagtttcacctatcctacctgcagttaaatccctgatgagaagttggctgwaattcattctctttarttctttaaaaatttcataaactcctaagaacccctgtcattgtgggaaacgaacaccaaccttctacagcgcgctcaagttcaccgtgtcaggctgcagcctgcacatcctgctttaatctgctcttccagcactgtgaaaggcctgcagctagactcagtaaataaatatataaaaacgtaaactcccggagcacaagacttaatcatgtcctttcccatcctacttctgctgcatgactgaggctgtctttggcacccctccctcattatcccctgggtacccactgatctcagtttc

SEQ ID NO: 12532 - DNA, 600 bp, Chicken  19866894216228_3
tcataaactcctaagaacccctgtcattgtgggaaacgaacaccaaccttctacagcgcgctcaagttcaccgtgtcaggctgcagcctgcacatcctgctttaatctgctcttccagcactgtgaaaggcctgcagctagactcagtaaataaatatataaaaacgtaaactcccggagcacaagacttaatcatgtcctttcccatcctacttctgctgcatgactgaggctgtctttggcacccctccctcattatcccctgggtacccactgatctcagtttctaagaggaacttygggaagtcctgccaggcagttctgtggaaattgcctgcagagggaagggaagattcagcaccctattcctgggtgatacggtccgatccttcagttaccctgcttggctccagccagtctrcaaacgcagcttcaaaataaaaatcaagacaaaatattgyatatatcgtcccaccacacgcaccttatttaggcagctaagtgaaatacaaacatatggactccataaattcttctgtaaatggctttatgtgaaacacggagccaaagcaatggttatcattaaacactgacaacacc

SEQ ID NO: 12533 - DNA, 600 bp, Chicken  19866894216228_4
tgtgaaaggcctgcagctagactcagtaaataaatatataaaaacgtaaactcccggagcacaagacttaatcatgtcctttcccatcctacttctgctgcatgactgaggctgtctttggcacccctccctcattatcccctgggtacccactgatctcagtttctaagaggaacttygggaagtcctgccaggcagttctgtggaaattgcctgcagagggaagggaagattcagcaccctattcctgggtgatacggtccgatccttcagttaccctgcttggctccagccagtctrcaaacgcagcttcaaaataaaaatcaagacaaaatattgyatatatcgtcccaccacacgcaccttatttaggcagctaagtgaaatacaaacatatggactccataaattcttctgtaaatggctttatgtgaaacacggagccaaagcaatggttatcattaaacactgacaacaccaacgcgtaacaacttccatgcaggaccagatcctcagcagcacagctctgtttgctccgtgacaccgggctgattgacaccagcaggaaacacaatgctttgggctttgggtttgtgcact

SEQ ID NO: 12534 - DNA, 562 bp, Chicken  19866894216228_5
aaaacgtaaactcccggagcacaagacttaatcatgtcctttcccatcctacttctgctgcatgactgaggctgtctttggcacccctccctcattatcccctgggtacccactgatctcagtttctaagaggaacttygggaagtcctgccaggcagttctgtggaaattgcctgcagagggaagggaagattcagcaccctattcctgggtgatacggtccgatccttcagttaccctgcttggctccagccagtctrcaaacgcagcttcaaaataaaaatcaagacaaaatattgyatatatcgtcccaccacacgcaccttatttaggcagctaagtgaaatacaaacatatggactccataaattcttctgtaaatggctttatgtgaaacacggagccaaagcaatggttatcattaaacactgacaacaccaacgcgtaacaacttccatgcaggaccagatcctcagcagcacagctctgtttgctccgtgacaccgggctgattgacaccagcaggaaacacaatgctttgggctttgggtttgtgcactca

SEQ ID NO: 12535 - DNA, 600 bp, Chicken  19866894216236_1
gaggataatagctctgggctctgaatgtggttgctttggaatacacttacttaaaatcataaaaattagtccttatttgaacaactttaaatctattttattgttttcctttttatttctggcaatcctcagtttccaaacaaagattgttgataattgaaaaaaacacatctacgtgtcagggtacactttgtaacaaatgcaagaatgtgagctaacacaaatggcagatagaagaagcttattttcagaagaatgcattatttacatttaacatcaaactgttggaagccagaatcwtttatatttatgtatcctacagagaccacaaattttagtttacttattctttttctcatgtattttccctttctatccccatgcattgaagttttacagaagatcacactaaataaataaataaatagtttctccagtagtccctttaccttcaaaagtagcaattttctctgcagtaagataaccaaatcagttgtagtgatttgatttgacatggcgcattagctgaaatttccaaatgaatttaaacaaggtaggagcccatttctttttaagctccttgtcagttctggattttta

SEQ ID NO: 12536 - DNA, 600 bp, Chicken  19866894216246_1
aatttcccctcttttagtttaaagccattccctcttgtcctgtcgctatcagatcacataaaaactctatttccttcatgtttataagctccttttatgtactggaagcctgcagtgaggtctcccagataactttctcttctccaggctgaacgagcccacctccctcagcctgtcttcataggagaagtgctccagccctctgatcatccttgtggtcctcccctggacctgctccaacaggtccacatccttcttgtgctgggggccccaagcctggaggaagtgctacaggtgagyccgtatgagggcagggtagggaagtatgcactgaatcagagataatttacagaaagccaaatctgcccttttttccttccacctgcagcccattaacccataaaatctggaaagtaatgaagacacattgcagtttattattagatctaaaaagtcttgcagattgctggattactttcaggggttatgctggggagttcactccagcaacagttcttgagctgtagtcagcaaaccaaggatgaaaaaacagagaacccacaaaccagctcccagaggacacccagctactttcattgc

SEQ ID NO: 12537 - DNA, 600 bp, Chicken  19866894216249_1
tctgtacgctttctgtcaattccacttaattttttcagtggtgagttgaatttaacataggaaagaaatatacccctcaactacaaatgtcaccctaaaactcctgaactgcttttcttaaagctaaatgcacatggtgcttgcctcttgcctgaaacaaagcatagagaacttcaaatctcaagtaaataatttaggaaagttatgaacaattagaaaatggatgtcttgaattctgctgcagagccacagttttgtgggttgcacaaaagtaatagctgttcatgccatttttggttsagtattctgactgcaagaaaatggtgcatctgatattgctctgtaagaacataatggcagtgggtagcagcagtgaatgctcgtggttagcatgcgagacctcagtttgatcctcatctagtgcaagggtctgcctttgcatggccaacacgaggttagagatgctttaaaatcctgggaagacgttgggtaaggtgctggtcgttggagtggttgagaatggggaaccaagaggaatacagccaacagaaacrtttgctggagaataaaactagtgttgagctagagtggtatcaggca

SEQ ID NO: 12538 - DNA, 600 bp, Chicken  19866894216249_2
ttgtgggttgcacaaaagtaatagctgttcatgccatttttggttsagtattctgactgcaagaaaatggtgcatctgatattgctctgtaagaacataatggcagtgggtagcagcagtgaatgctcgtggttagcatgcgagacctcagtttgatcctcatctagtgcaagggtctgcctttgcatggccaacacgaggttagagatgctttaaaatcctgggaagacgttgggtaaggtgctggtcgttggagtggttgagaatggggaaccaagaggaatacagccaacagaaacrtttgctggagaataaaactagtgttgagctagagtggtatcaggcagattttggggagtaagcgaattgaaacctgctgcaattgcatgccaggttaaaacgttcctcttccaaatgcttccagcatcactgagttgccacagtggaacactgacagtggtgcgtgcacaatgtattatgaattacctatgtacatctaatctctattccttgacacaaaccagaccccaggctagggctcgaagagatggttatcgtaggtatgtggcaattaacatgcacaaactgctgcacaaatgt

SEQ ID NO: 12539 - DNA, 600 bp, Chicken  19866894216250_1
ctactaacagagttgccgcctttctgtaacatgtagtacaagatcggattggttttggtcagtctcggagagtctttttcataatcattcttgtccatacccgtgatcacccatctaatgggacccttctcactgggcatgggacacacactaaactggtcaggttcaagtctccccaaatgttcagggaagggtgaactggcaggactttttaccggatactgaaatgttctgtgatctacacaaccgctctgttgcacaggacttcccattaatgcattcactgaagaaatgctgaaytcgggtttattaattgttgcattgcttttgtttccttttttcttgccctcagttagtaagttattcctatgttgcgacaggtctctctcacagttttctgagagaagcagctgtttcaacacattaaagcctttactatctctagaccaactcctattaccactttcattatttgaaccatgacttacagcatatttaaattctgaatcacttctgccgaatttcagttcttgctggcttagcaaaggcccatacagtgcctctgaaggagaaatgtgattgtttgcagcatgagacaca

SEQ ID NO: 12540 - DNA, 600 bp, Chicken  19866894216251_1
aagctaacttaatcagcaaacaaacaaaataaaacctactgcttctcgaaattcagggtaaatttaaggcagtctttacgctctgtaataatctcagtctttttatgagttcatcttgggtccacctgagatcaaaagcccgcttgctgagggcattgtgcaaaccacccccaaacaagttatagtgtaaacatgggagttacataggatcagtggggatacaaggtcatagggaagtgaggtctctggttattggtcgatggcagaactgatgcaggccttcttgctttgtaacccaaygcttaagctacaggtgtctrtactgaatattttgctgcaaataatgattttttttttttttttccaaacagaaaggggcygatttccatattttttgtaagacttcttaaatacttactggggagtttgttaatctgatacgtttaaaatgaaattgcatagacaatgttagtgaacctgaagcttagtctcttgagtcatcagttgtatgaagttctcatcttgtacactttttttacactgaaagtctttcagtctttggattcctgtgaaaaggaaggaggtgctggtccctgtcag

SEQ ID NO: 12541 - DNA, 600 bp, Chicken  19866894216251_2
caaacaaaataaaacctactgcttctcgaaattcagggtaaatttaaggcagtctttacgctctgtaataatctcagtctttttatgagttcatcttgggtccacctgagatcaaaagcccgcttgctgagggcattgtgcaaaccacccccaaacaagttatagtgtaaacatgggagttacataggatcagtggggatacaaggtcatagggaagtgaggtctctggttattggtcgatggcagaactgatgcaggccttcttgctttgtaacccaaygcttaagctacaggtgtctrtactgaatattttgctgcaaataatgattttttttttttttttccaaacagaaaggggcygatttccatattttttgtaagacttcttaaatacttactggggagtttgttaatctgatacgtttaaaatgaaattgcatagacaatgttagtgaacctgaagcttagtctcttgagtcatcagttgtatgaagttctcatcttgtacactttttttacactgaaagtctttcagtctttggattcctgtgaaaaggaaggaggtgctggtccctgtcagccccatagaagcagatgttt

SEQ ID NO: 12542 - DNA, 600 bp, Chicken  19866894216251_3
ctctgtaataatctcagtctttttatgagttcatcttgggtccacctgagatcaaaagcccgcttgctgagggcattgtgcaaaccacccccaaacaagttatagtgtaaacatgggagttacataggatcagtggggatacaaggtcatagggaagtgaggtctctggttattggtcgatggcagaactgatgcaggccttcttgctttgtaacccaaygcttaagctacaggtgtctrtactgaatattttgctgcaaataatgattttttttttttttttccaaacagaaaggggcygatttccatattttttgtaagacttcttaaatacttactggggagtttgttaatctgatacgtttaaaatgaaattgcatagacaatgttagtgaacctgaagcttagtctcttgagtcatcagttgtatgaagttctcatcttgtacactttttttacactgaaagtctttcagtctttggattcctgtgaaaaggaaggaggtgctggtccctgtcagccccatagaagcagatgtttgctgttttcctcctttacagactgaacagcagtactgttaaacattgtgcttttgaatgt

SEQ ID NO: 12543 - DNA, 599 bp, Chicken  19866894216253_1
  misc_feature (1)..(72): n is any nucleotide
nnnnnnnnnnnnnnnnnnnnnnnnnnnnnnnnnnnnnnnnnnnnnnnnnnnnnnnnnnnnnnnnnnnnnnnntgaatcctgctcttttatttgttaaaaatctgtattaaatatttctcctgccgtgcaaccttaatatcctcaaatggcttatgtactaagccatcagtgcttatctctttctcatgagaatggtttatgatttgtagcacaacaaccatgcgattccaggtatttaaacgtggggcgcagcctccatgtgtttttgatttggcattcataagtagcatttagaatagyrggatgatgttgtttyggaaacatcagagcattgagccaggcrgaaggcaggttggatgctcctggaggcagccctgtgctccaggctgctgctactgtgctcagccccattatatccaaaagagtgtcagccggaggagaccatgtggcatgtcccaaggccacctgagggtcatcacttcacagctctaaagcagttaagtgttcatttatagcccacttaaaccataagtattcccagatcagacatataacatttttagcagggtactgcattcctctccatacgttatgctctt

SEQ ID NO: 12544 - DNA, 599 bp, Chicken  19866894216253_2
  misc_feature (1)..(71): n is any nucleotide
nnnnnnnnnnnnnnnnnnnnnnnnnnnnnnnnnnnnnnnnnnnnnnnnnnnnnnnnnnnnnnnnnnnnnnntgaatcctgctcttttatttgttaaaaatctgtattaaatatttctcctgccgtgcaaccttaatatcctcaaatggcttatgtactaagccatcagtgcttatctctttctcatgagaatggtttatgatttgtagcacaacaaccatgcgattccaggtatttaaacgtggggcgcagcctccatgtgtttttgatttggcattcataagtagcatttagaatagyrggatgatgttgtttyggaaacatcagagcattgagccaggcrgaaggcaggttggatgctcctggaggcagccctgtgctccaggctgctgctactgtgctcagccccattatatccaaaagagtgtcagccggaggagaccatgtggcatgtcccaaggccacctgagggtcatcacttcacagctctaaagcagttaagtgttcatttatagcccacttaaaccataagtattcccagatcagacatataacatttttagcagggtactgcattcctctccatacgttatgctcttt

SEQ ID NO: 12545 - DNA, 599 bp, Chicken  19866894216253_3
  misc_feature (1)..(56): n is any nucleotide
nnnnnnnnnnnnnnnnnnnnnnnnnnnnnnnnnnnnnnnnnnnnnnnnnnnnnnnntgaatcctgctcttttatttgttaaaaatctgtattaaatatttctcctgccgtgcaaccttaatatcctcaaatggcttatgtactaagccatcagtgcttatctctttctcatgagaatggtttatgatttgtagcacaacaaccatgcgattccaggtatttaaacgtggggcgcagcctccatgtgtttttgatttggcattcataagtagcatttagaatagyrggatgatgttgtttyggaaacatcagagcattgagccaggcrgaaggcaggttggatgctcctggaggcagccctgtgctccaggctgctgctactgtgctcagccccattatatccaaaagagtgtcagccggaggagaccatgtggcatgtcccaaggccacctgagggtcatcacttcacagctctaaagcagttaagtgttcatttatagcccacttaaaccataagtattcccagatcagacatataacatttttagcagggtactgcattcctctccatacgttatgctctttgcttgttaatacctt

SEQ ID NO: 12546 - DNA, 599 bp, Chicken  19866894216253_4
  misc_feature (1)..(29): n is any nucleotide
nnnnnnnnnnnnnnnnnnnnnnnnnnnnntgaatcctgctcttttatttgttaaaaatctgtattaaatatttctcctgccgtgcaaccttaatatcctcaaatggcttatgtactaagccatcagtgcttatctctttctcatgagaatggtttatgatttgtagcacaacaaccatgcgattccaggtatttaaacgtggggcgcagcctccatgtgtttttgatttggcattcataagtagcatttagaatagyrggatgatgttgtttyggaaacatcagagcattgagccaggcrgaaggcaggttggatgctcctggaggcagccctgtgctccaggctgctgctactgtgctcagccccattatatccaaaagagtgtcagccggaggagaccatgtggcatgtcccaaggccacctgagggtcatcacttcacagctctaaagcagttaagtgttcatttatagcccacttaaaccataagtattcccagatcagacatataacatttttagcagggtactgcattcctctccatacgttatgctctttgcttgttaataccttcagctgcactttcagacgatatcaaat

SEQ ID NO: 12547 - DNA, 600 bp, Chicken  19866894216258_1
tgcagtagatgctttgctgtctatcagaggaggaaaggactggtttgcactttaatcctgaaaggaatgttaacctcactgggaggctgcgggcaagcatgtctgagggaaaactgcaaaaaacacttccccagatgcacctgatatgcaactaaataaagcagtaactgcctggcagcttttgcagctactaaacctgtgtgttatttgagtttaatagcagaggctgaaccggctaccaaaccacagcaaatggttttgggttcagtcccatccatgaactgagtgtggcaatctgcwgtgagccaagccctcagccataactgttgtgggaggaggacttgggagcctcctctgccacccagctgcagactgagcaccccttaaaatgcctcattggtgcagaggcaggcatacactaggatttctctcttttgctattgcaggctatccattagcaaacacaagtctgcagtctgctctgaactccatggcatggctttactgggcactatcacaccctgctaaatttgaaccaaactttgtctttatttcttaatgcacagttttatgcagtgccaagcacagattgccagatgg

SEQ ID NO: 12548 - DNA, 600 bp, Chicken  19866894216270_1
catgtgaggagttcccagatccagctccctaagcagcagttacaaattactgaagtggttggttcagtactacagccacagcagtctggaaaggccttgagcacccagcagctcctctcagctccaattgttgatagatatcctgcctccctacaggctttatggatcttacacaaagtggaaagtttcagcaggaggactccagcgcatccttcttgaaggagggaaggaggagctcctacaggacacctacagctagatcatgtggctcagagcctggtccaaccttcccttccactrcaccatcgcaacacagtgaayataatctcccatgctgcaccggtctccttccatccctgctgctgaagctagaagttgaaattagtcccaggagagatcaggaagaaacccaggccattttcaacccaagccattctatgattctatgattctatgcaactgacaccaatgggattgtgatggaattcttagggggacaaaaggctcctttgctatttaaaaaggaaactcttgagaatagttttagacgccataatctgtattttcagactgtggagtgacaggctcgaagaaaagcay

SEQ ID NO: 12549 - DNA, 600 bp, Chicken  19866894216270_2
cagctccctaagcagcagttacaaattactgaagtggttggttcagtactacagccacagcagtctggaaaggccttgagcacccagcagctcctctcagctccaattgttgatagatatcctgcctccctacaggctttatggatcttacacaaagtggaaagtttcagcaggaggactccagcgcatccttcttgaaggagggaaggaggagctcctacaggacacctacagctagatcatgtggctcagagcctggtccaaccttcccttccactrcaccatcgcaacacagtgaayataatctcccatgctgcaccggtctccttccatccctgctgctgaagctagaagttgaaattagtcccaggagagatcaggaagaaacccaggccattttcaacccaagccattctatgattctatgattctatgcaactgacaccaatgggattgtgatggaattcttagggggacaaaaggctcctttgctatttaaaaaggaaactcttgagaatagttttagacgccataatctgtattttcagactgtggagtgacaggctcgaagaaaagcayatcaataccttccttctctct

SEQ ID NO: 12550 - DNA, 600 bp, Chicken  19866894216270_3
caccatcgcaacacagtgaayataatctcccatgctgcaccggtctccttccatccctgctgctgaagctagaagttgaaattagtcccaggagagatcaggaagaaacccaggccattttcaacccaagccattctatgattctatgattctatgcaactgacaccaatgggattgtgatggaattcttagggggacaaaaggctcctttgctatttaaaaaggaaactcttgagaatagttttagacgccataatctgtattttcagactgtggagtgacaggctcgaagaaaagcayatcaataccttccttctctctttatttaatgaggaacggggtttagctgaggaatttaaatgattgactgataggtatttagaattcttgagggtcataaagatcaaggcaaatggatcaatccaaaataattaattttgacaccgtgacaactgcttgctctgtttttcccctatactttgatttttttttcccttcttgaaacaccaaagtaaagaaggatcttattttacaaggaagtgcaattttaaatgtccctgtatttgacaagtgtgcttccagacagatgtaggagttgta

SEQ ID NO: 12551 - DNA, 600 bp, Chicken  19866894216270_4
tctctctttatttaatgaggaacggggtttagctgaggaatttaaatgattgactgataggtatttagaattcttgagggtcataaagatcaaggcaaatggatcaatccaaaataattaattttgacaccgtgacaactgcttgctctgtttttcccctatactttgatttttttttcccttcttgaaacaccaaagtaaagaaggatcttattttacaaggaagtgcaattttaaatgtccctgtatttgacaagtgtgcttccagacagatgtaggagttgtatctctaaaagaagyaaaaaaaacactgaaaaacagccacttcttaacttcatgattcattcatcagctggtcctttgacactttctcttaattaatagagttgttaacagaaaaagcagcaagagagacaaattaagcaagaagaaaaaaatccgttgagaaataaatgtttgatatttaattacaacagtcgtgcagtgagcatatgtgctatgccacatctcaagcaaaatcagcacatcattgtatccttgaagaagtgaccttcagaaagagcaattagctttctagcaattttccttttctattactaa

SEQ ID NO: 12552 - DNA, 553 bp, Chicken  19866894216273_1
ttttcgtgctcccagaaaagccaagcacaaagggcagttacacaaaagccaagctcaagcccctgcatgccacctcctcagaacagccacaaaggacaggagataacaaaggtggtttttcttcatcgctacactgcataatggaaaactgaacaccaagcaaatagcgccagggctcaaacctgtgtgcaaactcaaggcattccttcagcaactgcgctgggtaaatgtcccctaaggggttgttagggttgatgaggactaatactctcactctgatgccctgaaaaaagagaaacmagcagtgggagacagcagtgacaccaaactgaagttggaggatgcagcaagagcggaacgttcccttccatggaaagttggcttttggaaatcactgaattctacctgttacgtattagcatgcagattaaactgcagattttgtctcattattcatccagtgaaatgccaagatcacaccaaaaggtttgttagtgagtgaaaatcagcttaatgctcatttgaaacacccactgaccccaacaggcaagat

SEQ ID NO: 12553 - DNA, 600 bp, Chicken  19866894216275_1
ttggagtgctttccagaagctggagacattggcttgaagcctcctctcctcccttccagttggagcagggaatggagtttgtgccccatgtcccaagagcttcaattcttgtggttaactgcatggcaggtcttgcttgacctgttgagaacagaagtactcagcttatatgaaccacatgtgaccatagatgccccattccccttgaggcacccaagtccctttttagactcatacttctatgacttgcccaaggtcacactggaaatcagtggcaaagcaaagcagagcaaaacccakgcccctggcttggagctctgatctagtgcctggtttagtggttggctaccctgctcacagcagggggttggaacaagttgatctttgaggtctcttccaacccaagccattctataattctgtgattcttgccttgctgtgctcttgggttcatgtggtagcatgatggtcctgtatatcttgcacctctctgcccrcagaagttgaggagaaaaactgtcaaagggttggaccaaatggactcagaggtcctctccaacatcagccatcctgtgattctgtgatgctttcttaacagac

SEQ ID NO: 12554 - DNA, 600 bp, Chicken  19866894216275_2
attccccttgaggcacccaagtccctttttagactcatacttctatgacttgcccaaggtcacactggaaatcagtggcaaagcaaagcagagcaaaacccakgcccctggcttggagctctgatctagtgcctggtttagtggttggctaccctgctcacagcagggggttggaacaagttgatctttgaggtctcttccaacccaagccattctataattctgtgattcttgccttgctgtgctcttgggttcatgtggtagcatgatggtcctgtatatcttgcacctctctgcccrcagaagttgaggagaaaaactgtcaaagggttggaccaaatggactcagaggtcctctccaacatcagccatcctgtgattctgtgatgctttcttaacagacaactggaagatcagctgagcggtcagatcatctgatggtagatattgggcctttcagcacttttctttggtcttttccttcagcccagcataacagcagtttattgatttgactgccccagctcatggggacacaaaacctccctggtaccacatgggctgaatgtcctgatttttgttacaatttcctctgtcttc

SEQ ID NO: 12555 - DNA, 600 bp, Chicken  19866894216278_1
tactgacgctccatctctatccatccatatcctcactcaaccagaagagccacatctgtaaacgcctgtaacatgcaccttctgtattatatctgctgcttgcttctacactggctgaaatggtgattacgtgtacctagtggaacgtagatgaacttaaaccttatgaaaaaaagctctcctggagaatgggagaaacaaaacaaaactcaaatacaaatctcaaatctgcagttttggatcacagaatcatagaatacccccagttggaaaggacccataaggatcattgaatccaayacttgactccacacaggaccacacaaaatcagactgtgtaactgagagcgctgtccagacacttctagaactctggcacttggggcagtgcccactgccctgggaacctgttccaaggcccaacmactcactgstgaacaaacttttcctaacccccagcctgcctctcccctgacacagctccatgcggttcccttcggcctgtgctgcccctccactccctgtgaggagctgcagctgaggcctcccctcagctcctctgttctgcgctgagcaaacccagggacttcagctgcacta

SEQ ID NO: 12556 - DNA, 600 bp, Chicken  19866894216278_2
attacgtgtacctagtggaacgtagatgaacttaaaccttatgaaaaaaagctctcctggagaatgggagaaacaaaacaaaactcaaatacaaatctcaaatctgcagttttggatcacagaatcatagaatacccccagttggaaaggacccataaggatcattgaatccaayacttgactccacacaggaccacacaaaatcagactgtgtaactgagagcgctgtccagacacttctagaactctggcacttggggcagtgcccactgccctgggaacctgttccaaggcccaacmactcactgstgaacaaacttttcctaacccccagcctgcctctcccctgacacagctccatgcggttcccttcggcctgtgctgcccctccactccctgtgaggagctgcagctgaggcctcccctcagctcctctgttctgcgctgagcaaacccagggacttcagctgcactaaatgcttaaggattcatggatgaactgggagcaacagatctgtaaaaaaygttacaatcaataacaaatcagggtaaaggactcctaaatgggaataattacagtactggaatccacatggaagg

SEQ ID NO: 12557 - DNA, 600 bp, Chicken  19866894216278_3
acctagtggaacgtagatgaacttaaaccttatgaaaaaaagctctcctggagaatgggagaaacaaaacaaaactcaaatacaaatctcaaatctgcagttttggatcacagaatcatagaatacccccagttggaaaggacccataaggatcattgaatccaayacttgactccacacaggaccacacaaaatcagactgtgtaactgagagcgctgtccagacacttctagaactctggcacttggggcagtgcccactgccctgggaacctgttccaaggcccaacmactcactgstgaacaaacttttcctaacccccagcctgcctctcccctgacacagctccatgcggttcccttcggcctgtgctgcccctccactccctgtgaggagctgcagctgaggcctcccctcagctcctctgttctgcgctgagcaaacccagggacttcagctgcactaaatgcttaaggattcatggatgaactgggagcaacagatctgtaaaaaaygttacaatcaataacaaatcagggtaaaggactcctaaatgggaataattacagtactggaatccacatggaaggacaatcaaa

SEQ ID NO: 12558 - DNA, 519 bp, Chicken  19866894216278_4
ctgtccagacacttctagaactctggcacttggggcagtgcccactgccctgggaacctgttccaaggcccaacmactcactgstgaacaaacttttcctaacccccagcctgcctctcccctgacacagctccatgcggttcccttcggcctgtgctgcccctccactccctgtgaggagctgcagctgaggcctcccctcagctcctctgttctgcgctgagcaaacccagggacttcagctgcactaaatgcttaaggattcatggatgaactgggagcaacagatctgtaaaaaaygttacaatcaataacaaatcagggtaaaggactcctaaatgggaataattacagtactggaatccacatggaaggacaatcaaagattagacgtctttgtggtaagaataaaccatcccagtgctatttagaaaaacaatttacttttccaaagtattattgaatggaattgtcctgttttaaattaactaaaactttaaaaatcaattattatgcaaa

SEQ ID NO: 12559 - DNA, 599 bp, Chicken  19866894216279_1
  misc_feature (1)..(136): n is any nucleotide
nnnnnnnnnnnnnnnnnnnnnnnnnnnnnnnnnnnnnnnnnnnnnnnnnnnnnnnnnnnnnnnnnnnnnnnnnnnnnnnnnnnnnnnnnnnnnnnnnnnnnnnnnnnnnnnnnnnnnnnnnnnnnnnnnnnnnnnntattgtttccttttgctgaagcataacccagctctggcccacggcacacagcatcagcacaacaggcagcagtggggcacatggggcagaccacctcgtggtcaagaaactgattctttcctcattatacaacaatgcaaatgtggcaatttcctctctgctcyggttgttactcagtctccaattaattcagaaatgggccagcagtaaatatgcaagtgctagtgcggtgtaatrtgaagtctggtttattgtcaggtcgctgtttgagatggctctgattaggctctcccctcagctgtttgaacatcactgctggaatcacaggggtgaaaaggatctcatctcttctccccaaccctcaacctctgcatcgcaggaactttgaaacgtgcatttctccctattgttcttcagcctattgtggaagtgctgcagtgactaattcttgcataaatcattg

SEQ ID NO: 12560 - DNA, 599 bp, Chicken  19866894216279_2
  misc_feature (1)..(63): n is any nucleotide
nnnnnnnnnnnnnnnnnnnnnnnnnnnnnnnnnnnnnnnnnnnnnnnnnnnnnnnnnnnnnnntattgtttccttttgctgaagcataacccagctctggcccacggcacacagcatcagcacaacaggcagcagtggggcacatggggcagaccacctcgtggtcaagaaactgattctttcctcattatacaacaatgcaaatgtggcaatttcctctctgctcyggttgttactcagtctccaattaattcagaaatgggccagcagtaaatatgcaagtgctagtgcggtgtaatrtgaagtctggtttattgtcaggtcgctgtttgagatggctctgattaggctctcccctcagctgtttgaacatcactgctggaatcacaggggtgaaaaggatctcatctcttctccccaaccctcaacctctgcatcgcaggaactttgaaacgtgcatttctccctattgttcttcagcctattgtggaagtgctgcagtgactaattcttgcataaatcattgccatgacaacacctgtaatatctgctgccaaacagcaccgaggcgctcaggttcctcagctcagccaggagga

SEQ ID NO: 12561 - DNA, 600 bp, Chicken  19866894216279_3
gcacccctgggtgagcaggactgtgtcggagcagctgagctctgtgctccgtgtgcagatcttggtgccacgtgggctaaatgctaacatatcggttctcattggctgcgaagcaggcaaagttgggtgttgtgtttaattagagaccttccaacatggacttgtaaagcaatcagtaattattagggtggcgtaatcttattctgggtgtgctgcgcatcatcagcggggccatcactgtgtgacagtgatggggcatcctttatggcagcatcccttatgacaacctgaagccagctscagtttaatggcaaaacacagcaacccgtttttctcctgctcttgctagctcttctttattcattctagaaagaagaaggtctgtgaaggagaaacgcagcagagaggttactgattgctatctacagtctcgttgcaaaggaaaattcaccatcacggtgcaacaacttgcattaaatgagcactgtcaggagctgttgcagggagggctgggtgaaagacgaggtgtggcctttcacaccaacgtagaatccattcgtctgcatgggtccgtccgctgtttttcttacagctttttca

SEQ ID NO: 12562 - DNA, 600 bp, Chicken  19866894216286_1
caaatgggctatttttgttttgttgttatttaggtggttaccacatcccattacactctttctcattagcagtgttgggaaaatgtctttttagcagccatttgtggtcctggtgttacttgttttgttccttaatagtataaacatgtaagaaagaaagacaggtagattggcaggcaagtatgtgtttacgtctttgcatgactccaataacatttacatagcttatatacaaagccaaaacataaacaaacaaacaaaccaaacaaaaaacaacagcaaaaaaaaaaaaaaaaaaayccacaaccaactaacaggacagaagggacgttctcctgtggtagagagaacaaaatgccttgcttgctctcaggatgttccccacatttcctgacactgccctggcaaggtgtataggcagatccctgatacttaaagttccaggaaatatatgtgcacatactgctcttggtttccttacagaaacttctcttcctatttgatctaccagagaaactaattgatcttgcagtgtctctgtcatctactatcctagggtatataaaagaaaggaaagaaatataaagcaatggtgaagtg

SEQ ID NO: 12563 - DNA, 600 bp, Chicken  19866894216291_1
gtctcaattaggcttttaggaagtgctaattacactgaactagttggtaagaactttgtactgaagcctcaaattaggcaaagcagcctggctggcagccagagcccacagccagaagtgaataggatccaatttgacttagtcaaacttttgtcccaagtggccactgaagtccagtaagaggtcaaccacaattccctgtttgcaccaaaaaaaaaagggacagaatattagtatagtccccaggttcctaaatattcaccttgcttagcatttcagggtaatgcagctcttccccartttttggaacaggccattttttcccactattacatttctttgagtccaagtataaaacagaaacaacaataaattattatccatgtttgttgtcactgctgagtttgagtccctcattttggtgagatgaatttgtctgatgtcacacattttcctcatgatgttttctgtgttttagttttatagaaaactaaagagagaattaygtataacgtgccagatcttcatttgatggaaagtgatggaagtcaggacaactctaatttgaccaagtgaaaaacaagacaatttacaggagaa

SEQ ID NO: 12564 - DNA, 600 bp, Chicken  19866894216291_2
accaaaaaaaaaagggacagaatattagtatagtccccaggttcctaaatattcaccttgcttagcatttcagggtaatgcagctcttccccartttttggaacaggccattttttcccactattacatttctttgagtccaagtataaaacagaaacaacaataaattattatccatgtttgttgtcactgctgagtttgagtccctcattttggtgagatgaatttgtctgatgtcacacattttcctcatgatgttttctgtgttttagttttatagaaaactaaagagagaattaygtataacgtgccagatcttcatttgatggaaagtgatggaagtcaggacaactctaatttgaccaagtgaaaaacaagacaatttacaggagaagaggtacagaagcaatctaatatacctttcactttaatcatgtgcttttctgcagataagtaaaattctcaagatatatgatcacgtatcccataaacatcctgtatatttggtgagttatgctttattaaggtatgcatggcaacttactttctgatatttatcctgttaaatctatttcagtttcgtactgcatgtttcctaaa

SEQ ID NO: 12565 - DNA, 600 bp, Chicken  19866894216293_1
ttttaggaatgctttgcaccgctccactgaacctagacatgcgtgaggctccaccatggctctaaacacagaaggtgaaatacaacacagatcatctccagaaggcacatataagcttccacacaagaagcagggagttcttccttccaatattacactggtaaccaagcatcacctccaccaagtcactgtgatagacttgctactgcaactgttcctactggagcaaggtgagaatcagaatagggcagcattccctgtgtttctaagattaagggtcagcatagcttactctggtaygtcccctgcatggagctgattggctatgcccctctaggaagttcagatgacatcagaggaaattcatagaaagatgaaacaggtggctcttgagcacctcattcatacatagctttgcaacatcctagatattgaagtgttaatcataagtaattttgtcaatcaactggacttgctgtatacagccgaaggtggaaggaggtttttaccwtktactgtagccacaaacacctcctgataagtgcctttattcaagccagctccaggctgtcacttaggctgcgaccccattctcagctt

SEQ ID NO: 12566 - DNA, 600 bp, Chicken  19866894216293_2
ctgttcctactggagcaaggtgagaatcagaatagggcagcattccctgtgtttctaagattaagggtcagcatagcttactctggtaygtcccctgcatggagctgattggctatgcccctctaggaagttcagatgacatcagaggaaattcatagaaagatgaaacaggtggctcttgagcacctcattcatacatagctttgcaacatcctagatattgaagtgttaatcataagtaattttgtcaatcaactggacttgctgtatacagccgaaggtggaaggaggtttttaccwtktactgtagccacaaacacctcctgataagtgcctttattcaagccagctccaggctgtcacttaggctgcgaccccattctcagcttcagtaatataactactcctcctccaccctatgacctccattaaagacagtaacagggaagaccaggaacacacaagcctccatgctacagtaactctctatatgacccctcctcttctggatgaaaataattgctttttatccacggagaaagcacttgatggactgcatgagaaagttcatgagaagcctctgaacagttgctctgtgaa

SEQ ID NO: 12567 - DNA, 600 bp, Chicken  19866894216293_3
gttcctactggagcaaggtgagaatcagaatagggcagcattccctgtgtttctaagattaagggtcagcatagcttactctggtaygtcccctgcatggagctgattggctatgcccctctaggaagttcagatgacatcagaggaaattcatagaaagatgaaacaggtggctcttgagcacctcattcatacatagctttgcaacatcctagatattgaagtgttaatcataagtaattttgtcaatcaactggacttgctgtatacagccgaaggtggaaggaggtttttaccwtktactgtagccacaaacacctcctgataagtgcctttattcaagccagctccaggctgtcacttaggctgcgaccccattctcagcttcagtaatataactactcctcctccaccctatgacctccattaaagacagtaacagggaagaccaggaacacacaagcctccatgctacagtaactctctatatgacccctcctcttctggatgaaaataattgctttttatccacggagaaagcacttgatggactgcatgagaaagttcatgagaagcctctgaacagttgctctgtgaaac

SEQ ID NO: 12568 - DNA, 573 bp, Chicken  19866894216293_4
ctcctcttctggatgaaaataattgctttttatccacggagaaagcacttgatggactgcatgagaaagttcatgagaagcctctgaacagttgctctgtgaaacagtttaccacactatctttcatttcagaaggcaatgcccagctcagaggtttaagttctgccttgcgaggccaaagcaacacgtagaggaggtctcagcttgaaaactttagatcatgcacaaccaatgaaggcacaccactaccatgagctcctctcaaccagttctgttggatgacattcagcaccaaaaccyccttcactgtggggagctggcactgaattaatcccaaactgtcagcaatcactttctcagtcatagctctactatggcatgacagaacaaagactgctgggagccaaaaaggtaatggtgtgcaatttcccagtgccatcagaccttttactaagtcatcatcgacctcagcaaaacagacatcaaacacaggttgaacagaatcacacctgggagcatgctggctttgaaaagcacttgagcaagtattaaataggatgaaccatgctgcca

SEQ ID NO: 12569 - DNA, 600 bp, Chicken  19866894216296_1
tgaggcgtttttcattttgtaacatcaaagtcggctcctcttctttgatgtcttcacatgctgtttaaggtaaagcatgaatgaagaaatgtcaatctgcaaggtgtccatgtagtttatgctgaacactgaagaggacttgtagataaaaggcaaacacaaggtttgataatgaatgtccaacaaggaggtgtgcatatctaaaaggaaacactcagttggagaacagctctgcaaaccttaaaactctgcttaacccaagtttaagagattaaggaaaaagtgggattttttttaaastggggaaccaggacaaccaagacaggaattctgtaaaaatccttgttgttttgtaagaaaggcttttactcaacagtcataaatgtgccacccactgtgcttaatgtgataatgtgtaattttcagaaggtttggagtcagtgccagggaaagcagcacagaggggactacaaagcagcacggcgtatctgagaagtttgtggtggttgctttgtggtgcctcatgtctcaaaacttgcagaagtcgtgcactgaattaaatgaagcaaagtgtcaattagagacaaatagtgtcaaata

SEQ ID NO: 12570 - DNA, 599 bp, Chicken  19866894216298_1
  misc_feature (1)..(138): n is any nucleotide
nnnnnnnnnnnnnnnnnnnnnnnnnnnnnnnnnnnnnnnnnnnnnnnnnnnnnnnnnnnnnnnnnnnnnnnnnnnnnnnnnnnnnnnnnnnnnnnnnnnnnnnnnnnnnnnnnnnnnnnnnnnnnnnnnnnnnnnnnnctcgctgccccagcgcccgcccggcgggaggagcgctgcggtgcgcccctcagcacagggggagtgtcggccggagctgaggaggcgggctgggtcctgcgggctccgttagctgtccagagagagaacgcgccgcagtgatgggaagaatgcgaatgcctmtttagaggcgggactgggtaagcggcagctattccagcctgctgtgggtttcagaagtctcagccgcgtttttgtttcggtgctcgcggcggctgggtgcgggcatctgtgcgcagcctgaagtgggcgctgccgcgggacggccggccttcctggtgtcccctcgtaccgatcgctggttaactacgtgaggacacggtgctacctcctcaggcttagggtgtcgcctcttttaggcttctaagagcagatgaaatacatctgttcgttcgagatggaagtcaatgaggtgttgactt

SEQ ID NO: 12571 - DNA, 600 bp, Chicken  19866894216300_1
gtcccactgctgtgtcaatctagttgtgaaagcgctagggtactcacagggagtgagtgcacaggtagctgtgctgccttcagctgtgccaggcttcacaaaaacgttctgccctcagaagtgctgcatgtggacctctgcaggcccctggtactggcaatgtacagcgagccctaattctattcagctttactgtttttggtttccagatatgagcatcctcgcttaccctactcccccaaaaccggatcatataatcatagcataatttgtgttgggactcttaaaggtcgtctagtygatctcccctgcaatgaaaagacatctgcagctagatcagggtgctcacagcttctccagcccaacctcccctgtccccaagaaacaggacatcaatcacctctgtgggcaacctgttccagtgcttcactaccattatagtaatttttttttcttttatccagttgaaatcacacgtcttttcactcaaagccatttctccttgtcctgtcacaacagactctgctaacgagtttgtccccttctttcctgtagctcccctttagatgcggaagggctgctctcaggtctccccagagc

SEQ ID NO: 12572 - DNA, 600 bp, Chicken  19866894216307_1
cccactgatggggtgagctctcaggcacttgtataattgctgctagctgctggtgctaaattgttggcttgaagaggattgtgcagtctgcacctgatagctgagtactgccacagaaacttcagtttaattgcttatgggactggacatacatacgaaaagaatggagttcaaataatttagccgtaaaggaaatactcttgcattaaaataaggttattatgtagcaaaattaagctacatatgtttgagtataagcatatatagcttaggttttgaacacctgagggattcttcccyctggatgtctattactgatgacagtgcagcatcagaagtgcctagcgggttctctgagcacgacaaataaggatggctgtaagtaacggcctccaaagctgtgtttcctgaaatgcagcccacacacactgccactgcaatcaaacctcctttatattaaaccctcgtactctcccggttyctttccttctgcattcccaccttcctgccccttggcattggttcacactgtgtgttatgaaagttgtctctgaagctggcccaaggagttgtgcacattatttacatcacaacagagcc

SEQ ID NO: 12573 - DNA, 600 bp, Chicken  19866894216307_2
agccgtaaaggaaatactcttgcattaaaataaggttattatgtagcaaaattaagctacatatgtttgagtataagcatatatagcttaggttttgaacacctgagggattcttcccyctggatgtctattactgatgacagtgcagcatcagaagtgcctagcgggttctctgagcacgacaaataaggatggctgtaagtaacggcctccaaagctgtgtttcctgaaatgcagcccacacacactgccactgcaatcaaacctcctttatattaaaccctcgtactctcccggttyctttccttctgcattcccaccttcctgccccttggcattggttcacactgtgtgttatgaaagttgtctctgaagctggcccaaggagttgtgcacattatttacatcacaacagagcctgggggcatcaggcaggttgggggcctggtgtgccagctgctattcagcctttaagcacaaagccttagtcttagtctgacccaaagagatttctatcttgaatttcaacaggtagatggacagagatgattgtttcgctgatgcttcagactgcaccattccagttgctgtgagtagcag

SEQ ID NO: 12574 - DNA, 600 bp, Chicken  19866894216308_1
cccagataattcatggaagcagaacactgagctgttaatggcttaacttagctgagagggtttctttggaaagagaaaaagtaaatgtgaagtgattcccatctctttgcatgtttttgaggctgtgatctgtgggtcatttagtgctcactatgtcctgcaatatatatatttctgtcttggaatatttttcttaagcttctgtttagtgttaagatgctgcttttattaacgcctctctttgatcattgaaaacacatagtctcagcttaagagaaaaaaatgttctgcaaaaattamaactaatgctttgtaacttcacatctggaaagggagtaaaacagagctaggccactactgggactgaaatgttcttgcaaaaagcattcattttgcagaaaacagtttgctcatttagaaagccagcacactccttaatgctaaactggttttgagcagctttcctagcctgctgttgggcagcagcccttgatatggctgattctgtgcttcaggagatgcactygatcactttggcctctaaagaggcttttttctgcaagagtggtttgtttgtgggtttatttaaatgtaaaacag

SEQ ID NO: 12575 - DNA, 600 bp, Chicken  19866894216308_2
tattaacgcctctctttgatcattgaaaacacatagtctcagcttaagagaaaaaaatgttctgcaaaaattamaactaatgctttgtaacttcacatctggaaagggagtaaaacagagctaggccactactgggactgaaatgttcttgcaaaaagcattcattttgcagaaaacagtttgctcatttagaaagccagcacactccttaatgctaaactggttttgagcagctttcctagcctgctgttgggcagcagcccttgatatggctgattctgtgcttcaggagatgcactygatcactttggcctctaaagaggcttttttctgcaagagtggtttgtttgtgggtttatttaaatgtaaaacagtccgcaaatttgattattgctggatattctaaatctactaaatgagagcctcattaagctgtgtgtgtgtgtgtttattttttttacactgtattaggcagaggactggtttcttaagttgaagaaatttaagagaatgttatataagaagcatactgtactgcatacttatgtgaaaataactattaaacaaattggtagattactcttattctcttctgtatat

SEQ ID NO: 12576 - DNA, 600 bp, Chicken  19866894216309_1
ggctgtagttgtctgtagttgtctttgtttccacacaaagagaaaacaacaaagacatatctggaaatagagcatctctaaacattctccttggggtttttttctgtggttgtgtaggaagtccagtagctattaagtattcacgagcagctcatcaggtcagtagacgaaaggagataaaattggttcaaagacaggtcaagaaaggtgcttgcatgtagaaatgaatcccatgcaattctattctaatgagcgttttcccagcttctcttgtgagagaagccttctgctagggtaacrtttagtccagcgcaacacattccctttgtctaggagtcggcggggggagggaacagaagctcttcaggctgtagaagttgtatttaataggattcacagaagagatttagggagctaatcatccttatagctgctcaagttcaatttttatcccccaaagctactaaattttttaagcgtgtatttttggcagtagtcttcagaaaatatctccccttggagcgcactgaattctgtaggctgtattacataaatgaggtttttgccatctctgtaacacccaaatcctaatgagacgta

SEQ ID NO: 12577 - DNA, 600 bp, Chicken  19866894216309_2
aattctgtaggctgtattacataaatgaggtttttgccatctctgtaacacccaaatcctaatgagacgtataacatctaaatgctagtgagacgtgtatatatagctaggtattcccatcctcatctcaacaggctgacctagtcctagcctcccacttttaaagccagaagaagacagctgttccacataaggccagggacacagtgacacgtggctctacagtgcctggatgccaagatccagaactggaagtgattgcaccaggtgccccaggagtcttatccaagcaggaagggrcccaggtgtccacatcagggttcaaaacaaatggcaccctcactcccagccagccagcggatataccacaggtgaaagtatgtctgattgtttgtatatttatactcatattccatatggagggaaaagaatgggcaaatgaaaagcaagccaagaattactttgcatatgtttatccctctctgtatgtgctctgctgtgggtacaacttcctttaaatgaatagagcaggaggaacactgtccactttggacaactggaagatgttcagtcctatttcaggactccttatattctgta

SEQ ID NO: 12578 - DNA, 600 bp, Chicken  19866894216310_1
tgccaaacggagaagtgctgctttctctttctgtgcttttccatgcttcttggctgcccttagggcctgtctgtgagacagcagcacagacagggtggtctggagcatgcggcctcggctgtgtccctcctgtcctctctgttggggcttctggtgtgaactagtcgttcatattctgggctttgtgggcctcgttttgagccttttcctttgaatggagctttaatggcagctgctcaactcggcaacatcttgtacaaagggagctcactcagctgagagctgagattgttcctagcyctgacatcttctgttagtgtaaatctgcaggattcttgttttgctatataaactaactagcgtcgatttttgtcaactgagatgttcgagataacctgagcagcaaaaatgaagtctttgggctggtaatgtttgaccagctcgcccatcatcttgcttggcagaaaatgcatttcttactggaacaaagcagttaggccaggaaggctctgggcagctgttcagcaaggtgggtgggtggcagtcactcctcccgggatgcagagccaggaccaggaggttcagtcctgatgacagagc

SEQ ID NO: 12579 - DNA, 599 bp, Chicken  19866894216320_1
  misc_feature (1)..(49): n is any nucleotide
nnnnnnnnnnnnnnnnnnnnnnnnnnnnnnnnnnnnnnnnnnnnnnnnntcagcaagcatcagtgagtatcaatgggtgccatttttccttatggaggaattcagtgacacaccttttcttcattcacacttccatgcagacaccattctgtcagactgccccccctgctgccatttgtcacacaacaaaatttaatggaatattggtgggaaggttcaacctcccactgccatcccaccaacatccatctctggtatcatgggccaatgtaataacatgagaggcattactttgggagmagcaagagcaaaaaacacagctagctcaggtttctgtcatcatagaaaatgataattgaagaaggactaggtgttggtcagacttcattaaatggtgctttttcctccaatagaggagttatcagttgcattaaaacataacctgctctttttgtttggtttctaaaaggagcctgtgctccttgtgattgattccctgatgaagctgactcccttcctacactaagcttgctttgtgaactgtgaaagctgttttaatatatccccttttattgctccaaaatacatgaatcatgcta

SEQ ID NO: 12580 - DNA, 600 bp, Chicken  19866894216322_1
atgagctgtggatgcccagccaaagtcatgtccacctgctactgcagatgtaactctatattcacgagcagatgctaaacctttgtgtcctgagaaggctctgaagtaaaaggagcatgggatagcaatggctgcctaagacaccagcctggcccagcagtcttgatagacagggaaagaagaagcaaactgtggccttgccaggtgaattgtgctaggttcactgttccatcaagtcctccatttcatcaccctgagttctcccagcttgcccttgaaactgggagcgatggggatccyccagagatctgycccrctattctgactgctcaggtcsttcctcaggaatggtctcaatcttcagtcctgcatttgaagcccattatttcctggcgtggccacaagcagggagaaatagtctctcttgctttctgcaatccgttatagccttacctatgtgtctctctgactctccatcgtaggctgaacaagctttccctcccagcctgctgtaataccatcctttattgaaaaccttagcttctgggaacattgatgtcattttaaaggtggtttataatcatgatggctgtggaaaaa

SEQ ID NO: 12581 - DNA, 600 bp, Chicken  19866894216322_2
tgcccagccaaagtcatgtccacctgctactgcagatgtaactctatattcacgagcagatgctaaacctttgtgtcctgagaaggctctgaagtaaaaggagcatgggatagcaatggctgcctaagacaccagcctggcccagcagtcttgatagacagggaaagaagaagcaaactgtggccttgccaggtgaattgtgctaggttcactgttccatcaagtcctccatttcatcaccctgagttctcccagcttgcccttgaaactgggagcgatggggatccyccagagatctgycccrctattctgactgctcaggtcsttcctcaggaatggtctcaatcttcagtcctgcatttgaagcccattatttcctggcgtggccacaagcagggagaaatagtctctcttgctttctgcaatccgttatagccttacctatgtgtctctctgactctccatcgtaggctgaacaagctttccctcccagcctgctgtaataccatcctttattgaaaaccttagcttctgggaacattgatgtcattttaaaggtggtttataatcatgatggctgtggaaaaagctgaaataact

SEQ ID NO: 12582 - DNA, 600 bp, Chicken  19866894216322_3
cagccaaagtcatgtccacctgctactgcagatgtaactctatattcacgagcagatgctaaacctttgtgtcctgagaaggctctgaagtaaaaggagcatgggatagcaatggctgcctaagacaccagcctggcccagcagtcttgatagacagggaaagaagaagcaaactgtggccttgccaggtgaattgtgctaggttcactgttccatcaagtcctccatttcatcaccctgagttctcccagcttgcccttgaaactgggagcgatggggatccyccagagatctgycccrctattctgactgctcaggtcsttcctcaggaatggtctcaatcttcagtcctgcatttgaagcccattatttcctggcgtggccacaagcagggagaaatagtctctcttgctttctgcaatccgttatagccttacctatgtgtctctctgactctccatcgtaggctgaacaagctttccctcccagcctgctgtaataccatcctttattgaaaaccttagcttctgggaacattgatgtcattttaaaggtggtttataatcatgatggctgtggaaaaagctgaaataactcacc

SEQ ID NO: 12583 - DNA, 600 bp, Chicken  19866894216322_4
gctactgcagatgtaactctatattcacgagcagatgctaaacctttgtgtcctgagaaggctctgaagtaaaaggagcatgggatagcaatggctgcctaagacaccagcctggcccagcagtcttgatagacagggaaagaagaagcaaactgtggccttgccaggtgaattgtgctaggttcactgttccatcaagtcctccatttcatcaccctgagttctcccagcttgcccttgaaactgggagcgatggggatccyccagagatctgycccrctattctgactgctcaggtcsttcctcaggaatggtctcaatcttcagtcctgcatttgaagcccattatttcctggcgtggccacaagcagggagaaatagtctctcttgctttctgcaatccgttatagccttacctatgtgtctctctgactctccatcgtaggctgaacaagctttccctcccagcctgctgtaataccatcctttattgaaaaccttagcttctgggaacattgatgtcattttaaaggtggtttataatcatgatggctgtggaaaaagctgaaataactcacccaccaggattcacacagcaga

SEQ ID NO: 12584 - DNA, 599 bp, Chicken  19866894216328_1
  misc_feature (1)..(88): n is any nucleotide
nnnnnnnnnnnnnnnnnnnnnnnnnnnnnnnnnnnnnnnnnnnnnnnnnnnnnnnnnnnnnnnnnnnnnnnnnnnnnnnnnnnnnnnnctccctgctgcaagttatgccattatagaatatagatatggaagaaacctattagattagccgttccacctactgatgtgggattgttccctggagaacttttttcatcagtggatcacagcacaactttgtgggcacgctgtgccaagaccatcttggttttgttctgcttttccccccatcctttccctctggtgccaagagagctgccrgggatgtggttggtaaggagaaaatgggattctttagttttgtggtcacacgggtggttcagatgcttgagtgtgtacttatttatgtgaatacttaatttctgtacttctttaattagtacccaagttcagacaactagatggggatgaggatggasagagtgccttattcaacgtcattcactgtatgacctgctgaagcccagtgatcctttatagaatatcaccttcacggtttgccctgattctgcagtrtcctctgatgtagtctccattttgccttctgcattcactcattt

SEQ ID NO: 12585 - DNA, 600 bp, Chicken  19866894216328_2
tactgatgtgggattgttccctggagaacttttttcatcagtggatcacagcacaactttgtgggcacgctgtgccaagaccatcttggttttgttctgcttttccccccatcctttccctctggtgccaagagagctgccrgggatgtggttggtaaggagaaaatgggattctttagttttgtggtcacacgggtggttcagatgcttgagtgtgtacttatttatgtgaatacttaatttctgtacttctttaattagtacccaagttcagacaactagatggggatgaggatggasagagtgccttattcaacgtcattcactgtatgacctgctgaagcccagtgatcctttatagaatatcaccttcacggtttgccctgattctgcagtrtcctctgatgtagtctccattttgccttctgcattcactcatttgtgagcagatggagacagttttaattgcttgtcagccagtggaggcagcttggcatttttctgcttttgctggacagttgatcaagttgctcaaaacttgatttgttgttctagggcagcattctaggttaggattagggttaagattagggtcagggt

SEQ ID NO: 12586 - DNA, 600 bp, Chicken  19866894216328_3
tgcttttccccccatcctttccctctggtgccaagagagctgccrgggatgtggttggtaaggagaaaatgggattctttagttttgtggtcacacgggtggttcagatgcttgagtgtgtacttatttatgtgaatacttaatttctgtacttctttaattagtacccaagttcagacaactagatggggatgaggatggasagagtgccttattcaacgtcattcactgtatgacctgctgaagcccagtgatcctttatagaatatcaccttcacggtttgccctgattctgcagtrtcctctgatgtagtctccattttgccttctgcattcactcatttgtgagcagatggagacagttttaattgcttgtcagccagtggaggcagcttggcatttttctgcttttgctggacagttgatcaagttgctcaaaacttgatttgttgttctagggcagcattctaggttaggattagggttaagattagggtcagggttttattagctcccataaaactctgagcttggcattctgcacagttgtgcccactgctggggagctttcagatgggttttattctccaaacgtttcac

SEQ ID NO: 12587 - DNA, 600 bp, Chicken  19866894216332_1
gagggttttatggtgattactctgacttagggctctatttggagaaaaaggaataggagagatttcagccaaagatcacattgttctgtgcttgacacaggctggaaccaatatttctggttatgttagaggagaaaataagttagtgtggaatcatatgtagaagaaatggacaaatcaaaaggaaagttcaataatgtcagtgtatcaaacattaggttaatggtgctcattgtcaaggctgataatggaatcgtaatgactggattcatccttatatttcaatatagacttcatatmtctttatcagagacaaaatatcagtgattaaacttaatgctggacacaacggactaaggaggcctttaaagttcttttcaacttatgttatttcaggcttgtcctgtgtgtctctcctttcaccctaagagataaacagtattatttcagtctgggaaaagtctgcatttcagactgccagaatacacacatcattctggaagttagaacgttcattaaatgtacttaagcaaatcattcttgttcatgttttatccttacgcttgtattctcataagatgatatatttccattatcttt

SEQ ID NO: 12588 - DNA, 600 bp, Chicken  19866894216337_1
gtgagattggaccaaaaacgcagagagtggttgctgtgccttactgtgatttgctttgcgtcacgacccctcccagcgcctaatctgcaaggcaggcgcagcgtgccaggcacgtacaggaaagagatggctacaggctggggctttctttccttctctgtcttttttttttttttttaaattaagcacaaacgttccttgtgacttggctcgtgcccatctcaggggagctcacgtcaggcaggcaccaatgcagagccgcctcccgcagccatcagtgccaggatgcatgacgcagcrcagagcccrgctctgggcatacagcactgggagagccgtttccccagggctgccagggggtcccagttggggtcatggccactctatgcttggaagcatttccaggcagcccartgctggcctggcacacgtgctggatgcctatgagatgcgtcaccatgttgtgccacagcagtaagttagccgcgtgcagagccttgttgctcagggccagattgggtttagagaagatgcacagtgagatctgcatgaagagctgatttgccagctgtggggtttggatcagcccagaaacgagca

SEQ ID NO: 12589 - DNA, 600 bp, Chicken  19866894216337_2
gaccaaaaacgcagagagtggttgctgtgccttactgtgatttgctttgcgtcacgacccctcccagcgcctaatctgcaaggcaggcgcagcgtgccaggcacgtacaggaaagagatggctacaggctggggctttctttccttctctgtcttttttttttttttttaaattaagcacaaacgttccttgtgacttggctcgtgcccatctcaggggagctcacgtcaggcaggcaccaatgcagagccgcctcccgcagccatcagtgccaggatgcatgacgcagcrcagagcccrgctctgggcatacagcactgggagagccgtttccccagggctgccagggggtcccagttggggtcatggccactctatgcttggaagcatttccaggcagcccartgctggcctggcacacgtgctggatgcctatgagatgcgtcaccatgttgtgccacagcagtaagttagccgcgtgcagagccttgttgctcagggccagattgggtttagagaagatgcacagtgagatctgcatgaagagctgatttgccagctgtggggtttggatcagcccagaaacgagcaagggagaaa

SEQ ID NO: 12590 - DNA, 600 bp, Chicken  19866894216337_3
tacaggaaagagatggctacaggctggggctttctttccttctctgtcttttttttttttttttaaattaagcacaaacgttccttgtgacttggctcgtgcccatctcaggggagctcacgtcaggcaggcaccaatgcagagccgcctcccgcagccatcagtgccaggatgcatgacgcagcrcagagcccrgctctgggcatacagcactgggagagccgtttccccagggctgccagggggtcccagttggggtcatggccactctatgcttggaagcatttccaggcagcccartgctggcctggcacacgtgctggatgcctatgagatgcgtcaccatgttgtgccacagcagtaagttagccgcgtgcagagccttgttgctcagggccagattgggtttagagaagatgcacagtgagatctgcatgaagagctgatttgccagctgtggggtttggatcagcccagaaacgagcaagggagaaaatcaaacttgctttccattatcctggatgataccaagtgttttgtttcagccacaataattttgctcatctttggagtactgaatattttaaacatatacattaa

SEQ ID NO: 12591 - DNA, 600 bp, Chicken  19866894216341_1
gcagacatttcaggctatagaacctttttttggttctttaaatcagtaacagaattatgtagcatcaacctagatctaataaaagcttaactactaatttaatagtaaatattagaaaggtatgttcctgtttctagtaaaggtatcgtggcttgctttagttgcttacaggagagtcagtgcagtataagcagacattaaaatcggaacgatgtatttaaatatggcagcagtgatttcatgagggatactatggtctgttcccagcagagctttaaacctcattcaagtctttgttcktctgtctttatagtgatgttttacaagcttctgcaagtacattttttccttagcgcacacattasaacttgtgagctcctgggcagcatgtgtgatgctcatttccctcttgtgctgagcgtggatgtgttagcatgcagaagtgatggcaaaatacctatccccatgacttgtgtttcttaatttgttttcttgactgaagattttggtattacaatataccacagagatattctgcccaagcatagattttaattttgcatatgctttgcggtacaraatgagagtttgtagagcatt

SEQ ID NO: 12592 - DNA, 600 bp, Chicken  19866894216341_2
caacctagatctaataaaagcttaactactaatttaatagtaaatattagaaaggtatgttcctgtttctagtaaaggtatcgtggcttgctttagttgcttacaggagagtcagtgcagtataagcagacattaaaatcggaacgatgtatttaaatatggcagcagtgatttcatgagggatactatggtctgttcccagcagagctttaaacctcattcaagtctttgttcktctgtctttatagtgatgttttacaagcttctgcaagtacattttttccttagcgcacacattasaacttgtgagctcctgggcagcatgtgtgatgctcatttccctcttgtgctgagcgtggatgtgttagcatgcagaagtgatggcaaaatacctatccccatgacttgtgtttcttaatttgttttcttgactgaagattttggtattacaatataccacagagatattctgcccaagcatagattttaattttgcatatgctttgcggtacaraatgagagtttgtagagcattataatgaacttaggcctgctgtaattccagcctgagttttacctgccccgcagttacaacagaat

SEQ ID NO: 12593 - DNA, 600 bp, Chicken  19866894216341_3
cctcattcaagtctttgttcktctgtctttatagtgatgttttacaagcttctgcaagtacattttttccttagcgcacacattasaacttgtgagctcctgggcagcatgtgtgatgctcatttccctcttgtgctgagcgtggatgtgttagcatgcagaagtgatggcaaaatacctatccccatgacttgtgtttcttaatttgttttcttgactgaagattttggtattacaatataccacagagatattctgcccaagcatagattttaattttgcatatgctttgcggtacaraatgagagtttgtagagcattataatgaacttaggcctgctgtaattccagcctgagttttacctgccccgcagttacaacagaatcctcrtaggtgtagccctctgygcagttttctttcccagagcaattagttgttgagttgcatgccttttaaatgtgcccctgatgagttcacaggcagtttgctgcctgcctgtgattccgccttgtttgtaccactcatttgtgcacaaagcagagaagaaatcagcagcataatgtgggacttgcaggattttcctaagcctacatttctgt

SEQ ID NO: 12594 - DNA, 600 bp, Chicken  19866894216341_4
gtgagctcctgggcagcatgtgtgatgctcatttccctcttgtgctgagcgtggatgtgttagcatgcagaagtgatggcaaaatacctatccccatgacttgtgtttcttaatttgttttcttgactgaagattttggtattacaatataccacagagatattctgcccaagcatagattttaattttgcatatgctttgcggtacaraatgagagtttgtagagcattataatgaacttaggcctgctgtaattccagcctgagttttacctgccccgcagttacaacagaatcctcrtaggtgtagccctctgygcagttttctttcccagagcaattagttgttgagttgcatgccttttaaatgtgcccctgatgagttcacaggcagtttgctgcctgcctgtgattccgccttgtttgtaccactcatttgtgcacaaagcagagaagaaatcagcagcataatgtgggacttgcaggattttcctaagcctacatttctgtggccatttaatttctttttctccttctgttcagtgtgaacccagcgctagagaaaaagtctttggrggctaaaatagaacaaaacttattc

SEQ ID NO: 12595 - DNA, 600 bp, Chicken  19866894216341_5
atgtgtgatgctcatttccctcttgtgctgagcgtggatgtgttagcatgcagaagtgatggcaaaatacctatccccatgacttgtgtttcttaatttgttttcttgactgaagattttggtattacaatataccacagagatattctgcccaagcatagattttaattttgcatatgctttgcggtacaraatgagagtttgtagagcattataatgaacttaggcctgctgtaattccagcctgagttttacctgccccgcagttacaacagaatcctcrtaggtgtagccctctgygcagttttctttcccagagcaattagttgttgagttgcatgccttttaaatgtgcccctgatgagttcacaggcagtttgctgcctgcctgtgattccgccttgtttgtaccactcatttgtgcacaaagcagagaagaaatcagcagcataatgtgggacttgcaggattttcctaagcctacatttctgtggccatttaatttctttttctccttctgttcagtgtgaacccagcgctagagaaaaagtctttggrggctaaaatagaacaaaacttattcatcaaaagcaaatccta

SEQ ID NO: 12596 - DNA, 600 bp, Chicken  19866894216341_6
ccccgcagttacaacagaatcctcrtaggtgtagccctctgygcagttttctttcccagagcaattagttgttgagttgcatgccttttaaatgtgcccctgatgagttcacaggcagtttgctgcctgcctgtgattccgccttgtttgtaccactcatttgtgcacaaagcagagaagaaatcagcagcataatgtgggacttgcaggattttcctaagcctacatttctgtggccatttaatttctttttctccttctgttcagtgtgaacccagcgctagagaaaaagtctttggrggctaaaatagaacaaaacttattcatcaaaagcaaatcctacagtgatagatgccttacaagtgcggataggtattctgcagaagtagctatcactcagaaaatcatttagttctgctcatttgggggagcataaacaccattaatttagcctggtgttttagtcttgcttctggaatataaaatactgagaagtactattgcttcattttagatctaagaaaatcgagagggytccaagataacaaatagcagtgagtagaaaactgacaaagctttggacaggaaaattaagatcta

SEQ ID NO: 12597 - DNA, 600 bp, Chicken  19866894216341_7
gccatttaatttctttttctccttctgttcagtgtgaacccagcgctagagaaaaagtctttggrggctaaaatagaacaaaacttattcatcaaaagcaaatcctacagtgatagatgccttacaagtgcggataggtattctgcagaagtagctatcactcagaaaatcatttagttctgctcatttgggggagcataaacaccattaatttagcctggtgttttagtcttgcttctggaatataaaatactgagaagtactattgcttcattttagatctaagaaaatcgagagggytccaagataacaaatagcagtgagtagaaaactgacaaagctttggacaggaaaattaagatctagtgctttgctgtttaacatcacttgtaacttcagtgatgccgggggaggtgaaaacctacatctccctgctctcttatgtactttctcctcccttcctccctgcctctctgatctgcctcttttttcactttccactgaaatttttagtgctggttactaatacattaaagtcttggtgtaagtgggcagtgcgtggatggtttatagtggctcacatctgtaggctcagacttg

SEQ ID NO: 12598 - DNA, 600 bp, Chicken  19866894216347_1
tttgagcaaatccttgcttgctgcagcctagaaccttgctgctttgctgtcattgccatgctttgtgttgttacaacctccaagacacattaaacatttgtacagacttcataaagagccattcaaaataccatggtcatccatctttatacagagagactgaaaaaggccagatcccaaagcagaactttctctgttagtgtcctctccttttgatgtgatggagagatgactgaaatcagcgttttatggtgtgaggactgtgtgctgacagggtgtgcgatgaaactgctgatgtcygctccctttcccagtacaggtggaagtgcatgttatgtttcatgtggctggtgtctcccctttcacactccaatttcagattctctggtctgtgtggctgctggcctccgttttgagcacttaaaaattatatatggtgccctcaaygctcccagtaaaatgaagagactttgcctggtgaatttgcacaagatgaatcacttaaataagaacacttaattaaaaaaacaaacaaacagaacttgataagtatgtaatgaaactcagcatcacaaatgagctttggaaaggtgatgagca

SEQ ID NO: 12599 - DNA, 600 bp, Chicken  19866894216347_2
tatacagagagactgaaaaaggccagatcccaaagcagaactttctctgttagtgtcctctccttttgatgtgatggagagatgactgaaatcagcgttttatggtgtgaggactgtgtgctgacagggtgtgcgatgaaactgctgatgtcygctccctttcccagtacaggtggaagtgcatgttatgtttcatgtggctggtgtctcccctttcacactccaatttcagattctctggtctgtgtggctgctggcctccgttttgagcacttaaaaattatatatggtgccctcaaygctcccagtaaaatgaagagactttgcctggtgaatttgcacaagatgaatcacttaaataagaacacttaattaaaaaaacaaacaaacagaacttgataagtatgtaatgaaactcagcatcacaaatgagctttggaaaggtgatgagcaaatgcacctggtcttcttagtaagctgcttttgtaggaacagtgctaatgtctgtacgttaagagtcttcccctatgttatttccatggccatgttttcctttgcctcttctgaaatctgggaagtggagaacttgggcccagggag

SEQ ID NO: 12600 - DNA, 600 bp, Chicken  19866894216351_1
aatcagcaactaaaatgtcttgataaataatagcaaataacaagtaaattagaaaaagctgtaaactgttcatggttgattgtgagcagaaaaagattacgtttgtggaataaatgtgttcactttgagctgcttgctcgggcctaatttggaaagaaggcaggcttttataactacagtggacaaaaaaacttcactgcagctccccttttcaaatggcaaggacaaagtatttattcagctgtcaagtggggaaagaaagcaaattagttttaggctgaaatgctgtactgtgcttgytkctgtagttctaaggtcagatggcaacttgaacaacctttaggaatgggtaacaagtttctccaggacaaagatcagaggcaaagggaaatattcagattatcctgctgtttcgcttcctagagctgtcctacagagaagtgtgagatttagaaagtggtgtctgtaggggattcaccactcatcttgaaactgatggaactgctgaatcctagaatggggtttgtggcagagatgaggttttgagttgcttttctacgagtttgtctcttccactgaaatgccagctgtccctgggct

SEQ ID NO: 12601 - DNA, 600 bp, Chicken  19866894216351_2
tcagcaactaaaatgtcttgataaataatagcaaataacaagtaaattagaaaaagctgtaaactgttcatggttgattgtgagcagaaaaagattacgtttgtggaataaatgtgttcactttgagctgcttgctcgggcctaatttggaaagaaggcaggcttttataactacagtggacaaaaaaacttcactgcagctccccttttcaaatggcaaggacaaagtatttattcagctgtcaagtggggaaagaaagcaaattagttttaggctgaaatgctgtactgtgcttgytkctgtagttctaaggtcagatggcaacttgaacaacctttaggaatgggtaacaagtttctccaggacaaagatcagaggcaaagggaaatattcagattatcctgctgtttcgcttcctagagctgtcctacagagaagtgtgagatttagaaagtggtgtctgtaggggattcaccactcatcttgaaactgatggaactgctgaatcctagaatggggtttgtggcagagatgaggttttgagttgcttttctacgagtttgtctcttccactgaaatgccagctgtccctgggctga

SEQ ID NO: 12602 - DNA, 600 bp, Chicken  19866894216356_1
atcagtagaaagaggcacaaaacttctgttaccagagatgcactaaatgagggcttattatttgtttccggcagttttggatcccaggtcactgccaacaggatagagctgcctccctgtttactgatggagcagaagggtcacaccaagctgcggacccagctgatgttacagctgctccatggctgcatgaggacctgaaacaaaatccttaaatcaagggagtctcaaattcctggggcttgaaatccaggctgaaattgagattttacatttcagctccgtctctaatgagcaagrcagaagctaagcctcagcatgcctgatcagtgtgtggtaggagtgaaaaaagagcacagtgtagtctcctgctctgtttactataactgctgggcatggatgctcatgagggtgcataggtgctgatatgccagcctctatgagaggacgaggagaacacagatagagctgtatattttatacaccactctgccctaatgagatacatctcttgcccttaccttcttacatgggctgacgctgaaccctctaggcactcaccagcccaccactggagcaatcagtttatagaggaggggg

SEQ ID NO: 12603 - DNA, 599 bp, Chicken  19866894216362_1
  misc_feature (1)..(67): n is any nucleotide
nnnnnnnnnnnnnnnnnnnnnnnnnnnnnnnnnnnnnnnnnnnnnnnnnnnnnnnnnnnnnnnnnnnttcttgcatttcattgtatgttttaagcaaagcaaatattcataaagtcacactcggtaaatgaaagcaagacccctctggaaagcataaatgttgcctgtctgcatcatttctattcaaagcattgctgttggctggagaacgtgctaaaggaagttttcctcatccactccttgctcatacacaccttgagtctcctaatttattctttcaaagtagcaaatagaagtgtytctcaagccatctatgtttacaatcctgtattacaaagccaatcagaggttcataaacattaccttcatatacaatttcacgcccagtggaaatgtagctgtatccttgaatcagctctggaaggcagtccttacagaaggagtgaaggcatggcagcatcctggggtctctcctgcacagatcccatttgcacaccaagcatttcctcagcacatccaggggctccattgccgttggctgaggtttgacatcaaaaacacgaagagtcacaaaatggctcatgacagcccctccgctt

SEQ ID NO: 12604 - DNA, 600 bp, Chicken  19866894216368_1
tgctagtaaagcaccaaaaatagttcatattacgaaaaatgaaattcatgtagcaattgacatcttttagaagaatcaaaggatacctgattgaactcatttttgcctcagaacaatgcaaaattggccatggtgtgtgctctactatcagtgtccagacacagcctgtttcagtaaatttctatacctagctgcagacaacaccattcaagaatcagttcaataacttacaatgattttaataacttatgatgattttcatgtgatttttttagaaaacatcctatattggccaccaastccttgctcctgacaaaccagatctttccttgacatacatgctacttgatttattcaagtttgtcagtacaacaaacacgtggcatgtcttctattagcaatcaggtcttacaatccctattgacaagacggacaacaatccagtctcgtaaaagattcatgacacaactttgcactctctactgcttgctttctcataaaaccagcgcaaatcccatcaaaaatttagcagaacccctgcctcatctgtttaggcctgaagctagttgcagggacaactcattagggacaagctcatta

SEQ ID NO: 12605 - DNA, 599 bp, Chicken  19866894216370_1
  misc_feature (1)..(112): n is any nucleotide
nnnnnnnnnnnnnnnnnnnnnnnnnnnnnnnnnnnnnnnnnnnnnnnnnnnnnnnnnnnnnnnnnnnnnnnnnnnnnnnnnnnnnnnnnnnnnnnnnnnnnnnnnnnnnnnnaatcttctgttctcttctttgttggggagttcctgaagagaaacaacttaatccatttagggcttatgagagttttgtcttggtttaaagataacagtgtgcaagagcaaatgtagcctttattaatggctacatttagagaatgaggatgtataaatttgagaatttaattgtaaagaaataaaaawttataagtattggaactaaattaaaaaaaaaaagttttatcttgtttgtggtatgactacagcaatttataatcatctatatagaccttgcaccttgttttgttgtcttcagcacattctgttgacgtagtatgatcattctgaacaatttgtattgaatagattgtatatcacttggtcttctttgcactccctcatactggaaagcaaacaaaaccctcagcctataaatattataaacagaccttttcttactaagcattttttaagcgatagtttagcyatgctatggaaaacag

SEQ ID NO: 12606 - DNA, 600 bp, Chicken  19866894216370_2
tgtaaagaaataaaaawttataagtattggaactaaattaaaaaaaaaaagttttatcttgtttgtggtatgactacagcaatttataatcatctatatagaccttgcaccttgttttgttgtcttcagcacattctgttgacgtagtatgatcattctgaacaatttgtattgaatagattgtatatcacttggtcttctttgcactccctcatactggaaagcaaacaaaaccctcagcctataaatattataaacagaccttttcttactaagcattttttaagcgatagtttagcyatgctatggaaaacagctctcaaactgggggttgaattgaacactgactgaagatgcatttggtctgagagttctaaataatcaatcaactagttatcagttgatatttgattgtatcaaggtcccagtgttgtgtgttcctatttaccttccatgtgggaatatccattcactcccagattttgcttcatgcaaatgtcagaacaggattgagaacaggcaggttagaaccaaaaaactgaaaaaaatatttcttagtcaccttcctttcattttctcttcttcatcgtctactacgga

SEQ ID NO: 12607 - DNA, 600 bp, Chicken  19866894216371_1
gcatccatgggaacaccacatcccaaacaatggggccaagtccacttctgagcaagaagtctgcaagcagagtgtttagttttcctcgtgtccctgggaaattgctccaagtgcctcggtttcctgaaagggtgggaacgtctgcatgcacgactttgcaagcaacgcccaggtctggcagagaagggtgggaggcatttgtgttcacactgctgttctccctcaggcctgggatttgggggagtgtgggcaggcactgaacagaagggctggtgggagcaggggccgtctgggatgcasagcagcagctcgggaggtgatggcagttccccactctgccacctgcacagccctctgacaacagctctgccccttgcaggagagctgtgggtgtttgcacgatgggacgggggaggggcagagggaccctgcgactctgtcacgttgcttcaaatgcagcgctgccaatgagaccgttgcggtggcacagcgttaatgcagcgtgaggacagcgctgccccagaaaggctctgtgctttaacaacacacagcggctgttgtgtgcagcagccgggggagacgctctctttattaaaccat

SEQ ID NO: 12608 - DNA, 600 bp, Chicken  19866894216373_1
aggtggctaaactaagggaaaagacagaaagggacaagtgctggaagcagggatgggtggcctggaaagaatacatacatgccatttggagaggcagaaatgagcgcaggacagtcaaggtgcacatagaactcaacttgaggagggatgagaaaattaatagagattctacaggtacactggtcagaagagaaggtcatggacagcatagtccctctgataagtgagaacagagaaatggctacaatagacatggagaaggctgaggtactcagcaagttctttgcctcagtcttcatytacagtaaaacaatttgctacctgccaggttcaaaagatcttcaatgtgtccttttgcagcctttcaaaataataagcacaagaagataatagtaggatagaaggatgatagtaagattctgaaggtctttagagaccttcagaagtattttctagattattacttagaatcagtcaagaaaactaaccttgttgggaaatatctttatattcatgcacatatatgaacatatatgtactacatttatatagaatgggtacaaaaatacacatcagttattaatcagttcataacakcag

SEQ ID NO: 12609 - DNA, 600 bp, Chicken  19866894216373_2
atytacagtaaaacaatttgctacctgccaggttcaaaagatcttcaatgtgtccttttgcagcctttcaaaataataagcacaagaagataatagtaggatagaaggatgatagtaagattctgaaggtctttagagaccttcagaagtattttctagattattacttagaatcagtcaagaaaactaaccttgttgggaaatatctttatattcatgcacatatatgaacatatatgtactacatttatatagaatgggtacaaaaatacacatcagttattaatcagttcataacakcagttattttcaagaaactcatatgttgagaagttataataaacaacaacaaaaaaaaacatattctttttatagaagttccttatcagcaaaaagaaaaaaaaaaaaaagcaagaaggtgtgttgtaacacaatactggaagatattttaaacagtgcataaccagaatgacagagggatataaggtccagagcaacaggaaattaaagttatgtagattagaagtatcaagcagtacactgaggcccctcagaaatttctaaaccaaggtgaagtaggagagaaggagggcttgtagt

SEQ ID NO: 12610 - DNA, 600 bp, Chicken  19866894216378_1
tttgcacgctccatctcaactgttaccacattatgctcctttcccagcgcacaaaaagggaaggtcctctcctcgttttgtggttgtgcacaaattctctggaagcataagtgctcttgcccagacagaggggaacgggtgaagaaactcccactggaggccctgatctcccaggatattgaaacatctgctgcttctgcaattgcatgcatctctgggtcagtgcagtctgcttcctgacagtcatccatataggaaagctgattactctgaaataacgagcctgcttagcacagaacrgagcccagacttgcaacccactgactatcccatgataacccccagcacctcccaacaaggctctggtttcaggacagcactgaggtccccgtgcccatcaagaggttacgtgggtgaagagttcacatccccgtggcagctcattcacatctcctgatttctaatgccatctgctcctccctgagcctcttttcaggtttaattagaaattctggatcttctggaggctgaagggcatagaggtgaatgagcacatctgggtctgtgcctcccagcttggtatcttgcactttaacacct

SEQ ID NO: 12611 - DNA, 600 bp, Chicken  19866894216385_1
aaaaatatccctgtgtctgctgggggatgtggctgatgtggctccctgtgggtttagaagcactgcattagtgttgaggaacttgcacaacagttttgcacaggaagggaagaatgctgcatctgaacagaaccaccgcagggtggatttacccagccatactgggatttggccagtgtactctctgttcttgctgttcctccccctgtaagcagcacatcactctgcagatccacgttatattgtaccactcaggcaccttctaagagttatctaattaagctgggtgggtcatacctrggcatttcagcttctgagctcaggtatccacctgtccagctctgtatgggagggggaggctgacagtgaagrttctaccctgagagatagtggagttatctgcwgaagaaggcatcactggaggggaaaaaaaggagtagaagaatggaaggcaaaacaatgccaggctgaagagaaaggtgagaagttcagaaaacagaccagggcaactgtggaggatgtacatattagaaaagcatacacagtttttctgagattatgcagaagtctctcttgttctggrtatagctggaggactga

SEQ ID NO: 12612 - DNA, 600 bp, Chicken  19866894216385_2
gttgaggaacttgcacaacagttttgcacaggaagggaagaatgctgcatctgaacagaaccaccgcagggtggatttacccagccatactgggatttggccagtgtactctctgttcttgctgttcctccccctgtaagcagcacatcactctgcagatccacgttatattgtaccactcaggcaccttctaagagttatctaattaagctgggtgggtcatacctrggcatttcagcttctgagctcaggtatccacctgtccagctctgtatgggagggggaggctgacagtgaagrttctaccctgagagatagtggagttatctgcwgaagaaggcatcactggaggggaaaaaaaggagtagaagaatggaaggcaaaacaatgccaggctgaagagaaaggtgagaagttcagaaaacagaccagggcaactgtggaggatgtacatattagaaaagcatacacagtttttctgagattatgcagaagtctctcttgttctggrtatagctggaggactgaagaggctctgaagttgtgacagggaaggaaacttcttctgggatargcaggaccctatttatgctgtcagga

SEQ ID NO: 12613 - DNA, 600 bp, Chicken  19866894216385_3
aagggaagaatgctgcatctgaacagaaccaccgcagggtggatttacccagccatactgggatttggccagtgtactctctgttcttgctgttcctccccctgtaagcagcacatcactctgcagatccacgttatattgtaccactcaggcaccttctaagagttatctaattaagctgggtgggtcatacctrggcatttcagcttctgagctcaggtatccacctgtccagctctgtatgggagggggaggctgacagtgaagrttctaccctgagagatagtggagttatctgcwgaagaaggcatcactggaggggaaaaaaaggagtagaagaatggaaggcaaaacaatgccaggctgaagagaaaggtgagaagttcagaaaacagaccagggcaactgtggaggatgtacatattagaaaagcatacacagtttttctgagattatgcagaagtctctcttgttctggrtatagctggaggactgaagaggctctgaagttgtgacagggaaggaaacttcttctgggatargcaggaccctatttatgctgtcaggaaagtatgatgaattaaaattaggactagtgct

SEQ ID NO: 12614 - DNA, 600 bp, Chicken  19866894216385_4
tgaacagaaccaccgcagggtggatttacccagccatactgggatttggccagtgtactctctgttcttgctgttcctccccctgtaagcagcacatcactctgcagatccacgttatattgtaccactcaggcaccttctaagagttatctaattaagctgggtgggtcatacctrggcatttcagcttctgagctcaggtatccacctgtccagctctgtatgggagggggaggctgacagtgaagrttctaccctgagagatagtggagttatctgcwgaagaaggcatcactggawgggaaaaaaaggagtagaagaatggaaggcaaaacaatgccaggctgaagagaaaggtgagaagttcagaaaacagaccagggcaactgtggaggatgtacatattagaaaagcatacacagtttttctgagattatgcagaagtctctcttgttctggrtatagctggaggactgaagaggctctgaagttgtgacagggaaggaaacttcttctgggatargcaggaccctatttatgctgtcaggaaagtatgatgaattaaaattaggactagtgctgatactgtacattgtgatt

SEQ ID NO: 12615 - DNA, 600 bp, Chicken  19866894216385_5
tgggtgggtcatacctrggcatttcagcttctgagctcaggtatccacctgtccagctctgtatgggagggggaggctgacagtgaagrttctaccctgagagatagtggagttatctgcwgaagaaggcatcactggaggggaaaaaaaggagtagaagaatggaaggcaaaacaatgccaggctgaagagaaaggtgagaagttcagaaaacagaccagggcaactgtggaggatgtacatattagaaaagcatacacagtttttctgagattatgcagaagtctctcttgttctggrtatagctggaggactgaagaggctctgaagttgtgacagggaaggaaacttcttctgggatargcaggaccctatttatgctgtcaggaaagtatgatgaattaaaattaggactagtgctgatactgtacattgtgattgcttgtttggaagccctacttgcctatccactgcaggaaaggaattgctgacttttttctacttctgcttgcacctgcaaacttcttttctgtgagttaagcaacgattgctcatgtgcatgcttagctttagcacaggaataatccatttctgtttgta

SEQ ID NO: 12616 - DNA, 600 bp, Chicken  19866894216385_6
tgggagggggaggctgacagtgaagrttctaccctgagagatagtggagttatctgcwgaagaaggcatcactggaggggaaaaaaaggagtagaagaatggaaggcaaaacaatgccaggctgaagagaaaggtgagaagttcagaaaacagaccagggcaactgtggaggatgtacatattagaaaagcatacacagtttttctgagattatgcagaagtctctcttgttctggrtatagctggaggactgaagaggctctgaagttgtgacagggaaggaaacttcttctgggatargcaggaccctatttatgctgtcaggaaagtatgatgaattaaaattaggactagtgctgatactgtacattgtgattgcttgtttggaagccctacttgcctatccactgcaggaaaggaattgctgacttttttctacttctgcttgcacctgcaaacttcttttctgtgagttaagcaacgattgctcatgtgcatgcttagctttagcacaggaataatccatttctgtttgtactgttaccttcttctgtaagactgtaagccttgggatgacttaatggtgagccctccgtcccc

SEQ ID NO: 12617 - DNA, 600 bp, Chicken  19866894216393_1
gaaaatcccttggtggcccacatgaacaggacagtaagattacctacatattgacacagctacctgaatgcattcagagcatgcaattttgatctcattttaagctccagggtgggcttcattgtttcatttttcttctcctgtgaaatatactttatacccatcacaaacctgcttgtttcacatctacagtttatttacagaagtaaacaacgattataaaattgcagtacactcactagctaatatgtagaaaaaggacttatcaaaaaatattttttccttctaaataaagagaaratcaaggtctggaagcagacacatatattattcgaaagtatattttccaattatgaacataatgtttatatgctttgcatttattattcttgtaagcaattcatatctgttgcgttcaacttcattacaaaatgcaaactgtattggaaaactgtggacaggggtaaggtaagtacagagattatatgtcagtgactcataacacatcttaattcttaaaattcttaattcttaaaatcctgctttttattaaacattcactgaacacactgttgcattattttaaatgccccataatat

SEQ ID NO: 12618 - DNA, 599 bp, Chicken  19866894216404_1
  misc_feature (1)..(3): n is any nucleotide
nnntgttttggtatcgttccccttgttgctacagcagcccagcatgtctggcttttgaaaacgttcttaaactgagacacaagtgtgcggaggaaagttgctcattccatcttccctgcagggtctagggccctgccggcattgttcctctgtctcgccatctccttgccaaggagggccgatggtgtgcttctgaatgcaggtacttaataggaacagtgggatcacggggaaaagaagcaaaatatcaacttgactgggagcaatttctacagttgccagttcttttatgtttgttaytctttaataagaggtgagacttgaggaagtcggtaatgaatatttaaacgtactctgaagtggccagatgcagtttttcatgggcttctgtcctggtcattttgagtctttgaaatcttgtgttgaattataatgggagtaggggggaggggagaggaaaaccagctcctttttgtttcttacccttgttggcaataatgaatggaaggaatttaatccaatgaaagtaatgaaacttaatccccgcactgtgtctttgttaactagttcaaagaactatttttaatgcatcttattca

SEQ ID NO: 12619 - DNA, 599 bp, Chicken  19866894216405_1
  misc_feature (1)..(171): n is any nucleotide
nnnnnnnnnnnnnnnnnnnnnnnnnnnnnnnnnnnnnnnnnnnnnnnnnnnnnnnnnnnnnnnnnnnnnnnnnnnnnnnnnnnnnnnnnnnnnnnnnnnnnnnnnnnnnnnnnnnnnnnnnnnnnnnnnnnnnnnnnnnnnnnnnnnnnnnnnnnnnnnnnnnnnnnnnnnactgttttgctcttctttctccgattctattttctggtgtctactgtaagcttctgtaaggaagaggccatggaaagccatcagtgtcctctaaggtctttcattaagactccatgcctttcttccaasactgactccttggcctaactttgcaggcttcttatcctccatgccagagtctccttctcagcctccttccatcatctccacaaaatccacctgtccagccaaactcagggctcccagcacctgttggccacaaccaacgcaggttatacttgaggactggcaagatggaaccaggagggtcacaaagcactgaaatgcaccatctttccacatttttggggagggacaagtaaaaaaccaggaaatcagaaattctgattcttctgtcaaatttgaagctctccacaagattcaaacag

SEQ ID NO: 12620 - DNA, 526 bp, Chicken  19866894216405_2
tccttggcctaactttgcaggcttcttatcctccatgccagagtctccttctcagcctccttccatcatctccacaaaatccacctgtccagccaaactcagggctcccagcacctgttggccacaaccaacgcaggttatacttgaggactggcaagatggaaccaggagggtcacaaagcactgaaatgcaccatctttccacatttttggggagggacaagtaaaaaaccaggaaatcagaaattctgattcttctgtcaaatttgaagctctccacaagattcaaacagcacacayggracaacacattacaaagtccaaacatacaattcctttgaccaacgccaaggaactgcgctgaccaaaaccaagtagtttctacgcctcaccatcattcaaagaaactaaaaaaatactataaaaagccttcaatagagaagactgtagaaaagactatagaaatcagagcgtccatagcttcacactgataaattcattcacaaagtttgaacaatctcataca

SEQ ID NO: 12621 - DNA, 523 bp, Chicken  19866894216405_3
ttggcctaactttgcaggcttcttatcctccatgccagagtctccttctcagcctccttccatcatctccacaaaatccacctgtccagccaaactcagggctcccagcacctgttggccacaaccaacgcaggttatacttgaggactggcaagatggaaccaggagggtcacaaagcactgaaatgcaccatctttccacatttttggggagggacaagtaaaaaaccaggaaatcagaaattctgattcttctgtcaaatttgaagctctccacaagattcaaacagcacacayggracaacacattacaaagtccaaacatacaattcctttgaccaacgccaaggaactgcgctgaccaaaaccaagtagtttctacgcctcaccatcattcaaagaaactaaaaaaatactataaaaagccttcaatagagaagactgtagaaaagactatagaaatcagagcgtccatagcttcacactgataaattcattcacaaagtttgaacaatctcataca

SEQ ID NO: 12622 - DNA, 600 bp, Chicken  19866894216408_1
aaaggccacagtgtgaagttatcagtaattttcacagttcagtatgccatcaagttaaacttaaagtgggtatcagccaggtgatcactgcctatgttgtctgggctctgaatagaactaactacaggggcagtgggtacaaatatataagaattacattcgcgttacatttgctctgctgtttgtaggacaacttgcttcctaaatttcctagaagacataaatttaaaagtaaaataaaaaaaactctaattacatctggttgatgaaaaaagctaacactaagaaagggaaaacacmagaatgaagggatatagaagaagagattttggattaaatgctggctcagaattgtgaacaagggagccatttcctgctgtttcattcctgttttgttcacggacacacrgctccatgtaccttccttgtaaataaagcaaggctgcagtaaggaaatacaggactccaatatttgctttttttttgtctcctaaatgaaacagtctacaagacatttaaaattggcttacagtgcaagtcaaggagggataatagttctgtgaagtgaaccaaaatgatctcgacattgcgcagacctgg

SEQ ID NO: 12623 - DNA, 600 bp, Chicken  19866894216408_2
gaatagaactaactacaggggcagtgggtacaaatatataagaattacattcgcgttacatttgctctgctgtttgtaggacaacttgcttcctaaatttcctagaagacataaatttaaaagtaaaataaaaaaaactctaattacatctggttgatgaaaaaagctaacactaagaaagggaaaacacmagaatgaagggatatagaagaagagattttggattaaatgctggctcagaattgtgaacaagggagccatttcctgctgtttcattcctgttttgttcacggacacacrgctccatgtaccttccttgtaaataaagcaaggctgcagtaaggaaatacaggactccaatatttgctttttttttgtctcctaaatgaaacagtctacaagacatttaaaattggcttacagtgcaagtcaaggagggataatagttctgtgaagtgaaccaaaatgatctcgacattgcgcagacctggcgtatgtgcattatctcagcgctccacgtctgtttattttatatgtattgactcgtcagtctgacaaggttggagctgagtttccattcccttggaaacattttaccct

SEQ ID NO: 12624 - DNA, 600 bp, Chicken  19866894216416_1
aggaaacagagggaaaaagatgaatttttaagccgatagagcgcagtgataactgatctgaaatttgccattttcttttaatatacttctgtataatgtggtagcaacatggatacagaaatgaacccacctgccagctcacccccattggtcctttcagtctcggtctttctcaaactttgaagagtcctggattgggtagcagagaagcctttttgaaatgggaggcgagtgcactgaacatgtgtgaaaggacagcatgcctttttggctgagtaaatcccgtgaagtcaagatttwatygtttcactttattttgtgtgacagaagtgaatcagaattcctgctccctggagttccctctgctgagggagggagaagctgagagcaaaacgaaaggcagactgcaggagcggacagtgaaggctcacatcaaacaaatagtggtggcagcattggaaygggtgctacaaaatgggctaacagctgtgttaatgaatttggtgcagacactgtaggtctcttttccttctttgggagtgcttcagagagcatctgggaagattttccataattttgagtcacagtttttgtggatca

SEQ ID NO: 12625 - DNA, 600 bp, Chicken  19866894216416_2
aaacagagggaaaaagatgaatttttaagccgatagagcgcagtgataactgatctgaaatttgccattttcttttaatatacttctgtataatgtggtagcaacatggatacagaaatgaacccacctgccagctcacccccattggtcctttcagtctcggtctttctcaaactttgaagagtcctggattgggtagcagagaagcctttttgaaatgggaggcgagtgcactgaacatgtgtgaaaggacagcatgcctttttggctgagtaaatcccgtgaagtcaagatttwatygtttcactttattttgtgtgacagaagtgaatcagaattcctgctccctggagttccctctgctgagggagggagaagctgagagcaaaacgaaaggcagactgcaggagcggacagtgaaggctcacatcaaacaaatagtggtggcagcattggaaygggtgctacaaaatgggctaacagctgtgttaatgaatttggtgcagacactgtaggtctcttttccttctttgggagtgcttcagagagcatctgggaagattttccataattttgagtcacagtttttgtggatcaaat

SEQ ID NO: 12626 - DNA, 556 bp, Chicken  19866894216416_3
tcggtctttctcaaactttgaagagtcctggattgggtagcagagaagcctttttgaaatgggaggcgagtgcactgaacatgtgtgaaaggacagcatgcctttttggctgagtaaatcccgtgaagtcaagatttwatygtttcactttattttgtgtgacagaagtgaatcagaattcctgctccctggagttccctctgctgagggagggagaagctgagagcaaaacgaaaggcagactgcaggagcggacagtgaaggctcacatcaaacaaatagtggtggcagcattggaaygggtgctacaaaatgggctaacagctgtgttaatgaatttggtgcagacactgtaggtctcttttccttctttgggagtgcttcagagagcatctgggaagattttccataattttgagtcacagtttttgtggatcaaatcatgtgcattatatacgtctttctgggttccagtttcagcagttttatttggttccaaatttggtagtcagggtaacaaccactcaaaagcaatctccacttttaaaaaaaaaaa

SEQ ID NO: 12627 - DNA, 599 bp, Chicken  19866894216418_1
  misc_feature (1)..(32): n is any nucleotide
nnnnnnnnnnnnnnnnnnnnnnnnnnnnnnnnaagaaaaaaacaggttgacagcatttccagaatgagactgtaatgtaataaaagcattatcatggcttgtgtctgcacagagaataagaaaattaatgaaacatcatgacaaattaggactgggagaatttacaagaggagggaaaaatgaaggtacagctcgagaagaacaaagcaaagccttgctgaaaggccatgtttaaccccaggaatgtatggctgctcttctcatctctgtggaccctctgtgaaggcacccaccaccccraatgaagggtttgtcagctgtccactaaaccctttttctccaaaacccctaaccacatttaaatgcccactgtgtttccagatcggggtattcctgtttcaaatatcagcacttaaggaatacctgaaagcattcctttcactgaaagtagcagtaataaacatggcaagataaggatatattcccagcagggctttgggagcacctgatgtatgtctctatatgcttacctacacagaaacaaacctgctactttatgatatctctttctattcagccactctggtaaaaaccatttt

SEQ ID NO: 12628 - DNA, 599 bp, Chicken  19866894216419_1
  misc_feature (1)..(11): n is any nucleotide
nnnnnnnnnnntttcaactaaagccattggcacaagcctccaaaaggcaaacttctaatacttctgtttctgagacacttttttcccctgcaaacactgtgactacacagttcaaccagcatgaaaagcttacagtatcaccaaatgagaatcttcgggagaaaaaaagccatgacaaaagtatccaatataattgaaccacaggtaatattcagttgtaagaaaagcagccacagtggcagagtatatttgtgttccctttttttaaatcataaccagtaactacagttagctgacatyttgtctagacagctcccttaattaagatataaaagcaaacctagcacaatgatgctactgttaatctgctccaaattcaaaattcagttactttcttaactgggggagaaaaagaagagtctgaatcaatcrattaatacaaccccagattttagttactgaaagaaaacaatctgacctccatatgcacttcaaccacaatctcttagaatgtgacggatattaaaactatgttttctttggagcccctaaaatattgcacaattcaaatgaytagttttatcagtaagttgacagta

SEQ ID NO: 12629 - DNA, 600 bp, Chicken  19866894216419_2
cagtatcaccaaatgagaatcttcgggagaaaaaaagccatgacaaaagtatccaatataattgaaccacaggtaatattcagttgtaagaaaagcagccacagtggcagagtatatttgtgttccctttttttaaatcataaccagtaactacagttagctgacatyttgtctagacagctcccttaattaagatataaaagcaaacctagcacaatgatgctactgttaatctgctccaaattcaaaattcagttactttcttaactgggggagaaaaagaagagtctgaatcaatcrattaatacaaccccagattttagttactgaaagaaaacaatctgacctccatatgcacttcaaccacaatctcttagaatgtgacggatattaaaactatgttttctttggagcccctaaaatattgcacaattcaaatgaytagttttatcagtaagttgacagtatcaagaaagtaacaaagaattttgtaaaaagagataatacgtaaagaatcacctctgaactattacttttttaaagaaatatgaattaaatatcttaaaccttaagttaactttagattaacaatccgaggaa

SEQ ID NO: 12630 - DNA, 600 bp, Chicken  19866894216419_3
accagtaactacagttagctgacatyttgtctagacagctcccttaattaagatataaaagcaaacctagcacaatgatgctactgttaatctgctccaaattcaaaattcagttactttcttaactgggggagaaaaagaagagtctgaatcaatcrattaatacaaccccagattttagttactgaaagaaaacaatctgacctccatatgcacttcaaccacaatctcttagaatgtgacggatattaaaactatgttttctttggagcccctaaaatattgcacaattcaaatgaytagttttatcagtaagttgacagtatcaagaaagtaacaaagaattttgtaaaaagagataatacgtaaagaatcacctctgaactattacttttttaaagaaatatgaattaaatatcttaaaccttaagttaactttagattaacaatccgaggaattaatctttacagaagagtgaggacactcctgtaagtctacctctcctacagtttcatagtgtgacttttgccaccttgctcctatttactttgagaaatctttttcctgtgctcagccttgatctggtcagcatgaatgtc

SEQ ID NO: 12631 - DNA, 600 bp, Chicken  19866894216425_1
tgaggtttgttagatgttgtgctgcagcttgcttttttaaaacgtgcctccaaaatataagaaagacagcatatgcggaacagtgcacgcaacaggtgcccaggtcatttaaatattgagatgaacagtgtgccttgctcagatattttacaggtaggctggcattgctgctgtatgtggttcagcatggatctaaggtgatcactacataaattaccccaactaattaaaccagtttggtgttatgctagtcatctcaaagtgcagagagacttggctggcatgccttatcctcatacytcataggcttataggcacatacaattgaaaggtcaattaacagggattttatttctatttgggggcttttgttatttcttattgctagtaggtaatgtgacaaattacgctgtgtatgtcctacgtgcataccctaacgtgcacaccatcaaaagtttccctggcactttctcttgacgtgattctcttttggtttttctctacgtgcaccattcccgactccagcaatagcagttgtagcacagtgcatagtctaagtccttgctttgcacagcagctgctgggaaaggaggcatggga

SEQ ID NO: 12632 - DNA, 520 bp, Chicken  19866894216429_1
ttcatgataggaagaagaatcacatttcagaagagaccatttctgtctgctgattgcataataagcagagtttagcatcaggttggtgatggtagatatctgaccagcagcgaggtggcaggatggctgtctctaatcttcagacatcttgcattatgttgtttcactcttccctaccatgtctggtggggtttggtggcctctgccagtggttcctgccaggtggtgcatccaccagaagcttgcccaagggcttagccttcggtttttgtgtaaacaaagtggagaatgctgcttaartactgcagaggaagaaaacttgttagcagggatttatttccagaggaagccaggagaattatctataccttttaacagcaatgaaggagctgtagggtcttcttccatatccattaagttgtatgtgtgtgtctagggcatgtgtacaggcagaaacaaatacgtgtggacagggaagatatacattggcagtgaactacagtgaggattcttctccaag

SEQ ID NO: 12633 - DNA, 600 bp, Chicken  19866894216439_1
ttaaccatcccttcaaaggtataccaactaaaacttcaatttataaatctatgattgaaatcactcatctgttgcatttttctgctacacatttctatttcaaattattttcctagcttctctgagcatacatttcagcttcctaattagaattcataggaaaaagaaacactttgaaaattctttcctctgttttgagtctaggaaagagtttgattgttagagaagggaaatactaattctcaagcacaaacaaaaacatgcacagcatacacttgtacagcaggctagagttttaayattagaagacaagaagacagtattttttggatgaaatataaccagtccccataaaaactactatcctaaagctactctctgttctgcttcattttttcattctttctttccttttgctctttttcactttctgttggtcaggacaatgacataatctgctgggactcaaatatacatgtaaagaggatgcaagagaagacaacatcttatgaacatcatctgagaccagtaagtccacttattttttccatcgttctcacatcaactaaaacagaggcacagttttaattcctgctacat

SEQ ID NO: 12634 - DNA, 600 bp, Chicken  19866894216439_2
atcttatgaacatcatctgagaccagtaagtccacttattttttccatcgttctcacatcaactaaaacagaggcacagttttaattcctgctacataaacttttttccttgtctttcatcagaagttaacgatcaaaatacaatttcttatcactccgaatatatgctttctatcagaatgtatgaatgtgcatatgacccaacaaaaccattttgagttccgtaaggacagaatttcatcctcaaatagttataaagtaattgaattatgctttactataaatattacatgcatcacrcwacaagtatcaccaggatataatcaagtatttgagtgcgaaaagatagagtgaacgccctgaagaattatgcattattaaagaacaacacagtgtttacttagttaaaaatgagatacaagttatgactttataattggattctgttccaaaagaaaattcgaatgaatttggactgcattatttttggactacattttcataatatctgagaagtatgttttggtgaacaaaataaatgtaaagcagccctaggaaatatttcattacataaactgaaataaaaggaaagatcacaaa

SEQ ID NO: 12635 - DNA, 600 bp, Chicken  19866894216439_3
cttatgaacatcatctgagaccagtaagtccacttattttttccatcgttctcacatcaactaaaacagaggcacagttttaattcctgctacataaacttttttccttgtctttcatcagaagttaacgatcaaaatacaatttcttatcactccgaatatatgctttctatcagaatgtatgaatgtgcatatgacccaacaaaaccattttgagttccgtaaggacagaatttcatcctcaaatagttataaagtaattgaattatgctttactataaatattacatgcatcacrcwacaagtatcaccaggatataatcaagtatttgagtgcgaaaagatagagtgaacgccctgaagaattatgcattattaaagaacaacacagtgtttacttagttaaaaatgagatacaagttatgactttataattggattctgttccaaaagaaaattcgaatgaatttggactgcattatttttggactacattttcataatatctgagaagtatgttttggtgaacaaaataaatgtaaagcagccctaggaaatatttcattacataaactgaaataaaaggaaagatcacaaaga

SEQ ID NO: 12636 - DNA, 600 bp, Chicken  19866894216441_1
atagtggcgatactggcaggggatacacttgtggagtggtgactgctgaagactagagacatggacagaaacatgtgggtgtgcaggacactgtccctctaaccaaacccctctctgctccacggtgcaggtactgctgtgagcacccagggcatctgcagttccacagctgatggtgagtgtgagaatgggtccagaaaatgaagacatggtgggggtgggagatggggagagagaaaggctttattgcctctgaattcccaatatccaccccaggaggtcagattctccatgacttgraatgcagtgtgttttgcagctaatgatgctggtggaatccctgtgccatctctccaggtactctccaggctccagccatgctcctaaacacttccagagctcaggaaggggaagttgtcctggctcagtgtgtccttcagaagataatacctgctgcccgaattgtcttctgcaaggatggaatggaggtttacagcatgaaagcccaacagcataccgtcatctactccatgctgctgaacatctctgcaagaagcagtgggacatacacgtgtgcgtaccagcagaggaacaagagca

SEQ ID NO: 12637 - DNA, 600 bp, Chicken  19866894216449_1
tttattattgttttttgtagcaggataaattaacctgtagctggtgaaattaaaagtgcatgcatcccccagactcaccccttttatctaaagcgtctaacaaggtggtgatatttaagctttaataccatgtgcttcagcaatgctgaggggacttgaggtgaaagaacggtctgtattaggcacagaaattaatttgaggcctgaaaggaaacctaaacacccaaagccataagcatatatatatctaaggcccttgtttcccttgcaagtcccaacgggcagtgtgtctgagcagcrtggccaagccacagtgccagcaaggaaggtgaaggtgctgccggagaggaaggcggaggctggaggcagcagggatggaggcaagcagatgggaatgtggtgttggaaacccagttcctgagggatgccttcttgctggtgtctgtaccccagagcagaggacagcatggaaatgagggagaggagcagaagctgtactttctcttgtgatcctgccctcctgtgtgttgcaggcacaaagggcagtctcagccctaactgccattgcagtgacaacacacacagcgtctgggctgcgtt

SEQ ID NO: 12638 - DNA, 600 bp, Chicken  19866894216459_1
ctcaggcattgattggctggtggtgagcaattgtgtggtgtgttgtgcatcatttgttttgtaaatatataactgtacttacaaaataatgtgtatatatatatacacatgtcatatatatatttatgtactgtgttcagtttggggcctgtcactgcatgaaagacaaggccctggtgtgtgttcagagaagggcaacaaagctggtgagaggtctggagcataaatctcatgaggagaggctgatagaactcggattattttgtctggagaagaggaggctcaggggagatcttatcrctccctataactacctgaagggaggttgtgatgagatgggattcggtctctcctgccatgtaactagtgataggactagaggcagtggcctcaagttactccagggaaggttcaggttggacattaagaaatacttattctccagaagagtagttaggctctggaatgggctgccgaggtcggtggtggagttactgaccctgaaagttttgaagaaatgtttagacattgtacttaaggacatggttttgtggaaaatattggtgataagtggatggttggactggatgatcttggggg

SEQ ID NO: 12639 - DNA, 600 bp, Chicken  19866894216460_1
acttgttgaagttctcaggacaccagcctgagatttctggtcttagaatatactaaatgggtcgtttggatgacaaacagttcaggatggcaaggattcccaaagagtttcaactctgagcttgcagcactgggtaaagagtttttacatgcaggggacaatttggatggggaatactccctcaagtttcagacttaaatagtttctggactttgcccttttcaagctggcaaaacagaagcaagtccaaacagcactcagattctggtagtcactcagtagcaagaccactatcagacrctagcgaagggcttattaacctgtgaaaataaggcaaagcctctgttttccaagaaytatttttgaatggctattcaacaaaagatctctcaacctaaagcactccatataaactaagctgcttaatgcagagtgcattagactgggcagtaaaaggtcagatgttctygaaggctcacagtttcacatcactatttaaatcccacagacttctgaagaaactggatggataactaatattatgttcttcctctcttattcatctcctcttctcagcattattgaaacacagatcaagtt

SEQ ID NO: 12640 - DNA, 600 bp, Chicken  19866894216460_2
tgggtcgtttggatgacaaacagttcaggatggcaaggattcccaaagagtttcaactctgagcttgcagcactgggtaaagagtttttacatgcaggggacaatttggatggggaatactccctcaagtttcagacttaaatagtttctggactttgcccttttcaagctggcaaaacagaagcaagtccaaacagcactcagattctggtagtcactcagtagcaagaccactatcagacrctagcgaagggcttattaacctgtgaaaataaggcaaagcctctgttttccaagaaytatttttgaatggctattcaacaaaagatctctcaacctaaagcactccatataaactaagctgcttaatgcagagtgcattagactgggcagtaaaaggtcagatgttctygaaggctcacagtttcacatcactatttaaatcccacagacttctgaagaaactggatggataactaatattatgttcttcctctcttattcatctcctcttctcagcattattgaaacacagatcaagttgtcyaattttactcaacaactactgtcctagaaatcccaaatcagcaattacgtttg

SEQ ID NO: 12641 - DNA, 600 bp, Chicken  19866894216460_3
gggaatactccctcaagtttcagacttaaatagtttctggactttgcccttttcaagctggcaaaacagaagcaagtccaaacagcactcagattctggtagtcactcagtagcaagaccactatcagacrctagcgaagggcttattaacctgtgaaaataaggcaaagcctctgttttccaagaaytatttttgaatggctattcaacaaaagatctctcaacctaaagcactccatataaactaagctgcttaatgcagagtgcattagactgggcagtaaaaggtcagatgttctygaaggctcacagtttcacatcactatttaaatcccacagacttctgaagaaactggatggataactaatattatgttcttcctctcttattcatctcctcttctcagcattattgaaacacagatcaagttgtcyaattttactcaacaactactgtcctagaaatcccaaatcagcaattacgtttgctgtttgtagttgcacatacttccatttgtgaaaatagatgaaatgtaaagttaatacaacttcaacttsgtagtaactcggcctaagcacggagaggaagatacagcaaca

SEQ ID NO: 12642 - DNA, 600 bp, Chicken  19866894216460_4
cgaagggcttattaacctgtgaaaataaggcaaagcctctgttttccaagaaytatttttgaatggctattcaacaaaagatctctcaacctaaagcactccatataaactaagctgcttaatgcagagtgcattagactgggcagtaaaaggtcagatgttctygaaggctcacagtttcacatcactatttaaatcccacagacttctgaagaaactggatggataactaatattatgttcttcctctcttattcatctcctcttctcagcattattgaaacacagatcaagttgtcyaattttactcaacaactactgtcctagaaatcccaaatcagcaattacgtttgctgtttgtagttgcacatacttccatttgtgaaaatagatgaaatgtaaagttaatacaacttcaacttsgtagtaactcggcctaagcacggagaggaagatacagcaacaggaaagttatcatctttgttgtaaaatgcgattccaatctaagtgaaccctgaaatataataagaaaaagtctgtatcattcttataaacaaagatagtgatactccactgactgggcctcaaagactgtgaaag

SEQ ID NO: 12643 - DNA, 600 bp, Chicken  19866894216460_5
gcagagtgcattagactgggcagtaaaaggtcagatgttctygaaggctcacagtttcacatcactatttaaatcccacagacttctgaagaaactggatggataactaatattatgttcttcctctcttattcatctcctcttctcagcattattgaaacacagatcaagttgtcyaattttactcaacaactactgtcctagaaatcccaaatcagcaattacgtttgctgtttgtagttgcacatacttccatttgtgaaaatagatgaaatgtaaagttaatacaacttcaacttsgtagtaactcggcctaagcacggagaggaagatacagcaacaggaaagttatcatctttgttgtaaaatgcgattccaatctaagtgaaccctgaaatataataagaaaaagtctgtatcattcttataaacaaagatagtgatactccactgactgggcctcaaagactgtgaaagtgaagagaaacagctatgtacattgtaccaatgatgagatactggtaggcaagattatgtattacaagatgagcatcctagacatgtttacagaggcacccaattttgtaaggattaagtact

SEQ ID NO: 12644 - DNA, 600 bp, Chicken  19866894216462_1
gtgtgctggcccccaaaggtcatctcacagccggggaaagcatctactctctgcaacagaagtgtgaatttcttatgctcctttcctcagagccctgtctgcagcacagaaatgtatgtatgacttaaaaatcagctcttaatgaagttgcttcagtaatgcaggccccttcagaaggcatgagtaagctcaattgtgaatctttcagatgagtgtgtttgtgttcactttttattgtgttatttttggtggcaatgctcctaagataatagctgattttctctgtgatgatttgcatargaagttaaatgagaagaatagtattgcccagtaatctgtgtatcatcgtctgtgcatctcatcatcatttgttatggtgcatatggttggagtgtgtaatgcaaagaaagggatggaggaaatacagatgagctgtgggtactgcatctgaatcatggggtctggctgggaccccctgccctccacaatgattatattcattcttctacagcgtagaagtgctcatggtggtgatacggatgtctgtgcactatarcttggaccaagtccatcttttctcttctgaaaggtcaccaaaga

SEQ ID NO: 12645 - DNA, 600 bp, Chicken  19866894216462_2
gctcctaagataatagctgattttctctgtgatgatttgcatargaagttaaatgagaagaatagtattgcccagtaatctgtgtatcatcgtctgtgcatctcatcatcatttgttatggtgcatatggttggagtgtgtaatgcaaagaaagggatggaggaaatacagatgagctgtgggtactgcatctgaatcatggggtctggctgggaccccctgccctccacaatgattatattcattcttctacagcgtagaagtgctcatggtggtgatacggatgtctgtgcactatarcttggaccaagtccatcttttctcttctgaaaggtcaccaaagaactgctaaatagcagcaactttcagctttgtgtcagaagtagtttgccagtcacaaagcagcacttcacaaacttttaaattcaacctggtacatcaggagcagtgtaatgagctctggtagtcgcacaggacacaaactatgtgcttggataacatttaatgcatgctttgccatccctgtaactctgcagtcttgtgtagagctattatacttaagaaaggatatgtacctggtgaatcacacctactaaatct

SEQ ID NO: 12646 - DNA, 600 bp, Chicken  19866894216466_1
gtccagcaagtttataataatgactgtgaagtcaccagatgcaatcatctgaatcccctctgcctgtaaatcacgaaggcattttatctttgtgaaattaaacttaattccaagcagacaaattcagcttgaatagttgatttgtctgaggaaagcctttgagaacataccaaagaactgctaactttgtacttaagatattagagtactacgatttacctagttatgctcttcttcttaaagagctctgcattactgatcaattttacactacaacacaaatgtgacttcagtagcccratcaacaggctgagcaccttctcttttcctctatctgtagggaagaaaaagaagaaaattttttcaggaacattcctttcactatgtttcggagtatttaatattttaaatacagaatatttttcttagttactgctcactatttgttcgtaaatactgtcttgatttttaattagcagcttgacaattcagcaaagaaattaacctgagaagagaggtggagtacacactaaataaacaagaaagcagagggggaaattagtgtagaaatgaagtgactcactcagtgtctgtgctgga

SEQ ID NO: 12647 - DNA, 600 bp, Chicken  19866894216466_2
attttaaatacagaatatttttcttagttactgctcactatttgttcgtaaatactgtcttgatttttaattagcagcttgacaattcagcaaagaaattaacctgagaagagaggtggagtacacactaaataaacaagaaagcagagggggaaattagtgtagaaatgaagtgactcactcagtgtctgtgctggagtcagaaagtcacaaacaggaaacaaattggagttgaagaacattttatcatctagtgaaataagtttgcagggtcataatttttccatctattcattcttscctcgcttttctccagtgcrgattgctgagcttatgtaaaccaacatccttctttgattcattcaaactgctcttcagaattcctcaacttacaactgatgaaagcattaaaaggagagctacttggatggacctaaaaggtgtatgtgtggaatctgatatgtgtgttaaagctttgatctgtacctgtaaatagtggaaggcacttatttcactgggagcatatgcttaaatgcctctgtgaagcagagttttactaggaaattatgtaagcttactatttatttatatatttagttt

SEQ ID NO: 12648 - DNA, 600 bp, Chicken  19866894216466_3
ttcttagttactgctcactatttgttcgtaaatactgtcttgatttttaattagcagcttgacaattcagcaaagaaattaacctgagaagagaggtggagtacacactaaataaacaagaaagcagagggggaaattagtgtagaaatgaagtgactcactcagtgtctgtgctggagtcagaaagtcacaaacaggaaacaaattggagttgaagaacattttatcatctagtgaaataagtttgcagggtcataatttttccatctattcattcttscctcgcttttctccagtgcrgattgctgagcttatgtaaaccaacatccttctttgattcattcaaactgctcttcagaattcctcaacttacaactgatgaaagcattaaaaggagagctacttggatggacctaaaaggtgtatgtgtggaatctgatatgtgtgttaaagctttgatctgtacctgtaaatagtggaaggcacttatttcactgggagcatatgcttaaatgcctctgtgaagcagagttttactaggaaattatgtaagcttactatttatttatatatttagttttccttttacgatcaatttaa

SEQ ID NO: 12649 - DNA, 600 bp, Chicken  19866894216472_1
tcacatgagggcagtacatctctatgtcagtgccttgaaacattcctgtcccatcgtggcattcccttgcacaagtcatcaagattttttgaatggacattgcgtggactgtggtgatcccttcctattctcctgtcccagaataggtacagtatcagcgtgagaccttcatggagcaggggacaatacattcttgatgagtgccagcacaacccacaggacgtggttgagatttttccaagcaggatctgaatgggagctatttggggacagggagaaactgtgtcattttcaggcttmcatagagaagccaaatgctcatatattgtccaaggaagaacaccagtgtcttgaacatttctgatctttaaacatttcacggggctcatactaaaagacattctccagaatctcttgcccagcaaatgggcaattcactcaaaaaatgtcttgcttagagaagcagttggaagttttagcccaaccccaaastctcaatcttctgcagactactaagttttgttacatcacttccytctcataaattgctgccacggctgccctaaagataagccacctggactgggagaaggtaatctt

SEQ ID NO: 12650 - DNA, 554 bp, Chicken  19866894216472_2
cttgatgagtgccagcacaacccacaggacgtggttgagatttttccaagcaggatctgaatgggagctatttggggacagggagaaactgtgtcattttcaggcttmcatagagaagccaaatgctcatatattgtccaaggaagaacaccagtgtcttgaacatttctgatctttaaacatttcacggggctcatactaaaagacattctccagaatctcttgcccagcaaatgggcaattcactcaaaaaatgtcttgcttagagaagcagttggaagttttagcccaaccccaaastctcaatcttctgcagactactaagttttgttacatcacttccytctcataaattgctgccacggctgccctaaagataagccacctggactgggagaaggtaatctttgccacttttagccttctgaatcacagctgtggcaagaggaaaggaagtgtcctctagtagttttggttactggtaccagaggaattcacagaggggctctcagatcattcactcccttcctatctcagcaaagccacactgtcac

SEQ ID NO: 12651 - DNA, 510 bp, Chicken  19866894216472_3
tccaagcaggatctgaatgggagctatttggggacagggagaaactgtgtcattttcaggcttmcatagagaagccaaatgctcatatattgtccaaggaagaacaccagtgtcttgaacatttctgatctttaaacatttcacggggctcatactaaaagacattctccagaatctcttgcccagcaaatgggcaattcactcaaaaaatgtcttgcttagagaagcagttggaagttttagcccaaccccaaastctcaatcttctgcagactactaagttttgttacatcacttccytctcataaattgctgccacggctgccctaaagataagccacctggactgggagaaggtaatctttgccacttttagccttctgaatcacagctgtggcaagaggaaaggaagtgtcctctagtagttttggttactggtaccagaggaattcacagaggggctctcagatcattcactcccttcctatctcagcaaagccacactgtcac

SEQ ID NO: 12652 - DNA, 600 bp, Chicken  19866894216483_1
agcctagtaatgataatccctatgtaaaatagtaggcggatatgagcttctaagaaattcagtatctttcaagcagattaggtctactgactttatggacatcaaaggagattataacatcccctgaagtaaaacaatttaaagtccactatgtaaatcgagaatgcaagactacaagacagggactacctgtgctcatgtcagaagccaatcacagcaaaaaagccagagcttgtaagcctgaaatttgcttttaaattttgatgtaataaaatcacgaacatctcatggacatattaygagattcttttgaagaaatttaagtacacattaatcacagtgctatgggagaacacaacttccttactacctatgtgtattttttcagtctaatacataatatgagaagaattacagtacgtaccttttactttaagttcttctcatagtatctagtgtttaatgcagaaaataattttggacaataacagattcaactatgttacctttaaaatgctattttgcgtctgcctttgtctttttattactattttattattgctaggaactttctagttgagatacctctaaaattatggt

SEQ ID NO: 12653 - DNA, 600 bp, Chicken  19866894216483_2
aatgggaagcttgttaagattatgatagaactcaaaagtcagaaaactgctgtcaaaatagagataaagatacagcactgataaggaatgggcattcattatggtggggagttgggcacttgcccaatgaggagaggctgatgctagctagattttctttggaggaaactaaactctatatcaggcacacatcaaatgcaatctagcaagtagtgggttcataagggtccaaacaaaaggttagttcttcaaaggactttgagctgcacatgtgacgaggacatctgaatcaggaaactrgactaaatcaattcaaaataagcccccagagcagtacacataatagtggcagtagtctcaaccaccagctattttgatctcctgatctatttcttccatgtatgacttgctgatgcagacacagctactaccctgtaaaaaaaagttaacctggcacttgtatggtctaaaattattgcactgaaagatagagaaagaaatactagccatttaagtgaaggtcacagcaaaaatccaaataattcacctaagcttaagttttacagaatttagggtatacattatactgtaaggtgtgaa

SEQ ID NO: 12654 - DNA, 600 bp, Chicken  19866894216490_1
tctccctcctcgtggcgagggagaaaacgcgcagctgctccgtgagctccttctgctcctggagctctcctcccgtggcactcactgctctcctgttcccccttggctggggactgcaggctcacagtctccgccacgcatccgctgtgccgtttctccagaggagctctatggccaacctgttcctttcgggctgattgtgtgcttttctatgcagacaggcaggcaggcaggatttcttgcagctctcgcacttgctgtgtctcatgctccgtcctgcagctgtgccttctctcgttygtgatgtgctctgctcagcatctgtctgctgaacaacagctgtcacagctgtcacactggccctaccttgtgctctccctgcagacgttagaacattctctctgccactctccaaagcgtaacagctcagatggtttccagcagcacacagctggcacacagagccgtgctgaccacggcagggtgcagcttcttgttgcagagccccacccacttgtagcggtgggtgagcrtgccaaagggggatcccaccgctgctcttctccatccttctctgctctttctgcaccaccgtgcatt

SEQ ID NO: 12655 - DNA, 554 bp, Chicken  19866894216490_2
gatttcttgcagctctcgcacttgctgtgtctcatgctccgtcctgcagctgtgccttctctcgttygtgatgtgctctgctcagcatctgtctgctgaacaacagctgtcacagctgtcacactggccctaccttgtgctctccctgcagacgttagaacattctctctgccactctccaaagcgtaacagctcagatggtttccagcagcacacagctggcacacagagccgtgctgaccacggcagggtgcagcttcttgttgcagagccccacccacttgtagcggtgggtgagcrtgccaaagggggatcccaccgctgctcttctccatccttctctgctctttctgcaccaccgtgcattccttcctgctcgtgctgcgctgccctcagagtgctttgtccatttctcgcggtcgttgcagcagctgtccaagtgctgacgttggagccatttcttccccaccgcgagatcccttccgagacgcactgtctctgctgctgcaacagccccagttctggggtgccttttggtaaggagttgcgttgtg

SEQ ID NO: 12656 - DNA, 453 bp, Chicken  19866894216492_1
tcctgattgctgtggcgttactgcactctccctcctcgtggcgagggagaaaacgcgcagctgctccgtgagctccttctgctcctggagctctcctcccgtggcactcactgctctcctgttcccccttggctggggactgcaggctcacagtctccgccacgcatccgctgtgccgtttctccagaggagctctatggccaacctgttcctttcgggctgattgtgtgcttttctatgcagacaggcaggcaggcaggatttcttgcagctctcgcacttgctgtgtctcatgctccrtcctgcagctgtgccttctctcgttcgtgatgtgctctgctcagcatctgtctgctgaacaacagctgtcacagctgtcacactggccctaccttgtgctctccctgcagacgttagaacattctctctgccactctccaaagcgtaacagct

SEQ ID NO: 12657 - DNA, 556 bp, Chicken  19866894216500_1
  misc_feature (1)..(28): n is any nucleotide
nnnnnnnnnnnnnnnnnnnnnnnnnnnnaaggagctacggagcagctgcgcgttttctccctcgccacgaggagggagagtgcagtaacgccacagcaatcaggaaggagctttgctgctgcaccgagagctgcgcccgatggaacagcagggaggagagcgtttctcgcacaccccgcaggcacttggggggatgcgctgggatgtggggaagccctacgggttgtggggcagctaaaggatgcctatgggagggctacaggggcactttggggcagctatggggcagagccacacctrggagctgcctttacccaacacactgctggtggtggaactgctgctggccacgggccgggggcagtgatggggctgctctggggctgctctaggatggctctggggctgctgtggggcagctatgggacacacccacacctcggtggggctgatgttcctccacacggagctggtggtaaacctgctctgattgtgggacctcccccatagctcccttgacccccatcttgccccagaagacgtgggcaaggtgagg

SEQ ID NO: 12658 - DNA, 600 bp, Chicken  19866894216527_1
gcttcttaccacaaaccagctctcatcagtgcttcagtttaatgtgggttaagaaacggagaggaaaccacagacacttgcctcattcttctgcctgtaatgaagatggaaatttccaacagccaggggaaaccttaatggatctgcttgtgctcacctgaaactcaccttcaaagtcctaaactaactccaacacaaaaacacaatgaaatcctaagatccaaaaatcattagattacattcacggatactagtcagactcaggtacagaacttcttgtatcagccacagctaagcaamrtgaagtgctaaactgtaaggttacctggcaaargataaggaaacattttccctctaacacttcaacaagtaacaaaaacctarcagtgcagaaacacaggtggtttctccttatatcacagaagatgacctcattatactgccacatcactactttcaatccttttaagcttttcttacactctcttgctaatgaagcaaaaacatctgtcaccacaaaagctggggataacaacttcacacrcttatttgtgaaccaccaccaaaattctgaagctaaagcagtactattaatattaa

SEQ ID NO: 12659 - DNA, 600 bp, Chicken  19866894216527_2
cttcttaccacaaaccagctctcatcagtgcttcagtttaatgtgggttaagaaacggagaggaaaccacagacacttgcctcattcttctgcctgtaatgaagatggaaatttccaacagccaggggaaaccttaatggatctgcttgtgctcacctgaaactcaccttcaaagtcctaaactaactccaacacaaaaacacaatgaaatcctaagatccaaaaatcattagattacattcacggatactagtcagactcaggtacagaacttcttgtatcagccacagctaagcaamrtgaagtgctaaactgtaaggttacctggcaaargataaggaaacattttccctctaacacttcaacaagtaacaaaaacctarcagtgcagaaacacaggtggtttctccttatatcacagaagatgacctcattatactgccacatcactactttcaatccttttaagcttttcttacactctcttgctaatgaagcaaaaacatctgtcaccacaaaagctggggataacaacttcacacrcttatttgtgaaccaccaccaaaattctgaagctaaagcagtactattaatattaaa

SEQ ID NO: 12660 - DNA, 600 bp, Chicken  19866894216527_3
cagtttaatgtgggttaagaaacggagaggaaaccacagacacttgcctcattcttctgcctgtaatgaagatggaaatttccaacagccaggggaaaccttaatggatctgcttgtgctcacctgaaactcaccttcaaagtcctaaactaactccaacacaaaaacacaatgaaatcctaagatccaaaaatcattagattacattcacggatactagtcagactcaggtacagaacttcttgtatcagccacagctaagcaamrtgaagtgctaaactgtaaggttacctggcaaargataaggaaacattttccctctaacacttcaacaagtaacaaaaacctarcagtgcagaaacacaggtggtttctccttatatcacagaagatgacctcattatactgccacatcactactttcaatccttttaagcttttcttacactctcttgctaatgaagcaaaaacatctgtcaccacaaaagctggggataacaacttcacacrcttatttgtgaaccaccaccaaaattctgaagctaaagcagtactattaatattaaagcaaagagaaatttaggttgaaaaaaaatatat

SEQ ID NO: 12661 - DNA, 600 bp, Chicken  19866894216527_4
attcttctgcctgtaatgaagatggaaatttccaacagccaggggaaaccttaatggatctgcttgtgctcacctgaaactcaccttcaaagtcctaaactaactccaacacaaaaacacaatgaaatcctaagatccaaaaatcattagattacattcacggatactagtcagactcaggtacagaacttcttgtatcagccacagctaagcaamrtgaagtgctaaactgtaaggttacctggcaaargataaggaaacattttccctctaacacttcaacaagtaacaaaaacctarcagtgcagaaacacaggtggtttctccttatatcacagaagatgacctcattatactgccacatcactactttcaatccttttaagcttttcttacactctcttgctaatgaagcaaaaacatctgtcaccacaaaagctggggataacaacttcacacrcttatttgtgaaccaccaccaaaattctgaagctaaagcagtactattaatattaaagcaaagagaaatttaggttgaaaaaaaatatatacacttactactaaktctaggtgttcagtctgaaagtgctgaaaacagcc

SEQ ID NO: 12662 - DNA, 600 bp, Chicken  19866894216527_5
cggatactagtcagactcaggtacagaacttcttgtatcagccacagctaagcaamrtgaagtgctaaactgtaaggttacctggcaaargataaggaaacattttccctctaacacttcaacaagtaacaaaaacctarcagtgcagaaacacaggtggtttctccttatatcacagaagatgacctcattatactgccacatcactactttcaatccttttaagcttttcttacactctcttgctaatgaagcaaaaacatctgtcaccacaaaagctggggataacaacttcacacrcttatttgtgaaccaccaccaaaattctgaagctaaagcagtactattaatattaaagcaaagagaaatttaggttgaaaaaaaatatatacacttactactaaktctaggtgttcagtctgaaagtgctgaaaacagccttttccaggacgcttgctaggtgtgtctcctcccacccacaaatccctgctcccattagctgcagctgcaagcactcagtgcttctgcaaatcaaacacttgggtctcaagtcatcaagccagaaaatgagcaccacctgtgaaaagctgcctttctgtg

SEQ ID NO: 12663 - DNA, 600 bp, Chicken  19866894216527_6
tccctctaacacttcaacaagtaacaaaaacctarcagtgcagaaacacaggtggtttctccttatatcacagaagatgacctcattatactgccacatcactactttcaatccttttaagcttttcttacactctcttgctaatgaagcaaaaacatctgtcaccacaaaagctggggataacaacttcacacrcttatttgtgaaccaccaccaaaattctgaagctaaagcagtactattaatattaaagcaaagagaaatttaggttgaaaaaaaatatatacacttactactaaktctaggtgttcagtctgaaagtgctgaaaacagccttttccaggacgcttgctaggtgtgtctcctcccacccacaaatccctgctcccattagctgcagctgcaagcactcagtgcttctgcaaatcaaacacttgggtctcaagtcatcaagccagaaaatgagcaccacctgtgaaaagctgcctttctgtgctgtggctggtgctgcattagcagaaatgatttttcacagctgtttagccatgactaaggcgaggcgagattactgtttgttttgtggaggctttcttttgattc

SEQ ID NO: 12664 - DNA, 600 bp, Chicken  19866894216530_1
cggtaaactcggctttaccctcttgcccttcggtgctcgtttctgtctcttctgatgcatcacgtaagcacgtcataatttccagcatgcaattatcagtgtttattcttctctcacagcagagcactacaggagccacgctacccctggatacgatgcaatacgaggtgaagggattagcatgtaagtactttggttgcttaaaaattaaggctaagaatgaaagctcttttcgagtgaatacgctcatgaaatagcttgcgtcctcttcattcctgtcatagagattagggatgaagyaccagaatacaacgtttcccagagatttctgttggtggagaaatccagccctcctaatgagactatataaactctccatattatctcattatttttcattaatccatgtgcgccagcccgcctccacgtgctgtaattccatgttaccacccgtgttcacattaaaataggaacagattattcaagactcccacacgaatcgtgaacctctctcccttctgatctgttcctgcagcctgggtcgctcccgggatggggggaagccttcccccaaggcaggattagggtccgaaccccatc

SEQ ID NO: 12665 - DNA, 600 bp, Chicken  19866894216530_10
ggctgtaattgggctgcagcgaagctatcaggctgcttcaggtccgtgatagtcagggcaaacgtgtccaaagcacagcatcacagcctcctcccagcgatacctccaaggcttttttggctctccaaagycacrttccttgccctctgtgcatggtgtacaggagcagattcccggctgctgcaatctgctcgtactgcagctaagctcatttgtgctgtggaagtgcccctctgagcagttttgccacaatccaagtactgcagaaacttcaccttgctgcgcgtgtctgcaggcgcrtctcatgggtgcacgtgctgttatacacacaggtcctgttctggggacatccatgatagccaccaaaatgggccgtcctgaggtcacatcaacccatggtagcacagtttgatttgtagtggtcagttcagtccacgcctcatttatggataattccaggtgtagatttcaggagtgcggtcactgcagatgtcacttgctgctggatgagtgctgaggttctggctcttcatcacacccaggtccaggtgctgcataccccaacatgcagagtttgggcaatggctgtgtttcccaagc

SEQ ID NO: 12666 - DNA, 600 bp, Chicken  19866894216530_11
tgctgctttttttgccacgaagaggcacataacgtgcttttccttgggagctctctgaattgcttcagtcagatgctgtctttgtttttgttcaacttctttccctttattccagtgtcagcgggcactagaatagagcaaggcttcaatcaatccggactgattgattatttgcctcatgtttgttcttagaagtccttcagagctaggtggtgtagtagcaccaagtaaaaaacaggtcccagccagcaccaaagttcttataatccccatataaaaaggaaccaggcttcttctcaygttcagaagtgcaaatacggttctgtactgctgttctgtctcctttatttgttgaagcacagataccaggctgagaggcattgtgctggtggttgtcccaccaacgcgtcctgctgcttcttgagccttttactcacctgtttatatggatatgctcagaggtgtataaccatgggagtatacattctcatgttcccatgaatggctggcttttcaatacttgcagatcagtgttttcaaatgcatgctgcccttwtaccctgtgtgcagttcgcctctaagctctgycwgaatatctgc

SEQ ID NO: 12667 - DNA, 600 bp, Chicken  19866894216530_12
gttcttataatccccatataaaaaggaaccaggcttcttctcaygttcagaagtgcaaatacggttctgtactgctgttctgtctcctttatttgttgaagcacagataccaggctgagaggcattgtgctggtggttgtcccaccaacgcgtcctgctgcttcttgagccttttactcacctgtttatatggatatgctcagaggtgtataaccatgggagtatacattctcatgttcccatgaatggctggcttttcaatacttgcagatcagtgttttcaaatgcatgctgcccttwtaccctgtgtgcagttcgcctctaagctctgycwgaatatctgctgttcagaagacaaccttcrtccctgtgaatgtgacctacattgctggttctttggcatctgatgtgacaccgagatgtgctgaagcacgtggcggtcaaatgcgtccctctacccagcagatccgggtgggtttggataacgggcttatcctcatcgttatcgtgttctcacagatctgtcttgtctgtcaacgttaccagctctatttctccatttttggttagatcgtttgataagatattcaacgatctggg

SEQ ID NO: 12668 - DNA, 600 bp, Chicken  19866894216530_13
gcttcttctcaygttcagaagtgcaaatacggttctgtactgctgttctgtctcctttatttgttgaagcacagataccaggctgagaggcattgtgctggtggttgtcccaccaacgcgtcctgctgcttcttgagccttttactcacctgtttatatggatatgctcagaggtgtataaccatgggagtatacattctcatgttcccatgaatggctggcttttcaatacttgcagatcagtgttttcaaatgcatgctgcccttwtaccctgtgtgcagttcgcctctaagctctgycwgaatatctgctgttcagaagacaaccttcrtccctgtgaatgtgacctacattgctggttctttggcatctgatgtgacaccgagatgtgctgaagcacgtggcggtcaaatgcgtccctctacccagcagatccgggtgggtttggataacgggcttatcctcatcgttatcgtgttctcacagatctgtcttgtctgtcaacgttaccagctctatttctccatttttggttagatcgtttgataagatattcaacgatctgggtcaaaaccagacctaaatgggaccctactgct

SEQ ID NO: 12669 - DNA, 599 bp, Chicken  19866894216530_14
ttcttctcaygttcagaagtgcaaatacggttctgtactgctgttctgtctcctttatttgttgaagcacagataccaggctgagaggcattgtgctggtggttgtcccaccaacgcgtcctgctgcttcttgagccttttactcacctgtttatatggatatgctcagaggtgtataaccatgggagtatacattctcatgttcccatgaatggctggcttttcaatacttgcagatcagtgttttcaaatgcatgctgcccttwtaccctgtgtgcagttcgcctctaagctctgycwgaatatctgctgttcagaagacaaccttcrtccctgtgaatgtgacctacattgctggttctttggcatctgatgtgacaccgagatgtgctgaagcacgtggcggtcaaatgcgtccctctacccagcagatccgggtgggtttggataacgggcttatcctcatcgttatcgtgttctcacagatctgtcttgtctgtcaacgttaccagctctatttctccatttttggttagatcgtttgataagatattcaacgatctgggtcaaaaccagacctaaatgggaccctactgctg

SEQ ID NO: 12670 - DNA, 569 bp, Chicken  19866894216530_15
ttctgtactgctgttctgtctcctttatttgttgaagcacagataccaggctgagaggcattgtgctggtggttgtcccaccaacgcgtcctgctgcttcttgagccttttactcacctgtttatatggatatgctcagaggtgtataaccatgggagtatacattctcatgttcccatgaatggctggcttttcaatacttgcagatcagtgttttcaaatgcatgctgcccttwtaccctgtgtgcagttcgcctctaagctctgycwgaatatctgctgttcagaagacaaccttcrtccctgtgaatgtgacctacattgctggttctttggcatctgatgtgacaccgagatgtgctgaagcacgtggcggtcaaatgcgtccctctacccagcagatccgggtgggtttggataacgggcttatcctcatcgttatcgtgttctcacagatctgtcttgtctgtcaacgttaccagctctatttctccatttttggttagatcgtttgataagatattcaacgatctgggtcaaaaccagacctaaatgggaccctactgctg

SEQ ID NO: 12671 - DNA, 600 bp, Chicken  19866894216530_2
acgtttcccagagatttctgttggtggagaaatccagccctcctaatgagactatataaactctccatattatctcattatttttcattaatccatgtgcgccagcccgcctccacgtgctgtaattccatgttaccacccgtgttcacattaaaataggaacagattattcaagactcccacacgaatcgtgaacctctctcccttctgatctgttcctgcagcctgggtcgctcccgggatggggggaagccttcccccaaggcaggattagggtccgaaccccatcacctgcctctkcgcaccccaatcctacttctgtgcccgtcagccgttcctgccacccccagcacctgagtcgggacaaagctgccctgtcaaagctgatttttagcagaaaattgcttcttggtgaaaggtgttccctatggaaagcggctgcttttcatagacaggggtggatttggggattctcgtctcaggaagaaaggctgaaactctaaaccccctgaaggcttctgggttattttgtttggtttcaagaggaaatacttccctcccctcagctgttttcatatcagttcaaataatgtcaggacg

SEQ ID NO: 12672 - DNA, 600 bp, Chicken  19866894216530_3
gggttattttgtttggtttcaagaggaaatacttccctcccctcagctgttttcatatcagttcaaataatgtcaggacgcaatttgctgctctttcccattattttggtgacttttcctgtttcacgctgcccatgtgtagtttgtagggtgtggtaaggaatgtaaattattattttcatgtaggtgtggtagctattcagttgtaaatcctgttttcaatccttctgactattttatttgtgatctgtaatatcgatctgtcttcagggcagagagcggtgccatctatcagcagcrgtgacttttattcctcgctaaaataaagcactcaaagcagcccctgaaatctatgtgatggaggagggaggggggggrraaaaaaaagaagagatctcgcttgaagccttttttttttttgcttgttctttgaaatgagctgaggaatttgtttctgtggttgatttgtttttatcagctcgttgcaaaatgtgactggcctccctcttcagatccacctcctgtggtagcctgccagtggctgtctcctgataaccractctatgaaatcagaaaggggaaaaaaataataaaatttaa

SEQ ID NO: 12673 - DNA, 600 bp, Chicken  19866894216530_4
tgtcaggacgcaatttgctgctctttcccattattttggtgacttttcctgtttcacgctgcccatgtgtagtttgtagggtgtggtaaggaatgtaaattattattttcatgtaggtgtggtagctattcagttgtaaatcctgttttcaatccttctgactattttatttgtgatctgtaatatcgatctgtcttcagggcagagagcggtgccatctatcagcagcrgtgacttttattcctcgctaaaataaagcactcaaagcagcccctgaaatctatgtgatggaggagggargggggggrraaaaaaaagaagagatctcgcttgaagccttttttttttttgcttgttctttgaaatgagctgaggaatttgtttctgtggttgatttgtttttatcagctcgttgcaaaatgtgactggcctccctcttcagatccacctcctgtggtagcctgccagtggctgtctcctgataaccractctatgaaatcagaaaggggaaaaaaataataaaatttaaagatttgcctttgaacgtgattcatgacagtgaaggaacgggaataattgataaaaaagagagctctgtg

SEQ ID NO: 12674 - DNA, 600 bp, Chicken  19866894216530_5
cgcaatttgctgctctttcccattattttggtgacttttcctgtttcacgctgcccatgtgtagtttgtagggtgtggtaaggaatgtaaattattattttcatgtaggtgtggtagctattcagttgtaaatcctgttttcaatccttctgactattttatttgtgatctgtaatatcgatctgtcttcagggcagagagcggtgccatctatcagcagcrgtgacttttattcctcgctaaaataaagcactcaaagcagcccctgaaatctatgtgatggaggagggaggggggggrraaaaaaaagaagagatctcgcttgaagccttttttttttttgcttgttctttgaaatgagctgaggaatttgtttctgtggttgatttgtttttatcagctcgttgcaaaatgtgactggcctccctcttcagatccacctcctgtggtagcctgccagtggctgtctcctgataaccractctatgaaatcagaaaggggaaaaaaataataaaatttaaagatttgcctttgaacgtgattcatgacagtgaaggaacgggaataattgataaaaaagagagctctgtggctgtaat

SEQ ID NO: 12675 - DNA, 600 bp, Chicken  19866894216530_6
gcaatttgctgctctttcccattattttggtgacttttcctgtttcacgctgcccatgtgtagtttgtagggtgtggtaaggaatgtaaattattattttcatgtaggtgtggtagctattcagttgtaaatcctgttttcaatccttctgactattttatttgtgatctgtaatatcgatctgtcttcagggcagagagcggtgccatctatcagcagcrgtgacttttattcctcgctaaaataaagcactcaaagcagcccctgaaatctatgtgatggaggagggaggggggggrraaaaaaaagaagagatctcgcttgaagccttttttttttttgcttgttctttgaaatgagctgaggaatttgtttctgtggttgatttgtttttatcagctcgttgcaaaatgtgactggcctccctcttcagatccacctcctgtggtagcctgccagtggctgtctcctgataaccractctatgaaatcagaaaggggaaaaaaataataaaatttaaagatttgcctttgaacgtgattcatgacagtgaaggaacgggaataattgataaaaaagagagctctgtggctgtaatt

SEQ ID NO: 12676 - DNA, 600 bp, Chicken  19866894216530_7
atctgtcttcagggcagagagcggtgccatctatcagcagcrgtgacttttattcctcgctaaaataaagcactcaaagcagcccctgaaatctatgtgatggaggagggaggggggggrraaaaaaaagaagagatctcgcttgaagccttttttttttttgcttgttctttgaaatgagctgaggaatttgtttctgtggttgatttgtttttatcagctcgttgcaaaatgtgactggcctccctcttcagatccacctcctgtggtagcctgccagtggctgtctcctgataaccractctatgaaatcagaaaggggaaaaaaataataaaatttaaagatttgcctttgaacgtgattcatgacagtgaaggaacgggaataattgataaaaaagagagctctgtggctgtaattgggctgcagcgaagctatcaggctgcttcaggtccgtgatagtcagggcaaacgtgtccaaagcacagcatcacagcctcctcccagcgatacctccaaggcttttttggctctccaaagycacrttccttgccctctgtgcatggtgtacaggagcagattcccggctgctgcaatct

SEQ ID NO: 12677 - DNA, 600 bp, Chicken  19866894216530_8
ctccctcttcagatccacctcctgtggtagcctgccagtggctgtctcctgataaccractctatgaaatcagaaaggggaaaaaaataataaaatttaaagatttgcctttgaacgtgattcatgacagtgaaggaacgggaataattgataaaaaagagagctctgtggctgtaattgggctgcagcgaagctatcaggctgcttcaggtccgtgatagtcagggcaaacgtgtccaaagcacagcatcacagcctcctcccagcgatacctccaaggcttttttggctctccaaagycacrttccttgccctctgtgcatggtgtacaggagcagattcccggctgctgcaatctgctcgtactgcagctaagctcatttgtgctgtggaagtgcccctctgagcagttttgccacaatccaagtactgcagaaacttcaccttgctgcgcgtgtctgcaggcgcrtctcatgggtgcacgtgctgttatacacacaggtcctgttctggggacatccatgatagccaccaaaatgggccgtcctgaggtcacatcaacccatggtagcacagtttgatttgtagtggtcagttcag

SEQ ID NO: 12678 - DNA, 600 bp, Chicken  19866894216530_9
ctcttcagatccacctcctgtggtagcctgccagtggctgtctcctgataaccractctatgaaatcagaaaggggaaaaaaataataaaatttaaagatttgcctttgaacgtgattcatgacagtgaaggaacgggaataattgataaaaaagagagctctgtggctgtaattgggctgcagcgaagctatcaggctgcttcaggtccgtgatagtcagggcaaacgtgtccaaagcacagcatcacagcctcctcccagcgatacctccaaggcttttttggctctccaaagycacrttccttgccctctgtgcatggtgtacaggagcagattcccggctgctgcaatctgctcgtactgcagctaagctcatttgtgctgtggaagtgcccctctgagcagttttgccacaatccaagtactgcagaaacttcaccttgctgcgcgtgtctgcaggcgcrtctcatgggtgcacgtgctgttatacacacaggtcctgttctggggacatccatgatagccaccaaaatgggccgtcctgaggtcacatcaacccatggtagcacagtttgatttgtagtggtcagttcagtcca

SEQ ID NO: 12679 - DNA, 599 bp, Chicken  19866894216533_1
  misc_feature (1)..(85): n is any nucleotide
nnnnnnnnnnnnnnnnnnnnnnnnnnnnnnnnnnnnnnnnnnnnnnnnnnnnnnnnnnnnnnnnnnnnnnnnnnnnnnnnnnnnnggcctgaaagaagcctcctattgccctgctagggctggagcagaacttacctgctgcttcttgctgccatttcctccctcatctttttaatgtcgctcttgcatttctcaatctccacaactttcaggccttccactgtcaacaaaggaaaacaccaaaggtgtcaccgtggcaaaatccgaaggctctcctttcacagttgtgcagaatttcaragggcttcaataagggggcagcccagacagccggtgagccccacacacacgggtgctgccaaagcagtrtgtcatggaagcccataggcattctcggctgccagctttagataatagcacgagctttttaatttgcagactggcctcagctttcccgcaattgtgagcagcagccagcttgttctaatgccttcacttctctgctgtagagcaggaatcaaaggaaatcctgagcaaaacccctcctgcgatgggatgataagtgcagctcggcaaacgcgtcccagcgggattagaat

SEQ ID NO: 12680 - DNA, 599 bp, Chicken  19866894216533_2
  misc_feature (1)..(16): n is any nucleotide
nnnnnnnnnnnnnnnnggcctgaaagaagcctcctattgccctgctagggctggagcagaacttacctgctgcttcttgctgccatttcctccctcatctttttaatgtcgctcttgcatttctcaatctccacaactttcaggccttccactgtcaacaaaggaaaacaccaaaggtgtcaccgtggcaaaatccgaaggctctcctttcacagttgtgcagaatttcaragggcttcaataagggggcagcccagacagccggtgagccccacacacacgggtgctgccaaagcagtrtgtcatggaagcccataggcattctcggctgccagctttagataatagcacgagctttttaatttgcagactggcctcagctttcccgcaattgtgagcagcagccagcttgttctaatgccttcacttctctgctgtagagcaggaatcaaaggaaatcctgagcaaaacccctcctgcgatgggatgataagtgcagctcggcaaacgcgtcccagcgggattagaattcccattaagataaaaagttttaatttgaaaggtcatgcagagcactgagaggctctgagaggcatcgc

SEQ ID NO: 12681 - DNA, 600 bp, Chicken  19866894216534_1
accatatgaagtgtatatgaattagacccaaaaatatatacttgcatttctcattcctttcaaggcctcaaaagctatatttgcagttagcttttttgtaagcacactagagatctgataaagtttcacctacaacacctcagtatgttgttgcatttgttcacctgaatccatctaagaacatgagaaaagaaatcctgcatcaagacaaagatttctttaactcagtagcccatccttggcagtagtgaccttttctcttatgaattacagagctcctcatcatgtagtaatatgcaktttaggggggactgaataggggactcagttggattgctttatttattcaccactggacctatccctaatgagctggtgtaatcaccaaaagaatccctttaaacttttggccttcacaacttcaggttgtaacaagttccaaaatataattatatgctatgtgaaaacattaccccctttgtctgtgcactaaatgtactcctttgatgaagatacttctctcctttgcttttccttggactgcttttcacatgttgattctgattggcatcaggagatcaggaagacatattgcatctt

SEQ ID NO: 12682 - DNA, 600 bp, Chicken  19866894216540_1
cataccattttccttactttatttacacttcctgccttcactgaatttctgtcttgtgacaggaaggtgaggatgtcccagttaaatggcacttgcccctctgaaattggggttattccacatgccacttagaaagagttagtaagtaattaacagatcttttaatagaaggttaataaattatttagcacctatagctcacttggctaagtatgactacggcctatagccattcctagcaccatctgccactgtgctaaaaaccagagttaacaatatatctcacatctgttcttcacrcactctaaaatggcaattaataatgtattggcctttcataaagtattggcaaagagattacatgtcacccatttgtgcttttgcaccttcaaaagctgtattttgcttttcagacaaaacccatcccactgtcgtgtyraacaggacaatagtggccttttcatggttggtaggttcagagtcagtctcccccaacagtttaatatggatctgtcccagaacctgcactggtgccrtatgcctttgactcctgcattcataagaacacatcttagctttacacaaaccctccaagagcac

SEQ ID NO: 12683 - DNA, 600 bp, Chicken  19866894216540_2
ttagtaagtaattaacagatcttttaatagaaggttaataaattatttagcacctatagctcacttggctaagtatgactacggcctatagccattcctagcaccatctgccactgtgctaaaaaccagagttaacaatatatctcacatctgttcttcacrcactctaaaatggcaattaataatgtattggcctttcataaagtattggcaaagagattacatgtcacccatttgtgcttttgcaccttcaaaagctgtattttgcttttcagacaaaacccatcccactgtcgtgtyraacaggacaatagtggccttttcatggttggtaggttcagagtcagtctcccccaacagtttaatatggatctgtcccagaacctgcactggtgccrtatgcctttgactcctgcattcataagaacacatcttagctttacacaaaccctccaagagcacagcctatagggtctgagccttttcctgaccagagacgcactagttattacagcagcaccttcagaaactacttttcttctatctgtgtgattactttcttagcaagtgctgctgtgaccagaaatgctctgaatttat

SEQ ID NO: 12684 - DNA, 600 bp, Chicken  19866894216540_3
tagtaagtaattaacagatcttttaatagaaggttaataaattatttagcacctatagctcacttggctaagtatgactacggcctatagccattcctagcaccatctgccactgtgctaaaaaccagagttaacaatatatctcacatctgttcttcacrcactctaaaatggcaattaataatgtattggcctttcataaagtattggcaaagagattacatgtcacccatttgtgcttttgcaccttcaaaagctgtattttgcttttcagacaaaacccatcccactgtcgtgtyraacaggacaatagtggccttttcatggttggtaggttcagagtcagtctcccccaacagtttaatatggatctgtcccagaacctgcactggtgccrtatgcctttgactcctgcattcataagaacacatcttagctttacacaaaccctccaagagcacagcctatagggtctgagccttttcctgaccagagacgcactagttattacagcagcaccttcagaaactacttttcttctatctgtgtgattactttcttagcaagtgctgctgtgaccagaaatgctctgaatttatc

SEQ ID NO: 12685 - DNA, 600 bp, Chicken  19866894216540_4
tagcaccatctgccactgtgctaaaaaccagagttaacaatatatctcacatctgttcttcacrcactctaaaatggcaattaataatgtattggcctttcataaagtattggcaaagagattacatgtcacccatttgtgcttttgcaccttcaaaagctgtattttgcttttcagacaaaacccatcccactgtcgtgtyraacaggacaatagtggccttttcatggttggtaggttcagagtcagtctcccccaacagtttaatatggatctgtcccagaacctgcactggtgccrtatgcctttgactcctgcattcataagaacacatcttagctttacacaaaccctccaagagcacagcctatagggtctgagccttttcctgaccagagacgcactagttattacagcagcaccttcagaaactacttttcttctatctgtgtgattactttcttagcaagtgctgctgtgaccagaaatgctctgaatttatcctactgctcagtcattagcctggcagtccttgtggactcatgtcagtgagcactctcccatgcggacatggtctgtgacccaggtagtgaagtcaac

SEQ ID NO: 12686 - DNA, 594 bp, Chicken  19866894216541_1
ttactgtttactgtcatgctactgcattactaaattataaatgttaactggaaaaaatagactaatatgcagcatgaaatgaatatatgtgctagcataatattattttactattgcatgacggcaacacatctttccctatacaagagcagctttctgtacagtatagtgatcactgctatttaaataagaacactaattcttaattacttaaacaaacaaaaaaatgtcttaaattaactttgcactgactgagtttgaggttggttttggtttgtttgtttgtttgtttttaatcastaaamagatgtcacaaagtatgtatcttgctcttcattcttctgtctcattacggtggtacgaccatgtcttgtgctccctcctgtttctgtgcacacaaacagcgctgctcccttcctttcagtgggctggtggtgaggattgctggcatcagccagtgtagcacaaggtggaaaagaaactctgtctgggcttgagaagtcttttacagatgccctagaaataaacatctcttttcccttcagtgaactggagtttgttttcttttagcacagactttcaatcaagaagaaa

SEQ ID NO: 12687 - DNA, 589 bp, Chicken  19866894216541_2
gtttactgtcatgctactgcattactaaattataaatgttaactggaaaaaatagactaatatgcagcatgaaatgaatatatgtgctagcataatattattttactattgcatgacggcaacacatctttccctatacaagagcagctttctgtacagtatagtgatcactgctatttaaataagaacactaattcttaattacttaaacaaacaaaaaaatgtcttaaattaactttgcactgactgagtttgaggttggttttggtttgtttgtttgtttgtttttaatcastaaamagatgtcacaaagtatgtatcttgctcttcattcttctgtctcattacggtggtacgaccatgtcttgtgctccctcctgtttctgtgcacacaaacagcgctgctcccttcctttcagtgggctggtggtgaggattgctggcatcagccagtgtagcacaaggtggaaaagaaactctgtctgggcttgagaagtcttttacagatgccctagaaataaacatctcttttcccttcagtgaactggagtttgttttcttttagcacagactttcaatcaagaagaaa

SEQ ID NO: 12688 - DNA, 600 bp, Chicken  19866894216542_1
tgttctaacacacccacttctaatagaacagaattgttacaaacagagatgctatttgtttatgtacctaagtcgcacagtgtcatccaatcactttttgcatgccataagtagcacaggttttggttacttccatattggaagtcatacacggaaaaagagaagccacctgcaggactagttaaatatggttttactaggcagtgacactgcaaaactagaaaggaacagtccaacacagacagatcaattggtgttttgctatcatgaaacctattgtaattaagcaatctccaaacrcaaygtacacgtaaaactgtcaatcctacattaaccatacctggatcctggggtaatgaaaccacctcagaacagggcgaaaatgacacataactttgttctcccataattttgttggccactgtaaagtttatattagtgaaacctgcaacgcttgctctgttaataaaggagaaaaagatacatgacatggttttaatagtcataggcaaggtctatgacttctttatctttttgctttcaatagcagcaagataaatacctgtatgaatgaagaggaatcaatggtccattttcata

SEQ ID NO: 12689 - DNA, 600 bp, Chicken  19866894216542_2
ctaacacacccacttctaatagaacagaattgttacaaacagagatgctatttgtttatgtacctaagtcgcacagtgtcatccaatcactttttgcatgccataagtagcacaggttttggttacttccatattggaagtcatacacggaaaaagagaagccacctgcaggactagttaaatatggttttactaggcagtgacactgcaaaactagaaaggaacagtccaacacagacagatcaattggtgttttgctatcatgaaacctattgtaattaagcaatctccaaacrcaaygtacacgtaaaactgtcaatcctacattaaccatacctggatcctggggtaatgaaaccacctcagaacagggcgaaaatgacacataactttgttctcccataattttgttggccactgtaaagtttatattagtgaaacctgcaacgcttgctctgttaataaaggagaaaaagatacatgacatggttttaatagtcataggcaaggtctatgacttctttatctttttgctttcaatagcagcaagataaatacctgtatgaatgaagaggaatcaatggtccattttcatagcca

SEQ ID NO: 12690 - DNA, 599 bp, Chicken  19866894216543_1
  misc_feature (1)..(143): n is any nucleotide
nnnnnnnnnnnnnnnnnnnnnnnnnnnnnnnnnnnnnnnnnnnnnnnnnnnnnnnnnnnnnnnnnnnnnnnnnnnnnnnnnnnnnnnnnnnnnnnnnnnnnnnnnnnnnnnnnnnnnnnnnnnnnnnnnnnnnnnnnnnnnnncacgctgtggcaattgtctctgaactacaccaggccctttcctgcatgggaacacatcaagaagcgtagctttgtggagtgatgttctgaaatgatgtttcagactgctctgctcccattgatcaaggggccactggccattactggcaaaagcaaytacaaaagtcagggaagaaaaagagcatcagaactcttaagttcagagatacaagttctagcaggctgagtcacagataaccggggagtggggctgccccactccgataccagctgctctgccctttggcatctgctgctggcaaacccacagtgatagggcaccaggttggctgcccccttgtctgatctccagcagatgttctgctgttcggttaagcctcagacacaactggagaaacaacatgggagcaacagtaccaggaatgcctaccatatccaagtgttgtgtttatcagc

SEQ ID NO: 12691 - DNA, 600 bp, Chicken  19866894216550_1
tgtgaagcagaggtgatgtacagaacgcctgctgttttgtagaaggtttctgtctctttgagttagtctcgtgagaacagatcacaccaggcttgacctaagaagaatgatacagtagttccccatctcaagtgtgcattaggatgcgacctttcagcctatccatatcttcattttcccacttctgttgtttctggccctcccaagatggttgattttttttgcctgaaagtcagcagaagggtcgtgtcatatggccttccatagtatacccaagaggttttctttgctattttcttsttgttgtagcaggttatgtctactttattataaatagtatacctgtattcttataaacagtgcacagtttagctcttgtggctgatttctcttttttttttaagtttattttttttaataaaatgaaagatgcgtttggtcagtgttgaaggtgaactctatcagagagcaagactgtctcaaaggacacatataaaagtctgatctgtagccatccacacctgggaaggtgtctcttgcagcagcatcacgccatgtggaaagccccaaagaaaaatgctgcaggcaggtgcccagatg

SEQ ID NO: 12692 - DNA, 600 bp, Chicken  19866894216551_1
gctgaatggacacgtggagggacagagcaagaagtcaataagaatagactcttttttttttctttttatgtcaagagtttgtcctctcaatagcacatgcaaacagaaaacatgaggcagatttttttgctgcaatgtcaactttgttgctctagtacagttgagaaagcattgcttgtgaagttttcagaacagacctatccacctttattaagagaattctgtaagaaaacagaatgaaaatagatagcaatttcatagcagttgtggtgtgtatacagaccccctgctttcatttcwggccaaattctgtatgtcaaacttcattatatgttgacttttttatggccacttttatgaactcttaactgaaggcatttgtgctaatccagtagtttagtattgtagtaaaatactgtaaaataacaagataacaaaatttgatacattacctgaactgagatttgaattttaattgttctattaaaaaaataaagcagccctgtaataacagggtagctttcatttttatcactttcgctactctgctaatcagtctgaagtctgtaatatatctgatgacataacataaaatgttgt

SEQ ID NO: 12693 - DNA, 599 bp, Chicken  19866894216553_1
  misc_feature (1)..(18): n is any nucleotide
nnnnnnnnnnnnnnnnnntgcggttaccctgtaattagctgatagttactaatcattgcagtttgccttgccctgaggaagggctatggggtgtgaggaaggcacggtgtggcctgtggcctggctagcctggccaccaggcaaggcctggagggaaaacatctcccaacatcttcacaggagctgagcagatgaactggggcacctcatgtagcagatagggcttcacaggggtcggggtagggcgaggacaatctcattatgggggatgaacttagagcaaggggcctgcaaacacaygtttgaatgaggcctgggcgagtgaagacagcaaacgcattcccagaacatttggatatccctcttgcaactcatcctctcaaggcttctgcagttcctgggatgcagcaggcacagaaataaacacaaagtattacatgttctacatatgtttatttgccccagtattcctctttttctgaagaatcgtgcattacaatctacgcacagacaaaaaacgttattggcaatgtggatttgctcaggaaataaggcagcagagtcagctgtcactttaaccctcagcagcacagtccagg

SEQ ID NO: 12694 - DNA, 600 bp, Chicken  19866894216553_2
cagcaaacgcattcccagaacatttggatatccctcttgcaactcatcctctcaaggcttctgcagttcctgggatgcagcaggcacagaaataaacacaaagtattacatgttctacatatgtttatttgccccagtattcctctttttctgaagaatcgtgcattacaatctacgcacagacaaaaaacgttattggcaatgtggatttgctcaggaaataaggcagcagagtcagctgtcactttaaccctcagcagcacagtccaggtctggaatttttgcacttcctgtaaaaawtgggatcatccaatgccactgaagaacgacaaacatmtgggactatccctgatctctggacacacacccgtgagactctctcagagcatccatggctcgagcttaaacatttggggctatctaggaaaggattgatttgccatataaggagtagtgctgggaaaactgaaggggggaagtggggctgcagagggagttcgaagagctgtttgataactatttcttctgtgaaagaaaaaaatgaatgaatgacaaagtgagaggtgtgtctggctacctgaggcctgacaggggaaactg

SEQ ID NO: 12695 - DNA, 576 bp, Chicken  19866894216553_3
tgcaactcatcctctcaaggcttctgcagttcctgggatgcagcaggcacagaaataaacacaaagtattacatgttctacatatgtttatttgccccagtattcctctttttctgaagaatcgtgcattacaatctacgcacagacaaaaaacgttattggcaatgtggatttgctcaggaaataaggcagcagagtcagctgtcactttaaccctcagcagcacagtccaggtctggaatttttgcacttcctgtaaaaawtgggatcatccaatgccactgaagaacgacaaacatmtgggactatccctgatctctggacacacacccgtgagactctctcagagcatccatggctcgagcttaaacatttggggctatctaggaaaggattgatttgccatataaggagtagtgctgggaaaactgaaggggggaagtggggctgcagagggagttcgaagagctgtttgataactatttcttctgtgaaagaaaaaaatgaatgaatgacaaagtgagaggtgtgtctggctacctgaggcctgacaggggaaactgaaaagcttgcaca

SEQ ID NO: 12696 - DNA, 600 bp, Chicken  19866894216556_1
tgctgctgacgaagatagtattattaccctgtactcctgcatcctgcaacctcaggcaaggcacacaacaggccctgcgaggcggtcccgctccaccactcattaaccagcaggcagatgcaattcgagcccaacttcagcgcaagcaactgcacctggggaccagtgctcactggcagcccgtgccggggcacattccagcccagctcccccagcactgcaagcaggctgggcaggcgcagcgtgacctgatccccacctctgatagcacctagccccgtcccagtcctgtacaacccraccgcgtgtcgagaggaacgggatgcagatacccatctgcacgcatggagggactcccttgcaacgctacggctatttgcggagcagccaccatccaaaactcgcccaaatgagaaagtccgggcatttggcaggtcagccacttactacagcgagtagtttgttccaccgagggactcgtaacaccctcccaaattacacattgccctttacaggacaccgcagcagctggaatcggctcccttctcacattccttaataagcacttccattgcggagtggggtggatgtagggcatca

SEQ ID NO: 12697 - DNA, 599 bp, Chicken  19866894216563_1
  misc_feature (1)..(88): n is any nucleotide
nnnnnnnnnnnnnnnnnnnnnnnnnnnnnnnnnnnnnnnnnnnnnnnnnnnnnnnnnnnnnnnnnnnnnnnnnnnnnnnnnnnnnnnnaatgtcagttatcccttttttcttgttccagcgaaatgtcttacatgattgctttgtggatgcatcacaattgctatctgaagggtgaataacaaattgctggctgggtgtttgaggatatttacaacttcaatcattgtgaggtaccccagtttcagggacagttggtagcctgccccactgtgtgagtgggtaaaaagtttgtagagatygtggtagcagtggtaatgggaggacggttggactcgatcatcttgtaggtcctttccaacctggtgattctatggacatgttgttgctacaggagactttacttttaacaggtgttactttcatgattcaaggaaaactttaaataacaagaggcttaaaattcctccttttgactttggggtcaagcagaatctraaaatctttcacagtgtatgtagtttgtgcttggttctttgcagtaatcccatgtggcagttagtcttaagaaatttgtagagggacttcataggatttaaga

SEQ ID NO: 12698 - DNA, 600 bp, Chicken  19866894216563_2
tgtttgaggatatttacaacttcaatcattgtgaggtaccccagtttcagggacagttggtagcctgccccactgtgtgagtgggtaaaaagtttgtagagatygtggtagcagtggtaatgggaggacggttggactcgatcatcttgtaggtcctttccaacctggtgattctatggacatgttgttgctacaggagactttacttttaacaggtgttactttcatgattcaaggaaaactttaaataacaagaggcttaaaattcctccttttgactttggggtcaagcagaatctraaaatctttcacagtgtatgtagtttgtgcttggttctttgcagtaatcccatgtggcagttagtcttaagaaatttgtagagggacttcataggatttaagacaattttctgttctttcattgtttgaaagacacataagaaacaatgtaattagtgtcaataatgagtcagttaaagtattctgtttggttgtcctcctcctcctgtcttggcatagttaaagcacagctgtgggacttaaaatgagtggatgctggtcttactttcatggactctgtggctgccatgtaactcctga

SEQ ID NO: 12699 - DNA, 600 bp, Chicken  19866894216577_1
cagttgtaatgtcagtgggaacccagccctccatgtatatttatttacatgtagagatattgctgtaaacagagcttcaagcactacagatgcacaagggggcaatcacccattatttctgcctgatcctggccttgcaatccccatcctgattaaattactaggggcaggattatcagcaagataatcagatgcagtgtctaatccagataactcagctttactggatctcacaacacaggacttcactgaccacccagctgggcattccaaagcattacatccctttcctgctacttraaagattcaagcgacttgcacataagggaaagctaaggaaaatattcccaaattcagaaagatgttgtaacttgcttaactggcatggctccgagagctccctggtccagcagagtagtggtttcagagcaataattcatctgagcatctcactaactatttcatagctgcagaacctccatcttcagatctcaataaagtctcaagtcytctgtcaggagcagctttgcctgtcccaaggcagagaaatagcccagacagcttttttggtctgggcatcccccccttgtctccccataa

SEQ ID NO: 12700 - DNA, 572 bp, Chicken  19866894216577_2
taactcagctttactggatctcacaacacaggacttcactgaccacccagctgggcattccaaagcattacatccctttcctgctacttraaagattcaagcgacttgcacataagggaaagctaaggaaaatattcccaaattcagaaagatgttgtaacttgcttaactggcatggctccgagagctccctggtccagcagagtagtggtttcagagcaataattcatctgagcatctcactaactatttcatagctgcagaacctccatcttcagatctcaataaagtctcaagtcytctgtcaggagcagctttgcctgtcccaaggcagagaaatagcccagacagcttttttggtctgggcatcccccccttgtctccccataaactttcaatttccttggccttcaccttgtcaagtgatgtttgcacttgcagaaggctacagcaacaccttgagaggggacaagatctgggaagtgaggattggcctgcacttggagaactgcaatatctggaaacaggcaagagattttaacaattcttattgcctatgttcactgcttccc

SEQ ID NO: 12701 - DNA, 600 bp, Chicken  19866894216581_1
tgttcctgttttatggcaatgatagacagcaatgagaaaagctactaatatctcttcagagcaaacgtatcataattgttggccatagcaaaataaaagtctctaaaacaactggactgcataacctgaactgctcagaactcagtagttgccaaacatggatttggcatggacaatttctcctgcacaacagtaaggctggtgtgatggaatgcctcatccctggagatattcaaggctaggctagatgaggccttgggcagcctgacagagtgcttaatctagtggctggtagccctrtccatgacaggaagttgtaactagatgatctttgtggtcccttccaacccaagccatactacgattctataaccaccaaagtgtagacatattgctttagttttgctgtagatactgctccataaagcttttcctactctttttttttcctctatattgctacagttgtctatcctctgagtattagcttaacttttcttacacttgtccccattcaatatgcaatcgtgcaatacatttcaaatattgtttttgatgtctataattattgctcatcatttttttttgtccagaagacca

SEQ ID NO: 12702 - DNA, 599 bp, Chicken  19866894216582_1
  misc_feature (1)..(3): n is any nucleotide
nnntttattgacacaacacccttgatggccctcaggatcccagcgtatgtgccagatcccaagtttactgaaatcaaggaaataatttccatgggctggaggagtaccataagtcatgtggttctcattcactctttctaaataagagattttgcttgggaaagatttatgactctaacttgcatagtgatgcaaatacaagcgagctgctgcatgtttgcaaagccctttttactgtcatgaggatctgaacagaagaaccacaaaatgtattatctaagacagccaaaaaccccaaasaaaccattggccaagcctctgagtgggttcctcgggatttatatagcttgaaaacctgaacccacagtttggcttcaaagagacaaggtggatttcagggtaccagggcatttgccactctccctgctgtcgggatcggccattttgaggacatgtggagaaaggatgagtaaggatttcaggatttggctgttccatgtgggttcacttgtttgttttgcttttcaaaaaagctgctaaagggaacacagctgtgcttacatgatctgtttgtatgtaaaattcagtcacacacccat

SEQ ID NO: 12703 - DNA, 600 bp, Chicken  19866894216585_1
aacttctttacagaaagggtgatggaacactgaaactgactgcccatctccttctgtggagatattcaagatccatctgaatgctcacctgtgtgacctactgtagggaagctgctttagcagggggggatggactcaatgatcttgaggtcccttccaacccttacagtcctgccattctgtgactcttgaactcagtccaaatggacagttggctttgggacagtactgtatgctctgacccaacacagcaagcaagcaagcagcagagcgagcttctcttcatgaaagactctccamaaaagagagaacagactttatggcagactgtcagtatttggtagtagctagttcttaactacacggtgttttgcaaatgatgtttttgcaaagctaacttatgtatcccgtcacaagccactcaggaaaagatatccaaccaaatgactagcaaactgcctctgaacatgcatcagggatacctcctctgttaactgcagctattgaccaagctccataagaacacactgagtggttacacacagtgaaaatctgagatggcatttgacaggacaacacaagagcagggtctacaaatga

SEQ ID NO: 12704 - DNA, 600 bp, Chicken  19866894216589_1
tgctctgatcatatgttaatcttgcttgtcccgattaaaggggacatgcagatggggtcaagcttgatgacctctcttatttccattggtgactgggcttccttttctccacagcacgccgtactccaaagatcagtttcttctgcctggatgatgaacaaagaccttacttcctccttgtgctccaagaaggtgaaaggaagaggggtctagccacaggcacagctttctccagagttgtcccctgttcagggctgtgcccccgccacacagctcagtgagcggccagaactagttgcrctccttggacaaccttgtgcctttgctgacacaaacgggaccacaactttaataaaaagcagcagagctcaggccggtcttagcttaaaactaagttttcttttaggaataaactcaatgatttgcagctgctgaaaatccttggaaagctcaccctgcttgctctcatttccttcttgcttattgtgcttcatagaatcatagaatcatagaatcgctaaggttggaaaagacccacaggatcatccagtccaaccatccgcccttcatcaatggttctccctaaaccatgtccctcaa

SEQ ID NO: 12705 - DNA, 600 bp, Chicken  19866894216590_1
cacaatacaccttctatttgtatattccatttggtaccagtgatttggaggcttctcatgtggcaacacatgcagttgctgcaaatgtggatcactgtttccttttcagggaaatatttgaatgttgtgagagaatgtggacgtgatgttacctgcccagtggctaaagaggtcatctatactttaaaagagcgagcatatgtggaacaaatagaaaaagcatataactatgctagcaaagttcttctggatttcctgatggaggagaaagagcttgtggctcacctaaggtttgatttmttttattaaatacatgttaaataggttggttctgattgcaaatgtcaggttttaaagttagctctcttttcctggcatattcactctgttagaaatgtttctgttagaaatgttgacatgaagaaaaaaacaaacaaaaaaaagacttgttttctcctgaaataaaatgaaaaagaaacgtaaaatcatagaaatgttggatgggagggacctttaggggtctctcatccaactttctactggaaggctaccaccaaaactacgttctgccaaaactggccactaggctttatctgactt

SEQ ID NO: 12706 - DNA, 600 bp, Chicken  19866894216598_1
ggaggtggctcggagcactgaagtagcagacattgcaccattagccttgggtgcttgactggactgcggagcatcaaaggatgagaaaatgtaatgaattaaaaggaaggttctgttctgcagaatcattgtatcagaacaatgtatgtgcggtgctttttgagctcacacaagaagtcttctggagaaataggactgatgtatcggggctgtttggaatatatatttgttttcattatcgcactttgtcagaaaatgtcctccaaaggaaataaatacaagaaactattagatgggaaraattggtgagttttacaatctgctttcctcccaccttgcttttttgtatttgtgttctattttgttttgcaagctcggtttcatttataatgaagcttcttgacgcttgattggcagctgaagacaatttgcaacatatcagcagcagaataaaggcacagtgatgaatggtttaggaaaacacaaggaaagagaaatactgattttggtaatgggtttgttgatggaattccatttggtttggttggaagttccctctgctgtgaggggctcccagtggtgcagtaacacagygcacat

SEQ ID NO: 12707 - DNA, 600 bp, Chicken  19866894216598_2
gggaaraattggtgagttttacaatctgctttcctcccaccttgcttttttgtatttgtgttctattttgttttgcaagctcggtttcatttataatgaagcttcttgacgcttgattggcagctgaagacaatttgcaacatatcagcagcagaataaaggcacagtgatgaatggtttaggaaaacacaaggaaagagaaatactgattttggtaatgggtttgttgatggaattccatttggtttggttggaagttccctctgctgtgaggggctcccagtggtgcagtaacacagygcacatcattgctatcagctccctgggcagtggggctgctgctgtcctgcagttgtgaccttccaaccttgagctgcctcatctagagctggaatgaacgacgtgatcttaaaggccccttccaacccaaactgtgctgtgattctatgatccccaagctgcaggacactactgatcagccaggttctttcacagaattgtaggggctggaagggacctctagagatcgagtccgacccccagattccctacacgctggactgactttcaagcatgggatgtgtatttatgggattccct

SEQ ID NO: 12708 - DNA, 600 bp, Chicken  19866894216598_3
cttgagctgcctcatctagagctggaatgaacgacgtgatcttaaaggccccttccaacccaaactgtgctgtgattctatgatccccaagctgcaggacactactgatcagccaggttctttcacagaattgtaggggctggaagggacctctagagatcgagtccgacccccagattccctacacgctggactgactttcaagcatgggatgtgtatttatgggattccctgttaaactgattctacctttgactgaagtttaatagaaacatccctgcagcccattatggcaggtcrtggagtgcaggcaggatggtgaactgaattgctgggaggaatccgatatgaatcaaaacagataactaaaatggaaaagaaattaagagacttctttatgaccagaggctctaggttagtttacagcaactggattgggaataaggaaacacagtatgctgtagcatagttccttaagaagaaggaagcagatgaaattccccctgagtaaaatgatgaggttaataagaatagctgtgcctccccagttagggaacacaggaggcgtgcatattactgccttggcaaaggagactgtga

SEQ ID NO: 12709 - DNA, 600 bp, Chicken  19866894216598_4
ggagctctgtatttatttcacctgaggaggaattgcaggataaggagtgatctgggtgggagctcagcctgctttgctaaccctggaacctaaaccagagattctgcttttatcattgcgctgtcttcaggaagaaaagggtttgctgtgctaattactactctgatttccattaaactgttacttcgctgcttaaaaggcacgtctgttttgcatgcttctgggaagcatgaacagtttctacagaaagtggattattttgctcttcttctcttcctgctaccaggaaggggaaaaatsagcagtggtggtggagrtgctgtaacatcagtaaagttaatgataggacagctggcatccatgggctgagtgttgaacaggttctgcattttatgagtgcaaggaaatcaaaaagcctcggcccaaggacgctgtggatgccccatccctgcagacattcaaggccaggctggatgtggctctgggcagcctgggctggtggttggtgaccctgcacatagcagggggttggaactcaatgatcactgtggtccctttcaacccaggccattctatgattctgtgatatgattctatgaa

SEQ ID NO: 12710 - DNA, 600 bp, Chicken  19866894216598_5
tcacctgaggaggaattgcaggataaggagtgatctgggtgggagctcagcctgctttgctaaccctggaacctaaaccagagattctgcttttatcattgcgctgtcttcaggaagaaaagggtttgctgtgctaattactactctgatttccattaaactgttacttcgctgcttaaaaggcacgtctgttttgcatgcttctgggaagcatgaacagtttctacagaaagtggattattttgctcttcttctcttcctgctaccaggaaggggaaaaatsagcagtggtggtggagrtgctgtaacatcagtaaagttaatgataggacagctggcatccatgggctgagtgttgaacaggttctgcattttatgagtgcaaggaaatcaaaaagcctcggcccaaggacgctgtggatgccccatccctgcagacattcaaggccaggctggatgtggctctgggcagcctgggctggtggttggtgaccctgcacatagcagggggttggaactcaatgatcactgtggtccctttcaacccaggccattctatgattctgtgatatgattctatgaaagggagagccgagatgc

SEQ ID NO: 12711 - DNA, 599 bp, Chicken  19866894216611_1
  misc_feature (1)..(9): n is any nucleotide
nnnnnnnnnttttctcactttttttagggtcagttcctatttttctagcattttcgagaattccagttttcagctgtgagctgcaggggaccccgggctgtttgcatggggcgaagggacactgagtggcagatgtgcccaggtcaggcagcgctgctgtcagtgggtttccttctgcaccagaagcatttcctgaacaacatatagggacccagagactgaaaacaatcattagaagaatagagaagacttattaaggttggaaaagacctctaagatctccagcccacccctaccatrtgcactcactgcccatgtccctcagtgccacctccccatggatcaggaacatctccagggacagtgaccccagcagtccctgagcagcccattgcattgcagtgcattgccactcccttctgagagttttcygaagcccttctgaaagtcttttgttttcatggatggttattttcctgaatgaatgctgacttaccccataaatcccctcctatgatctgttacagttccaggcattcaaggaattggtaaaagtgtggacttaaaaatatatggatgtctgacgaaagatctcactg

SEQ ID NO: 12712 - DNA, 600 bp, Chicken  19866894216611_2
atgtgcccaggtcaggcagcgctgctgtcagtgggtttccttctgcaccagaagcatttcctgaacaacatatagggacccagagactgaaaacaatcattagaagaatagagaagacttattaaggttggaaaagacctctaagatctccagcccacccctaccatrtgcactcactgcccatgtccctcagtgccacctccccatggatcaggaacatctccagggacagtgaccccagcagtccctgagcagcccattgcattgcagtgcattgccactcccttctgagagttttcygaagcccttctgaaagtcttttgttttcatggatggttattttcctgaatgaatgctgacttaccccataaatcccctcctatgatctgttacagttccaggcattcaaggaattggtaaaagtgtggacttaaaaatatatggatgtctgacgaaagatctcactgatgtgaaatagtgctaacagcttctgggagatttgtgtgtgctaaatttgcagtgcagagttcagcagataaactatgcaaatgaaaattgatattcccttcagcaattgggaaagaaaggccacggacagag

SEQ ID NO: 12713 - DNA, 600 bp, Chicken  19866894216614_1
gataggaagcagtgaatggattccttgttttgctttgcttatgcacatagcttctgttttatccagtaagctgtctttatgtcaacccatgagttcttgtacttctccctttctgattctcttccccatcccgctgggggagagcaagaggttgtatgttgctgagctgcctgtggggtttaaccccatcaagaccccaaaaacctgctcccaaaaggtgatgctggacaaactaacaaagcgtgtggtatgtctccatctgctgaggataagagccaacggctgctgtgccctctgagwgctgctcctcacatctccagaggatcccacccacctcctgacctccgggagggctgcagggtcccagaacraggaccaccagaccccacatcaaggcacagcactggtggccaagccagcagggctggtagatgatggaggacagctgtgggccctcctgctcccagcccccagctgctcccccctccagaccagaaatccaaatttctctctttgcaaagccctggtaggtaacctcatctcaagggtaaaacacctcgccacattaagagctgccgcagcccgctcaccgccgcgcta

SEQ ID NO: 12714 - DNA, 600 bp, Chicken  19866894216614_2
tgtctttatgtcaacccatgagttcttgtacttctccctttctgattctcttccccatcccgctgggggagagcaagaggttgtatgttgctgagctgcctgtggggtttaaccccatcaagaccccaaaaacctgctcccaaaaggtgatgctggacaaactaacaaagcgtgtggtatgtctccatctgctgaggataagagccaacggctgctgtgccctctgagwgctgctcctcacatctccagaggatcccacccacctcctgacctccgggagggctgcagggtcccagaacraggaccaccagaccccacatcaaggcacagcactggtggccaagccagcagggctggtagatgatggaggacagctgtgggccctcctgctcccagcccccagctgctcccccctccagaccagaaatccaaatttctctctttgcaaagccctggtaggtaacctcatctcaagggtaaaacacctcgccacattaagagctgccgcagcccgctcaccgccgcgctatttacacttacggagaggagcgggcctgaattgttttgatatacgatctgtaattggcatcattacagagc

SEQ ID NO: 12715 - DNA, 600 bp, Chicken  19866894216614_3
ccagctgctcccccctccagaccagaaatccaaatttctctctttgcaaagccctggtaggtaacctcatctcaagggtaaaacacctcgccacattaagagctgccgcagcccgctcaccgccgcgctatttacacttacggagaggagcgggcctgaattgttttgatatacgatctgtaattggcatcattacagagcgatgatctcatccaggtcgtgttctcctccccggggagggaacacaaggcagctcgcggtccctcgcgcggctgagatataatgagggagctgcaaaaygaggaaatttctccaagttcaaagggacgggcaggggggtggtgtggggctgcagaaggggcccygcagggctgctccccctgcaacccaggcagcaggggttgaaagtataatacagcatattttcagtatggaacgtatgcctgggcgacacaaagccaagctcaaaacatctcccaaagctctaaagtccttgcagagtgaccccagaaggaaggggcaaacatcctcacacgggcttctgaacaactgtcatagcaaaggggatkctcggctggcctcatyccctctggagagtgc

SEQ ID NO: 12716 - DNA, 600 bp, Chicken  19866894216614_4
ctcatctcaagggtaaaacacctcgccacattaagagctgccgcagcccgctcaccgccgcgctatttacacttacggagaggagcgggcctgaattgttttgatatacgatctgtaattggcatcattacagagcgatgatctcatccaggtcgtgttctcctccccggggagggaacacaaggcagctcgcggtccctcgcgcggctgagatataatgagggagctgcaaaaygaggaaatttctccaagttcaaagggacgggcaggggggtggtgtggggctgcagaaggggcccygcagggctgctccccctgcaacccaggcagcaggggttgaaagtataatacagcatattttcagtatggaacgtatgcctgggcgacacaaagccaagctcaaaacatctcccaaagctctaaagtccttgcagagtgaccccagaaggaaggggcaaacatcctcacacgggcttctgaacaactgtcatagcaaaggggatkctcggctggcctcatyccctctggagagtgctgaatgctcctgctgctgtgcttccctgcctgcaccctgcttttttggcatcaaagtggggggag

SEQ ID NO: 12717 - DNA, 497 bp, Chicken  19866894216614_5
cggctgagatataatgagggagctgcaaaaygaggaaatttctccaagttcaaagggacgggcaggggggtggtgtggggctgcagaaggggcccygcagggctgctccccctgcaacccaggcagcaggggttgaaagtataatacagcatattttcagtatggaacgtatgcctgggcgacacaaagccaagctcaaaacatctcccaaagctctaaagtccttgcagagtgaccccagaaggaaggggcaaacatcctcacacgggcttctgaacaactgtcatagcaaaggggatkctcggctggcctcatyccctctggagagtgctgaatgctcctgctgctgtgcttccctgcctgcaccctgcttttttggcatcaaagtggggggaggtgggagggggtatgggtgtttgtgtagttgaagggcattacaaaactgtcagagcaagagtggctacaacctcttcccttacactgaggactcgctgtgt

SEQ ID NO: 12718 - DNA, 481 bp, Chicken  19866894216614_6
agggagctgcaaaaygaggaaatttctccaagttcaaagggacgggcaggggggtggtgtggggctgcagaaggggcccygcagggctgctccccctgcaacccaggcagcaggggttgaaagtataatacagcatattttcagtatggaacgtatgcctgggcgacacaaagccaagctcaaaacatctcccaaagctctaaagtccttgcagagtgaccccagaaggaaggggcaaacatcctcacacgggcttctgaacaactgtcatagcaaaggggatkctcggctggcctcatyccctctggagagtgctgaatgctcctgctgctgtgcttccctgcctgcaccctgcttttttggcatcaaagtggggggaggtgggagggggtatgggtgtttgtgtagttgaagggcattacaaaactgtcagagcaagagtggctacaacctcttcccttacactgaggactcgctgtgt

SEQ ID NO: 12719 - DNA, 599 bp, Chicken  19866894216617_1
  misc_feature (1)..(122): n is any nucleotide
nnnnnnnnnnnnnnnnnnnnnnnnnnnnnnnnnnnnnnnnnnnnnnnnnnnnnnnnnnnnnnnnnnnnnnnnnnnnnnnnnnnnnnnnnnnnnnnnnnnnnnnnnnnnnnnnnnnnnnnnnntgtggtacagtaaaaaaaaacagtaacctagttccttctacccgttatctaattaatagtttcccacttccttacagtgtcacagtatttcaggttttaaaaaaggaacatttctgagaataatctcatatttccctgaagtggaatgataagtatattaaccaagctgtttggatgstgtggtaactgcatgaaaaggagctacagctgtggagtcacaggctragagagagcaaggtgaggaaatctcctgagctccagtttttatgcctgcagaaagtactgatcaaaaataggatcttggaaaaaaataaaataaaataaaataaaataaaataaaataaaataaaataaaataaaataaaagtgagctaataaaaaaaaactatttacttaaatactgtaaaaacggagggagaagtagtagtggacataggaagagtcatacctgttgatggttcctctgtaggtaaagag

SEQ ID NO: 12720 - DNA, 599 bp, Chicken  19866894216617_2
  misc_feature (1)..(75): n is any nucleotide
nnnnnnnnnnnnnnnnnnnnnnnnnnnnnnnnnnnnnnnnnnnnnnnnnnnnnnnnnnnnnnnnnnnnnnnnnnntgtggtacagtaaaaaaaaacagtaacctagttccttctacccgttatctaattaatagtttcccacttccttacagtgtcacagtatttcaggttttaaaaaaggaacatttctgagaataatctcatatttccctgaagtggaatgataagtatattaaccaagctgtttggatgstgtggtaactgcatgaaaaggagctacagctgtggagtcacaggctragagagagcaaggtgaggaaatctcctgagctccagtttttatgcctgcagaaagtactgatcaaaaataggatcttggaaaaaaataaaataaaataaaataaaataaaataaaataaaataaaataaaataaaataaaagtgagctaataaaaaaaaactatttacttaaatactgtaaaaacggagggagaagtagtagtggacataggaagagtcatacctgttgatggttcctctgtaggtaaagaggtcaagctttggttagcatggcacagagacacaactgaagaattctc

SEQ ID NO: 12721 - DNA, 600 bp, Chicken  19866894216627_1
gagcgtggtacatccggtgtgagtgatgaactgctttcatcaggcagcattaagagctgagaattagcacagctgtaagtcatatttcatgttaggttacaggggaaaacggtaggagagaggatttatgctctccgtataaatgaactttataagcttttcttcgcaagggaaaagaaatagagcctgataaagttctgcgctaagaaaaaaagaatggaaggtttctaaagtggggaaaaaaccacttttgttatcactggtgattactcgaattgatgcagaaccggtgttccaaarcagggcagattagaaacagtgacagagtgtgcctcagtggtccccattctgctgctagctgaaattacagtccaaagcagacgggcttctgtgccccacagattcataaaaattcaagagccactctcaccagtctcgttttgataaattctttttgattcagtaacctttcttaatggaatttctctctctctttttctcttttctcttaccctttttctcactttggtccccgtacttattattccctcccactctcctccgtgggagtgcagacctctgactaaacagccatgttgt

SEQ ID NO: 12722 - DNA, 555 bp, Chicken  19866894216627_2
aaaggaaattatgcatttctcagatctaccctggggcacacaaatcaaagtctcccttgaacactgtctagtaaaactgagagcagcgacactttatatggaaatcagatgatcctaggacataatatagctaaacatatatcaaaacatagcgacaattaatgcagaaaccgctttttccttagcgagggtatgcacctcgattttgttttatttcttctgtgttctcctggtgtgtgcctgttcctcaggtgatgagaaaaatcctgtgaggaatatggcttcatcgggcaggctccrgagctcgtgatcctttttcatctttatgttgcttataggccacctttgttttgcactgagtctttccactgctttaagaagggtgtttggaaaaggtcaaagagtagcaaataccttgatctcagctgcctcgtggactcagtcagaaagggaagagcataatttggggtggcttgatagctgatggtactactcgggtagggagaggtgcaggagaacgtgtctaattctctaggtttttttcactgcgttcat

SEQ ID NO: 12723 - DNA, 600 bp, Chicken  19866894216639_1
tggaaacacaaaacctttagaacagatatttatggttttgcccaattcaaaacccaaggattttttcaagttgtagtgtaacaaattcagataatctttagaaaatcaagattcaacacctttgcctttgaggttaaccaaagaaaaggtcaccaagtggaacttgcagtagctgcctgttttcaggagtcaagcagaacagcacccagatgtataaagtgttagcagtgactcagagctaatgagtaaagtgtaattaatttacagagtaaaaatgggaactgaggaaattgccatttytacacaagcacttttcatgtgataacagtattggtttcctgttcctttcagcagggctgttcatagttatctcacagggtacctcctctcttggatcaatgctaattttggaccagtcatccaacagrcagtatatgaaaatgtaggaatctttttactggacggatgtttggcctcgtcattctgcaaaagagtgggaagaaaatgtgtgtttgaaagggctatgaaacatagtcatcgaaaaaaatgacttgaaaggtcattagctgcacrtttgtccagtcatgcaacttgagagta

SEQ ID NO: 12724 - DNA, 600 bp, Chicken  19866894216639_2
tgaggttaaccaaagaaaaggtcaccaagtggaacttgcagtagctgcctgttttcaggagtcaagcagaacagcacccagatgtataaagtgttagcagtgactcagagctaatgagtaaagtgtaattaatttacagagtaaaaatgggaactgaggaaattgccatttytacacaagcacttttcatgtgataacagtattggtttcctgttcctttcagcagggctgttcatagttatctcacagggtacctcctctcttggatcaatgctaattttggaccagtcatccaacagrcagtatatgaaaatgtaggaatctttttactggacggatgtttggcctcgtcattctgcaaaagagtgggaagaaaatgtgtgtttgaaagggctatgaaacatagtcatcgaaaaaaatgacttgaaaggtcattagctgcacrtttgtccagtcatgcaacttgagagtatgggttctcactgttcccatttttgcataccaaggagaactcccatgatacttattttatgtgaatgaagagtgcaaattgtaaaatggcattaaaggaagagaacaagatggagcatgaattggtct

SEQ ID NO: 12725 - DNA, 600 bp, Chicken  19866894216639_3
aatgggaactgaggaaattgccatttytacacaagcacttttcatgtgataacagtattggtttcctgttcctttcagcagggctgttcatagttatctcacagggtacctcctctcttggatcaatgctaattttggaccagtcatccaacagrcagtatatgaaaatgtaggaatctttttactggacggatgtttggcctcgtcattctgcaaaagagtgggaagaaaatgtgtgtttgaaagggctatgaaacatagtcatcgaaaaaaatgacttgaaaggtcattagctgcacrtttgtccagtcatgcaacttgagagtatgggttctcactgttcccatttttgcataccaaggagaactcccatgatacttattttatgtgaatgaagagtgcaaattgtaaaatggcattaaaggaagagaacaagatggagcatgaattggtcttctattctcaagccctctgtagagcaattaagaaaatggatggagcaaatagttcataggctttccaactctgaattctgcactcctcctccttagcttcttttgtggtctgtggtctgcccctgaggtcaaataaaaactggtt

SEQ ID NO: 12726 - DNA, 599 bp, Chicken  19866894216644_1
  misc_feature (1)..(112): n is any nucleotide
nnnnnnnnnnnnnnnnnnnnnnnnnnnnnnnnnnnnnnnnnnnnnnnnnnnnnnnnnnnnnnnnnnnnnnnnnnnnnnnnnnnnnnnnnnnnnnnnnnnnnnnnnnnnnnnncatagttaataatgacttacttaacatagttaaataatgactaaataaaatagttaattgtagaacttaattcttgtgcacttgattcatgaattaatttaaaatatcaagtgataccaattgtagaaactgagtttctcagagttcttgctgtaatcattaaaatgggatataaacatcttgctgcrttatctgtgtaytttggaaaagcatgtgaatcctagttgccagtataattaatgactgcttattattttccataaatcagtgttctgttacctcatgttgaattcagcttggagtttgaatggtggtrtgtttattcagktttggctgacccactgtctctgtagtcaggagcrataaagaaccttttcaaaagtgcatatctgaagagagagaactcttgaacaggtaaatgtggaggaaagtctaaggtgaagttttacacggcattgtctgagttatcaccttgttaacagattcc

SEQ ID NO: 12727 - DNA, 599 bp, Chicken  19866894216644_2
  misc_feature (1)..(100): n is any nucleotide
nnnnnnnnnnnnnnnnnnnnnnnnnnnnnnnnnnnnnnnnnnnnnnnnnnnnnnnnnnnnnnnnnnnnnnnnnnnnnnnnnnnnnnnnnnnnnnnnnnnncatagttaataatgacttacttaacatagttaaataatgactaaataaaatagttaattgtagaacttaattcttgtgcacttgattcatgaattaatttaaaatatcaagtgataccaattgtagaaactgagtttctcagagttcttgctgtaatcattaaaatgggatataaacatcttgctgcrttatctgtgtaytttggaaaagcatgtgaatcctagttgccagtataattaatgactgcttattattttccataaatcagtgttctgttacctcatgttgaattcagcttggagtttgaatggtggtrtgtttattcagktttggctgacccactgtctctgtagtcaggagcrataaagaaccttttcaaaagtgcatatctgaagagagagaactcttgaacaggtaaatgtggaggaaagtctaaggtgaagttttacacggcattgtctgagttatcaccttgttaacagattccagaactttgaga

SEQ ID NO: 12728 - DNA, 600 bp, Chicken  19866894216644_3
ttacttaacatagttaaataatgactaaataaaatagttaattgtagaacttaattcttgtgcacttgattcatgaattaatttaaaatatcaagtgataccaattgtagaaactgagtttctcagagttcttgctgtaatcattaaaatgggatataaacatcttgctgcrttatctgtgtaytttggaaaagcatgtgaatcctagttgccagtataattaatgactgcttattattttccataaatcagtgttctgttacctcatgttgaattcagcttggagtttgaatggtggtrtgtttattcagktttggctgacccactgtctctgtagtcaggagcrataaagaaccttttcaaaagtgcatatctgaagagagagaactcttgaacaggtaaatgtggaggaaagtctaaggtgaagttttacacggcattgtctgagttatcaccttgttaacagattccagaactttgagagaaggggaaagtatgcaattaagttccctattactaatttgtaatgatgtaaattgagaactgggctttaccttggacttccttctgttactaatttttgcagtttttcatctacgt

SEQ ID NO: 12729 - DNA, 600 bp, Chicken  19866894216644_4
gttaaataatgactaaataaaatagttaattgtagaacttaattcttgtgcacttgattcatgaattaatttaaaatatcaagtgataccaattgtagaaactgagtttctcagagttcttgctgtaatcattaaaatgggatataaacatcttgctgcrttatctgtgtaytttggaaaagcatgtgaatcctagttgccagtataattaatgactgcttattattttccataaatcagtgttctgttacctcatgttgaattcagcttggagtttgaatggtggtrtgtttattcagktttggctgacccactgtctctgtagtcaggagcrataaagaaccttttcaaaagtgcatatctgaagagagagaactcttgaacaggtaaatgtggaggaaagtctaaggtgaagttttacacggcattgtctgagttatcaccttgttaacagattccagaactttgagagaaggggaaagtatgcaattaagttccctattactaatttgtaatgatgtaaattgagaactgggctttaccttggacttccttctgttactaatttttgcagtttttcatctacgtagtggttttcag

SEQ ID NO: 12730 - DNA, 600 bp, Chicken  19866894216644_5
gaacttaattcttgtgcacttgattcatgaattaatttaaaatatcaagtgataccaattgtagaaactgagtttctcagagttcttgctgtaatcattaaaatgggatataaacatcttgctgcrttatctgtgtaytttggaaaagcatgtgaatcctagttgccagtataattaatgactgcttattattttccataaatcagtgttctgttacctcatgttgaattcagcttggagtttgaatggtggtrtgtttattcagktttggctgacccactgtctctgtagtcaggagcrataaagaaccttttcaaaagtgcatatctgaagagagagaactcttgaacaggtaaatgtggaggaaagtctaaggtgaagttttacacggcattgtctgagttatcaccttgttaacagattccagaactttgagagaaggggaaagtatgcaattaagttccctattactaatttgtaatgatgtaaattgagaactgggctttaccttggacttccttctgttactaatttttgcagtttttcatctacgtagtggttttcagttgattcaggcttgcagtttagcattcagagcag

SEQ ID NO: 12731 - DNA, 600 bp, Chicken  19866894216644_6
cggcattgtctgagttatcaccttgttaacagattccagaactttgagagaaggggaaagtatgcaattaagttccctattactaatttgtaatgatgtaaattgagaactgggctttaccttggacttccttctgttactaatttttgcagtttttcatctacgtagtggttttcagttgattcaggcttgcagtttagcattcagagcagaggtggtatgtaatcttcagtttagtttgaggagaatggatgttacttgcgtgtgcagttaagtagatgaaacatggaagtacatacrtagaaaagcaagaagtgaggaaagaactcattttagtggcagaaatgatagagaactgggatcagatacaggaaaaactctttgagtgacatctttgtgaagggtaaggaaggtgagatttaaattacgtgatgtaaggttgcaacccggtggaaagctttgaaaggatgtacgatgtgctgaagataaacagggacgagctgttttaaggatgtcagtgtccatttctgaaacgctacagagtggagatttgaggaaagcctttccacaaccacgtcaggagacaagtgtaaagtaagt

SEQ ID NO: 12732 - DNA, 600 bp, Chicken  19866894216645_1
gtctaccattaaagaaaatttagggccaagttaaatgcttttatgacgggcagaagtatcataaattaaagtatttcatggtgtttattacagtttcagccaagggaaataataaatgcaatgactggctgattaaaaaatatcctattattggctaaattattagtgggcaatgaccctaattaacacagtaataaacctaaagatttgcttatgatgcagttgttgagacaccatatgctccaggtagagttttccctgcagagaacagagcacacagttcctggaagaaacaaaccwaacaaaaaattggttgatgagagtccctggattactggaactgacactgtattgtagcttgaagaccataattgtcctatgaatttatggcttgggtaataagaaaaggctacaacatagttctcaagtaatacacagcgcaaatgtggaggtcagctaacaaagcttatgtccaagcataggttttggaaaaaagaccaaattctcttcttcttcatttcttcttgcaacttagcagaagggtaaacatgttgtttagtcattgccttacaaaaataccttatgcaaggcatttgtcca

SEQ ID NO: 12733 - DNA, 600 bp, Chicken  19866894216651_1
tggtttgaagttctttgtcaacttcattaaacgcacaagcataaatgttcaaaatgaacataatgaataaaagatatgtggaaagcaagttactacagactacctggtcaaataggggtctgcactgcaaaatgttttattttttcaaatattcattttcatcttaatgtgcttcaggggaaaaacatattgctcttcctcccccggccactgatcatttaagtgactgtacagggtcttaaaacaactgccagggactaagctgttcttcaccttgttgggctatgaagtagctgctawatgctgagaaaaaaaaagaaaagaaatagtaaaataccgaaatgttattacagtttcattcttagtgcaccatgaagtcacttttccttcatttcaactgaaaatattgaaaaacaatttaagggacgctacagaggtttccaacttcagactatcaatttagctcatccttctcaagttcaacaccacatacagttttgtttccccgtgtcattaccacaactcatgtgaaaatttaaatgaatcaacttccaactctgagcaccgcttgagtgattattgaagcctgaatttgacaaa

SEQ ID NO: 12734 - DNA, 600 bp, Chicken  19866894216651_2
tatactttcctctatatttttttaatagaacatattcccttcagcacagacacactaacaaaacagagttctgcttctgcaaaatatatatgtatttaccagtagttcaccatcaaaataagagtgaaatacatagaaaaaaatatctaactatagccattctcaagactgtaagtattctctcatttcttactctccaatgcgttaaaggcaaatactttcttcccctccagagcagaacttgcaatgcaactgcagaacatttgatcaaggatcctagatgtaattcctgactgcacrgagcacgttctggagtttgcattcactgctcacagttaaatgaaaaaataaaaacttgatacatttactctgacgttgaaaagatgaagcatgcagcaataataytcaagtcagtaagaaaatagggagaagtgacctggtataaaagtcatcacctgtaaagctgaagataaaggaagcagtattagcctgcttttccttcagggtaactgctgcaggattgccaaatgcactcacattcgagtttggcaggaacagcatgaamattactgactttctctgggtttatttgactcctgt

SEQ ID NO: 12735 - DNA, 600 bp, Chicken  19866894216651_3
ttcaccatcaaaataagagtgaaatacatagaaaaaaatatctaactatagccattctcaagactgtaagtattctctcatttcttactctccaatgcgttaaaggcaaatactttcttcccctccagagcagaacttgcaatgcaactgcagaacatttgatcaaggatcctagatgtaattcctgactgcacrgagcacgttctggagtttgcattcactgctcacagttaaatgaaaaaataaaaacttgatacatttactctgacgttgaaaagatgaagcatgcagcaataataytcaagtcagtaagaaaatagggagaagtgacctggtataaaagtcatcacctgtaaagctgaagataaaggaagcagtattagcctgcttttccttcagggtaactgctgcaggattgccaaatgcactcacattcgagtttggcaggaacagcatgaamattactgactttctctgggtttatttgactcctgtctgtaaccatgcaaaggccactgcacaaggccttgtacagctacccacagtagactgcaaacgaaagccaggacagcagctgagatgagaaagaagagcaatctg

SEQ ID NO: 12736 - DNA, 466 bp, Chicken  19866894216651_4
gatcaaggatcctagatgtaattcctgactgcacrgagcacgttctggagtttgcattcactgctcacagttaaatgaaaaaataaaaacttgatacatttactctgacgttgaaaagatgaagcatgcagcaataataytcaagtcagtaagaaaatagggagaagtgacctggtataaaagtcatcacctgtaaagctgaagataaaggaagcagtattagcctgcttttccttcagggtaactgctgcaggattgccaaatgcactcacattcgagtttggcaggaacagcatgaamattactgactttctctgggtttatttgactcctgtctgtaaccatgcaaaggccactgcacaaggccttgtacagctacccacagtagactgcaaacgaaagccaggacagcagctgagatgagaaagaagagcaatctgcttgacaagacaaactgaacatgaga

SEQ ID NO: 12737 - DNA, 600 bp, Chicken  19866894216655_1
atgtgatggagagctttcctttgcatcagtgacactcaatttccttccccattaaacctgggtaaacgttctacctgagcgatctttatatgcttgaattgtctactttatggtttcccaaacctgactgaacacagtgagatatgagcggtgaaagactctgtcttatccatcattttgagctgggacagcattgctgggctgcccgtgatctacagatgtgcagagcgaaggtgagtgcaacagtgtcctcacagccataccactgtgccctgcagtggttttgcttcacgtgatccrtttttggagctctgccacggctgtgtgtaaatgaactgaggagaattaggcagtgagtgattaattacctctagggaggcagtcgtgatgtcagacctgacctagcaggtaacagcaatgcttgaggactacaaagcagatcaatgagcggctatcaagctgcgtgaggacacrgtgagcacttgagccttgggacaaaccattccatctctagagtaatgaatgaaataatgacatctagtggaatggcccaaagggcagagaaatacctctggaagaagacaggaaatacctttgctg

SEQ ID NO: 12738 - DNA, 600 bp, Chicken  19866894216655_2
attttgagctgggacagcattgctgggctgcccgtgatctacagatgtgcagagcgaaggtgagtgcaacagtgtcctcacagccataccactgtgccctgcagtggttttgcttcacgtgatccrtttttggagctctgccacggctgtgtgtaaatgaactgaggagaattaggcagtgagtgattaattacctctagggaggcagtcgtgatgtcagacctgacctagcaggtaacagcaatgcttgaggactacaaagcagatcaatgagcggctatcaagctgcgtgaggacacrgtgagcacttgagccttgggacaaaccattccatctctagagtaatgaatgaaataatgacatctagtggaatggcccaaagggcagagaaatacctctggaagaagacaggaaatacctttgctgatgactttagcttccatgcctgaaagatctgtatcatcttcacgagccaccgtgcaaactacacccatgcagtagcattatttgaactactgaggacattcacaccagctcaaacagcagtaattctccaggatattgacatatcccgggctggaaaacctttactgctccaaa

SEQ ID NO: 12739 - DNA, 600 bp, Chicken  19866894216655_3
gacatctagtggaatggcccaaagggcagagaaatacctctggaagaagacaggaaatacctttgctgatgactttagcttccatgcctgaaagatctgtatcatcttcacgagccaccgtgcaaactacacccatgcagtagcattatttgaactactgaggacattcacaccagctcaaacagcagtaattctccaggatattgacatatcccgggctggaaaacctttactgctccaaagtcactaataggtcctaatgagttgattaaaaaaaattatcaaggtaataattcaatygggaactgtaccattgggcaatacatacaacttcaattggcaggcacatcaatggactgctgaacagtgatttcaatggctcttgcccaaggctagaggcraaagtctctcttacgcattttgcaatggccaaggatatttgctgtgatatgcaaataccattcttgttttgattaagtaaaactgaaccagcaaatcttttagcccatgatcaaggcattaggtggcaagtcatctggagggaacccacagacagctacagaatttcccttactccacacttatttggaaatttaactc

SEQ ID NO: 12740 - DNA, 600 bp, Chicken  19866894216655_4
tcatcttcacgagccaccgtgcaaactacacccatgcagtagcattatttgaactactgaggacattcacaccagctcaaacagcagtaattctccaggatattgacatatcccgggctggaaaacctttactgctccaaagtcactaataggtcctaatgagttgattaaaaaaaattatcaaggtaataattcaatygggaactgtaccattgggcaatacatacaacttcaattggcaggcacatcaatggactgctgaacagtgatttcaatggctcttgcccaaggctagaggcraaagtctctcttacgcattttgcaatggccaaggatatttgctgtgatatgcaaataccattcttgttttgattaagtaaaactgaaccagcaaatcttttagcccatgatcaaggcattaggtggcaagtcatctggagggaacccacagacagctacagaatttcccttactccacacttatttggaaatttaactcattccttaacattatctaaaatgaggccctcttgcatttgctctggattcaactcatactagctgtgtgaacaaaaatacttgagcacaatcctagtggtg

SEQ ID NO: 12741 - DNA, 600 bp, Chicken  19866894216655_5
ccaaggatatttgctgtgatatgcaaataccattcttgttttgattaagtaaaactgaaccagcaaatcttttagcccatgatcaaggcattaggtggcaagtcatctggagggaacccacagacagctacagaatttcccttactccacacttatttggaaatttaactcattccttaacattatctaaaatgaggccctcttgcatttgctctggattcaactcatactagctgtgtgaacaaaaatacttgagcacaatcctagtggtgcccaggattctcctgcaatgcagggatytttttcyaagttgggattatgcactttgaataccatttctgcagccctctgttcctccatgggtgctgtggggcaccttattggtggttagcaacagcctcagtggcatcacatagctcatgctgggataagacgacaacacgctgatgatccccaaggccctgcagaggaaggatttttccgggaatagaaagggttccctgtggccatgcagggcatggagccctggagaacccaaccaggcatgttcacagaaacacctgttctggagctggtctttcaaagtactgaagggtttaa

SEQ ID NO: 12742 - DNA, 600 bp, Chicken  19866894216655_6
tatttgctgtgatatgcaaataccattcttgttttgattaagtaaaactgaaccagcaaatcttttagcccatgatcaaggcattaggtggcaagtcatctggagggaacccacagacagctacagaatttcccttactccacacttatttggaaatttaactcattccttaacattatctaaaatgaggccctcttgcatttgctctggattcaactcatactagctgtgtgaacaaaaatacttgagcacaatcctagtggtgcccaggattctcctgcaatgcagggatytttttcyaagttgggattatgcactttgaataccatttctgcagccctctgttcctccatgggtgctgtggggcaccttattggtggttagcaacagcctcagtggcatcacatagctcatgctgggataagacgacaacacgctgatgatccccaaggccctgcagaggaaggatttttccgggaatagaaagggttccctgtggccatgcagggcatggagccctggagaacccaaccaggcatgttcacagaaacacctgttctggagctggtctttcaaagtactgaagggtttaacacagca

SEQ ID NO: 12743 - DNA, 600 bp, Chicken  19866894216659_1
tcatactaaactagtagattagatactcctgcccatgtatatagttaaaccctcagatttcttgagggttctagggaggaaaaagggatgaaggggagaggagacagtgtacagcccacgactgatggtcagtataatctaaatgggtcatatcttcttcttcagatgatgatatattttgcagccttttagaaaatcatttgcataaagacgcacttgaaatgaacttcagaaatctaacccattttcagaatatgactgaaaagaaggatgagaatttggtgtgccaacatttcaggyaaaaaaaaaaragaaaaaaaaagcagaagcagtcttttgtcagtactggggattagcaatttaaatagttcaatytttaatccaggaaactagtaaaatgaggccaattaacatttgcaggacacataaaatatttaaagtagtaaggggcatgttttcagaggcattcttatctctactaaatgtgttctttttttcccctaaatggcttatatttttagtgctgatgctatgtgctctcaaaggttaagtaagagtttatttactgccgtggtgtagagaggactactgggtgatttt

SEQ ID NO: 12744 - DNA, 600 bp, Chicken  19866894216659_2
tagtagattagatactcctgcccatgtatatagttaaaccctcagatttcttgagggttctagggaggaaaaagggatgaaggggagaggagacagtgtacagcccacgactgatggtcagtataatctaaatgggtcatatcttcttcttcagatgatgatatattttgcagccttttagaaaatcatttgcataaagacgcacttgaaatgaacttcagaaatctaacccattttcagaatatgactgaaaagaaggatgagaatttggtgtgccaacatttcaggaaaaaaaaaaaragaaaaaaaaagcagaagcagtcttttgtcagtactggggattagcaatttaaatagttcaatytttaatccaggaaactagtaaaatgaggccaattaacatttgcaggacacataaaatatttaaagtagtaaggggcatgttttcagaggcattcttatctctactaaatgtgttctttttttcccctaaatggcttatatttttagtgctgatgctatgtgctctcaaaggttaagtaagagtttatttactgccgtggtgtagagaggactactgggtgattttcttcatctcaa

SEQ ID NO: 12745 - DNA, 600 bp, Chicken  19866894216659_3
gaggaaaaagggatgaaggggagaggagacagtgtacagcccacgactgatggtcagtataatctaaatgggtcatatcttcttcttcagatgatgatatattttgcagccttttagaaaatcatttgcataaagacgcacttgaaatgaacttcagaaatctaacccattttcagaatatgactgaaaagaaggatgagaatttggtgtgccaacatttcaggaaaaaaaaaaaragaaaaaaaaagcagaagcagtcttttgtcagtactggggattagcaatttaaatagttcaatytttaatccaggaaactagtaaaatgaggccaattaacatttgcaggacacataaaatatttaaagtagtaaggggcatgttttcagaggcattcttatctctactaaatgtgttctttttttcccctaaatggcttatatttttagtgctgatgctatgtgctctcaaaggttaagtaagagtttatttactgccgtggtgtagagaggactactgggtgattttcttcatctcaatacacttcagtgtcatcgacaaccaatttctgatttcctgatattgacattctgcacattgaaa

SEQ ID NO: 12746 - DNA, 599 bp, Chicken  19866894216660_1
  misc_feature (1)..(91): n is any nucleotide
nnnnnnnnnnnnnnnnnnnnnnnnnnnnnnnnnnnnnnnnnnnnnnnnnnnnnnnnnnnnnnnnnnnnnnnnnnnnnnnnnnnnnnnnnnntgaactatgtgagtgggaaaacacttgatctgtgccaaaacaagcgcatcagtctgcagtactgacagctttcctgagacacagaacacagtccatctcagttgagggtcagcatgatttctcatcaatctgctacacaaaaatagaatgactaaaatcccctgttcttcttcaggaaacgagagtacaaaagaaatcacaaggatgcycttctggccatttccagacaacatgcctgttgcatgactcaggcacttgaaagagtgttttaccatgaaatactattccatacattggcaattatttcagtaggagcgtgccaactatgcaagcaatgcaacatccaacaggatgtcagggcccactacagaacatgaatgcaactgtgacagaccagtaaatatctatgtatcactaaaacctagccttgccttgaaaacawaatgtgggtaagtgtagcaaaaattacccacaaaaagaattaaacaaggagggtccaaacacacag

SEQ ID NO: 12747 - DNA, 600 bp, Chicken  19866894216660_2
atagaatgactaaaatcccctgttcttcttcaggaaacgagagtacaaaagaaatcacaaggatgcycttctggccatttccagacaacatgcctgttgcatgactcaggcacttgaaagagtgttttaccatgaaatactattccatacattggcaattatttcagtaggagcgtgccaactatgcaagcaatgcaacatccaacaggatgtcagggcccactacagaacatgaatgcaactgtgacagaccagtaaatatctatgtatcactaaaacctagccttgccttgaaaacawaatgtgggtaagtgtagcaaaaattacccacaaaaagaattaaacaaggagggtccaaacacacagcctaacttccagctaagcacaggctgggtaagtcatgacttygggcctccrtcagctgactgccaccagcagctgccctgaaagctccctgccctgccaggccgcgctgccagctgcccccctctcctctgctcagccccacactgcctacacaggattccagcagctctccaacaaccaagctgttgaaaaaagccaagctataaactggatgctgccctcattttctgtatc

SEQ ID NO: 12748 - DNA, 570 bp, Chicken  19866894216660_3
ggcacttgaaagagtgttttaccatgaaatactattccatacattggcaattatttcagtaggagcgtgccaactatgcaagcaatgcaacatccaacaggatgtcagggcccactacagaacatgaatgcaactgtgacagaccagtaaatatctatgtatcactaaaacctagccttgccttgaaaacawaatgtgggtaagtgtagcaaaaattacccacaaaaagaattaaacaaggagggtccaaacacacagcctaacttccagctaagcacaggctgggtaagtcatgacttygggcctccrtcagctgactgccaccagcagctgccctgaaagctccctgccctgccaggccgcgctgccagctgcccccctctcctctgctcagccccacactgcctacacaggattccagcagctctccaacaaccaagctgttgaaaaaagccaagctataaactggatgctgccctcattttctgtatccttttacataatctcatccgcacactcattttgtatcttttcttgaagtaccttggcaggattaagctcatggagctg

SEQ ID NO: 12749 - DNA, 561 bp, Chicken  19866894216660_4
aagagtgttttaccatgaaatactattccatacattggcaattatttcagtaggagcgtgccaactatgcaagcaatgcaacatccaacaggatgtcagggcccactacagaacatgaatgcaactgtgacagaccagtaaatatctatgtatcactaaaacctagccttgccttgaaaacawaatgtgggtaagtgtagcaaaaattacccacaaaaagaattaaacaaggagggtccaaacacacagcctaacttccagctaagcacaggctgggtaagtcatgacttygggcctccrtcagctgactgccaccagcagctgccctgaaagctccctgccctgccaggccgcgctgccagctgcccccctctcctctgctcagccccacactgcctacacaggattccagcagctctccaacaaccaagctgttgaaaaaagccaagctataaactggatgctgccctcattttctgtatccttttacataatctcatccgcacactcattttgtatcttttcttgaagtaccttggcaggattaagctcatggagctg

SEQ ID NO: 12750 - DNA, 599 bp, Chicken  19866894216661_1
  misc_feature (1)..(135): n is any nucleotide
nnnnnnnnnnnnnnnnnnnnnnnnnnnnnnnnnnnnnnnnnnnnnnnnnnnnnnnnnnnnnnnnnnnnnnnnnnnnnnnnnnnnnnnnnnnnnnnnnnnnnnnnnnnnnnnnnnnnnnnnnnnnnnnnnnnnnnnaaccaaaatgtgctccataactgaggaataaaacaaatgtgtgttttgaaggaaagcagcaattacacctgacatttcctgaactgcatttctgatctttttggctcatatttagaataatttcgttacaagttccatgcttcacatctcttgctggaatccacwtcataaccttgccttcacaaagcttcaagaaaagctatttaaaaacaattttttccaagcctcagaaaagcaattgttctccttaacacagcctacatctgaaaaggttaatttgacacattatccccgctgcgtaataaaagcagatataattcattataggcatggctgatgagtgtgattcagaatgcctgcattttactgaagcgctttgtatctgcaactggcaaagctacaatgcagaattttctctgagygaatctgatccctgtgctttggaggtgtcatccatcaggtag

SEQ ID NO: 12751 - DNA, 600 bp, Chicken  19866894216661_2
tcgttacaagttccatgcttcacatctcttgctggaatccacwtcataaccttgccttcacaaagcttcaagaaaagctatttaaaaacaattttttccaagcctcagaaaagcaattgttctccttaacacagcctacatctgaaaaggttaatttgacacattatccccgctgcgtaataaaagcagatataattcattataggcatggctgatgagtgtgattcagaatgcctgcattttactgaagcgctttgtatctgcaactggcaaagctacaatgcagaattttctctgagygaatctgatccctgtgctttggaggtgtcatccatcaggtagcatgacttgaacacagtattggccaagcccccatttacttaatttttagagtacactattgaacagttcttcaagtgtttaaaggggaagcttgtacaacagctttcctaatcctgttctccattcagatttccgaattatgatacacacaagaaataaaagcaggaggctatgttatcaaaaattctgttggggagaatgaggtacaaaaagatttatgtagcatcacatctatatattactcgtagtgcttgggtt

SEQ ID NO: 12752 - DNA, 600 bp, Chicken  19866894216664_1
agggttgtcatgaaagcaattccttcctaaaaattacttggcggtgcacacactacagcatttatctgaagacagcataggatgtctcttgttcaagaggccatgaacacgcaacaggtaggatgtctgtgctatacaaacggtaaggcgatcagcttaagcatgctggcagggacaggagattgatttcaagctgattctcatagtcctctcccttcccttagctcacagagccaccaacacaactccaactactcacctccccatccccttgttacatggaaggacgtggggaatggytttaaactaaaagagatttaggttagttgctggggggacatgtttcacccagaaggtggtaaggcagtggcacaggctgcccagaaaagatgacttgtccctgggggtgtgygaggccaggctggatggggtcctgggcagcctgggctggtggggggcagccagcccatggcagcgttgggactgggtgggctttaaggtcccttccgatcctaccattctatgattctaygatacgtgaagggagctgcgttctccatctgttatcagcttcatccacctattacagcaactttttat

SEQ ID NO: 12753 - DNA, 600 bp, Chicken  19866894216664_2
aacaggtaggatgtctgtgctatacaaacggtaaggcgatcagcttaagcatgctggcagggacaggagattgatttcaagctgattctcatagtcctctcccttcccttagctcacagagccaccaacacaactccaactactcacctccccatccccttgttacatggaaggacgtggggaatggytttaaactaaaagagatttaggttagttgctggggggacatgtttcacccagaaggtggtaaggcagtggcacaggctgcccagaaaagatgacttgtccctgggggtgtgygaggccaggctggatggggtcctgggcagcctgggctggtggggggcagccagcccatggcagcgttgggactgggtgggctttaaggtcccttccgatcctaccattctatgattctaygatacgtgaagggagctgcgttctccatctgttatcagcttcatccacctattacagcaactttttatcgtgcaattacctgctatcagcagcwgctctccrttcgccctgaggtctccacgctttctgtagccatctctcagcctgttagagccctattgctgcctctgaggctcagct

SEQ ID NO: 12754 - DNA, 600 bp, Chicken  19866894216664_3
gccaccaacacaactccaactactcacctccccatccccttgttacatggaaggacgtggggaatggytttaaactaaaagagatttaggttagttgctggggggacatgtttcacccagaaggtggtaaggcagtggcacaggctgcccagaaaagatgacttgtccctgggggtgtgygaggccaggctggatggggtcctgggcagcctgggctggtggggggcagccagcccatggcagcgttgggactgggtgggctttaaggtcccttccgatcctaccattctatgattctaygatacgtgaagggagctgcgttctccatctgttatcagcttcatccacctattacagcaactttttatcgtgcaattacctgctatcagcagcwgctctccrttcgccctgaggtctccacgctttctgtagccatctctcagcctgttagagccctattgctgcctctgaggctcagctgtctggtcacgttcactcatctttggctttggggctaccacacaaactggatgtttcctaaagtcctgttttaatctgactgtgctcccracctgcagctcctatcatcttcagctgyac

SEQ ID NO: 12755 - DNA, 600 bp, Chicken  19866894216664_4
ttgctggggggacatgtttcacccagaaggtggtaaggcagtggcacaggctgcccagaaaagatgacttgtccctgggggtgtgygaggccaggctggatggggtcctgggcagcctgggctggtggggggcagccagcccatggcagcgttgggactgggtgggctttaaggtcccttccgatcctaccattctatgattctaygatacgtgaagggagctgcgttctccatctgttatcagcttcatccacctattacagcaactttttatcgtgcaattacctgctatcagcagcwgctctccrttcgccctgaggtctccacgctttctgtagccatctctcagcctgttagagccctattgctgcctctgaggctcagctgtctggtcacgttcactcatctttggctttggggctaccacacaaactggatgtttcctaaagtcctgttttaatctgactgtgctcccracctgcagctcctatcatcttcagctgyacatattcctcctcccaaacaaagctgtttctttagctcggaagagcaaaaattaggaaagctttgttttggctacaaagccaaactacagtacca

SEQ ID NO: 12756 - DNA, 600 bp, Chicken  19866894216664_5
gggacatgtttcacccagaaggtggtaaggcagtggcacaggctgcccagaaaagatgacttgtccctgggggtgtgygaggccaggctggatggggtcctgggcagcctgggctggtggggggcagccagcccatggcagcgttgggactgggtgggctttaaggtcccttccgatcctaccattctatgattctaygatacgtgaagggagctgcgttctccatctgttatcagcttcatccacctattacagcaactttttatcgtgcaattacctgctatcagcagcwgctctccrttcgccctgaggtctccacgctttctgtagccatctctcagcctgttagagccctattgctgcctctgaggctcagctgtctggtcacgttcactcatctttggctttggggctaccacacaaactggatgtttcctaaagtcctgttttaatctgactgtgctcccracctgcagctcctatcatcttcagctgyacatattcctcctcccaaacaaagctgtttctttagctcggaagagcaaaaattaggaaagctttgttttggctacaaagccaaactacagtaccaaacgctgc

SEQ ID NO: 12757 - DNA, 504 bp, Chicken  19866894216664_6
ccttccgatcctaccattctatgattctaygatacgtgaagggagctgcgttctccatctgttatcagcttcatccacctattacagcaactttttatcgtgcaattacctgctatcagcagcwgctctccrttcgccctgaggtctccacgctttctgtagccatctctcagcctgttagagccctattgctgcctctgaggctcagctgtctggtcacgttcactcatctttggctttggggctaccacacaaactggatgtttcctaaagtcctgttttaatctgactgtgctcccracctgcagctcctatcatcttcagctgyacatattcctcctcccaaacaaagctgtttctttagctcggaagagcaaaaattaggaaagctttgttttggctacaaagccaaactacagtaccaaacgctgccattgctcccggcaaggagcatgaggtaaattcaggtgggagtttttggcagaaatagatggtaaaccttgg

SEQ ID NO: 12758 - DNA, 476 bp, Chicken  19866894216664_7
aygatacgtgaagggagctgcgttctccatctgttatcagcttcatccacctattacagcaactttttatcgtgcaattacctgctatcagcagcwgctctccrttcgccctgaggtctccacgctttctgtagccatctctcagcctgttagagccctattgctgcctctgaggctcagctgtctggtcacgttcactcatctttggctttggggctaccacacaaactggatgtttcctaaagtcctgttttaatctgactgtgctcccracctgcagctcctatcatcttcagctgyacatattcctcctcccaaacaaagctgtttctttagctcggaagagcaaaaattaggaaagctttgttttggctacaaagccaaactacagtaccaaacgctgccattgctcccggcaaggagcatgaggtaaattcaggtgggagtttttggcagaaatagatggtaaaccttgg

SEQ ID NO: 12759 - DNA, 600 bp, Chicken  19866894216671_1
ttgtccattttttactgccttgcctccaagcatctcaaattgctgtataaatctgataggccttgaacctacctacccacaaacaacagaaatacaatttctcttttacaagggagacatcacatatgtatgaggtacatttgggcagccctaaggccagctgctttaagagctgggagaaaaaaatcgtcacctataacgtgacttgcacctgtcagtctgaatgtcacgaggcccatctccctcccccagtacatcctctacaaatgagccaagagctgttttgctgtgctctcaccrtcaaaccgcgtatacttcagrggggctgtagggttttccaggacggagccaacttctgcttctccatcacttgtcagctgcagttgcagtttggacttagcccagttactgagcagctctcgggctatcacaaagaaagagaatgatgactttaaaaatatacaggtaggtgcaaactagcaaaactctttctgtgcgacagttatatcacatgctgggaaaacattctaaaatgaccagaagctgatctacaacagaaaatggaataggactaataattctgttttcatatttttgatc

SEQ ID NO: 12760 - DNA, 600 bp, Chicken  19866894216671_2
gcctccaagcatctcaaattgctgtataaatctgataggccttgaacctacctacccacaaacaacagaaatacaatttctcttttacaagggagacatcacatatgtatgaggtacatttgggcagccctaaggccagctgctttaagagctgggagaaaaaaatcgtcacctataacgtgacttgcacctgtcagtctgaatgtcacgaggcccatctccctcccccagtacatcctctacaaatgagccaagagctgttttgctgtgctctcaccrtcaaaccgcgtatacttcagrggggctgtagggttttccaggacggagccaacttctgcttctccatcacttgtcagctgcagttgcagtttggacttagcccagttactgagcagctctcgggctatcacaaagaaagagaatgatgactttaaaaatatacaggtaggtgcaaactagcaaaactctttctgtgcgacagttatatcacatgctgggaaaacattctaaaatgaccagaagctgatctacaacagaaaatggaataggactaataattctgttttcatatttttgatctaaaaagaataggatggtggc

SEQ ID NO: 12761 - DNA, 600 bp, Chicken  19866894216672_1
gttgttctaagttagagcagttagaagaaactgttagaaacgtagaggtttttttggttgtatggatttacagtgagcttttcagaagagtattagttaaatctatgggaaagagattactgtatctttttctgcttcagcatcttgtttactatgcacgtgtattaactcctaaagaaacctttgcaaagtgttatttaattggcatcaactctctttcttaccctgtgtgttcacatatactctgcattttgtttacccttacagacaaacaaatgcaataaattttgtcgtcattgytctactgtaagggaaggaaggagctatggtcagaacaatatagtgggaactgggagaaagtgctatttctgtttatgctatagatgttctctgtgaatgagtgtacacctgccgtggtcctgactcatggctgttttctttttttttatattatattaccttacacttctctgattttatttttatgtgagcgaacctcttcttagcttctgacgccactctcgagttaacagtctgtgtccttattcacccaggcataytgggaaaacacatattgaaggaaatagtgagacagtgccc

SEQ ID NO: 12762 - DNA, 600 bp, Chicken  19866894216672_2
cttacagacaaacaaatgcaataaattttgtcgtcattgytctactgtaagggaaggaaggagctatggtcagaacaatatagtgggaactgggagaaagtgctatttctgtttatgctatagatgttctctgtgaatgagtgtacacctgccgtggtcctgactcatggctgttttctttttttttatattatattaccttacacttctctgattttatttttatgtgagcgaacctcttcttagcttctgacgccactctcgagttaacagtctgtgtccttattcacccaggcataytgggaaaacacatattgaaggaaatagtgagacagtgcccttttgccactgcctttgcgttgtcgtagtttaaacaagttactgcaaagcatatgtgagaataaggttgtgtaattactctaaagacaaatagtgttgtgaatagccacatgaaagaaatggccaggatgcagctttcagaacatttttcttccgagagatttaggcctttaaaattaatttctcactagttaattgaatgcttctggaaattctttccaatgagtaatctgtcatttcaaaattactggcgcttgagac

SEQ ID NO: 12763 - DNA, 600 bp, Chicken  19866894216674_1
tctgtaaactctcgagctgctgaggaagtgacaggtgcaatatgtgcagcaacaggcatatactaaagtgctgagatcctaagaggaaaagagatatacctcttctctctgtataaaccaatgttttttgattgcagtgttgatacactgctctccatcaaggcaagggcgtgtaactgttttattacaaaaattgtaagggttaaatcacattatgattaaagcatgcagttagggtctctcgtccctacttaatatgaaagtggttatcagttttctgtaatgaagagaaattcacaraggcaagtaagtcatcctgtccaggataaactgtcaacccagtgaggttgacacatggggcctttaagcttctgcttgtacaaacctcagtttctgggcaggtcttaaacygaaacatctgcaaaatcctcagcagagtcatttttgtcgccagcaaacccatcttcctaccaatacagccacggggtcccgctccaaagggcagatatgcaaagggatgtcgctccttcttggcctcctctgtaaacctggaaggtgaaaagatggcaaccagttcaataaactttttgttcctagttc

SEQ ID NO: 12764 - DNA, 600 bp, Chicken  19866894216674_2
tataaaccaatgttttttgattgcagtgttgatacactgctctccatcaaggcaagggcgtgtaactgttttattacaaaaattgtaagggttaaatcacattatgattaaagcatgcagttagggtctctcgtccctacttaatatgaaagtggttatcagttttctgtaatgaagagaaattcacaraggcaagtaagtcatcctgtccaggataaactgtcaacccagtgaggttgacacatggggcctttaagcttctgcttgtacaaacctcagtttctgggcaggtcttaaacygaaacatctgcaaaatcctcagcagagtcatttttgtcgccagcaaacccatcttcctaccaatacagccacggggtcccgctccaaagggcagatatgcaaagggatgtcgctccttcttggcctcctctgtaaacctggaaggtgaaaagatggcaaccagttcaataaactttttgttcctagttccatattattttattcacacttcaaaagttatttctattccacttaatggacagataaagggactattgtcagattatgcccctaagtcaactgttagtttgagttgcagat

SEQ ID NO: 12765 - DNA, 600 bp, Chicken  19866894216676_1
aatactttagtaactccaaataaaagcgtttacgtactcattttaattgtgcctgcagtaaaaatgcttctgaagctcacggtgttggttataacaagaaggaatgatgcgtgtacagacaaaaataggcattcagtcacccatccatattcaaagaggtcaaattaattttcacttatgcttgggaataaactcagattacccaggtgataatacacccacgtagaccagagcatggtttagcagcaggaaagcaggaacaggctgatattgttacaggaccgatgttcagtatctgcmcagcagttcagcacctgcagaacckgaatgttgtcaatctaacagctccctttaagccctctggactcataccattgtgcattctgcctcagacacctcccacatcgctccactctaccactgtccatagcttgggagttaaaccaagcatcagaagaaacccagacgaaagtgggttgcttgagtggaagttatttaaccccagcactgatggttgtgtacaactaacacagaaagaaagttacttcagttcaaaagccagtacttattctgctccgtaagtcttcaatggacatatgc

SEQ ID NO: 12766 - DNA, 600 bp, Chicken  19866894216676_2
gcgtttacgtactcattttaattgtgcctgcagtaaaaatgcttctgaagctcacggtgttggttataacaagaaggaatgatgcgtgtacagacaaaaataggcattcagtcacccatccatattcaaagaggtcaaattaattttcacttatgcttgggaataaactcagattacccaggtgataatacacccacgtagaccagagcatggtttagcagcaggaaagcaggaacaggctgatattgttacaggaccgatgttcagtatctgcmcagcagttcagcacctgcagaacckgaatgttgtcaatctaacagctccctttaagccctctggactcataccattgtgcattctgcctcagacacctcccacatcgctccactctaccactgtccatagcttgggagttaaaccaagcatcagaagaaacccagacgaaagtgggttgcttgagtggaagttatttaaccccagcactgatggttgtgtacaactaacacagaaagaaagttacttcagttcaaaagccagtacttattctgctccgtaagtcttcaatggacatatgcatatattttaattaatgttcctttc

SEQ ID NO: 12767 - DNA, 600 bp, Chicken  19866894216676_3
atagttaggagtaattaactgagccttacaatttcacttttttgctcaggaattcttttaatacgtgaaaagtcaagctatttatttagcttacaggagtttatcaacatcataccgtatttaccactaacacagcaaaaaattgcaagaatgatggctttgctttattgactacactgtcagacagcagttcagctacaactacaattagtgctagatataatttggaaatccctagcaggggactcagaccgtttgtgccttgggcttgctcaaacaagagcaacgtttgaggacaayagaatcccagaatcacaggggctggaaggcatctcaaaagatcatcaagtccaacccccctgctaaagcatgttccctacaataggtcgcacaggtaggcatccagatgggtctcgaatatctccatagaaggagactcyacaacctccctgggcaactacgaagctataacttgtatactcattctgcaatgaacaaactcttttcctcggagcatgtgtgagagaatcaagaaattaggaggagagaagcaaagaagacacatcatgaggttatttgttgttaaayagagcaagagca

SEQ ID NO: 12768 - DNA, 600 bp, Chicken  19866894216676_4
aattgcaagaatgatggctttgctttattgactacactgtcagacagcagttcagctacaactacaattagtgctagatataatttggaaatccctagcaggggactcagaccgtttgtgccttgggcttgctcaaacaagagcaacgtttgaggacaayagaatcccagaatcacaggggctggaaggcatctcaaaagatcatcaagtccaacccccctgctaaagcatgttccctacaataggtcgcacaggtaggcatccagatgggtctcgaatatctccatagaaggagactcyacaacctccctgggcaactacgaagctataacttgtatactcattctgcaatgaacaaactcttttcctcggagcatgtgtgagagaatcaagaaattaggaggagagaagcaaagaagacacatcatgaggttatttgttgttaaayagagcaagagcatggtgagccagaaaatgtgtattttctcaagctacagcttagcaaagcttgttactaacttgttttggagatgatatgatatgattgatcgcctcagctttttccactgattaccgagcaaatggaaaggaatgagagcc

SEQ ID NO: 12769 - DNA, 544 bp, Chicken  19866894216676_5
tttgaggacaayagaatcccagaatcacaggggctggaaggcatctcaaaagatcatcaagtccaacccccctgctaaagcatgttccctacaataggtcgcacaggtaggcatccagatgggtctcgaatatctccatagaaggagactcyacaacctccctgggcaactacgaagctataacttgtatactcattctgcaatgaacaaactcttttcctcggagcatgtgtgagagaatcaagaaattaggaggagagaagcaaagaagacacatcatgaggttatttgttgttaaayagagcaagagcatggtgagccagaaaatgtgtattttctcaagctacagcttagcaaagcttgttactaacttgttttggagatgatatgatatgattgatcgcctcagctttttccactgattaccgagcaaatggaaaggaatgagagccaagaaaacacaaatgaaactgagggaacagaatcaattccagggtatatcaatatttcactcaaatgcttcccatcttgctcctaattattt

SEQ ID NO: 12770 - DNA, 600 bp, Chicken  19866894216684_1
cctgtgactcaatggatagctcatcctgctgtttctgcatggggcactacaagattgcatgctctgggagctggatttgtactcctagtgatgcattgcatgaagatgttccccaacaacgtggcagtgtggcaaagtatcatagcccttctgccagctactgcccctgaagggcatggagtgaggagttttgatgctgatgtgatttaggtggaagagccaaatggaagcaggcgcggttcagcatgaaatttagttccaaaatgttcagatttttgtctgaaaacttcacagtattcktccccctcccctccccccacttacaaacagttgtaaggccaaagaacacttaaatatttgttcccaagatacatctacatgtttcatgattgcacagagacagtctctgaagtgattactacgatcagttgctttaaaaaagaaaactataatagtactgtgcataagggcagaagaagactaaaacttccttttttatccttttctatatttatttttaaggtagagcagctgtgttttagctagaatgtgcctataaaatgttgttggtttaattaatttgatctccttgtccaagtt

SEQ ID NO: 12771 - DNA, 600 bp, Chicken  19866894216695_1
ctaggctggaaggcttttggtcccaagagatactaaattaaagctggtgcagttctaagctgttctggcttcctcccagttatatacattgagactgcagagcagtaattttgtaatgaaagtacttgaacttacagggtactcccaaaacatgtaatttcttggttggaactatgggaaagatactacaccgacaatactttgaattacagaagagatggcatattcttagctacttcagtaactatttttcatggcactgtcccaactggacagcatggcaaaactctcctttgcatwtaaggaaggcagttgtttattttcaggtgatgctgtcttattccaccaattcaaccaactaaaactgtcacttgaagagtagctgctgctgtgttcttcaagaagtggttgctgcacagcttggaatatgttgctgagtgtcgtccaaaaaggagagtttggacagaggagggagaaaaaatcagtaggcagagtctcaagtttgctacctaaataagcaggtatattcagatgtggatgttgtaagcattcaactgtttgaaaacaagtatgtttttaattaggtgtttaactgcagac

SEQ ID NO: 12772 - DNA, 600 bp, Chicken  19866894216703_1
ctaagcttgagaaagctgctttttaaaggacccataaaaaaagaaaaagcattacaatgaacaaaatgcacctattgagagtaacccatgaaattaatcttaatttcttctaaaacagaagaacaggcaggacagacaaaaagcaaagacttttttggactttactccagtgtcgagcaacatattctcataaagcaagacagagttcagtgcgttacaggtaaaatgactacaacttaaggcagaacattcctgaaaaaggacataccagaaagttgtttatcagatcactgtaaaacygaaaggatatttgcaacgcagtcattctggtccagatcatattccgtgttttaaatagctctttaaataatggaagagaaaaatatctaaagtgtctacaaattttgggcttccctatagtatctgtagaggacaagccaagaaatgaggatgataggaagaaagtgtgtgagaaagacacacacagagaaatcttatgaaaaatactggatgtatcacagtagggacaacacaaatttcagtgttttagcagaaataaacattaaaaagacagaggcagttaggcagatacccattctt

SEQ ID NO: 12773 - DNA, 600 bp, Chicken  19866894216703_2
atattcaaagttagcaaccatacaaatgaaaaagcactgcctctgctcttccagatcaccaagttttgattaaaccaacttggaaataattgcatcctaaagtaaacaagtatttgcagcctctgtaaatctttagctcaagaaagcaataaatcattttgacaggcttagaacatataaccagaagagcaagatattatcatggggcttacactaaaatgtaatgaactcaaagacacaacaaggaaatcaagctattatcctcttggctgacaactcaaggaagtgatgtagtcttcraagtgcacaggaaataaaaccctttgaaagggtacatttttagttgcctcaggaaacacacattaaaaagttgagcaattacctttcgggttcaaagacactgctatctgctaccatggcctttaacacatcagcatttgctgtaatgagaataaatagaattcttcaaaaatgcacagctctaactttagaaaaacaaacaacaaaactaaaggtgctaaaaagaacttccatctagaagaaagatggctgcattgtctgtatcaccaaaaaggcatgagagagaatcatgcaaaaatg

SEQ ID NO: 12774 - DNA, 599 bp, Chicken  19866894216704_1
  misc_feature (1)..(212): n is any nucleotide
nnnnnnnnnnnnnnnnnnnnnnnnnnnnnnnnnnnnnnnnnnnnnnnnnnnnnnnnnnnnnnnnnnnnnnnnnnnnnnnnnnnnnnnnnnnnnnnnnnnnnnnnnnnnnnnnnnnnnnnnnnnnnnnnnnnnnnnnnnnnnnnnnnnnnnnnnnnnnnnnnnnnnnnnnnnnnnnnnnnnnnnnnnnnnnnnnnnnnnnnnnnnnnnnnnnntaaaattcatttgaaagcaccagtgctgtcctgctgctgcagacaggctgcatgaaagtagctttaactgattccagtatttgaaaaygaaagtacrgttcactgtgagatttcaccaagtattaccttgatcttacccaaaatgttagggtttgactccaggttatgtgaccattggactgaagatataatgtgtaattttttctatttctttaaaatytaatgaatcttatgtaattttrgattttataataaaattctatgtggtttaaagtttaaaatcagacaatgggcaaccggataattaacaacccactttacatagtttaaaaaaaataggagatgtaaacattatccttgtagaatcctgtagacttccttaatgct

SEQ ID NO: 12775 - DNA, 599 bp, Chicken  19866894216704_2
  misc_feature (1)..(203): n is any nucleotide
nnnnnnnnnnnnnnnnnnnnnnnnnnnnnnnnnnnnnnnnnnnnnnnnnnnnnnnnnnnnnnnnnnnnnnnnnnnnnnnnnnnnnnnnnnnnnnnnnnnnnnnnnnnnnnnnnnnnnnnnnnnnnnnnnnnnnnnnnnnnnnnnnnnnnnnnnnnnnnnnnnnnnnnnnnnnnnnnnnnnnnnnnnnnnnnnnnnnnnnnnnntaaaattcatttgaaagcaccagtgctgtcctgctgctgcagacaggctgcatgaaagtagctttaactgattccagtatttgaaaaygaaagtacrgttcactgtgagatttcaccaagtattaccttgatcttacccaaaatgttagggtttgactccaggttatgtgaccattggactgaagatataatgtgtaattttttctatttctttaaaatytaatgaatcttatgtaattttrgattttataataaaattctatgtggtttaaagtttaaaatcagacaatgggcaaccggataattaacaacccactttacatagtttaaaaaaaataggagatgtaaacattatccttgtagaatcctgtagacttccttaatgctcttcttgga

SEQ ID NO: 12776 - DNA, 599 bp, Chicken  19866894216704_3
  misc_feature (1)..(80): n is any nucleotide
nnnnnnnnnnnnnnnnnnnnnnnnnnnnnnnnnnnnnnnnnnnnnnnnnnnnnnnnnnnnnnnnnnnnnnnnnnnnnnnntaaaattcatttgaaagcaccagtgctgtcctgctgctgcagacaggctgcatgaaagtagctttaactgattccagtatttgaaaaygaaagtacrgttcactgtgagatttcaccaagtattaccttgatcttacccaaaatgttagggtttgactccaggttatgtgaccattggactgaagatataatgtgtaattttttctatttctttaaaatytaatgaatcttatgtaattttrgattttataataaaattctatgtggtttaaagtttaaaatcagacaatgggcaaccggataattaacaacccactttacatagtttaaaaaaaataggagatgtaaacattatccttgtagaatcctgtagacttccttaatgctcttcttggagactttccctttttccttcttcatccttctttttctttgttctgctagtgccctcctcttttcatcagatttcctgttaattctgtctcaggtccgcaaattctttttggaatggatcagtgt

SEQ ID NO: 12777 - DNA, 599 bp, Chicken  19866894216704_4
  misc_feature (1)..(58): n is any nucleotide
nnnnnnnnnnnnnnnnnnnnnnnnnnnnnnnnnnnnnnnnnnnnnnnnnnnnnnnnnntaaaattcatttgaaagcaccagtgctgtcctgctgctgcagacaggctgcatgaaagtagctttaactgattccagtatttgaaaaygaaagtacrgttcactgtgagatttcaccaagtattaccttgatcttacccaaaatgttagggtttgactccaggttatgtgaccattggactgaagatataatgtgtaattttttctatttctttaaaatytaatgaatcttatgtaattttrgattttataataaaattctatgtggtttaaagtttaaaatcagacaatgggcaaccggataattaacaacccactttacatagtttaaaaaaaataggagatgtaaacattatccttgtagaatcctgtagacttccttaatgctcttcttggagactttccctttttccttcttcatccttctttttctttgttctgctagtgccctcctcttttcatcagatttcctgttaattctgtctcaggtccgcaaattctttttggaatggatcagtgttttgctttgtagaggtgagtat

SEQ ID NO: 12778 - DNA, 600 bp, Chicken  19866894216709_1
taggtttccccaggaagtcatagatccatagatcatagccatctaatccaggtctttgcaatgaatctgcaaattaatgtttattgtattgtgccagatattgtagttgataccaattaatttttgtattttgcgtgttctggcttgcagggtggaaagagttacacaggaccatgtggaggaagagactgcagtggaggatgccaatgtttccctgaaaaaggagcccgtgtaagtaacatttcttcctgcagaaagttcttcgtgccgtcagctcaatgccatttgctataggtagaygtgcatcagagtgctgggaatattcaatttgtgggttgtttctttttttcaggaaaacgtttctgttgttgcatctcacttctttgagagcatgtagatttgagaaaaaaataccttgttttgaagtattgcagattcttttcttagaggtaagggtcaaggtacctcacaatgctaaatgattgtgaacaaaatcactcagtagctttcttgaagtctttctaatgaaattgtatctgatgaaaagatacctcatacaggcggtttcctgcaggacctggaaggaaactgcctgggact

SEQ ID NO: 12779 - DNA, 599 bp, Chicken  19866894216721_1
  misc_feature (1)..(24): n is any nucleotide
nnnnnnnnnnnnnnnnnnnnnnnnatgcagataggaattattaaatctgttagcatagagttgccttaatgaggtgtcaaattcttcacaaaagcaaatcctattaaaaagacccaagattgaaagcagagtagattctaaaatgatggaaaaggaaaggaatgagagaacacagtattgatcattcacaccagtaatgtctgtttctgtttagaaatatgaaaaacagattaatgaattaataattcagtgtcaaaaagaggcccagaaggattaagtctattaaagtaatgtgactgygactataataactgcagcaccttctggaggtgagaagaagactgcacagtgggagagggatgagagtcagttacaaaaccccagcagagacaagtcagggaagggatgtatcagattttaattccatgacagtgaatggccattgaggatctgggctctgagggcactcagcaggcagmactgaggtaagggacaaccaaccagctgcatcctctgctaggtcagatttcaggtattgcagcagggctgttagctgtgaaggcaagtcataaagaaggcactgcacagacactgctgca

SEQ ID NO: 12780 - DNA, 600 bp, Chicken  19866894216721_2
gatcattcacaccagtaatgtctgtttctgtttagaaatatgaaaaacagattaatgaattaataattcagtgtcaaaaagaggcccagaaggattaagtctattaaagtaatgtgactgygactataataactgcagcaccttctggaggtgagaagaagactgcacagtgggagagggatgagagtcagttacaaaaccccagcagagacaagtcagggaagggatgtatcagattttaattccatgacagtgaatggccattgaggatctgggctctgagggcactcagcaggcagmactgaggtaagggacaaccaaccagctgcatcctctgctaggtcagatttcaggtattgcagcagggctgttagctgtgaaggcaagtcataaagaaggcactgcacagacactgctgcatctgggaagaatttgtgttcatggtgaaacctgtgcaatggtctgccttttccatactggagcttttccttgcttcagcacaaaccatctcccaggaaatcagaaagtgcgctgcagaagtgatatgatagaaactggtaagaggtgtagaaacaagcttcaggagctgtgatgggaatg

SEQ ID NO: 12781 - DNA, 600 bp, Chicken  19866894216722_1
tctaggcacatcactacatcgataatgtgatttaaaccccgatgcatacacctccaatactctgatatacaatttgaaaggctattacttaaaggctcaggtcactgggaaaataattcagctgctgaaggcagcctcctctagcagcaacacggtgctgtggctccggccctgtggtggttgctgctcctatgccccagggatactggcaccatcctacaattctgtgatccctagcactgcacttgtggttcagaggactgaattttgacagtgcaagatgtaaaatacttgcatcaygtgtctgccatgaaaacaaatgttgctgcaatggtctgatggttccctgggcagcagcactcgtgtccctgccaagtccttcctgcgcagggaggacktcaggagctgccattccctggatgaagtgcaatgtggggtcttcaaggctactcacccatctacaaaccattttcccccttcctcatatggcaaataggatgaccatacaaattaatatattgtcccattcactctgttactctgagcaacatttaattagaaggaaggcatagcctaccaagaagacctcctgtttaccaa

SEQ ID NO: 12782 - DNA, 600 bp, Chicken  19866894216722_2
aggtcactgggaaaataattcagctgctgaaggcagcctcctctagcagcaacacggtgctgtggctccggccctgtggtggttgctgctcctatgccccagggatactggcaccatcctacaattctgtgatccctagcactgcacttgtggttcagaggactgaattttgacagtgcaagatgtaaaatacttgcatcaygtgtctgccatgaaaacaaatgttgctgcaatggtctgatggttccctgggcagcagcactcgtgtccctgccaagtccttcctgcgcagggaggacktcaggagctgccattccctggatgaagtgcaatgtggggtcttcaaggctactcacccatctacaaaccattttcccccttcctcatatggcaaataggatgaccatacaaattaatatattgtcccattcactctgttactctgagcaacatttaattagaaggaaggcatagcctaccaagaagacctcctgtttaccaaacccaaactctgcccagcggcctcagctgggagcacgccatggaccaagctgctccccgtgggctgagctgctccccatggatgaagccagcccaggc

SEQ ID NO: 12783 - DNA, 599 bp, Chicken  19866894216728_1
  misc_feature (1)..(168): n is any nucleotide
nnnnnnnnnnnnnnnnnnnnnnnnnnnnnnnnnnnnnnnnnnnnnnnnnnnnnnnnnnnnnnnnnnnnnnnnnnnnnnnnnnnnnnnnnnnnnnnnnnnnnnnnnnnnnnnnnnnnnnnnnnnnnnnnnnnnnnnnnnnnnnnnnnnnnnnnnnnnnnnnnnnnnnnnacagcttattcaactaaagctgtgggcatactgcaatagctgctggctgtttggaatggagtctgtcctctactatggatggtgcctagtaacattgggagcaccaccctgagtagtgcttacaagaaataktaattgggatgaaggggaaaggaraaacactgacaggcagttgtttgatggcaatcacttttccgagagatttctttctagatagttatgtctccttgacttgctgccattcttttcctcctttaggcaattctcggggcatgctctgtggaaagacttgtaaagaagacagagacgatgaatggatgggcgtgagcttggctaggcagcctaaggctggtggaagtgtgctggtaggtccattctcctctttgatctcattaaaaccattgctgctgtctgactctaatgctaaacac

SEQ ID NO: 12784 - DNA, 599 bp, Chicken  19866894216728_2
  misc_feature (1)..(144): n is any nucleotide
nnnnnnnnnnnnnnnnnnnnnnnnnnnnnnnnnnnnnnnnnnnnnnnnnnnnnnnnnnnnnnnnnnnnnnnnnnnnnnnnnnnnnnnnnnnnnnnnnnnnnnnnnnnnnnnnnnnnnnnnnnnnnnnnnnnnnnnnnnnnnnnnacagcttattcaactaaagctgtgggcatactgcaatagctgctggctgtttggaatggagtctgtcctctactatggatggtgcctagtaacattgggagcaccaccctgagtagtgcttacaagaaataktaattgggatgaaggggaaaggaraaacactgacaggcagttgtttgatggcaatcacttttccgagagatttctttctagatagttatgtctccttgacttgctgccattcttttcctcctttaggcaattctcggggcatgctctgtggaaagacttgtaaagaagacagagacgatgaatggatgggcgtgagcttggctaggcagcctaaggctggtggaagtgtgctggtaggtccattctcctctttgatctcattaaaaccattgctgctgtctgactctaatgctaaacacatcaaaattaatgtttttggtagt

SEQ ID NO: 12785 - DNA, 600 bp, Chicken  19866894216728_3
atcagaactcaccatgaaaaatgtaagatgagactttggggaaatatttgtctttatgtatatgtattttccattaatgaggcggaagcattgaaagtgaagatgaattagttgtgtgtgggtggccttgctgtctttgatatggttaccatgcaaatagaaagggtcaaggagagcagatgtggtccttaggatgtggaatttatttctgcaaaacatttcctgtactggaaaaaaatcttaagaagaactggacaaatacctttctaaaatatatgagtatattatggtcaacatttkcctgtgtttgcatctgctgttgagctccatctaccctgggagcttgtgaaggaatgttaaatgaatgagaaaaaaatttatgaaatattgtgcataatgtgtgtctggcaaatttcaagcttgtgtcacagtacccctaataacaatctaatgctacacactactttttttgagttggaaatttgcatcatgaccccatctttcccgtgaggcaaggaatcacgcttgtgtgtgggcacccatgagtttcaaacctgctatcaacaggagctcttgtacagcactttctccactgaccac

SEQ ID NO: 12786 - DNA, 600 bp, Chicken  19866894216728_4
ttgcatcatgaccccatctttcccgtgaggcaaggaatcacgcttgtgtgtgggcacccatgagtttcaaacctgctatcaacaggagctcttgtacagcactttctccactgaccacctactcagtcaagtggagaaagctgcttaatgtgaaggcattttatttaatatgtatttagatgctttatcaccatgagtccttgcacactgacctcccatgggggagcaggtgggttttctacctttctatgatagtgcagtggtattttatctgattgtctctattggtgcacagcttgrcagtgtttcagaggctggctggttcattaccttagtagaatgttttaactgtgttcaaccgcagaaggggaaaagcagaatgggataaataaaatacattataaatgtacagcagagcacaaaatgaaggcattccaactagaagagtatgtaagcaatgtatgttttcaagggataacccagtatgtgygcttagaagaagtctgcttgatgactggggagtaatgtgttctgatccagacaaaccagcctcatgctataattctgtgttggaagtgttcaaggtcaggttggatgtgg

SEQ ID NO: 12787 - DNA, 600 bp, Chicken  19866894216728_5
ccatgagtccttgcacactgacctcccatgggggagcaggtgggttttctacctttctatgatagtgcagtggtattttatctgattgtctctattggtgcacagcttgrcagtgtttcagaggctggctggttcattaccttagtagaatgttttaactgtgttcaaccgcagaaggggaaaagcagaatgggataaataaaatacattataaatgtacagcagagcacaaaatgaaggcattccaactagaagagtatgtaagcaatgtatgttttcaagggataacccagtatgtgygcttagaagaagtctgcttgatgactggggagtaatgtgttctgatccagacaaaccagcctcatgctataattctgtgttggaagtgttcaaggtcaggttggatgtggctttgagcaacctgatgaaaggtgtgtctacccacagcagtgggatgtggagctggatgatctttaaagcaccttttcaacacaaaccgttgtgtggttccaagatacgtaattcttgtgatcttctactcattggtccgagctagacaaattcttctgtcattttcagaagctaagggaaagcagcaga

SEQ ID NO: 12788 - DNA, 600 bp, Chicken  19866894216728_6
tggaagtgttcaaggtcaggttggatgtggctttgagcaacctgatgaaaggtgtgtctacccacagcagtgggatgtggagctggatgatctttaaagcaccttttcaacacaaaccgttgtgtggttccaagatacgtaattcttgtgatcttctactcattggtccgagctagacaaattcttctgtcattttcagaagctaagggaaagcagcagaggagagggaagtatatgaaaaagccaggcaactgctagagctagggctggctgctcactcaaaacagaactttttaaagygagaagttgaggaactatcaggctatttaaccccagtgtcttcccagcagtaggaaggctgtgttttgaaaggagtccttacagctctctacaactacctgaaaggaggttgtggtgaattaggggtcagtctattctcccacgtaactagcaatagggctagggggaatggcttcaagttgtgccaggagakgttcaagttgggtattaggaaaaatttctccaaaagagaagtcagatgctggaatgggctgcccagggaggtggttgagaaagtactttcccaaaagatcttgcaag

SEQ ID NO: 12789 - DNA, 600 bp, Chicken  19866894216728_7
tttcagaagctaagggaaagcagcagaggagagggaagtatatgaaaaagccaggcaactgctagagctagggctggctgctcactcaaaacagaactttttaaagygagaagttgaggaactatcaggctatttaaccccagtgtcttcccagcagtaggaaggctgtgttttgaaaggagtccttacagctctctacaactacctgaaaggaggttgtggtgaattaggggtcagtctattctcccacgtaactagcaatagggctagggggaatggcttcaagttgtgccaggagakgttcaagttgggtattaggaaaaatttctccaaaagagaagtcagatgctggaatgggctgcccagggaggtggttgagaaagtactttcccaaaagatcttgcaagttcaatacttttgtgttcagtagccccggattgttttattagtttcataaatatgagcagtcactttttaaacgcatgtaaactctttatgctcttgctgtcctatattagagcatttagttccacagtgtaattgtggattgtagctgctccttttgctttgaaattgcctagtggcttagatttgtcttat

SEQ ID NO: 12790 - DNA, 599 bp, Chicken  19866894216734_1
  misc_feature (1)..(153): n is any nucleotide
nnnnnnnnnnnnnnnnnnnnnnnnnnnnnnnnnnnnnnnnnnnnnnnnnnnnnnnnnnnnnnnnnnnnnnnnnnnnnnnnnnnnnnnnnnnnnnnnnnnnnnnnnnnnnnnnnnnnnnnnnnnnnnnnnnnnnnnnnnnnnnnnnnnnnnnnntactatgtgaatgcaggtacgtagttttatttgtctgttttttaacaaatagaaaggcaaaacgcttttagaccaaatcacgttacctttccttgtcagaggttgcagcatacttcgctggcaagcatcacgtttaccaagttccaraagrtgatgctcctattgtcaccaaattttgcwtattacagttaagcagtaatcaaggagagccatgttttgaaatgcagtagtagggctaatctttcttccaaagaatagttacctgaacaacacttaagagaacaagtcagttattgttagggtgtggggaaacagggtcctttwctgtattttagcaactcaccatgagcaccagtgtggtcatcctagctactttgtgtctgttggattattattatttttttttttaatccaagataaagggggaaactacatggtgacccaat

SEQ ID NO: 12791 - DNA, 599 bp, Chicken  19866894216734_2
  misc_feature (1)..(149): n is any nucleotide
nnnnnnnnnnnnnnnnnnnnnnnnnnnnnnnnnnnnnnnnnnnnnnnnnnnnnnnnnnnnnnnnnnnnnnnnnnnnnnnnnnnnnnnnnnnnnnnnnnnnnnnnnnnnnnnnnnnnnnnnnnnnnnnnnnnnnnnnnnnnnnnnnnnnntactatgtgaatgcaggtacgtagttttatttgtctgttttttaacaaatagaaaggcaaaacgcttttagaccaaatcacgttacctttccttgtcagaggttgcagcatacttcgctggcaagcatcacgtttaccaagttccaraagrtgatgctcctattgtcaccaaattttgcwtattacagttaagcagtaatcaaggagagccatgttttgaaatgcagtagtagggctaatctttcttccaaagaatagttacctgaacaacacttaagagaacaagtcagttattgttagggtgtggggaaacagggtcctttwctgtattttagcaactcaccatgagcaccagtgtggtcatcctagctactttgtgtctgttggattattattatttttttttttaatccaagataaagggggaaactacatggtgacccaataata

SEQ ID NO: 12792 - DNA, 599 bp, Chicken  19866894216734_3
  misc_feature (1)..(120): n is any nucleotide
nnnnnnnnnnnnnnnnnnnnnnnnnnnnnnnnnnnnnnnnnnnnnnnnnnnnnnnnnnnnnnnnnnnnnnnnnnnnnnnnnnnnnnnnnnnnnnnnnnnnnnnnnnnnnnnnnnnnnnnntactatgtgaatgcaggtacgtagttttatttgtctgttttttaacaaatagaaaggcaaaacgcttttagaccaaatcacgttacctttccttgtcagaggttgcagcatacttcgctggcaagcatcacgtttaccaagttccaraagrtgatgctcctattgtcaccaaattttgcwtattacagttaagcagtaatcaaggagagccatgttttgaaatgcagtagtagggctaatctttcttccaaagaatagttacctgaacaacacttaagagaacaagtcagttattgttagggtgtggggaaacagggtcctttwctgtattttagcaactcaccatgagcaccagtgtggtcatcctagctactttgtgtctgttggattattattatttttttttttaatccaagataaagggggaaactacatggtgacccaataataactgaagattgtaactggcaattagtttt

SEQ ID NO: 12793 - DNA, 600 bp, Chicken  19866894216734_4
ttttatttgtctgttttttaacaaatagaaaggcaaaacgcttttagaccaaatcacgttacctttccttgtcagaggttgcagcatacttcgctggcaagcatcacgtttaccaagttccaraagrtgatgctcctattgtcaccaaattttgcwtattacagttaagcagtaatcaaggagagccatgttttgaaatgcagtagtagggctaatctttcttccaaagaatagttacctgaacaacacttaagagaacaagtcagttattgttagggtgtggggaaacagggtcctttwctgtattttagcaactcaccatgagcaccagtgtggtcatcctagctactttgtgtctgttggattattattatttttttttttaatccaagataaagggggaaactacatggtgacccaataataactgaagattgtaactggcaattagtttttactacatgggttgacttataacattagcaaatcctccatggccagcctgccgatctgccctttgtctggtagaacgttgcctcaagcctgaagcaatcttttgttatgcccacttgattttgcttagcaaaaattctaccatgg

SEQ ID NO: 12794 - DNA, 600 bp, Chicken  19866894216736_1
aagtccccagcaggactgaaggtgggctgggtgctcgcggagcttctaggcccctgccctattgtgaggtcacggggtgactgtgactctttggtgacatcacagagctcacaggtagatggagatttgctttctggtaggtgttgcgttaatagttttcagttagagttttcagagtcagagttaatagagtctggcaagcaagagtccacccaaggactttcacaggggctgtttcacaaatactgaacattaaatgattttctgaagtatcagacgtaactcagggacatgatttgyagagggttgttagcgttagggtaatttggtcatattgctrtttcaagctgagcaattctgtgtttcaaagacttgtcccttttttctttttagatattggtttactttcatttacttaacaaacttaaacatttgagtcagttacagtccagacttcttgttatggtttcagtagtttaaaaagactggtttatttcctcacttctgtcttataattttctcattgcttgtgaccaactaagaaaactgtctaattttattgtccagagtggctcatttagccagaagtgaacatctcac

SEQ ID NO: 12795 - DNA, 600 bp, Chicken  19866894216736_2
agcttctaggcccctgccctattgtgaggtcacggggtgactgtgactctttggtgacatcacagagctcacaggtagatggagatttgctttctggtaggtgttgcgttaatagttttcagttagagttttcagagtcagagttaatagagtctggcaagcaagagtccacccaaggactttcacaggggctgtttcacaaatactgaacattaaatgattttctgaagtatcagacgtaactcagggacatgatttgyagagggttgttagcgttagggtaatttggtcatattgctrtttcaagctgagcaattctgtgtttcaaagacttgtcccttttttctttttagatattggtttactttcatttacttaacaaacttaaacatttgagtcagttacagtccagacttcttgttatggtttcagtagtttaaaaagactggtttatttcctcacttctgtcttataattttctcattgcttgtgaccaactaagaaaactgtctaattttattgtccagagtggctcatttagccagaagtgaacatctcacccactcagtaaagcactggggatttcctctaatacatcta

SEQ ID NO: 12796 - DNA, 600 bp, Chicken  19866894216736_3
atctatgtcagctatataaagtctctattaataattaaccaaattcctgttgggactgcctatacaatttcctttgcttatcattaagtaccatcactgtgcagtagccctgatttagtctaattgattgtgtaatgagcatgtgcatctattttgtatgacctgaccagtctttcaccattttcagaatggcaaaaattttgaagccatctaaaaagaaaaaaaaaaaaaaactcttctaagaacaaatttgtcctgttgcattatgcagaaaaggctctaccattggggtggcagggwatggcaagcatactttttttaaaatggtgtggctaatgtaaattgttttaatatctctgctcaccttgatctggtagcacagcttttttcaacaggatgcaacagctcttgcattttctctatggctcaggactgttccttctccccagtatgctctakcagcctgacatgtcatgtttagattagatagactagaaccttcaccctggctgacttctgactctccagtctgctctgggatactgtttatggctgtagtctaagcctatggccaggcatatgtaggccaatagagagaga

SEQ ID NO: 12797 - DNA, 600 bp, Chicken  19866894216736_4
gacctgaccagtctttcaccattttcagaatggcaaaaattttgaagccatctaaaaagaaaaaaaaaaaaaaactcttctaagaacaaatttgtcctgttgcattatgcagaaaaggctctaccattggggtggcagggwatggcaagcatactttttttaaaatggtgtggctaatgtaaattgttttaatatctctgctcaccttgatctggtagcacagcttttttcaacaggatgcaacagctcttgcattttctctatggctcaggactgttccttctccccagtatgctctakcagcctgacatgtcatgtttagattagatagactagaaccttcaccctggctgacttctgactctccagtctgctctgggatactgtttatggctgtagtctaagcctatggccaggcatatgtaggccaatagagagagatactgacaagaactgagaaatttcaagtcttgtacttagctggagaggttttatcagcatgaatgtggcgaatcctaacaragtccagcacttgtcccttttggctctactagaaataatagcatgttagactggtggagtaagtggtgctactcatag

SEQ ID NO: 12798 - DNA, 523 bp, Chicken  19866894216736_5
gcttttttcaacaggatgcaacagctcttgcattttctctatggctcaggactgttccttctccccagtatgctctakcagcctgacatgtcatgtttagattagatagactagaaccttcaccctggctgacttctgactctccagtctgctctgggatactgtttatggctgtagtctaagcctatggccaggcatatgtaggccaatagagagagatactgacaagaactgagaaatttcaagtcttgtacttagctggagaggttttatcagcatgaatgtggcgaatcctaacaragtccagcacttgtcccttttggctctactagaaataatagcatgttagactggtggagtaagtggtgctactcatagtcagtcagtaaaggaaatgtagatatgcctcatttgttactcttgctcttagtcactgctgtactcttgagcctcagagctgttcagagaagacatagattgatattaggagcagaggaggaaagtatttccttctcatgtcaac

SEQ ID NO: 12799 - DNA, 600 bp, Chicken  19866894216742_1
acctagccaatccataccaagtttttgtgaaacagcctgtaggttatgaatctgttcgtgatgttactcagtttaacaattccttatgcctttgtgtgtgccagaattattttgctgccatttggaatttaaatgaacaaagttttactgtcagggctctattttgtggcttcacaatcggagatctgctacagaattgaatccttgccattaagttatccttgaaaaatcgcagttttatttcaattcttgttctgatcacaaggagaactgctaaaatgtgaaccatttataaattamggaatgcctgcctggtctgtatagtgcttgaaacaatgttcttagaggcatrgactgcctgagtcatctcacttacagtagagtgggctccataatttgatgaaatttggtacatttttcacagtgccatgtgcaactattgtttttcctgcagggtacttcatatcttaacaaaaagacctttgttgtgttttaccttcctgctttattggaactcactggtaggtgcctgtccttctcctaacttttttctatacaggagggaattaaccagctgtagaagcatgctttctcactgtt

SEQ ID NO: 12800 - DNA, 600 bp, Chicken  19866894216742_2
tgttcgtgatgttactcagtttaacaattccttatgcctttgtgtgtgccagaattattttgctgccatttggaatttaaatgaacaaagttttactgtcagggctctattttgtggcttcacaatcggagatctgctacagaattgaatccttgccattaagttatccttgaaaaatcgcagttttatttcaattcttgttctgatcacaaggagaactgctaaaatgtgaaccatttataaattamggaatgcctgcctggtctgtatagtgcttgaaacaatgttcttagaggcatrgactgcctgagtcatctcacttacagtagagtgggctccataatttgatgaaatttggtacatttttcacagtgccatgtgcaactattgtttttcctgcagggtacttcatatcttaacaaaaagacctttgttgtgttttaccttcctgctttattggaactcactggtaggtgcctgtccttctcctaacttttttctatacaggagggaattaaccagctgtagaagcatgctttctcactgttggacaaaactagacagaagataagttttgacagacttgagaaccagtctaat

SEQ ID NO: 12801 - DNA, 600 bp, Chicken  19866894216742_3
gtttttcctgcagggtacttcatatcttaacaaaaagacctttgttgtgttttaccttcctgctttattggaactcactggtaggtgcctgtccttctcctaacttttttctatacaggagggaattaaccagctgtagaagcatgctttctcactgttggacaaaactagacagaagataagttttgacagacttgagaaccagtctaatttaaagacacaagagtaagagattagagaatacaataaaggttgagacctggagaacagaatatgtgaactattgaagatgagactcamaacatgcagargattttgakctgtgttgctctgatgtaaatgcaggaggttgtgtctgtgggccacttagtggacagctgcaaaattacagaattgagtaaaggtaaatcattgggtttttcaagttctagtcagccatgtttgggaggaatgacatagaaagatattttgtgaagatataacagattactagagttgcaaaatttgttcctattgttgccaactggttggcatgcacaagaaactgtagttctctccttctctcctcacatccagatgagttggttgaaaaccagaacc

SEQ ID NO: 12802 - DNA, 600 bp, Chicken  19866894216742_4
agggtacttcatatcttaacaaaaagacctttgttgtgttttaccttcctgctttattggaactcactggtaggtgcctgtccttctcctaacttttttctatacaggagggaattaaccagctgtagaagcatgctttctcactgttggacaaaactagacagaagataagttttgacagacttgagaaccagtctaatttaaagacacaagagtaagagattagagaatacaataaaggttgagacctggagaacagaatatgtgaactattgaagatgagactcamaacatgcagargattttgakctgtgttgctctgatgtaaatgcaggaggttgtgtctgtgggccacttagtggacagctgcaaaattacagaattgagtaaaggtaaatcattgggtttttcaagttctagtcagccatgtttgggaggaatgacatagaaagatattttgtgaagatataacagattactagagttgcaaaatttgttcctattgttgccaactggttggcatgcacaagaaactgtagttctctccttctctcctcacatccagatgagttggttgaaaaccagaacccctctgtgagg

SEQ ID NO: 12803 - DNA, 600 bp, Chicken  19866894216742_5
catatcttaacaaaaagacctttgttgtgttttaccttcctgctttattggaactcactggtaggtgcctgtccttctcctaacttttttctatacaggagggaattaaccagctgtagaagcatgctttctcactgttggacaaaactagacagaagataagttttgacagacttgagaaccagtctaatttaaagacacaagagtaagagattagagaatacaataaaggttgagacctggagaacagaatatgtgaactattgaagatgagactcamaacatgcagargattttgakctgtgttgctctgatgtaaatgcaggaggttgtgtctgtgggccacttagtggacagctgcaaaattacagaattgagtaaaggtaaatcattgggtttttcaagttctagtcagccatgtttgggaggaatgacatagaaagatattttgtgaagatataacagattactagagttgcaaaatttgttcctattgttgccaactggttggcatgcacaagaaactgtagttctctccttctctcctcacatccagatgagttggttgaaaaccagaacccctctgtgaggttacagtaa

SEQ ID NO: 12804 - DNA, 600 bp, Chicken  19866894216742_6
attgggtttttcaagttctagtcagccatgtttgggaggaatgacatagaaagatattttgtgaagatataacagattactagagttgcaaaatttgttcctattgttgccaactggttggcatgcacaagaaactgtagttctctccttctctcctcacatccagatgagttggttgaaaaccagaacccctctgtgaggttacagtaaggcagaattattaaattataactcctttgacacttctgctttgaagtcaggaaacagtaccataaatttgaagcttcaagtccatgaatygtcggaagaatgaaaacgcagtatttgcgaccattgaacctatttgataatttaagtgcctataactttgtactgtaaatcttgttctagataactttaaaaagggaagttatttatacagtgtgttttgtgctttattaaagaaaaataagtcctctgtacatgtgtataattagatacgttcacgcacacacacacatatatgccatagttgagatttgaaggaaaaagaggttaggaataatattaaaattgaagaaaatgttaaaacttcaattggatttataccagattatctgt

SEQ ID NO: 12805 - DNA, 600 bp, Chicken  19866894216744_1
agcgtgacgcaggagtaactaccaaagccttaacagaagcaaatcaaggacaagatatttctgtacagaatatttctgtaaaatcagctcggctgcaggttgggttcgatgaaagcctgcactggtctggaacaagcattgcaaacagccaggcagtacaggaacctgcttggacccttcgtcttggtgtaagaggagttgcacgagtcaaagaaacagcggaaggtctgtctgcaaaccctgcagagctgcaaggagcagcaggtgaaggcctggctgcaatcacacccctgcaggacycgacctccatgcccggatggctgcaggagagcggagagatcgcactctttgatgggggagatccaaatggcaccaaactccaggaaaagggtttgatagcagcagatgataacgaggggttcgggctgcgtgtgtgcaaataggtggaggcagagmggctccacgttccccacagcgctcagtgcaggagcagtcctggaggacggagaggagcggggagaagtgaggatgctcagggctttgttttaagtggcgctgctcagatcagggctgagactcagcgtgaggctggaagagcaa

SEQ ID NO: 12806 - DNA, 600 bp, Chicken  19866894216744_2
tacaggaacctgcttggacccttcgtcttggtgtaagaggagttgcacgagtcaaagaaacagcggaaggtctgtctgcaaaccctgcagagctgcaaggagcagcaggtgaaggcctggctgcaatcacacccctgcaggacycgacctccatgcccggatggctgcaggagagcggagagatcgcactctttgatgggggagatccaaatggcaccaaactccaggaaaagggtttgatagcagcagatgataacgaggggttcgggctgcgtgtgtgcaaataggtggaggcagagmggctccacgttccccacagcgctcagtgcaggagcagtcctggaggacggagaggagcggggagaagtgaggatgctcagggctttgttttaagtggcgctgctcagatcagggctgagactcagcgtgaggctggaagagcaaagaagtgaaagcagagaagcaaacagcggggctgaggctgatggaggggaaggaggggctgccaggggttaaaggggtgcaattatggccgatgaggacatcgccaaagggctcttcttccatctgcggtgcctcccccggagatttcggtgcctt

SEQ ID NO: 12807 - DNA, 600 bp, Chicken  19866894216762_1
aatgggaacaatcaggaggtgcctttatgacaggtgtctctgaagggctggcagacagaacccggggggccctttgatctcggcctttgaaaccctagagcggtgctgacagagctgctctgtgtttccaggctgggcggatgatcatttccatgcgggaacaatgagttctttatgctgctgtgcaccataaaaggacggcacacggggagcccatagcgggtcggctccgtccccgcgtggtgatggatggagggagctgggggcgggggggggtgagcccgagcctcagcatcacgkcaagctcagcatcctcaccacgtgcctagtgggaaataggaggcttttaggggaaggcagacaaatttcccttctgtggagctctgaggtgacctcacccagcagccccacctgcatcaccccaagcctcactgctcagctatgttccctcttggcgcgtcttccagccccacagcctcccccacttgagagtaaacctccatcccttcttgcttgcccacagatgccagcccatcattcccacacactgtgccagagccatatatctcatgtgccagaggcactaaacaccaggagcaa

SEQ ID NO: 12808 - DNA, 460 bp, Chicken  19866894216776_1
aactgtttcctctcaatcgcagtatgaccatctgctgagataccactggcaagaatgctcatgtgattgatgggtacatgaaaaagggaatattggaaaagtactttgtatgcagaagttcatgagacaaactatggggtccgtatttaaaagtagatggaggccaagggaggttatcctcctcctctcctctgccctgatgaggccacatctggaatactcaatcccattctgggcagacagcgaactgctggagagagcccagcagagggacagatgagatgatgagagcctggagcrtctcctggatgaggaaaggctgagagacctggggatgttcagcctggggaagactcagggggatcttctcagtgtttacggatatctaaaggatgggaatcagtggatgaagtcaggctcttttcagcagtgtgcagcaacagaacaatgagcagtggtt

SEQ ID NO: 12809 - DNA, 600 bp, Chicken  19866894216784_1
caaaaatttctaaaaatgaaatgaatgcaagaatacagatggaggcaaactaaccgaagtgggtcttttactgttggctttcttttgatgttactgtaataacagtacctattgattctaaaccagatataattgcaattaacccttctcttaatttcttactttctaatgggtgcctcatttaagagtgtattaataacaagcctgtcatgcaagcttactagtccctaaacagtgtccttttctggatagaaaagctggcttgtgtgcaattgaaactttgaaaaatacacagggcaygtaggttggatgttgctgtgtgaatagcctaacacattgactgtatgcctatactgtgtctaatctccttcactgtacagcgtaggattttgaaactgatagttactttcattgttctgtgtcctraattttctcttttcatttttacttggtttgggtttcatttattcttatgcttaaaaaataattccaaatcaaggaatctgatggtgagtagtgatgcactttacattttacagagccatcttagctctgaaccagtgctaacactggttggaaggtttaaatgataatcagaat

SEQ ID NO: 12810 - DNA, 600 bp, Chicken  19866894216784_2
atataattgcaattaacccttctcttaatttcttactttctaatgggtgcctcatttaagagtgtattaataacaagcctgtcatgcaagcttactagtccctaaacagtgtccttttctggatagaaaagctggcttgtgtgcaattgaaactttgaaaaatacacagggcaygtaggttggatgttgctgtgtgaatagcctaacacattgactgtatgcctatactgtgtctaatctccttcactgtacagcgtaggattttgaaactgatagttactttcattgttctgtgtcctraattttctcttttcatttttacttggtttgggtttcatttattcttatgcttaaaaaataattccaaatcaaggaatctgatggtgagtagtgatgcactttacattttacagagccatcttagctctgaaccagtgctaacactggttggaaggtttaaatgataatcagaatatttgaaatattaaatactttgggggattatgtgcaatttggagattatcttttttctctatatatactgctttgtgtttctaggaatagtactccgaagtctgaaattactgttttactaggaat

SEQ ID NO: 12811 - DNA, 599 bp, Chicken  19866894216786_1
  misc_feature (1)..(230): n is any nucleotide
nnnnnnnnnnnnnnnnnnnnnnnnnnnnnnnnnnnnnnnnnnnnnnnnnnnnnnnnnnnnnnnnnnnnnnnnnnnnnnnnnnnnnnnnnnnnnnnnnnnnnnnnnnnnnnnnnnnnnnnnnnnnnnnnnnnnnnnnnnnnnnnnnnnnnnnnnnnnnnnnnnnnnnnnnnnnnnnnnnnnnnnnnnnnnnnnnnnnnnnnnnnnnnnnnnnnnnnnnnnnnnnnnnnnnnaaacaaacaaaacaaaacaatattcattgaactacagagaaggagtaacatgcttaagcctgttcatgcrttaagtcatgggttctcatcactgttccatggactggttctgtattttaacccacatgcatttaatgtagaaggcacattgacagacagtgctgagatgtgtagcattcattgtggaaaatatctctaaaaaaattatagaatacaagaaggctccagagacctgaaatcagaaggagactcatgatgagcattaagttttcttctccttagtttgccatttatctaaaggaaaaacaaggaaagagtaaagaaatgacaaggatctaaattcaagggactaaatgcataagcaaagta

SEQ ID NO: 12812 - DNA, 600 bp, Chicken  19866894216789_1
agagaggataagaaaagaggtagaaagaagagagcagcattatatttggtgtatgtggcagggttttggtagtgggggctgcagggatggcctttttgagcacatctcaggatctgccccatgtttctaaaagcccattccagccatttcaaacaggactcaccactgactagagctgagccatgagcaacactgcatgtctgggagagcaagtttaagaaaaggaaaaactgctgcacaacaacaactgggagaaaggaatgagagatgtgagagaacagcacttccccctgtgggagycctcctcccacaaagaggcaggctgtcaccctgcagcccacaggcaccacatggagcagatttccacatgcagccatggaggagcccttggacagcaaatggatgaggcctgaaggagacacagcccatggagagcacctacagtagcaggcctgggctggagctgcagcctgtcccatgctgggtcaggagggaaggggggtgttgctggccatggggccccacattggagcagtgcctgaagggtgggactcatggtatggagctgtgtcgtaggactgcttggmgacctgcagcctg

SEQ ID NO: 12813 - DNA, 600 bp, Chicken  19866894216789_2
cccctgtgggagycctcctcccacaaagaggcaggctgtcaccctgcagcccacaggcaccacatggagcagatttccacatgcagccatggaggagcccttggacagcaaatggatgaggcctgaaggagacacagcccatggagagcacctacagtagcaggcctgggctggagctgcagcctgtcccatgctgggtcaggagggaaggggggtgttgctggccatggggccccacattggagcagtgcctgaagggtgggactcatggtatggagctgtgtcgtaggactgcttggmgacctgcagcctgtgggaagcccacataggatcagtttgagaaggatgacacccatgacacagactccattctcctgccctgcttgagggtagtaaataaaagaggatgtatagtggagaaatatggttttggttttattttagcttcttactgctctagtctgttagtaaatgataataaattatattaatctccctactctattttgcttgtgatggtaattagcaagcaacctcactgttcctattacaacctttgagcccttttaacaagaggcaaaaaaaaaaccaagaaaaaaa

SEQ ID NO: 12814 - DNA, 599 bp, Chicken  19866894216790_1
  misc_feature (1)..(149): n is any nucleotide
nnnnnnnnnnnnnnnnnnnnnnnnnnnnnnnnnnnnnnnnnnnnnnnnnnnnnnnnnnnnnnnnnnnnnnnnnnnnnnnnnnnnnnnnnnnnnnnnnnnnnnnnnnnnnnnnnnnnnnnnnnnnnnnnnnnnnnnnnnnnnnnnnnnnnaaaaagaagtcttaggaatcttttacatgcagcaatgctaatgagactgtagccacaagcagcggagaacagtgctgcagtgtatatgtcagccctggtgtgtgctttcaacagaggaagcaaataaaatatttttccaggctcctgagayggtaccgacggtagaacaaacccctgcccagcccgacatcttggaaaatataaaaacgtaagcaattatcaattgtcatcattcgagttaaagtaggcgatattcagcagtgatgctattttccttccaatcaacrtcccagtaactgacacaggaaggggcattctgaaaaggatgcagcttctttactctgagtaagtcatttgagatttgcagttcttattttacagaagaagttttgaagaagcatactgtggttaaaggcaaagccaccaccaacacgccagcagcctgatgta

SEQ ID NO: 12815 - DNA, 599 bp, Chicken  19866894216790_2
  misc_feature (1)..(13): n is any nucleotide
nnnnnnnnnnnnnaaaaagaagtcttaggaatcttttacatgcagcaatgctaatgagactgtagccacaagcagcggagaacagtgctgcagtgtatatgtcagccctggtgtgtgctttcaacagaggaagcaaataaaatatttttccaggctcctgagayggtaccgacggtagaacaaacccctgcccagcccgacatcttggaaaatataaaaacgtaagcaattatcaattgtcatcattcgagttaaagtaggcgatattcagcagtgatgctattttccttccaatcaacrtcccagtaactgacacaggaaggggcattctgaaaaggatgcagcttctttactctgagtaagtcatttgagatttgcagttcttattttacagaagaagttttgaagaagcatactgtggttaaaggcaaagccaccaccaacacgccagcagcctgatgtaaactctattgaaatcaatgggagtctttgcaccgacttcattgggtttgggatcaaatccttgaggagaataagctattctgcaatatccattatcatggaaggctttgttctggtaattagatgctgggagagca

SEQ ID NO: 12816 - DNA, 600 bp, Chicken  19866894216795_1
gcccactgtggtttgtttacacagtaatcagacctcatttcaaagtacttagccagtctccccttgaaagcactgaaagttttgcatttaaaataatggcttacaaacctttatagcaattgcttacatcattctgacactgatgtagcgaattgtacagcagacaaccatgtgccctatcaaagggcttctgacagcattttgcactgtactaagaagactacagccagtagacaaagtaactattcccctccaatcggtgcttgcttgactgcaactagtataatgaatccagctttrgaggctcgaatagaagacagatgttgacaaactgaagttcagcagggtctacaaaagctgtcaaggaagctgaagcccctgtcttgtgagaagcagccaaaggaatcaggcttattcagctcagagaagacaactttatggggatctaagggcaatcttagagcacctgcattgaggccaatgagaagacaaagctaagctcttaactggtgaacagcttgagaacaagctgcaacagacactgtgtgaaataaaagagattctgacttcacacagtagggaaaagctttttcatcataa

SEQ ID NO: 12817 - DNA, 599 bp, Chicken  19866894216801_1
  misc_feature (1)..(76): n is any nucleotide
nnnnnnnnnnnnnnnnnnnnnnnnnnnnnnnnnnnnnnnnnnnnnnnnnnnnnnnnnnnnnnnnnnnnnnnnnnnnaaaaaacagagtgttttgctggaacatgatttgagaaaagcacttaaggtaatctcttatttgggagagtaatcatatcacagtagcaaataaacaatataaatataatctgtgtgacgtgagttctgctgtgagagctaatgccaaaagcctctctgaactgaaaatgaatattctattgtatggcctctgtgcctgcaggtttccactctcatttaaatgartatcagtactgatctagtgtaaatgatcagtggtttctaggatcacataaaggagctgttagcaacccacatctcccagaragcggagggcagggggagggagggctctgggaaatctccaggggggaaggacagctctgtttgaagctgtagactgctgcagtgcacagcattcctatcacattctatctttagaacaatgtggctaatttttcatcattgtaaggtttgatgcagcagacatgctagtgtgggcctggcttagtttctccctccatcaataacattttgtttaattt

SEQ ID NO: 12818 - DNA, 600 bp, Chicken  19866894216801_2
acagagtgttttgctggaacatgatttgagaaaagcacttaaggtaatctcttatttgggagagtaatcatatcacagtagcaaataaacaatataaatataatctgtgtgacgtgagttctgctgtgagagctaatgccaaaagcctctctgaactgaaaatgaatattctattgtatggcctctgtgcctgcaggtttccactctcatttaaatgartatcagtactgatctagtgtaaatgatcagtggtttctaggatcacataaaggagctgttagcaacccacatctcccagaragcggagggcagggggagggagggctctgggaaatctccaggggggaaggacagctctgtttgaagctgtagactgctgcagtgcacagcattcctatcacattctatctttagaacaatgtggctaatttttcatcattgtaaggtttgatgcagcagacatgctagtgtgggcctggcttagtttctccctccatcaataacattttgtttaatttcctccttattgacaagctttgtttacatgttgggttagcattcatagaatggtttgggttggaagggagctcagagcccacc

SEQ ID NO: 12819 - DNA, 600 bp, Chicken  19866894216803_1
ttctacatgggaaaaggactgttttatgaagactaatttacacatgcaggaaaagtttccaggcaatagaatctgctaatatatatttttactgtggtctctggtgtggttttagcctggggacactcctagcaattcctgtgcactgagagctggcacagccccaaaagcattcccagtaggcagtctggatgcagccacttcacagactaaaagagtttaattgtataaacatagatcattgctggccctggtgctgaaaaatgctctcaggcttccttaatttacttgtgtagatcrttgcctcagtggaggaaaaatatggttcctattttagacacatgcaggatacagttttagcgacagcccttggcacttggatatgcacagtcatttcagctggaaatgccaccagacagaaacgaarcactctcccactgaccaggagaggccgtaaaattgatgctttgtggtataagtcagtatccagtgwtrgatggtaaaaaattcccttccttcaggggctgctggtgtgcagctgcctgctgggagatgaragccaagtgtgtgggcattgagtatttacaggaatgggattta

SEQ ID NO: 12820 - DNA, 578 bp, Chicken  19866894216803_2
cctagcaattcctgtgcactgagagctggcacagccccaaaagcattcccagtaggcagtctggatgcagccacttcacagactaaaagagtttaattgtataaacatagatcattgctggccctggtgctgaaaaatgctctcaggcttccttaatttacttgtgtagatcrttgcctcagtggaggaaaaatatggttcctattttagacacatgcaggatacagttttagcgacagcccttggcacttggatatgcacagtcatttcagctggaaatgccaccagacagaaacgaarcactctcccactgaccaggagaggccgtaaaattgatgctttgtggtataagtcagtatccagtgwtrgatggtaaaaaattcccttccttcaggggctgctggtgtgcagctgcctgctgggagatgaragccaagtgtgtgggcattgagtatttacaggaatgggatttactactgggacataaagcactgcaacctggaactcaaagagaatttcagagcctttttcagcctgcattacctctgggaatgagatagccactggtacagtgcaga

SEQ ID NO: 12821 - DNA, 512 bp, Chicken  19866894216803_3
gcagccacttcacagactaaaagagtttaattgtataaacatagatcattgctggccctggtgctgaaaaatgctctcaggcttccttaatttacttgtgtagatcrttgcctcagtggaggaaaaatatggttcctattttagacacatgcaggatacagttttagcgacagcccttggcacttggatatgcacagtcatttcagctggaaatgccaccagacagaaacgaarcactctcccactgaccaggagaggccgtaaaattgatgctttgtggtataagtcagtatccagtgwtrgatggtaaaaaattcccttccttcaggggctgctggtgtgcagctgcctgctgggagatgaragccaagtgtgtgggcattgagtatttacaggaatgggatttactactgggacataaagcactgcaacctggaactcaaagagaatttcagagcctttttcagcctgcattacctctgggaatgagatagccactggtacagtgcaga

SEQ ID NO: 12822 - DNA, 510 bp, Chicken  19866894216803_4
agccacttcacagactaaaagagtttaattgtataaacatagatcattgctggccctggtgctgaaaaatgctctcaggcttccttaatttacttgtgtagatcrttgcctcagtggaggaaaaatatggttcctattttagacacatgcaggatacagttttagcgacagcccttggcacttggatatgcacagtcatttcagctggaaatgccaccagacagaaacgaarcactctcccactgaccaggagaggccgtaaaattgatgctttgtggtataagtcagtatccagtgwtrgatggtaaaaaattcccttccttcaggggctgctggtgtgcagctgcctgctgggagatgaragccaagtgtgtgggcattgagtatttacaggaatgggatttactactgggacataaagcactgcaacctggaactcaaagagaatttcagagcctttttcagcctgcattacctctgggaatgagatagccactggtacagtgcaga

SEQ ID NO: 12823 - DNA, 448 bp, Chicken  19866894216803_5
tgaaaaatgctctcaggcttccttaatttacttgtgtagatcrttgcctcagtggaggaaaaatatggttcctattttagacacatgcaggatacagttttagcgacagcccttggcacttggatatgcacagtcatttcagctggaaatgccaccagacagaaacgaarcactctcccactgaccaggagaggccgtaaaattgatgctttgtggtataagtcagtatccagtgwtrgatggtaaaaaattcccttccttcaggggctgctggtgtgcagctgcctgctgggagatgaragccaagtgtgtgggcattgagtatttacaggaatgggatttactactgggacataaagcactgcaacctggaactcaaagagaatttcagagcctttttcagcctgcattacctctgggaatgagatagccactggtacagtgcaga

SEQ ID NO: 12824 - DNA, 599 bp, Chicken  19866894216814_1
  misc_feature (1)..(276): n is any nucleotide
nnnnnnnnnnnnnnnnnnnnnnnnnnnnnnnnnnnnnnnnnnnnnnnnnnnnnnnnnnnnnnnnnnnnnnnnnnnnnnnnnnnnnnnnnnnnnnnnnnnnnnnnnnnnnnnnnnnnnnnnnnnnnnnnnnnnnnnnnnnnnnnnnnnnnnnnnnnnnnnnnnnnnnnnnnnnnnnnnnnnnnnnnnnnnnnnnnnnnnnnnnnnnnnnnnnnnnnnnnnnnnnnnnnnnnnnnnnnnnnnnnnnnnnnnnnnnnnnnnnnnnnnnnnnnnnnnnnncgtgaaagtacgcgttttctcttygagaatcccccatttatcccgaaaatacgcgttttctcttcgcaaatcccaaattttagcgaaaatcgcgcgttttctctttgcaaatcccctatttaacccgaaaatcatgcgttttctctttgagaatccaccatttaacctgaaaatcttgtgttttctcttcrcaaatcccccatttaactgaaaatcrcgcgttttctcttcgsaaatcccccatttaactgaatatcacgcgttttctcttcgcaaatccctcatttaagcgaaaatcacacgttttctcttcgcaaatcccc

SEQ ID NO: 12825 - DNA, 599 bp, Chicken  19866894216814_2
  misc_feature (1)..(109): n is any nucleotide
nnnnnnnnnnnnnnnnnnnnnnnnnnnnnnnnnnnnnnnnnnnnnnnnnnnnnnnnnnnnnnnnnnnnnnnnnnnnnnnnnnnnnnnnnnnnnnnnnnnnnnnnnnnnncgtgaaagtacgcgttttctcttygagaatcccccatttatcccgaaaatacgcgttttctcttcgcaaatcccaaattttagcgaaaatcgcgcgttttctctttgcaaatcccctatttaacccgaaaatcatgcgttttctctttgagaatccaccatttaacctgaaaatcttgtgttttctcttcrcaaatcccccatttaactgaaaatcrcgcgttttctcttcgsaaatcccccatttaactgaatatcacgcgttttctcttcgcaaatccctcatttaagcgaaaatcacacgttttctcttcgcaaatcccctatttaacccgaaaatcacgcgttttctcttcgagaatccaccttttaacctgaaaatgttgtgttttcttttcgcaaatcccccatttaagcgaaaatcacgcgttttctcttcgagaatcccccacttaagcaaaaatcacgcgttttctcttcgagaatcccgc

SEQ ID NO: 12826 - DNA, 599 bp, Chicken  19866894216814_3
  misc_feature (1)..(83): n is any nucleotide
nnnnnnnnnnnnnnnnnnnnnnnnnnnnnnnnnnnnnnnnnnnnnnnnnnnnnnnnnnnnnnnnnnnnnnnnnnnnnnnnnnncgtgaaagtacgcgttttctcttygagaatcccccatttatcccgaaaatacgcgttttctcttcgcaaatcccaaattttagcgaaaatcgcgcgttttctctttgcaaatcccctatttaacccgaaaatcatgcgttttctctttgagaatccaccatttaacctgaaaatcttgtgttttctcttcrcaaatcccccatttaactgaaaatcrcgcgttttctcttcgsaaatcccccatttaactgaatatcacgcgttttctcttcgcaaatccctcatttaagcgaaaatcacacgttttctcttcgcaaatcccctatttaacccgaaaatcacgcgttttctcttcgagaatccaccttttaacctgaaaatgttgtgttttcttttcgcaaatcccccatttaagcgaaaatcacgcgttttctcttcgagaatcccccacttaagcaaaaatcacgcgttttctcttcgagaatcccgcatttatgcgaaaaatactcgttttct

SEQ ID NO: 12827 - DNA, 599 bp, Chicken  19866894216814_4
  misc_feature (1)..(67): n is any nucleotide
nnnnnnnnnnnnnnnnnnnnnnnnnnnnnnnnnnnnnnnnnnnnnnnnnnnnnnnnnnnnnnnnnnncgtgaaagtacgcgttttctcttygagaatcccccatttatcccgaaaatacgcgttttctcttcgcaaatcccaaattttagcgaaaatcgcgcgttttctctttgcaaatcccctatttaacccgaaaatcatgcgttttctctttgagaatccaccatttaacctgaaaatcttgtgttttctcttcrcaaatcccccatttaactgaaaatcrcgcgttttctcttcgsaaatcccccatttaactgaatatcacgcgttttctcttcgcaaatccctcatttaagcgaaaatcacacgttttctcttcgcaaatcccctatttaacccgaaaatcacgcgttttctcttcgagaatccaccttttaacctgaaaatgttgtgttttcttttcgcaaatcccccatttaagcgaaaatcacgcgttttctcttcgagaatcccccacttaagcaaaaatcacgcgttttctcttcgagaatcccgcatttatgcgaaaaatactcgttttctcttcgagaatctcgca

SEQ ID NO: 12828 - DNA, 600 bp, Chicken  19866894216816_1
attttgcaggctgagccgttcctgaggacgtacaaaaacagtaattacacgtaccctaaccaaactccagtaagtgtcaacatcagcaattcactgtgactatactgcatctgttcctgtatagtcatgaatcatgctttgcacctcaggtgaaatcagcctttggccaaagggtgcagaacaggaaagtacttgcttgagttaggcaaaacacatcaagaaaagctgtaagaacacatcctcagacagcacagttatcagaacaggatgctaatcctaacaacactaaatacgtctatygaattgggcaaccaaggcctgtatgtttatttacaagttaaacatactctggcttatccagttggcctctactagggagatcccagttactactgattgcatttcctagccaaatgttactcatctttcttctttttagaattatggaagccagctgctatgtgaggacaggtctccatcctccccttctccaacttcaggtagtctttgttttcagatatagcagtattcactttttcaattcctttcataatgtcttctccttagaccttctatgccttcttaaagcttttaatatag

SEQ ID NO: 12829 - DNA, 600 bp, Chicken  19866894216828_1
cacctggtccagggttctgtctacactgtccacgatacttgaatattactgttgggtctcatcacgctcttaatgtctcaatggcattccgtccttataaaacgcagttctggggtatttgtgcagtatgtcagccaccaccttggcccatttctcaccatgaactacttctgtgctacaatatgtaatttaatcactatgtgaaatcaggacccacctagctactgtaagcaaggcagggtaatttggaactgaaacttgattgccactcagattggtatgaaggagaactgcatgcaracaaatccttttatgtttttgaatacaaacacattttttttacagcttttcaccataaacctatatgccccttcaaaggtttgcattgtcgtggaggcttatcttgtcagatgggaattaatagctgctgtaaaagaattcagctcataggatgtaatgacttccgccaacatccgtgaactctgaattagatgactgttagtggctgtaaaggctcragcgttgttccagttgaactgctgagaacaagtttgtaatgtgctcgtgtagaactgtaggatgaccattttgagggaaaac

SEQ ID NO: 12830 - DNA, 600 bp, Chicken  19866894216828_2
tagctactgtaagcaaggcagggtaatttggaactgaaacttgattgccactcagattggtatgaaggagaactgcatgcaracaaatccttttatgtttttgaatacaaacacattttttttacagcttttcaccataaacctatatgccccttcaaaggtttgcattgtcgtggaggcttatcttgtcagatgggaattaatagctgctgtaaaagaattcagctcataggatgtaatgacttccgccaacatccgtgaactctgaattagatgactgttagtggctgtaaaggctcragcgttgttccagttgaactgctgagaacaagtttgtaatgtgctcgtgtagaactgtaggatgaccattttgagggaaaacattcctttctaatgcttttgtgtgtgtgtatgctatgagcatcagtgcaggatcattatctcttgactggagataccaaactgatactgggtgtgacctgtacacccttctagagtgggtgttatttggcaccagtctcacttggtctcttcccaagtgtcttctcttgggccaaactgcccttcagtttttaattggggtatgttatggctgtagtc

SEQ ID NO: 12831 - DNA, 600 bp, Chicken  19866894216835_1
aattcagggctagcatagctactacactgaaagggtccttgaaagtaaaaatgtgaagaagcttgacaggcaattcaagttcatttcatttcacacaactggtctgaattttcactctcactgacatttactttactgtaacttggtttcgataagtaatgccattttccattatattgtataaagcagaagctgtaaatcagcaaggttctactgacttaatcatgtattaagtgaacttatatgaaatgagcttttcgttttaatttttctaataataacttcaggtccttaaagttstaaaataaaaacactctaaactgcttattaaaaaaatcagattttctcgcacttctgtttaccagtaggtataaaaacaatgctttatgtaaaacaattaaagatgtgccacctctcacattaacatcttttaaaattacactttgaaaatgggaaaataagccrcatcaggtttatgttactactctaatgcaagacatttcccacctttaaaatgctgttattaaaaatgttgtcaaaattgaaatagttgtgaaagcctcaggtaaagcatcagagtctctcaactctttaaagatg

SEQ ID NO: 12832 - DNA, 600 bp, Chicken  19866894216835_2
tttccattatattgtataaagcagaagctgtaaatcagcaaggttctactgacttaatcatgtattaagtgaacttatatgaaatgagcttttcgttttaatttttctaataataacttcaggtccttaaagttstaaaataaaaacactctaaactgcttattaaaaaaatcagattttctcgcacttctgtttaccagtaggtataaaaacaatgctttatgtaaaacaattaaagatgtgccacctctcacattaacatcttttaaaattacactttgaaaatgggaaaataagccrcatcaggtttatgttactactctaatgcaagacatttcccacctttaaaatgctgttattaaaaatgttgtcaaaattgaaatagttgtgaaagcctcaggtaaagcatcagagtctctcaactctttaaagatgctagcaaattttaaaatgtagttattcttcccagcaaacagttcggaatatttctaattgccatcttaaccttacaatactcttactaaaaattgacctcttaaaattatttccattttgaaataattatttcttgaagtacgcttccattatgctttaaaaaaa

SEQ ID NO: 12833 - DNA, 600 bp, Chicken  19866894216836_1
ccagggcaagcccaggtctctcagaaacttctcccaaatcttcaacttccaaagaaatattatttatatcacctcccaaaactagagttatttagatgttctgcaaaagcatcaaagaaagctaagctactgtgacctttgaggtccttttcaacccaggccattctataccactatcttttaaaaaattttaggaaaacctgtagtcacagtgactaactggtttgacacatacaactgttactctgacaattcagttaacaaaattaaggtatctgccttgacagataatcagtaagrgtatttccttgtaacccaacacatcttttgcccatttcagcatagtctaaagaacactgyttttctcctctgctttttccaaccaggacaaaaagatcgaaagaatttcctcttggtatgactggagacaaccaggacagcttaataatatgctcagaacatactttcagccactgtccccatccaagaagtttgctttcattactgttcctcatwttgaggctgtgaataaccttactacwcaactctttcctctagatcttgcactcagatactagcccttactttcaaaggcaatat

SEQ ID NO: 12834 - DNA, 600 bp, Chicken  19866894216836_2
tatttatatcacctcccaaaactagagttatttagatgttctgcaaaagcatcaaagaaagctaagctactgtgacctttgaggtccttttcaacccaggccattctataccactatcttttaaaaaattttaggaaaacctgtagtcacagtgactaactggtttgacacatacaactgttactctgacaattcagttaacaaaattaaggtatctgccttgacagataatcagtaagrgtatttccttgtaacccaacacatcttttgcccatttcagcatagtctaaagaacactgyttttctcctctgctttttccaaccaggacaaaaagatcgaaagaatttcctcttggtatgactggagacaaccaggacagcttaataatatgctcagaacatactttcagccactgtccccatccaagaagtttgctttcattactgttcctcatwttgaggctgtgaataaccttactacwcaactctttcctctagatcttgcactcagatactagcccttactttcaaaggcaatattttctttgcatacatcagcacaatccgcttacgtaaggtattactcctgtaacacaaata

SEQ ID NO: 12835 - DNA, 600 bp, Chicken  19866894216836_3
taactggtttgacacatacaactgttactctgacaattcagttaacaaaattaaggtatctgccttgacagataatcagtaagrgtatttccttgtaacccaacacatcttttgcccatttcagcatagtctaaagaacactgyttttctcctctgctttttccaaccaggacaaaaagatcgaaagaatttcctcttggtatgactggagacaaccaggacagcttaataatatgctcagaacatactttcagccactgtccccatccaagaagtttgctttcattactgttcctcatwttgaggctgtgaataaccttactacwcaactctttcctctagatcttgcactcagatactagcccttactttcaaaggcaatattttctttgcatacatcagcacaatccgcttacgtaaggtattactcctgtaacacaaatacaatttggatggaagcagacttgtcagcatgttaaactagacacaattgaacacagtaccactcagcaaagaactagaaatgtatatacaagccatacagtaagctcctaccacaaatgagctaaactttcaatatctgagaccagggtcagtcct

SEQ ID NO: 12836 - DNA, 600 bp, Chicken  19866894216836_4
actctgacaattcagttaacaaaattaaggtatctgccttgacagataatcagtaagrgtatttccttgtaacccaacacatcttttgcccatttcagcatagtctaaagaacactgyttttctcctctgctttttccaaccaggacaaaaagatcgaaagaatttcctcttggtatgactggagacaaccaggacagcttaataatatgctcagaacatactttcagccactgtccccatccaagaagtttgctttcattactgttcctcatwttgaggctgtgaataaccttactacwcaactctttcctctagatcttgcactcagatactagcccttactttcaaaggcaatattttctttgcatacatcagcacaatccgcttacgtaaggtattactcctgtaacacaaatacaatttggatggaagcagacttgtcagcatgttaaactagacacaattgaacacagtaccactcagcaaagaactagaaatgtatatacaagccatacagtaagctcctaccacaaatgagctaaactttcaatatctgagaccagggtcagtccttcatgaacaccctacaggagcgcatc

SEQ ID NO: 12837 - DNA, 599 bp, Chicken  19866894216838_1
  misc_feature (1)..(43): n is any nucleotide
nnnnnnnnnnnnnnnnnnnnnnnnnnnnnnnnnnnnnnnnnnngtacagggttcagttatctttctagaaaaatccgctaaagactatcagttcatgttttatgcaaaacagagtgtgtcagaactgtgaaatctgataagtgaaaaaatagtatgaggatgggcatattgaggaagtgattcggattgttgcaatcagtgccttcagcatttcagaggtagaggacatattcaaatcagtactcataatatttagtgatggatattctctattatggctcctacaagtccatgggaatrtgtaattaggcaccttgggaaacgtgtgcagagtggaaatcttttgatgtgtttttaacctgtgacctgaagacactagttcttgtactgtgagaaatctttgtaagtatttctttttcaccttattgttcacagagcatatatwgatgttgtgatctcttccctcctatatagtccagacccttttcttccaaatggaacagtcttttattttttattttttttcactatcacctctctgacccctttggggagggagacctttcatcttgtaaatccacagaatgatatattgttca

SEQ ID NO: 12838 - DNA, 600 bp, Chicken  19866894216838_2
aaaatagtatgaggatgggcatattgaggaagtgattcggattgttgcaatcagtgccttcagcatttcagaggtagaggacatattcaaatcagtactcataatatttagtgatggatattctctattatggctcctacaagtccatgggaatrtgtaattaggcaccttgggaaacgtgtgcagagtggaaatcttttgatgtgtttttaacctgtgacctgaagacactagttcttgtactgtgagaaatctttgtaagtatttctttttcaccttattgttcacagagcatatatwgatgttgtgatctcttccctcctatatagtccagacccttttcttccaaatggaacagtcttttattttttattttttttcactatcacctctctgacccctttggggagggagacctttcatcttgtaaatccacagaatgatatattgttcaggaaagggtaattatccacctctcaggaaatgggagtaccatttctacttacagctggcttggagacatagatgccactagagacacacagggaaatcctttcttgctttttccaccagttcctttttcytatcattctattttag

SEQ ID NO: 12839 - DNA, 600 bp, Chicken  19866894216838_3
tcacagagcatatatwgatgttgtgatctcttccctcctatatagtccagacccttttcttccaaatggaacagtcttttattttttattttttttcactatcacctctctgacccctttggggagggagacctttcatcttgtaaatccacagaatgatatattgttcaggaaagggtaattatccacctctcaggaaatgggagtaccatttctacttacagctggcttggagacatagatgccactagagacacacagggaaatcctttcttgctttttccaccagttcctttttcytatcattctattttagacctgacccctgctgaccggcaacctgatgttttcacagagctgacttcagtgatttccccatctctctatggagttgcaattggttatttagagttcataattatgtcaaattatttttctcaggtccaaatatttaccaacacagatttttactatttaaatgctctccaacaaagtcttgctttcattcttcacaaccagattaagtttttattatcctgtagaactttataacaccctcaagcattcattacttcactaggtgcccatgataaaagatca

SEQ ID NO: 12840 - DNA, 600 bp, Chicken  19866894216845_1
atatgatttcttcccaacatagcttctccctgaaagtaactcctttcaagtttctgaacagccaaaagatcagctgtcaacagctgcaaaactaaatttaatagagttttgggaaggtctaaagtgttgcaagaaagaagggttccttagaagatttaacacataactattgcagcttttcccttcaaactagaagctgagactgcagaacagctaacagacttatatgatgcgcattcttttatcccataaacagactcctatttttgagaccttcttccctgtataagaaatgcaaaraacaatttaaagttagagagactgagcagaaccatgcagatatttcatctttttccactcttaratgtatttgtttatgaagtgccaccctgagttttaaagcaggagcatgagttttaactttgttcctaaggyaagcagaactgttacctttgaattctggccaaatgcagcaaggatcgactcagcacccagtaacagtagcctttgcatcyctaaaccaagctatggagtacagagcttcaaaggtcttcagaaatcagtacacagccttgtatttctcattttctctttataccc

SEQ ID NO: 12841 - DNA, 600 bp, Chicken  19866894216845_2
aaagatcagctgtcaacagctgcaaaactaaatttaatagagttttgggaaggtctaaagtgttgcaagaaagaagggttccttagaagatttaacacataactattgcagcttttcccttcaaactagaagctgagactgcagaacagctaacagacttatatgatgcgcattcttttatcccataaacagactcctatttttgagaccttcttccctgtataagaaatgcaaaraacaatttaaagttagagagactgagcagaaccatgcagatatttcatctttttccactcttaratgtatttgtttatgaagtgccaccctgagttttaaagcaggagcatgagttttaactttgttcctaaggyaagcagaactgttacctttgaattctggccaaatgcagcaaggatcgactcagcacccagtaacagtagcctttgcatcyctaaaccaagctatggagtacagagcttcaaaggtcttcagaaatcagtacacagccttgtatttctcattttctctttataccctgattaagctatacttctcctgatcagaaacacrcagggatacattactccccaggcaaaggtg

SEQ ID NO: 12842 - DNA, 600 bp, Chicken  19866894216845_3
agaagggttccttagaagatttaacacataactattgcagcttttcccttcaaactagaagctgagactgcagaacagctaacagacttatatgatgcgcattcttttatcccataaacagactcctatttttgagaccttcttccctgtataagaaatgcaaaraacaatttaaagttagagagactgagcagaaccatgcagatatttcatctttttccactcttaratgtatttgtttatgaagtgccaccctgagttttaaagcaggagcatgagttttaactttgttcctaaggyaagcagaactgttacctttgaattctggccaaatgcagcaaggatcgactcagcacccagtaacagtagcctttgcatcyctaaaccaagctatggagtacagagcttcaaaggtcttcagaaatcagtacacagccttgtatttctcattttctctttataccctgattaagctatacttctcctgatcagaaacacrcagggatacattactccccaggcaaaggtgacctaagctgctgaagaccccagcataagacagaacactgctttcatgaacacagagatccctttctcttc

SEQ ID NO: 12843 - DNA, 552 bp, Chicken  19866894216845_4
aacagacttatatgatgcgcattcttttatcccataaacagactcctatttttgagaccttcttccctgtataagaaatgcaaaraacaatttaaagttagagagactgagcagaaccatgcagatatttcatctttttccactcttaratgtatttgtttatgaagtgccaccctgagttttaaagcaggagcatgagttttaactttgttcctaaggyaagcagaactgttacctttgaattctggccaaatgcagcaaggatcgactcagcacccagtaacagtagcctttgcatcyctaaaccaagctatggagtacagagcttcaaaggtcttcagaaatcagtacacagccttgtatttctcattttctctttataccctgattaagctatacttctcctgatcagaaacacrcagggatacattactccccaggcaaaggtgacctaagctgctgaagaccccagcataagacagaacactgctttcatgaacacagagatccctttctcttctcctcagctcccaaacatggtgaaagaggttt

SEQ ID NO: 12844 - DNA, 433 bp, Chicken  19866894216845_5
tgcagatatttcatctttttccactcttaratgtatttgtttatgaagtgccaccctgagttttaaagcaggagcatgagttttaactttgttcctaaggyaagcagaactgttacctttgaattctggccaaatgcagcaaggatcgactcagcacccagtaacagtagcctttgcatcyctaaaccaagctatggagtacagagcttcaaaggtcttcagaaatcagtacacagccttgtatttctcattttctctttataccctgattaagctatacttctcctgatcagaaacacrcagggatacattactccccaggcaaaggtgacctaagctgctgaagaccccagcataagacagaacactgctttcatgaacacagagatccctttctcttctcctcagctcccaaacatggtgaaagaggttt

SEQ ID NO: 12845 - DNA, 600 bp, Chicken  19866894216847_1
tcagcaactagtttgtgtgcaagggtgtctactcacagcactacgtctacactgcgtctgtgtctgcgctcgcacgtgggagggctgtggaagcagacaacacaatagatcagatgaggtgctgacatgctttaaggtgcttgtcgtccttctagaccaaccttcaaaggaaaaacaatccgtattttgaagtgaagtccgaagggctcagctacacggtagaacttagggcaacctgttccacctgaccctgaaatgaagcggtttggtatctctctggccaaccccaacagaagatgygagaagcaaaggttctctctgcttctctgcccgaagctggaggccagcagcagcctttgcagggtcaggaaagcggatccgccttgccctgagagacggttgtgccgcaggtattttggcacttcagctaattcacatccgcccttcacccagcattacggagggagtctcacggaagcttcctgccttcttcttcttttttttttttttacattcttgttgctttcccaatcaattattaaagcagcaaatctctcttgtaggaacttcataggcgttrtaaatattttatcccaaaaa

SEQ ID NO: 12846 - DNA, 600 bp, Chicken  19866894216847_2
ccaaccccaacagaagatgygagaagcaaaggttctctctgcttctctgcccgaagctggaggccagcagcagcctttgcagggtcaggaaagcggatccgccttgccctgagagacggttgtgccgcaggtattttggcacttcagctaattcacatccgcccttcacccagcattacggagggagtctcacggaagcttcctgccttcttcttcttttttttttttttacattcttgttgctttcccaatcaattattaaagcagcaaatctctcttgtaggaacttcataggcgttrtaaatattttatcccaaaaaaattatttcatcaagtaccttaaggtttttgttgttgtcacttcgtgttaaatgtcaagtaaagcctaatttatttaacacacacacacacgcacgcacacatacagacctgcagtggttcattgcactctgggaaaaaaataaacaactgagtgctgccattcctctcaggcaaggaagcgactgctgggaggccagggcagtgccactacctcttggatacccccttgtacctcagcaggaagcagaatagggcagccacacgttgcgttggccagcc

SEQ ID NO: 12847 - DNA, 600 bp, Chicken  19866894216851_1
ctgctcctatccgtttatagagggataccacttggtcttcctttagcagacttcccctaggatatctccttcctctgccttccctttaaccctaatccataagctctctcatctgtccccaggtggagctccatggactccaggtggtcagtgatgtagagggcaacaccccttcccccttttccccctcccagtctttcctgaatagtttatacccatctattcctacattccagtcatgagagtcatcccatcacatctcagtgatgcccatgacatcatagccctttaggcactttmcatgcctgcaactcttcttggttgttcctacactccatgcattaagatcctggcatttgagtttggttctacgcttttaacagagaatagaacgctgcttggatttcttggctagattttgtgggtacagttttggacttattccaaaaacaaaaacaaaaaaaactaaaaacaatgttgttgtcctcttcatttgtaaggaagtaaggtggcttgtgaatgcttccaaggatttgtaggtgatcagaacctgttctgtggtctcaagcactttgattaatacagtttgttttgttcttg

SEQ ID NO: 12848 - DNA, 600 bp, Chicken  19866894216851_2
ggatttcttggctagattttgtgggtacagttttggacttattccaaaaacaaaaacaaaaaaaactaaaaacaatgttgttgtcctcttcatttgtaaggaagtaaggtggcttgtgaatgcttccaaggatttgtaggtgatcagaacctgttctgtggtctcaagcactttgattaatacagtttgttttgttcttggaactgggagtgcttcattttctttatttttttttatagtatgtgcaatgagttctctcagatatttcaactgtgtcagtttgtgatggtaagtattagkttttttttaaccttttccatactaccttcaccctgtcatgccttgataatattatatgcactgatgctttcctacaggaaaactcccaaaatgctcctttagttcatgcaactttggaaactttgctacgatttctgaactggattcctctgggatatatatttgagactaagttaatcagcacactaatatacaaggtatgtatgtaattatttatagctttttagtttagaagttgcaaaatgtgttccgtgtaacacctctgtaaaacgctttcttttgttttctcaatagttctta

SEQ ID NO: 12849 - DNA, 600 bp, Chicken  19866894216852_1
gcgctagccaataaaggacaactgtagcatgtgtaatgggggtatctgtgagctggcaccactggcactcagaccccaagagtttagtgtgagtttctgatcaatgtctctattgctgtttttcagaagagaaaagagatatttcagccaactgcaaagtgctattaagcatctgaacgagcgaaccacctggtgagcatgcagacctgtatttttaattaaaataaattaaaaaagaaatacccggtctgattatttgccaacgagaaaaatacaactgagggatctcaaagtgtcatyaccctctctgaaaggccaaaatggcttgtttgctgcagactgtaactctctctgatgctgctgcagggtcacagcacaacccccaaaattaacaagctacctaagaaatcaccaagagctgaaacaaacccaactcaagaaaggaggatgtttkgggttgggttctgccttcacaataagcagcatcagaagcattttaccatcagtagctctgcacttaacacctgctgcagagttgccaggtgcaggatgtcaccccagagcctttgtgtcatcagatacttatctcacagctgatag

SEQ ID NO: 12850 - DNA, 600 bp, Chicken  19866894216852_2
caaagtgctattaagcatctgaacgagcgaaccacctggtgagcatgcagacctgtatttttaattaaaataaattaaaaaagaaatacccggtctgattatttgccaacgagaaaaatacaactgagggatctcaaagtgtcatyaccctctctgaaaggccaaaatggcttgtttgctgcagactgtaactctctctgatgctgctgcagggtcacagcacaacccccaaaattaacaagctacctaagaaatcaccaagagctgaaacaaacccaactcaagaaaggaggatgtttkgggttgggttctgccttcacaataagcagcatcagaagcattttaccatcagtagctctgcacttaacacctgctgcagagttgccaggtgcaggatgtcaccccagagcctttgtgtcatcagatacttatctcacagctgataggatcacagcactcattcccttttcttccagcttcagtggaggaataacaactgttaaagcagcccttcaagataaagatgctttatctgcatatgctaccattgctagacaactaaacacttttacaggcttgcacacccaaattcacaaatgc

SEQ ID NO: 12851 - DNA, 538 bp, Chicken  19866894216855_1
atcctcccttggccaaaatacccaattgtgagatgatgtcttaaataaattttgctcctgtgtcagtggatttagcaggcagagctttggggcattttcagtttgcaggctagttgtttacgaagtcttagagcatgggagattttgtacatttggcagctgcaaaatgatgatatatctcttgcccatatatctatgaaaaaaaaaaagtcagagaatgtggcacctgagaagaaactttggtttgatgttaaactttcgcaaaagttttggcagggctgtctcctcctgcaccgcacyggtaactgccttgattcatgtcttggtcatttgctctttccttctgtgggatygacatcatttttatcagcaactactgcacatattttattttgctgaaatcttctgatttttcttgcttcatgaaaactgacatcaacttgtggtgagctggaaaagagaaaaatgctgtgtgatgggatcagagtgcgactcagtaaatgaaatgtggccttggtagtctgcatcaacacatttt

SEQ ID NO: 12852 - DNA, 485 bp, Chicken  19866894216855_2
gctcctgtgtcagtggatttagcaggcagagctttggggcattttcagtttgcaggctagttgtttacgaagtcttagagcatgggagattttgtacatttggcagctgcaaaatgatgatatatctcttgcccatatatctatgaaaaaaaaaaagtcagagaatgtggcacctgagaagaaactttggtttgatgttaaactttcgcaaaagttttggcagggctgtctcctcctgcaccgcacyggtaactgccttgattcatgtcttggtcatttgctctttccttctgtgggatygacatcatttttatcagcaactactgcacatattttattttgctgaaatcttctgatttttcttgcttcatgaaaactgacatcaacttgtggtgagctggaaaagagaaaaatgctgtgtgatgggatcagagtgcgactcagtaaatgaaatgtggccttggtagtctgcatcaacacatttt

SEQ ID NO: 12853 - DNA, 600 bp, Chicken  19866894216871_1
agcagagcctatagctttctagcactttcagtaccttatcctacacagtgcatctgctcagtggctgaaccacagtcagatcaatgccttgcaaccagcacaacaggatcacgtggatccagcagcatttttgtgcttttatgtccagaagtcctgcatccatccctgcaagtgtttccttttaacttgctttgtgctacaagggaatgctggctgagtatttgcaggatgtaggcccagatcccttttatttcaggacatcagacagtagttccttgacacctgaaacagttaattgaraagcaccaactctctactggaacgtgtgtgtgtgtgtatgtttttgtttcttagagccaagaagatttgctttggttttttttaaagcagaaatcacccacaaagttggctgtggttttagctgcgctcgttcaagatttgtgttgctgactaccaatyctaaaagagttaacccagcaagcatgactcagaagcagagagggagatgcgaggctgagaggctcagaaggcagcagagaagcacaggtgaggaacataataatcaccaaaaaaaggtgcagcgtccaggagtgaggctcc

SEQ ID NO: 12854 - DNA, 600 bp, Chicken  19866894216871_2
ccatccctgcaagtgtttccttttaacttgctttgtgctacaagggaatgctggctgagtatttgcaggatgtaggcccagatcccttttatttcaggacatcagacagtagttccttgacacctgaaacagttaattgaraagcaccaactctctactggaacgtgtgtgtgtgtgtatgtttttgtttcttagagccaagaagatttgctttggttttttttaaagcagaaatcacccacaaagttggctgtggttttagctgcgctcgttcaagatttgtgttgctgactaccaatyctaaaagagttaacccagcaagcatgactcagaagcagagagggagatgcgaggctgagaggctcagaaggcagcagagaagcacaggtgaggaacataataatcaccaaaaaaaggtgcagcgtccaggagtgaggctccctcggtgtgcctggccctggcactgctggcacgggctccctggaaggctgcagttccgctgttataacacaaggagcaggctggagaatttagagctgcgtcacagagctcagcgagagagcaagctccgtcgataggtctaccagcaacagccctgct

SEQ ID NO: 12855 - DNA, 600 bp, Chicken  19866894216879_1
tctgcaagaactctgtatgcacagtacttctaataaacttaagatttgggtcagagtgctgaaatctgtaaggcaggtcagaagctaaaaatgactctgagattcaaataagtcatcacaacaagcagtacctgcagcatagctggtggcattaccttggttgttgaacatacctgttaagggcactatttggtacgtttttaaagtagttgactcattcagtgcctgcactgtagccatggcagcacaaagctggctggatctgtactcaggtggtttgcttgagctgacctccacggygctccatattagcagcaactgataccagcttatgcagctaattagaaactgmctctaacatgtcaacacacactgcttacaaaataggtatgcatgttctgagagtctgcagctatcacctgggcatgcaacaaaatgccaaacattccagtatcagaggtctagaaaagcctacaaaagtacaattggaacgcagtaaacaggtgtaactcccagtacttggcagtaatttatgttacttctggatagcactcaaacaaatttgagaaaagcagctactcagagtaacctgggagaaac

SEQ ID NO: 12856 - DNA, 600 bp, Chicken  19866894216879_2
agagtgctgaaatctgtaaggcaggtcagaagctaaaaatgactctgagattcaaataagtcatcacaacaagcagtacctgcagcatagctggtggcattaccttggttgttgaacatacctgttaagggcactatttggtacgtttttaaagtagttgactcattcagtgcctgcactgtagccatggcagcacaaagctggctggatctgtactcaggtggtttgcttgagctgacctccacggygctccatattagcagcaactgataccagcttatgcagctaattagaaactgmctctaacatgtcaacacacactgcttacaaaataggtatgcatgttctgagagtctgcagctatcacctgggcatgcaacaaaatgccaaacattccagtatcagaggtctagaaaagcctacaaaagtacaattggaacgcagtaaacaggtgtaactcccagtacttggcagtaatttatgttacttctggatagcactcaaacaaatttgagaaaagcagctactcagagtaacctgggagaaacagccttcaataaaaatcaaactgaattctctattatgcaaaagtaaatagaa

SEQ ID NO: 12857 - DNA, 600 bp, Chicken  19866894216880_1
gcttctcctacaagggacaggcgtcaaggggctggaaggagcgcggtgggccttccctgccctggctgagtgtggcatcatggtgtgtttgtgctctcctccagagctgtctgactcacttcttgtggggagggaaggttaccgatgactcttactggaaagctgaacctgtgcctcttctttttttaataaaagataaattcggttttaatcccttgggcttcaggaacaggagctctgcagggaaagaagtcactcagctgaggggttagcagggctgtcactgttctctcagctgcygctcygtccctttctagcaactcaaggcaagcagaagtgaggaaaactgtttgctgctgtatgaaacttgtacatatttttttaatctaattgctgtggggaaaacaaacatcagttttatttcgcaccatttcttggctcaggaacttgaggcatattcgccaaattgtggttttgcagtcattggattgagtctcatttaccatgaggcctctttacaccgctcttggtttcttgagggacacagagtagctaaaaatgtcctctgcgacgttattgtaaagaattctgtgtgtaaat

SEQ ID NO: 12858 - DNA, 600 bp, Chicken  19866894216880_2
tcctacaagggacaggcgtcaaggggctggaaggagcgcggtgggccttccctgccctggctgagtgtggcatcatggtgtgtttgtgctctcctccagagctgtctgactcacttcttgtggggagggaaggttaccgatgactcttactggaaagctgaacctgtgcctcttctttttttaataaaagataaattcggttttaatcccttgggcttcaggaacaggagctctgcagggaaagaagtcactcagctgaggggttagcagggctgtcactgttctctcagctgcygctcygtccctttctagcaactcaaggcaagcagaagtgaggaaaactgtttgctgctgtatgaaacttgtacatatttttttaatctaattgctgtggggaaaacaaacatcagttttatttcgcaccatttcttggctcaggaacttgaggcatattcgccaaattgtggttttgcagtcattggattgagtctcatttaccatgaggcctctttacaccgctcttggtttcttgagggacacagagtagctaaaaatgtcctctgcgacgttattgtaaagaattctgtgtgtaaatgagca

SEQ ID NO: 12859 - DNA, 600 bp, Chicken  19866894216880_3
ctttggctccctgtaaatcttgaattgatggcagctgtttgagccaaactcaagacacgttgcatcacatcagggtttaagtgctcaaaggcaagggaggattgctactattctgtagtattcctccagcagctccatctgttcagctgaggtcaatcactagcatcatgcagcacttcagagagaggggaagatgttctttaatcctggccaggatactgaatttccattccatgataatttattcattctttgggggaatatttccagccagtcagtacagaaagccccaaacgctcraccctggcagactgcgtggtgggcttcagccctctgcctgacaatgggcatgtggagcaccttgagaaccaggcactgggctgcacaggtggtgaggatggcatcaggcgcagcgcctgactgtgggctgacttctgcacctgggtcagaacccagtggggccttgggccaggctgcagacccacagcttctcagaggtgtttgtaaggactagcccatgtctgcgtcgcttctcctgctttcactgggttagcatttggtggcaggcaaaaactccattagaaaatgtctgactggttc

SEQ ID NO: 12860 - DNA, 600 bp, Chicken  19866894216882_1
gcaggattacagcactggctcgtgctcggcgagagcagctgccagtcccacaccatgtcacagtgtcccacagcagatgatccagctgtgactctgctgaccaagggagctgcttgtaaggtcaccttccagccctgcctggcagccaagcaccctgaggacaccagcacctgtctctccactgtccaggctaagtctgctggacccctgggtggaaagtctgctcagcccagccgtgcctgctcctgaccctgcactgtgcctcagatcagaggcacccacaggtactaacacaggctkccagttgcccaccagcagcaatcccacagttctgacttccagtctttcagcccctttcctcttctttcctccacagcctctaagcaaaggagttaagcacagcaagggctcaagtctgcctattcctcttctttgctcacagcctttccctgtgctgtaccacgctcagcttggacccacctgtccttccagcctgactggctgcagaaggctgcctgctgctgggctcttccttctctaggttcaatcccaagagcaggtaaatcttaactctcactcaaatcttaaccctcattctcc

SEQ ID NO: 12861 - DNA, 599 bp, Chicken  19866894216883_1
  misc_feature (1)..(82): n is any nucleotide
nnnnnnnnnnnnnnnnnnnnnnnnnnnnnnnnnnnnnnnnnnnnnnnnnnnnnnnnnnnnnnnnnnnnnnnnnnnnnnnnnnctcaaactattgtttagacacaatcaagaacatcaaacttcattcagaaacagcagcattaagttagcaccctcgtgagatgcaaagatcccttctcagaagtaggaagtattaaaagtgtgccccagaaagcagcatagaggaccaagttcctttcccacatgaagcacagtacacgcacagaaaaacctaaaggtaatttagctgacggaggagcrtttcaagtggagtacagacacacaaagcaatttgaactgctcatcatcccaaccacttctgatttcagtcagctcctgtcttcttccttccccagggccacgcaccggtagttactgaaatgctttctcagaaatacaagaaagcgctgagtcaccttaagcagtctatttcctccctaagattcaccgagctgygtattaataggcaagttcacagaacttccacctagggccagaatgtcagaacagcaacayagataaatatggggtcaaaaagtaaaaataagatgactcaaaat

SEQ ID NO: 12862 - DNA, 571 bp, Chicken  19866894216883_2
aaaagtgtgccccagaaagcagcatagaggaccaagttcctttcccacatgaagcacagtacacgcacagaaaaacctaaaggtaatttagctgacggaggagcrtttcaagtggagtacagacacacaaagcaatttgaactgctcatcatcccaaccacttctgatttcagtcagctcctgtcttcttccttccccagggccacgcaccggtagttactgaaatgctttctcagaaatacaagaaagcgctgagtcaccttaagcagtctatttcctccctaagattcaccgagctgygtattaataggcaagttcacagaacttccacctagggccagaatgtcagaacagcaacayagataaatatggggtcaaaaagtaaaaataagatgactcaaaatcaaagcagcaaacccctgtcctctgctgtcacagtgggtatccctgggcctctgatcagccatttcaggatcaccttcagccattcattgataacatgaggtctccagagcaccaaagcccacgaggaagtgacagtccctttctctaaaagatcaggataactaaa

SEQ ID NO: 12863 - DNA, 511 bp, Chicken  19866894216883_3
acacgcacagaaaaacctaaaggtaatttagctgacggaggagcrtttcaagtggagtacagacacacaaagcaatttgaactgctcatcatcccaaccacttctgatttcagtcagctcctgtcttcttccttccccagggccacgcaccggtagttactgaaatgctttctcagaaatacaagaaagcgctgagtcaccttaagcagtctatttcctccctaagattcaccgagctgygtattaataggcaagttcacagaacttccacctagggccagaatgtcagaacagcaacayagataaatatggggtcaaaaagtaaaaataagatgactcaaaatcaaagcagcaaacccctgtcctctgctgtcacagtgggtatccctgggcctctgatcagccatttcaggatcaccttcagccattcattgataacatgaggtctccagagcaccaaagcccacgaggaagtgacagtccctttctctaaaagatcaggataactaaa

SEQ ID NO: 12864 - DNA, 599 bp, Chicken  19866894216884_1
  misc_feature (1)..(59): n is any nucleotide
nnnnnnnnnnnnnnnnnnnnnnnnnnnnnnnnnnnnnnnnnnnnnnnnnnnnnnnnnnnaacttctaccctaccttgtcagacctttattgacctcttcagaaatgcatgggagttacctgagcaatcttaccacatgtcagctgtatctatgtggacagcatctatcatctagcatgcacatacaactcagcagtttaatgttcttcttgtcttcttttctatgttttaagcatgctttaaatacgtacaaatattgtggtctttcaatatttgaagggagcatataaacaagagggtrtacaactctttacgagggtggatagtgataggacaaggaggaatggttttaaattgagatggagagggttaggttagatatcaggaggcagtttttcacacagagggtggtgacacactggaacaggttgtccaaggaggttgtggatgccccatccctgcatgcattcaagaccaggctggatgtggctctgggcagcctggtttggtggtttgcgaccctgcacatagcaggggggttgaaactcgatgatcactgtgatccttttcaacataggccattctgcgattctatgatgc

SEQ ID NO: 12865 - DNA, 600 bp, Chicken  19866894216886_1
tgggggggtggggatctgaagagggcttttccatgctcagcgatgctgcgattgtatggagctgtgctcccagcagcacacacaggatggcacagccagaaaagctccatcgaaaaagctgcccagagcgatgcccccccactgcccctacccggccatagagctctcagacacagaactcacacccacatgggtgaaaacagcgtttgggtccagcacacagctgtgtggggctgaagagccagagatgctcctcccacccaccgcccctgagatgtgactaacagcagcacgcagctygtgggtctgcagctctcagtctggccgttgggctgcacgttgcctccagttaacctcacctaccctcttgtttttcacttgtctccaacaacagaggctgtgccagcagaacatgcaggtgtttgccacccagcttgcaaawcacagagcggccagggggagagacgcagggagagacatcatctccgggcagaacactcactgggacggcgtcacagcacagatgtactgcaaagaacccttcccaccatgagcagcgaggaccgaatcatagaatatccagtgttggaagggacccac

SEQ ID NO: 12866 - DNA, 600 bp, Chicken  19866894216886_2
tgcccctacccggccatagagctctcagacacagaactcacacccacatgggtgaaaacagcgtttgggtccagcacacagctgtgtggggctgaagagccagagatgctcctcccacccaccgcccctgagatgtgactaacagcagcacgcagctygtgggtctgcagctctcagtctggccgttgggctgcacgttgcctccagttaacctcacctaccctcttgtttttcacttgtctccaacaacagaggctgtgccagcagaacatgcaggtgtttgccacccagcttgcaaawcacagagcggccagggggagagacgcagggagagacatcatctccgggcagaacactcactgggacggcgtcacagcacagatgtactgcaaagaacccttcccaccatgagcagcgaggaccgaatcatagaatatccagtgttggaagggacccacaaggatcagagtccaacccttggctccacacaggaccacccaaaaaacagagcgaggcagccccgcaaacacacctgcagccaaagcagcagcagctcctgctgtactttcaccgtagctacacacaaagctggaactatca

SEQ ID NO: 12867 - DNA, 600 bp, Chicken  19866894216888_1
ccttgtttgtgacttgttttggaaggtagctggtagtcagcattaaaggcaggactgaaattctggtacaggaggaagccatctctaactttgtcatgctctgaaaccgaacttttcctactgagtgtttgtcagcagcaaaaggtcttgtgcttgagagcaggacagcaaaccttcaccatgtttgggaaagctaaaataggaagagcgaaataaaggcgaagatttgtttgggatcactgataaaaagaggagatgagcctcatcagagtgtttgctcctgtcttgctgagatgcatrtatcacgttactcaaggcgctcaccatccaccatctgatttctcatttgagtgcctatattatggcttactttgagcttaaattctctggagcaagaattttatttactgtaatttgcccagtagggagatagtataagtttcctttaagtcctattctgcaatattaggtcttcttgatgctagcacgtgaagttygtcagtctgggaggagtccagtgcctttcgtgatggcgactcccttctgttgtttggatgtccataatgtttgttttcagtatactgcctaatcactagtgct

SEQ ID NO: 12868 - DNA, 600 bp, Chicken  19866894216888_2
aataggaagagcgaaataaaggcgaagatttgtttgggatcactgataaaaagaggagatgagcctcatcagagtgtttgctcctgtcttgctgagatgcatrtatcacgttactcaaggcgctcaccatccaccatctgatttctcatttgagtgcctatattatggcttactttgagcttaaattctctggagcaagaattttatttactgtaatttgcccagtagggagatagtataagtttcctttaagtcctattctgcaatattaggtcttcttgatgctagcacgtgaagttygtcagtctgggaggagtccagtgcctttcgtgatggcgactcccttctgttgtttggatgtccataatgtttgttttcagtatactgcctaatcactagtgctgagctgttacactgcggcacaactgagggactgaactaatgcgccatccagaaatgcctataatgcatctggctgcaggcyccaagcagtgcttccctttggggatgcatcgtgcctctgatggagtggttctgtgctgtctattggttaaaccctacagmactgarcgggtttgtgttcagcctgctctgggtgct

SEQ ID NO: 12869 - DNA, 600 bp, Chicken  19866894216888_3
attctctggagcaagaattttatttactgtaatttgcccagtagggagatagtataagtttcctttaagtcctattctgcaatattaggtcttcttgatgctagcacgtgaagttygtcagtctgggaggagtccagtgcctttcgtgatggcgactcccttctgttgtttggatgtccataatgtttgttttcagtatactgcctaatcactagtgctgagctgttacactgcggcacaactgagggactgaactaatgcgccatccagaaatgcctataatgcatctggctgcaggcyccaagcagtgcttccctttggggatgcatcgtgcctctgatggagtggttctgtgctgtctattggttaaaccctacagmactgarcgggtttgtgttcagcctgctctgggtgctctcaacactgcgtccctacctgaggctgctctgcttgtctcctggtgcctgtaactgcaaaaggttgttcccagtcgaaaggttagctgttgtgagtatgagatgggtttaaaacaaacaaacaaacaaaaaatcatgcttctgttaattttacatctaagctaaacaaaaatatctaagcatt

SEQ ID NO: 12870 - DNA, 600 bp, Chicken  19866894216888_4
aatattaggtcttcttgatgctagcacgtgaagttygtcagtctgggaggagtccagtgcctttcgtgatggcgactcccttctgttgtttggatgtccataatgtttgttttcagtatactgcctaatcactagtgctgagctgttacactgcggcacaactgagggactgaactaatgcgccatccagaaatgcctataatgcatctggctgcaggcyccaagcagtgcttccctttggggatgcatcgtgcctctgatggagtggttctgtgctgtctattggttaaaccctacagmactgarcgggtttgtgttcagcctgctctgggtgctctcaacactgcgtccctacctgaggctgctctgcttgtctcctggtgcctgtaactgcaaaaggttgttcccagtcgaaaggttagctgttgtgagtatgagatgggtttaaaacaaacaaacaaacaaaaaatcatgcttctgttaattttacatctaagctaaacaaaaatatctaagcattttgtacactatgaaagatcttggaggctctcatgggatttttaattgcctttttatttgatgtttgtgcaaatctaccat

SEQ ID NO: 12871 - DNA, 600 bp, Chicken  19866894216888_5
aggtcttcttgatgctagcacgtgaagttygtcagtctgggaggagtccagtgcctttcgtgatggcgactcccttctgttgtttggatgtccataatgtttgttttcagtatactgcctaatcactagtgctgagctgttacactgcggcacaactgagggactgaactaatgcgccatccagaaatgcctataatgcatctggctgcaggcyccaagcagtgcttccctttggggatgcatcgtgcctctgatggagtggttctgtgctgtctattggttaaaccctacagmactgarcgggtttgtgttcagcctgctctgggtgctctcaacactgcgtccctacctgaggctgctctgcttgtctcctggtgcctgtaactgcaaaaggttgttcccagtcgaaaggttagctgttgtgagtatgagatgggtttaaaacaaacaaacaaacaaaaaatcatgcttctgttaattttacatctaagctaaacaaaaatatctaagcattttgtacactatgaaagatcttggaggctctcatgggatttttaattgcctttttatttgatgtttgtgcaaatctaccatgttttg

SEQ ID NO: 12872 - DNA, 599 bp, Chicken  19866894216889_1
  misc_feature (1)..(25): n is any nucleotide
nnnnnnnnnnnnnnnnnnnnnnnnntgtaactttgtccagagctgtgcaagtttctattgcatcttcctccaccctgtgttccaacactgtcctgtggggacgctttctagcaattatacataaatttcatgtcaaaatacagctatctcaagcttcaaatcagagttgtgggaaaagttcccattggtttcagcagagttggttcacattcttcatctaagataactacagctggaagctatgcatgtaaatacccaacactagttgcacatggacagcatatcacatcaatcacagartgcagcaataacttcactgctattaaaccatccagagctaataactaggaacatggagataagyacaacacgtagtacttgcacaaaggtccaagcgagctccatgaggtagtggataccgtcctcactcctctgtgccctgttgaaaactccagcccatggatgccagtctgatccagttatactcaggaccaggcagtgctctaccaaagtcagtgcgacactactattgtgaaagcacaggaataggtattatctgttgtcacacttgcacgctgttatgcagcagtaaataaaag

SEQ ID NO: 12873 - DNA, 600 bp, Chicken  19866894216889_2
ttcctccaccctgtgttccaacactgtcctgtggggacgctttctagcaattatacataaatttcatgtcaaaatacagctatctcaagcttcaaatcagagttgtgggaaaagttcccattggtttcagcagagttggttcacattcttcatctaagataactacagctggaagctatgcatgtaaatacccaacactagttgcacatggacagcatatcacatcaatcacagartgcagcaataacttcactgctattaaaccatccagagctaataactaggaacatggagataagyacaacacgtagtacttgcacaaaggtccaagcgagctccatgaggtagtggataccgtcctcactcctctgtgccctgttgaaaactccagcccatggatgccagtctgatccagttatactcaggaccaggcagtgctctaccaaagtcagtgcgacactactattgtgaaagcacaggaataggtattatctgttgtcacacttgcacgctgttatgcagcagtaaataaaagaaaagcrtgaagcaagkaaaaygaaaagcaagcaagctggctgaaatttactccagggtgagagc

SEQ ID NO: 12874 - DNA, 600 bp, Chicken  19866894216889_3
aataacttcactgctattaaaccatccagagctaataactaggaacatggagataagyacaacacgtagtacttgcacaaaggtccaagcgagctccatgaggtagtggataccgtcctcactcctctgtgccctgttgaaaactccagcccatggatgccagtctgatccagttatactcaggaccaggcagtgctctaccaaagtcagtgcgacactactattgtgaaagcacaggaataggtattatctgttgtcacacttgcacgctgttatgcagcagtaaataaaagaaaagcrtgaagcaagkaaaaygaaaagcaagcaagctggctgaaatttactccagggtgagagctggaagaggtctggtaaacctgctagcaactgagctctttccccagcacacctgcagtaacgtctgcatgtgtctagtgacaagaggtgtacgtaaagggaggctcaagggaacactctactaccattactattcgaggacaacaaaagtaaatagaacaagacacagccacttttcaatcacaatcactgttttactacgttgtgcaagataaatgcttctgctctgtcttcccatttatg

SEQ ID NO: 12875 - DNA, 600 bp, Chicken  19866894216889_4
ctgctattaaaccatccagagctaataactaggaacatggagataagyacaacacgtagtacttgcacaaaggtccaagcgagctccatgaggtagtggataccgtcctcactcctctgtgccctgttgaaaactccagcccatggatgccagtctgatccagttatactcaggaccaggcagtgctctaccaaagtcagtgcgacactactattgtgaaagcacaggaataggtattatctgttgtcacacttgcacgctgttatgcagcagtaaataaaagaaaagcrtgaagcaagkaaaaygaaaagcaagcaagctggctgaaatttactccagggtgagagctggaagaggtctggtaaacctgctagcaactgagctctttccccagcacacctgcagtaacgtctgcatgtgtctagtgacaagaggtgtacgtaaagggaggctcaagggaacactctactaccattactattcgaggacaacaaaagtaaatagaacaagacacagccacttttcaatcacaatcactgttttactacgttgtgcaagataaatgcttctgctctgtcttcccatttatgtaccataata

SEQ ID NO: 12876 - DNA, 600 bp, Chicken  19866894216889_5
attaaaccatccagagctaataactaggaacatggagataagyacaacacgtagtacttgcacaaaggtccaagcgagctccatgaggtagtggataccgtcctcactcctctgtgccctgttgaaaactccagcccatggatgccagtctgatccagttatactcaggaccaggcagtgctctaccaaagtcagtgcgacactactattgtgaaagcacaggaataggtattatctgttgtcacacttgcacgctgttatgcagcagtaaataaaagaaaagcrtgaagcaagkaaaaygaaaagcaagcaagctggctgaaatttactccagggtgagagctggaagaggtctggtaaacctgctagcaactgagctctttccccagcacacctgcagtaacgtctgcatgtgtctagtgacaagaggtgtacgtaaagggaggctcaagggaacactctactaccattactattcgaggacaacaaaagtaaatagaacaagacacagccacttttcaatcacaatcactgttttactacgttgtgcaagataaatgcttctgctctgtcttcccatttatgtaccataatattagt

SEQ ID NO: 12877 - DNA, 600 bp, Chicken  19866894216893_1
tcccaaccaccatgaagggctgatccccaatccccttcacgcgatgcttgctggccctttactccacctggggatcagtgatcaccctgatcccaagtcaccgggcagactcaaaacccaacaccatcttactgaagctcctgagctggagaagaacccaacgggaagcagtgcagcagaaaggagctgagcatcgctgcaatcacacacacacaccaaggccaagggctcggcttggagcagatgccctgtcccaacacgcagggctgcaggagggccgtgccagcccttctccacccmtgcacagcacttgggggagagaaacctctgactgtttttttatcatcattattagggcagcttgccagcctttccgtatcactttagaagtgcaaaacagcctaatctggatctcaggttcacacctagtatttgaatgatgttttgggaccaagcccagttcttaatgtggaaggatgttacctggtagctcgggagtaaggatcagtgctcatacatcatttctttccacagggttttcccatgtgttttgtattaggagctgtcctgtgccctatagcactgattgcagaaaagcct

SEQ ID NO: 12878 - DNA, 535 bp, Chicken  19866894216894_1
ctgtgtaggggcagacatttaggaaggtgaaaacattctgaaagagcctgggacacagtatgtgttcttggcagtaggaatacctttttttgttttttacctgctctttctcttccattctcaccaaaagaatatcttatctcctttcccctgctgcttcagcacttgtgttctcagattgctaccaacctaacgggagttgaagtcagatgtatctttctggaatgagccaaagtaatacaactgaaacaataaacttgagagtaatcagatgcaataaaaatgcaaggaaatattttraatactgtcaattaactccacagtgtttaaagtaattaaaaaattgattgtcaccttaaagttgtatctatgtacgctggtatcacagctcctgatggatgcaccatgtgaaatgctttagaaatgtagcttgcattagagataagaagatttttttgtgccccttgtagctagttcatataaaatgtcaaaaggtctccttgcattgttggtggagatgtaattatgtagctca

SEQ ID NO: 12879 - DNA, 579 bp, Chicken  19866894216897_1
agtactccctccagaatctgcgtcaaggagtttatgattttatccacagaacccaactcgctgacaacaaaaaggaagagctcttcagattagacaagatccctcagtaaatatactggctcgactgagctgtgtgcatcattggtttaggttcttccaatgcaacttggacaagtcactgcctcagcctccctaaggacatgccacagcacagtgcaaatgcagggcttgctatcacaaaagctttcttcatacacttttcaccagaaagcagaaagtcaaagcatgtatgtattgctrtaagatctttcagcaacaaactacagatatttgccatctcaaaagaaaacttcattataaggcatcagatttctctccaaatcactaagggaaaacactcaaacatactctcctgagttcttatgttcagcggtgatcattaaacatacatgcaaaatacctacctcttccactgcctcagcaggatgagaagaagggtacacagcatagagcccagctgcagacaagatacccacatgggaactagaagctaagaagaaacatcacaagagttacagg

SEQ ID NO: 12880 - DNA, 600 bp, Chicken  19866894216900_1
actcaccttcctagaccctcccattgttatccgctactgattttccacatgggaaacaaagaagtaggcaaaagaagtcctcaggcgatcaaaaggtacttcagggccctgggaagacttctggagggcatgggagcacaagttgcattctcctcagtcctctcagttagtgactgagatctacacaacagcaacagggtggacacactgaaggattggctttgcacgggatgccacactgtggagggcatgggagcacaagttgcattctcctcagtcctctcagttagtgactgagawctacacaacagcaacagggtggacacactgaaggattggctttgcacaggatgccacactcagggctttgggtactatggcttgggacgcagccttgagaatgggcgaatgctggcagcaaatgggagccatctgactagaagggccaaaaatattcttgggaacaagttggctgggctggttagcagggctttaaactaggtatgggagaagggagtgtactgggtgacagaggagcacatgggaatggtgtcactgtgggaggtggtaatggaaaccccagacttgtcccagaggtat

SEQ ID NO: 12881 - DNA, 600 bp, Chicken  19866894216902_1
aaataccatagctatccagtagaggtctcaatttcttcatgtcaaatgcagctaaaacctcattgtcttcaaacttagatttattatccctatgatttttatcctcttccttgtaagcagactttcatagccagaactgtgctgtcaccaacatggaagaaatgaagatcttcgctaactcctgctttgcaattcagaattattatttccaaataccagtaaagaaatgggtgactccatggtggtcaaacagaaatattcccagctagttcctcattctcctgccagtagtcatagtcrtctgccaactgcagatgtaccataattaagaagcttaagaagaagatccttcctggaagtcctataaaaatgaactgttgtttcagtgtgggagtgtgcagcacctgctcaaacaggagctggattccttcagcggcagtggttattcactttcatgatgggcaaggtgtttcctcctgctgcaccttgaagacatttgttcctgtttccgagggttctgactagtactgcctcggccaggaacagctttcaaaagctgcattcagagaagcctgaaattgtatacacagtttctgatcc

SEQ ID NO: 12882 - DNA, 600 bp, Chicken  19866894216905_1
gcatctcccatgaagtgcatggcacctgggagttgaagacacaatgtgacaggctttaggaagaagtgttaaagccttaaataatgttcgacctatcaacgctctctgcttttaaactgttagaatttgaactttggccacaaaaaaacatactccgttcacacatgattgcaattgcattttcctcacttgttagccttgtaactgcacctgggacccaacggtcagactatgtcccatctcacatgtgtgtcagcattgagttaacaactctgcctgtaatggaagagccacaacagwctgtcagctctggccgtaaccgtagagcataaccagagctatttggggagaaaaaaatggttataaacatacccttgtgccattttatactgtttttttattattttgcctttgttgcattttaatcagagctcccagaatagtcaaatagtggatgcaggacaaaaaaaaaggcgaattctttgacacatagaaaccgctggcttctgaaagtaatggggtcatgcacaagctagtccctgtccattgccatgttggtttggctagggtcaatgctcctacctttattcagtgccattt

SEQ ID NO: 12883 - DNA, 600 bp, Chicken  19866894216908_1
tacagctaagccagtgccttatggtgaatgctttattccagccttgcacagcagggtttctattaggacactgagagatgcaacaaccacaaagataccgtaatacttgctcaggggacactgcaattaacacactgcccttccctttaagatcatcatcagtttatacagccatgactgtagcttcttgcttggggcagtgctggagaacagaaatcacacacagaactggaggggacggaagggacctccagagatcagcaagtccaaccccaatggaaatggcaagcttagcttatygtcttctggctcatctcttcttgatgttctcttgcccaggcaaactcactcttcaggactttgtagctactccatttgttttcccagtttttctaaatcctttttttcttttttccctcctgcatatttagtcacataatccccactacaatttcctcccacatttcaaagtctctgtaatccatctatacacgaacgtcaccagctctcagactgggcccacgttatgctcaaggtggggcaaattgttcggtgaaatcatccttcagcacacagattagttctccttcatttccacct

SEQ ID NO: 12884 - DNA, 600 bp, Chicken  19866894216908_2
catctatacacgaacgtcaccagctctcagactgggcccacgttatgctcaaggtggggcaaattgttcggtgaaatcatccttcagcacacagattagttctccttcatttccacctgatgtgccagggaacctaacgtgaagctacgctgaggaacacgaacactgacacaggcatctccaagcagtcttacagagttcctatctttggctcaattattgtacggtgacttttttttttttttattcccagctttattccaagttaccaattcagccagtttgcctggtagaattccygtccctcctatcccygtctagcaggagtagttgaatgcagcatgaatactatttaacaacatgccagaagttcatgtcaacgttataagtcaatttacatgtattacgcagtgatatggctcaagctgcatttgtcctgttgtctgcagcttcagatataacaaatagtcaccaatttaattacgcgttccccacctagcaagaaagtactccatatttttcttggatggggtttatttacatcctgaatcaaacaatatagtttcccagctgccagcatctccaagcagaaggacacat

SEQ ID NO: 12885 - DNA, 600 bp, Chicken  19866894216908_3
gtcaccagctctcagactgggcccacgttatgctcaaggtggggcaaattgttcggtgaaatcatccttcagcacacagattagttctccttcatttccacctgatgtgccagggaacctaacgtgaagctacgctgaggaacacgaacactgacacaggcatctccaagcagtcttacagagttcctatctttggctcaattattgtacggtgacttttttttttttttattcccagctttattccaagttaccaattcagccagtttgcctggtagaattccygtccctcctatcccygtctagcaggagtagttgaatgcagcatgaatactatttaacaacatgccagaagttcatgtcaacgttataagtcaatttacatgtattacgcagtgatatggctcaagctgcatttgtcctgttgtctgcagcttcagatataacaaatagtcaccaatttaattacgcgttccccacctagcaagaaagtactccatatttttcttggatggggtttatttacatcctgaatcaaacaatatagtttcccagctgccagcatctccaagcagaaggacacatctgggagctcctact

SEQ ID NO: 12886 - DNA, 600 bp, Chicken  19866894216909_1
ggttgtgaagacacctgaactcagtggatcaatctgaagtgtacttttcatgtgcctgaagcttgccaatcctttataagtccatgaaaaggaaacacagacttgttgacaaggacatgggaaaaaaataagcaaaaagttaatacatgtaacaaagtagttcacgcacagtgaatagtgcagaatgcgcaaaataagtgtaaaatgattatctccctcaatcttttctaattgtagtaattataattaaaacttttccacaaagatgtgtgatgtttgaaactcattgcactgtggcarttctctatttcagattaaagaaaagataaaaattactgttcagattcctggcttggcatatcccttataaataaataattcattgtataatattgatgyaaaattcatyttttatttttcaaacagatttacataactttaacaggaatttagtgaatcttggagatttatagtatcactcctgatggtctagtagtgacactaatagttgtgytgattaatattttccataataattctctaaatgttatttcttaggatttgactcaatttcaaaatatattgtgcttgtctgttctt

SEQ ID NO: 12887 - DNA, 600 bp, Chicken  19866894216909_2
gacttgttgacaaggacatgggaaaaaaataagcaaaaagttaatacatgtaacaaagtagttcacgcacagtgaatagtgcagaatgcgcaaaataagtgtaaaatgattatctccctcaatcttttctaattgtagtaattataattaaaacttttccacaaagatgtgtgatgtttgaaactcattgcactgtggcarttctctatttcagattaaagaaaagataaaaattactgttcagattcctggcttggcatatcccttataaataaataattcattgtataatattgatgyaaaattcatyttttatttttcaaacagatttacataactttaacaggaatttagtgaatcttggagatttatagtatcactcctgatggtctagtagtgacactaatagttgtgytgattaatattttccataataattctctaaatgttatttcttaggatttgactcaatttcaaaatatattgtgcttgtctgttcttttattccttcccatttcttgaaaagttagcaagatgcagtctggccatttctaggaaaaaggaaatcctgatgctacgaagcaacaggcaaatatcaca

SEQ ID NO: 12888 - DNA, 600 bp, Chicken  19866894216909_3
caaggacatgggaaaaaaataagcaaaaagttaatacatgtaacaaagtagttcacgcacagtgaatagtgcagaatgcgcaaaataagtgtaaaatgattatctccctcaatcttttctaattgtagtaattataattaaaacttttccacaaagatgtgtgatgtttgaaactcattgcactgtggcarttctctatttcagattaaagaaaagataaaaattactgttcagattcctggcttggcatatcccttataaataaataattcattgtataatattgatgyaaaattcatyttttatttttcaaacagatttacataactttaacaggaatttagtgaatcttggagatttatagtatcactcctgatggtctagtagtgacactaatagttgtgytgattaatattttccataataattctctaaatgttatttcttaggatttgactcaatttcaaaatatattgtgcttgtctgttcttttattccttcccatttcttgaaaagttagcaagatgcagtctggccatttctaggaaaaaggaaatcctgatgctacgaagcaacaggcaaatatcacatatcctcctt

SEQ ID NO: 12889 - DNA, 600 bp, Chicken  19866894216909_4
ccctcaatcttttctaattgtagtaattataattaaaacttttccacaaagatgtgtgatgtttgaaactcattgcactgtggcarttctctatttcagattaaagaaaagataaaaattactgttcagattcctggcttggcatatcccttataaataaataattcattgtataatattgatgyaaaattcatyttttatttttcaaacagatttacataactttaacaggaatttagtgaatcttggagatttatagtatcactcctgatggtctagtagtgacactaatagttgtgytgattaatattttccataataattctctaaatgttatttcttaggatttgactcaatttcaaaatatattgtgcttgtctgttcttttattccttcccatttcttgaaaagttagcaagatgcagtctggccatttctaggaaaaaggaaatcctgatgctacgaagcaacaggcaaatatcacatatcctcctttgaagagaccattcatgttccaggtgacaaattttgaagcactgagaataaagcttagtcttatctgtctatttgtacaacttttcaggaagaagaagtgactaa

SEQ ID NO: 12890 - DNA, 599 bp, Chicken  19866894216911_1
  misc_feature (1)..(20): n is any nucleotide
nnnnnnnnnnnnnnnnnnnngtctttgtggagacacagtgggagccctacagctgcgtcctcactggggacagggctgggctcagtgcccagagcccttggagggagcgtgctgtgcgtgttcccacttgcagaagctgtgactatacaggcatcccccccaagcatgctagtctttctactgtggaaggaaacctctggaactgtcagagccttgagcagtatctgcagaagtgggttagaacttggaacttaatgaatgggctgcaggactcctgagcaataggctaatgtgcccatmcaggagctttgttgttttggrgctgtttggtctgaacttgtttaaaagcctgtgcaccatagtgcaaaagcagggggtaagagggttggggcccatttttctcctgctttgcctcccagctgttgcttggtgttcagttcagctgttgcagctgatgcctatccacaagtgtgagaagggataccaaggtctcagctatttaaactctgacacctgtcctccttctcttgcagctgacatcagccttgctgactggggtcgcaaggccattgagattgcagagaatgagatgccggggc

SEQ ID NO: 12891 - DNA, 600 bp, Chicken  19866894216911_2
tctttgtggagacacagtgggagccctacagctgcgtcctcactggggacagggctgggctcagtgcccagagcccttggagggagcgtgctgtgcgtgttcccacttgcagaagctgtgactatacaggcatcccccccaagcatgctagtctttctactgtggaaggaaacctctggaactgtcagagccttgagcagtatctgcagaagtgggttagaacttggaacttaatgaatgggctgcaggactcctgagcaataggctaatgtgcccatmcaggagctttgttgttttggrgctgtttggtctgaacttgtttaaaagcctgtgcaccatagtgcaaaagcagggggtaagagggttggggcccatttttctcctgctttgcctcccagctgttgcttggtgttcagttcagctgttgcagctgatgcctatccacaagtgtgagaagggataccaaggtctcagctatttaaactctgacacctgtcctccttctcttgcagctgacatcagccttgctgactggggtcgcaaggccattgagattgcagagaatgagatgccggggctgatgaagatgcgggagatgta

SEQ ID NO: 12892 - DNA, 600 bp, Chicken  19866894216916_1
gaaatcaccgattaattttatgactgcgattttcatcgcagaaggtggagacttaaaatattactctccccagtgcagctgcaggttccctctcgctccgccttacccaacatactgctggagaaaccagtgagacaaaacattgcaaatcaggtcacctcttctctttgataaaaatgcgcagacaagctccagttcttgctactgaaatctcccagggtgctgagatgctgagcacgggaagttaccttcacagatttcccaacagcagatagcaaataaacaagccacgtgcacttyttccaggtctctgctgcctgggaaaggctcctgcacctctcagagtggtgagggcaggctctgagccaggactccatccagacacttgtgcccagcagctacagctgtctgagcattgcactgtttttggccaagacaaggatctccacatcttgtaggacccattcataaaatgcacactgctgaactatgggtgaccttctctgggtgctatagarcttgaggtcaatccctcctcacacccatccacacccaccagctcatctacatccaccagctctgctttgccatgtgctttta

SEQ ID NO: 12893 - DNA, 600 bp, Chicken  19866894216916_2
ggtgctgagatgctgagcacgggaagttaccttcacagatttcccaacagcagatagcaaataaacaagccacgtgcacttyttccaggtctctgctgcctgggaaaggctcctgcacctctcagagtggtgagggcaggctctgagccaggactccatccagacacttgtgcccagcagctacagctgtctgagcattgcactgtttttggccaagacaaggatctccacatcttgtaggacccattcataaaatgcacactgctgaactatgggtgaccttctctgggtgctatagarcttgaggtcaatccctcctcacacccatccacacccaccagctcatctacatccaccagctctgctttgccatgtgcttttagagaggtgagcataatggactcctgatcagcccaacattactacaacacacaggtggaagacagagcttcccattgctttagcaaagtacagcagatgatgagataaagcctgaccctgatcctatagaaattagctggaattttgtcattgttggagctgctccacttcaggagaatacagaatcagagcagggaggcagagggcaggaactgaagc

SEQ ID NO: 12894 - DNA, 600 bp, Chicken  19866894216930_1
cttggtgtttcactaatgattaaaccctagttcttcatgtacttgatcatgcaaatgtatggtacgcatccatttgtctgaactctatcagcagttttacaccattgcacaaatgactgagagaccagaaagaatgcaaatattaaagctcattgaaaaataaatacatacatatctatatctagaagagctgaaggaaacaatttacatgttgaaccctggaagaatgtggaaacagcatcgaaacagacagaacgcactctgtatttacccagtgcctttaatggatttttttttttktgtgtgtgtgtggaagacctgaaggattgggctattggatactcattaaatgtatataatcaataaataccataaagtatctgtgtgtccctccagtatggatttgagctgtagccagtgtcgatggacatgctcctaattgacttctgatggtgctgggtttgaccctatcatggtaaaatgggagacttttagaaatgtactgcggctgtctactgaccaagatcaacagggcaatttgcacatacgtaataccatgtgcatgaacaaatctgctgcatccaattttgaaccattctg

SEQ ID NO: 12895 - DNA, 600 bp, Chicken  19866894216942_1
ggctaccaatcagcagtaatgttgcattctccagttggcagctatgaagtgaaaatccaaaccaagcatagttttcttccccattcaccatccagttggcatcctctacagacagacgtcctgacagaccaggaaaatatgaattaaattttgtaacatggcatacaaaattctattagccatcatccactgacaaactcatcctatggtgagaagtttctactagtattactaccatccttgatatgacaccagctattgctagcttcattgcagagcaacgctaaatctgcaactgtrcactttcatcaaagcctttgttcaatgcagcctgcttctaaagaatcgcaatagcctgcatgaagtacatgacagctaccagtcaagtctgttctgaactgatgagtccttagggatgggaaaaagctgaaactatttattggaacttttcattcttcaaggttggtggaggagcattaaataattctggctttaattcakcaaatcattcaatcagttttttggtttaaaaaaaaaaagtcactgatgttttgaaatataaaatgcatttcagttgtggttttcagttttagataaagt

SEQ ID NO: 12896 - DNA, 600 bp, Chicken  19866894216942_2
tcctatggtgagaagtttctactagtattactaccatccttgatatgacaccagctattgctagcttcattgcagagcaacgctaaatctgcaactgtrcactttcatcaaagcctttgttcaatgcagcctgcttctaaagaatcgcaatagcctgcatgaagtacatgacagctaccagtcaagtctgttctgaactgatgagtccttagggatgggaaaaagctgaaactatttattggaacttttcattcttcaaggttggtggaggagcattaaataattctggctttaattcakcaaatcattcaatcagttttttggtttaaaaaaaaaaagtcactgatgttttgaaatataaaatgcatttcagttgtggttttcagttttagataaagtagaataagctaaaaaaactttagaagttattggaaaactcaattatgtggttctgatgaagctttgagtatctgcatatcctacctcattttatactaattttatttattcatgtatgtggcctttccttcctctttcacagcagtccccatcacctatactcactagctgtttcacttgtagcacttctctttgtccaca

SEQ ID NO: 12897 - DNA, 600 bp, Chicken  19866894216951_1
aacaagcaaggtcaaaagaattctgtagggaataagtccaggagaagaatgcttcttcctaagtttatggaaaatcacagatgactcaagatacataaccactcagcataatgtgagtttaaaacacatgcactgtagttaagacatggttttcaagctatgaaaattaaaaagaatttgtggcagagtgcaaccagtcattatattcaaagatttctacaaaagtataaggggatggtgacaggaaatagtattaagaaattgcagtgaactgagaaaagccagatgtcagatggaaawcatcactcaggtattcagtactcagacagcttcgtactgttatgtcttgcactatatagaggaatgaagcaaggcaaaattttattaagttctatgaatttttgtctcttaaaaatcagtgtttgtgataactcwttgcctttttagctcaatgaaaagtagccaaatgaaagggtaaggaatttctgaccagtttttcaaccattaagctacctttctgcacagtgtcacagtccaatacactttgaatctgcaaaataatttctaacagcaagaaccctaggcactctcytgacttca

SEQ ID NO: 12898 - DNA, 600 bp, Chicken  19866894216951_2
tagttaagacatggttttcaagctatgaaaattaaaaagaatttgtggcagagtgcaaccagtcattatattcaaagatttctacaaaagtataaggggatggtgacaggaaatagtattaagaaattgcagtgaactgagaaaagccagatgtcagatggaaawcatcactcaggtattcagtactcagacagcttcgtactgttatgtcttgcactatatagaggaatgaagcaaggcaaaattttattaagttctatgaatttttgtctcttaaaaatcagtgtttgtgataactcwttgcctttttagctcaatgaaaagtagccaaatgaaagggtaaggaatttctgaccagtttttcaaccattaagctacctttctgcacagtgtcacagtccaatacactttgaatctgcaaaataatttctaacagcaagaaccctaggcactctcytgacttcagtcagttagcaatcatggagcctagtcatatagccaatattaaaggtatttctgtgacacttttgcagaaaaattgagctttttgactttggacttctacatctcatgacataataacatttactaacaatttat

SEQ ID NO: 12899 - DNA, 600 bp, Chicken  19866894216951_3
atggaaawcatcactcaggtattcagtactcagacagcttcgtactgttatgtcttgcactatatagaggaatgaagcaaggcaaaattttattaagttctatgaatttttgtctcttaaaaatcagtgtttgtgataactcwttgcctttttagctcaatgaaaagtagccaaatgaaagggtaaggaatttctgaccagtttttcaaccattaagctacctttctgcacagtgtcacagtccaatacactttgaatctgcaaaataatttctaacagcaagaaccctaggcactctcytgacttcagtcagttagcaatcatggagcctagtcatatagccaatattaaaggtatttctgtgacacttttgcagaaaaattgagctttttgactttggacttctacatctcatgacataataacatttactaacaatttattttagatcagtaactcacccttccagtgaaatttcataacgtgtagtactaggcatttaacctgagacttgatttaagtgaaatcaggatttcatccaagaaaattattaggaaacattgcagagtaaaacaacagtggcaacaaagcctttggttc

SEQ ID NO: 12900 - DNA, 599 bp, Chicken  19866894216952_1
  misc_feature (1)..(56): n is any nucleotide
nnnnnnnnnnnnnnnnnnnnnnnnnnnnnnnnnnnnnnnnnnnnnnnnnnnnnnnntttgcgtgtaaaatgtgtaaaataaaaatgtattccgttaaaaaatggatcagcgcttattgctaccatgtcttaatccgcaccagtcatagagttaatggtctgtacgaacttgttgctccacagatgttcagcactaaccattttgccaaaaaaaatgatagagtgaatcgacaaaattttcctgcttgatgaggaatggcactgtaaagagtgtcacgtctcatcgctgagatcagtgagygcagttaaggtgcgctttaggtgccactctgcactgagggatgaagtttaagacattcagacattctcgtattaaaacattttagtatgagtgtttcacagttgagacagtttctgggtctaggatctgtgatgaacacaatcttttgtaatttaaatgtagttaaatgtttgrtagatttttaaaggctcagttatttcrtgagttgcaattggtatgtcttcttgttgtgacgttcacatgcttagaccactgcttttccttctctctctgtgtatggcttatgcacagtctagaac

SEQ ID NO: 12901 - DNA, 600 bp, Chicken  19866894216952_2
ctccacagatgttcagcactaaccattttgccaaaaaaaatgatagagtgaatcgacaaaattttcctgcttgatgaggaatggcactgtaaagagtgtcacgtctcatcgctgagatcagtgagygcagttaaggtgcgctttaggtgccactctgcactgagggatgaagtttaagacattcagacattctcgtattaaaacattttagtatgagtgtttcacagttgagacagtttctgggtctaggatctgtgatgaacacaatcttttgtaatttaaatgtagttaaatgtttgrtagatttttaaaggctcagttatttcrtgagttgcaattggtatgtcttcttgttgtgacgttcacatgcttagaccactgcttttccttctctctctgtgtatggcttatgcacagtctagaacttctcttgctaatgttggaaaatagaaagacggrggcgattgatgacatacaattaaaaggaaaaaaaaacagtataatttctatatctcaaagagctgcctcctgcaattagagttcgaatgctttctgcagtagctacaccttgagttttctcaaagcattttgcataccttt

SEQ ID NO: 12902 - DNA, 600 bp, Chicken  19866894216952_3
ttgccaaaaaaaatgatagagtgaatcgacaaaattttcctgcttgatgaggaatggcactgtaaagagtgtcacgtctcatcgctgagatcagtgagygcagttaaggtgcgctttaggtgccactctgcactgagggatgaagtttaagacattcagacattctcgtattaaaacattttagtatgagtgtttcacagttgagacagtttctgggtctaggatctgtgatgaacacaatcttttgtaatttaaatgtagttaaatgtttgrtagatttttaaaggctcagttatttcrtgagttgcaattggtatgtcttcttgttgtgacgttcacatgcttagaccactgcttttccttctctctctgtgtatggcttatgcacagtctagaacttctcttgctaatgttggaaaatagaaagacggrggcgattgatgacatacaattaaaaggaaaaaaaaacagtataatttctatatctcaaagagctgcctcctgcaattagagttcgaatgctttctgcagtagctacaccttgagttttctcaaagcattttgcataccttttgtgacaatttatgcatatttcaagac

SEQ ID NO: 12903 - DNA, 600 bp, Chicken  19866894216952_4
ctgagggatgaagtttaagacattcagacattctcgtattaaaacattttagtatgagtgtttcacagttgagacagtttctgggtctaggatctgtgatgaacacaatcttttgtaatttaaatgtagttaaatgtttgrtagatttttaaaggctcagttatttcrtgagttgcaattggtatgtcttcttgttgtgacgttcacatgcttagaccactgcttttccttctctctctgtgtatggcttatgcacagtctagaacttctcttgctaatgttggaaaatagaaagacggrggcgattgatgacatacaattaaaaggaaaaaaaaacagtataatttctatatctcaaagagctgcctcctgcaattagagttcgaatgctttctgcagtagctacaccttgagttttctcaaagcattttgcataccttttgtgacaatttatgcatatttcaagacacaaaacagctgaacattgactccttatcataatagacgtttaagagacagagatttgttacacaattttttttctgccatgcagtctattttgaggttgatgtatgaagcattttaggaagagagattatt

SEQ ID NO: 12904 - DNA, 537 bp, Chicken  19866894216952_5
attgctttgttcacctaaaatcctaatttagagcctatgtactgaaaagatctttttgcaactatttgctagtctaacatttaaagatgtttttatgtagattaatagaattcagatttcaatatatttttattaaatcccccctcccactttttttttaatgtatttttagcaagcacaaaacatattcagacctagatttccttgtgtgtgtgtattgttttgtttagtgtcagtcccttggaagactttgaacaaatttctctagtaattttttgagttccaagagtgcaaaaacayggtttctttcagaacattctttctcacttttgatgttatttgcgtagatgactcctgaatgcttccactgaaccactcgctgttccaccattgactggataaagctgagagcacttgtatttggctgtacatatgctatggatgttgtcaagagtgcgagtttgcatctgagaacatttagcgcctctgaaatgcaagtttgttaagactctacttcccttttcataaaaatatatt

SEQ ID NO: 12905 - DNA, 599 bp, Chicken  19866894216962_1
  misc_feature (1)..(145): n is any nucleotide
nnnnnnnnnnnnnnnnnnnnnnnnnnnnnnnnnnnnnnnnnnnnnnnnnnnnnnnnnnnnnnnnnnnnnnnnnnnnnnnnnnnnnnnnnnnnnnnnnnnnnnnnnnnnnnnnnnnnnnnnnnnnnnnnnnnnnnnnnnnnnnnnnctgctttggcaggggggctgcacactatgtgccttagacacttccttgccgtagcaaatttattcccatgaatagccttataggagaacactccgttgactctgcctgtgaaattggggctctttacatctgacctctaattgcaagtggctgtyggaaaccccaatcagcaccaaacacaaccccacaggtgaaaatttgttttgagctgaaatctgatcaaattcagtttaggatttggtgaaacctttattccatccaggttcactcagtttgttgttatccagagcaacctctttaaagagacagcataagtggaaatcatttgagtaaaattagatgtttcccatgcagatgcttatgcatgagctagccaggtgtaatcctcctgcaatcagcaagaagcagccttgcacgatttgttgagaattccctcctgagctattcatctaaa

SEQ ID NO: 12906 - DNA, 600 bp, Chicken  19866894216964_1
atgtaccagcagcaggactgccttcagagcttgctccgctgccgcagtgtgctcgtgaggcacgggggaagctgtggaggtggcttgcatttgcttctatttcattttcacaagtgcagcaggcctgcatgctaatgcaatagctgcgtgcagtggtgggctgtgggaggaagggatctgttctgtggtgcactcaggggctcctggtggagcactcgagagaggaggaagagaggcagaagtaatgcgagcggctgttttagggttttaaaagagcttgtgatgtttcctgcccaagtkgatgcacagcagatctcaagaggatggtaatggacctgcaaacctctctgtgggccggccctaataaaggacaacatctgaacgtaactggttaattgctggcatttctctgttgggtctgagaattccaaacatcataaatgcagcaataaaagtgggttaataaggcaataaatggcaatcaygaggtccctggttaacttcagctaaaaaagaatgtgtccttttacttcacctaggatggctgaagccttattacatcccttcyttgccccctgcatctgcttctcctcaggttta

SEQ ID NO: 12907 - DNA, 600 bp, Chicken  19866894216964_2
tggtgcactcaggggctcctggtggagcactcgagagaggaggaagagaggcagaagtaatgcgagcggctgttttagggttttaaaagagcttgtgatgtttcctgcccaagtkgatgcacagcagatctcaagaggatggtaatggacctgcaaacctctctgtgggccggccctaataaaggacaacatctgaacgtaactggttaattgctggcatttctctgttgggtctgagaattccaaacatcataaatgcagcaataaaagtgggttaataaggcaataaatggcaatcaygaggtccctggttaacttcagctaaaaaagaatgtgtccttttacttcacctaggatggctgaagccttattacatcccttcyttgccccctgcatctgcttctcctcaggtttatttgagcaatacrtcactttgccactgagcctctgctggcacctgcacgctctgcagacccttcccaaaggcctgccaatgctcttctgccctccaggacatagttctcctatagcaaatcccacagtaaatgactggaaactgggcagcatggacccagctgtgcagatgaagctggtgtttgt

SEQ ID NO: 12908 - DNA, 600 bp, Chicken  19866894216964_3
taaaagagcttgtgatgtttcctgcccaagtkgatgcacagcagatctcaagaggatggtaatggacctgcaaacctctctgtgggccggccctaataaaggacaacatctgaacgtaactggttaattgctggcatttctctgttgggtctgagaattccaaacatcataaatgcagcaataaaagtgggttaataaggcaataaatggcaatcaygaggtccctggttaacttcagctaaaaaagaatgtgtccttttacttcacctaggatggctgaagccttattacatcccttcyttgccccctgcatctgcttctcctcaggtttatttgagcaatacrtcactttgccactgagcctctgctggcacctgcacgctctgcagacccttcccaaaggcctgccaatgctcttctgccctccaggacatagttctcctatagcaaatcccacagtaaatgactggaaactgggcagcatggacccagctgtgcagatgaagctggtgtttgtgagcccatctggatcactcaggctcggtgcatgcggaggcaccagagtccttccatcactctgcggggcacacgcattgcagg

SEQ ID NO: 12909 - DNA, 600 bp, Chicken  19866894216964_4
tctcaagaggatggtaatggacctgcaaacctctctgtgggccggccctaataaaggacaacatctgaacgtaactggttaattgctggcatttctctgttgggtctgagaattccaaacatcataaatgcagcaataaaagtgggttaataaggcaataaatggcaatcaygaggtccctggttaacttcagctaaaaaagaatgtgtccttttacttcacctaggatggctgaagccttattacatcccttcyttgccccctgcatctgcttctcctcaggtttatttgagcaatacrtcactttgccactgagcctctgctggcacctgcacgctctgcagacccttcccaaaggcctgccaatgctcttctgccctccaggacatagttctcctatagcaaatcccacagtaaatgactggaaactgggcagcatggacccagctgtgcagatgaagctggtgtttgtgagcccatctggatcactcaggctcggtgcatgcggaggcaccagagtccttccatcactctgcggggcacacgcattgcaggcggtagtaccaggggaattcaaatacatgtcacttctttcctgta

SEQ ID NO: 12910 - DNA, 600 bp, Chicken  19866894216966_1
gggatgtgtcagcaattcaggaattgtatttcatcatagcttaattatttttttattattttttttccctatctcctcatatttggtgtctgtaaagacaaagactatttcttcgtatatactaatgtaggtatcattactgtgtgaaattatttgttctttatgtacaccagaattagtttaatagcttttactagatgtaacaacacaattaggcatttaaatcttaacatactttatggtttatgtaataaaagcacagtgatattccaatattatccttattaaattagaccttcwattaaaaatacacccaacaacagcacaagagacaacttatttttcttcagtgaaagaacagcaaaacaataagccatcaataaacacattcagtgtataaaatcagtagtgtgttaagcgctttgttatgtcacttctgaatattgtggaattttacctgtcatattttataaattatatcacattagttacttcatgagttattttcagaaagtgagaagtaaatatggtgctcatgtatcacactggtagtagattactattccttcatatcacattacaaggaatgtacaggagtct

SEQ ID NO: 12911 - DNA, 479 bp, Chicken  19866894216978_1
gagtagttgataagggtactgaatagagagagagaattgagagggtagactaaacaagtgttattctggagtagtagcaatttttctctgctccattttcctaggcttccttttcatgtgatatcttcagaaattttatgtgtgtatatatatttggttataaacataaaagcctttctcaggaatatatttcatttgttaccacaaggatgacatcttggactgccactgatgagggagattcagccatgctagaataacttttccttgatgacaagatcattcacacagtaggcacamcatcaagattcacattcctgctgaatctcactctgactgaggaaccaaacaacatcctatgattgtgccatcaccatcaggtcatagatactgctgtgtcctactgggggctggttcatttcctacaaacaaaaaacaaccaaacacaaaaactaaaccaacagcatgccatacttgga

SEQ ID NO: 12912 - DNA, 479 bp, Chicken  19866894216980_1
cctgctctgctttagctgcctggttcctgtggtgcctgccctatctcggcccatagggttaaaacggtgccggatttgtccttggatttgtcctctgagctttttgcagatcttggcagggtttccttgggggttttgagctcatacccttctgtgattaaaatatcagggtgggaaaggggagggagcgctgtgcagatgtggctgcagccgtgggctgccaggtctgctggagctgaatgtcgctgcgccgccgcatcccttccacttccttctctgcgatccccaaactgcggctcrcagagccttggcttggtggggtgtggaggatgctgttggtgaaagyatgaggtagtggtgggggcaatgctgagctacggtgaggtgaaaacaaaggtgtttgctcagaaatgccccagagctgctccccctcaggaggtctgggcactgaacgatgtgctcatgggcctcacatgcag

SEQ ID NO: 12913 - DNA, 433 bp, Chicken  19866894216980_2
cctgctctgctttagctgcctggttcctgtggtgcctgccctatctcggcccatagggttaaaacggtgccggatttgtccttggatttgtcctctgagctttttgcagatcttggcagggtttccttgggggttttgagctcatacccttctgtgattaaaatatcagggtgggaaaggggagggagcgctgtgcagatgtggctgcagccgtgggctgccaggtctgctggagctgaatgtcgctgcgccgccgcatcccttccacttccttctctgcgatccccaaactgcggctcyatgaggtagtggtgggggcaatgctgagctacggtgaggtgaaaacaaaggtgtttgctcagaaatgccccagagctgctccccctcaggaggtctgggcactgaacgatgtgctcatgggcctcacatgcag

SEQ ID NO: 12914 - DNA, 600 bp, Chicken  19866894216981_1
aggaagacagtggtgtgcagagccttggcttggcggggtgtggaggatgctgttggtgaaagtatgaggtagtggtgggggcaatgctgagctacggtgaggtgaaaacaaaggtgtttgctcagaaatgccccagagctgctccccctcaggaggtctgggcactgaacgatgtgctcatgggcctcacatgcagcgtgcagcctcagcccaaccccactgctgcgccgcctcccgccgcccctgggcaggcactgagggcatcgctgcatccatctcggcccaccttcccctgccttygggatctcctcttctcgttcctccctgctcagttggtgccaaacccggctcaccaagaggagtcccgggaatggaagcactgtgccatacgcacggccacagtgagccctctgccactccattattcctcagtgttacataaatctgcttttatacccaacctgtggacgtcaccggagctctgtccatacccataacatcattgtttccatgggaaccagcgtacttccaagggggaaaaagtaggagactaaaaaaaggacaaagaaggaacaaaataagacaaatatgtgacatatc

SEQ ID NO: 12915 - DNA, 599 bp, Chicken  19866894216982_1
  misc_feature (1)..(125): n is any nucleotide
nnnnnnnnnnnnnnnnnnnnnnnnnnnnnnnnnnnnnnnnnnnnnnnnnnnnnnnnnnnnnnnnnnnnnnnnnnnnnnnnnnnnnnnnnnnnnnnnnnnnnnnnnnnnnnnnnnnnnnnnnnnnnctcccacagtgtgccaaagccatccttgtgcaccatgatactcctaaggcttctcccagcagcccttaagaagtgcacagtggatacacacaacccccagatataaacatatctaaatgcactgccccttcaaaatgcccttaatgcccctgggaaatgcagcatgcagagagcrccagtgctctcttgggaaaggcctcactgcaaagccccattgctgcccacttgtaagcacragaccacamatcacagctgtccccacagcagggctccctgacagccacaccaggatgcttgggatacaccatccctgatccagcttgctgcattacccaagacaaaaccgttatgcaatgctccctaaacagtcacggtgaaacctttacaacatcccacaccaacacatcgttgggatatgtcacatatttgtcttattttgttccttctttgtcctttttttagtctcctactttt

SEQ ID NO: 12916 - DNA, 599 bp, Chicken  19866894216982_2
  misc_feature (1)..(64): n is any nucleotide
nnnnnnnnnnnnnnnnnnnnnnnnnnnnnnnnnnnnnnnnnnnnnnnnnnnnnnnnnnnnnnnnctcccacagtgtgccaaagccatccttgtgcaccatgatactcctaaggcttctcccagcagcccttaagaagtgcacagtggatacacacaacccccagatataaacatatctaaatgcactgccccttcaaaatgcccttaatgcccctgggaaatgcagcatgcagagagcrccagtgctctcttgggaaaggcctcactgcaaagccccattgctgcccacttgtaagcacragaccacamatcacagctgtccccacagcagggctccctgacagccacaccaggatgcttgggatacaccatccctgatccagcttgctgcattacccaagacaaaaccgttatgcaatgctccctaaacagtcacggtgaaacctttacaacatcccacaccaacacatcgttgggatatgtcacatatttgtcttattttgttccttctttgtcctttttttagtctcctactttttcccccttggaagtacgctggttcccatggaaacaatgatgttatgggtatggacagagct

SEQ ID NO: 12917 - DNA, 599 bp, Chicken  19866894216982_3
  misc_feature (1)..(55): n is any nucleotide
nnnnnnnnnnnnnnnnnnnnnnnnnnnnnnnnnnnnnnnnnnnnnnnnnnnnnnnctcccacagtgtgccaaagccatccttgtgcaccatgatactcctaaggcttctcccagcagcccttaagaagtgcacagtggatacacacaacccccagatataaacatatctaaatgcactgccccttcaaaatgcccttaatgcccctgggaaatgcagcatgcagagagcrccagtgctctcttgggaaaggcctcactgcaaagccccattgctgcccacttgtaagcacragaccacamatcacagctgtccccacagcagggctccctgacagccacaccaggatgcttgggatacaccatccctgatccagcttgctgcattacccaagacaaaaccgttatgcaatgctccctaaacagtcacggtgaaacctttacaacatcccacaccaacacatcgttgggatatgtcacatatttgtcttattttgttccttctttgtcctttttttagtctcctactttttcccccttggaagtacgctggttcccatggaaacaatgatgttatgggtatggacagagctccggtgacg

SEQ ID NO: 12918 - DNA, 599 bp, Chicken  19866894216986_1
  misc_feature (1)..(226): n is any nucleotide
nnnnnnnnnnnnnnnnnnnnnnnnnnnnnnnnnnnnnnnnnnnnnnnnnnnnnnnnnnnnnnnnnnnnnnnnnnnnnnnnnnnnnnnnnnnnnnnnnnnnnnnnnnnnnnnnnnnnnnnnnnnnnnnnnnnnnnnnnnnnnnnnnnnnnnnnnnnnnnnnnnnnnnnnnnnnnnnnnnnnnnnnnnnnnnnnnnnnnnnnnnnnnnnnnnnnnnnnnnnnnnnnnnccaatcacacaagactaccagatctcccaactacatcattatcagtatgagcctacaacactatgtaaaattawaagaaatgtacgagaggagcgtggcacagcttcctcctttgaaaaaataactgttctgttcyattaaaaacaatctgctttgttaaagacataatgggttattttcacaagcactgagcctctcttttctcattccctgtcagccagcctatgcacccttgaggctgccctgcactggcagcgctgtgcctcgtttccatcgagcctgcaaggcttaccgtttgagctttggtttctgccccggcggctgtggcgcgggattggaaaaggcggtgcttttgctgaccggcactgagctc

SEQ ID NO: 12919 - DNA, 599 bp, Chicken  19866894216986_2
  misc_feature (1)..(164): n is any nucleotide
nnnnnnnnnnnnnnnnnnnnnnnnnnnnnnnnnnnnnnnnnnnnnnnnnnnnnnnnnnnnnnnnnnnnnnnnnnnnnnnnnnnnnnnnnnnnnnnnnnnnnnnnnnnnnnnnnnnnnnnnnnnnnnnnnnnnnnnnnnnnnnnnnnnnnnnnnnnnnnnnnnnnccaatcacacaagactaccagatctcccaactacatcattatcagtatgagcctacaacactatgtaaaattawaagaaatgtacgagaggagcgtggcacagcttcctcctttgaaaaaataactgttctgttcyattaaaaacaatctgctttgttaaagacataatgggttattttcacaagcactgagcctctcttttctcattccctgtcagccagcctatgcacccttgaggctgccctgcactggcagcgctgtgcctcgtttccatcgagcctgcaaggcttaccgtttgagctttggtttctgccccggcggctgtggcgcgggattggaaaaggcggtgcttttgctgaccggcactgagctcttcttggagttagcaacctgcacggggtgggcggtggacgacttggggcttctcctcttgat

SEQ ID NO: 12920 - DNA, 600 bp, Chicken  19866894216986_3
tgcctcgtttccatcgagcctgcaaggcttaccgtttgagctttggtttctgccccggcggctgtggcgcgggattggaaaaggcggtgcttttgctgaccggcactgagctcttcttggagttagcaacctgcacggggtgggcggtggacgacttggggcttctcctcttgattttcctttcttccatttcctccgacttactgcctgcagactgatctcttatcctccgaaaggaaggaaaacgaggcaagaaacatcaccgtgcacctctacggcgttttagttcctccgaagccrggcggtctcttatttcttcaagcgggaggatcgagctgcgaggagaagctgcccaggcccgtcagcccagcaaagcaggtaagcactcagatctcctgcactgccttcagcgcacagatctcaagttatctcaagtcagatcacagttatctcaagctctgcgtcccgctactggaacacaccgcgactgctcaggtacacacagtcaaaatactgagacgcaacacaggaaggaggacagtcgcataaggcagcggccctgctggagctcggtctgttgttgagatggatccgacagcc

SEQ ID NO: 12921 - DNA, 600 bp, Chicken  19866894216987_1
tccaagaaattctagtgttcttctgagagaataaatcagtatgatcatctaacaagatgtggaatatctcatcttaatgaaatatagatgacactttttatcttatctagataagcaaaacaggttctacttacaatgacttcttctttatttttttatgcccattccttggaacaacaaaagtccccttcagaaaacctgtaaccctttatttctatgctgcagcttaaagctctttgtagttacacactttagcatctgtaataaagtggaccactgttacaacatgtcagtccagamttagtttgttccgtaaattccataggcatttactgaggtcttctcagctgcagagttgtattgctatttagccctcagaaagcatacatcccttaaagggtatggattattttgactgggttatgatgtaacagtagtctatactcagtgtgaggtaattggtgtatagcatatgaattctgcgcctgttccaaatataatggttgtttctctagcactattttagaattgtctagcactttaagagttcttcacagacatttcatcaccacttctcaactcaatcccatgtgtgttcac

SEQ ID NO: 12922 - DNA, 600 bp, Chicken  19866894216988_1
tagttcgataatgaagtgccaaacagacagaaaaccagacatgcttccctcagattactatcaatacacttttatataaatttccaaaattccttctattctccactgagaggaatttcaacagaaattgacagttttacatgtttgtaaggcctgcagttctgctttctgaacagaagttaaacctataggtatatacaaactacctaggattaatttcaaaaagggtagtttatatataaagtagcttactgggcagacattttttacatatattcatttctcaaaatactatcctcrtattttgcatgaaataacagaatgacactaacraaataagaaactaaaactctgaattacmtaatccaattgtgatcaccaggaaacatttttaacttcatgaagtgcaactagagggttctaaataagaaagtgtttgtgcacatgatgaatattctggtgaacaatatgcactcccagacaagccctgcaagatctgtgtctgcttccttaacagctatgttcaagatgagaattcattttaaactaggacagagctttttgactgtcatattaactgtattaaatatataatcccat

SEQ ID NO: 12923 - DNA, 600 bp, Chicken  19866894216988_2
accagacatgcttccctcagattactatcaatacacttttatataaatttccaaaattccttctattctccactgagaggaatttcaacagaaattgacagttttacatgtttgtaaggcctgcagttctgctttctgaacagaagttaaacctataggtatatacaaactacctaggattaatttcaaaaagggtagtttatatataaagtagcttactgggcagacattttttacatatattcatttctcaaaatactatcctcrtattttgcatgaaataacagaatgacactaacraaataagaaactaaaactctgaattacmtaatccaattgtgatcaccaggaaacatttttaacttcatgaagtgcaactagagggttctaaataagaaagtgtttgtgcacatgatgaatattctggtgaacaatatgcactcccagacaagccctgcaagatctgtgtctgcttccttaacagctatgttcaagatgagaattcattttaaactaggacagagctttttgactgtcatattaactgtattaaatatataatcccataaaacatgtaaagatttcaggacaacaatatct

SEQ ID NO: 12924 - DNA, 600 bp, Chicken  19866894216988_3
caatacacttttatataaatttccaaaattccttctattctccactgagaggaatttcaacagaaattgacagttttacatgtttgtaaggcctgcagttctgctttctgaacagaagttaaacctataggtatatacaaactacctaggattaatttcaaaaagggtagtttatatataaagtagcttactgggcagacattttttacatatattcatttctcaaaatactatcctcrtattttgcatgaaataacagaatgacactaacraaataagaaactaaaactctgaattacmtaatccaattgtgatcaccaggaaacatttttaacttcatgaagtgcaactagagggttctaaataagaaagtgtttgtgcacatgatgaatattctggtgaacaatatgcactcccagacaagccctgcaagatctgtgtctgcttccttaacagctatgttcaagatgagaattcattttaaactaggacagagctttttgactgtcatattaactgtattaaatatataatcccataaaacatgtaaagatttcaggacaacaatatctaatactattacagaggggaaaaaaagtg

SEQ ID NO: 12925 - DNA, 600 bp, Chicken  19866894217010_1
aggataaaattagttccttttacatctttaattgcaaaatgctgggttttcccatcactaattagaactgcattcctttactaaccttcagctgttgattggttcgcttcaggaattggacctcttcggcgtgtttcttctcctctatctgtcgcctttcaatttcacgcttctcaatagcttcacattttgctttctcttcgctcaccagtctttccagctcccgcttctcctcttctagctcttcaatctcggaaaataatacagatctctcgtgttttgtttgttattaatcaattytctattatggtgagacaatgctatgttgtacggtctttaaaatgctacaggaatagcagcagataatgtatgaaatgcagttcagcctcggggaggcattaagtatttggatacactttactgccatccagtggaagcagaaataattgattttgatacaaaactaataagcccataacatggcaaacttcatgtgatacagcataaggctaacagaccagcttactcttttttccatgtcagatttgccttgctctgcttgtagtgccttccgcatgccaaatgcaatgctgctctcat

SEQ ID NO: 12926 - DNA, 600 bp, Chicken  19866894217014_1
tatttaaatccaactgggatgatggtttaagaatattctggcagcacctccaatttcatctgactgcttttaactatttgtgaacaaacaactttttgttatgccttcaaagcaaaaagtaatgcatgcgtgtatctgattataatagagttagttacaattttatcatggttttgtaattttgctattggtattccacatcattacattatggacaaaagagaagtagaactacatatcccagatgacctcacggtcagagaaggaagatacatcacagaagatacatcatctggttgygcatggtctttcgcttttgcttgctgccagggagaggagtgggtgtgcttccaagccgtgcgccttcatcaagtagggctttcggttttggaaactctctcattctctctctctctctcacacacactctttctttctctctctcttatttcatttgatttattatccttactttcaattagattgtattttatcatgtcatcttgcattccaacatcatagtaaaataagttctcctccttagatcattgccactgctcygttttttttcgggaagccaaggagcccacgagcctactg

SEQ ID NO: 12927 - DNA, 600 bp, Chicken  19866894217014_2
ccttcaaagcaaaaagtaatgcatgcgtgtatctgattataatagagttagttacaattttatcatggttttgtaattttgctattggtattccacatcattacattatggacaaaagagaagtagaactacatatcccagatgacctcacggtcagagaaggaagatacatcacagaagatacatcatctggttgygcatggtctttcgcttttgcttgctgccagggagaggagtgggtgtgcttccaagccgtgcgccttcatcaagtagggctttcggttttggaaactctctcaytctctctctctctctcacacacactctttctttctctctctcttatttcatttgatttattatccttactttcaattagattgtattttatcatgtcatcttgcattccaacatcatagtaaaataagttctcctccttagatcattgccactgctcygttttttttcgggaagccaaggagcccacgagcctactgcccccctgtcacgagcacagatttatctagataactctgtgacaaatttcccacagatttagtagcatcaagaaagccttaacagcaayctacctcattgtct

SEQ ID NO: 12928 - DNA, 600 bp, Chicken  19866894217014_3; identical to SEQ ID NO: 12927

SEQ ID NO: 12929 - DNA, 600 bp, Chicken  19866894217014_4
gaaggaagatacatcacagaagatacatcatctggttgygcatggtctttcgcttttgcttgctgccagggagaggagtgggtgtgcttccaagccgtgcgccttcatcaagtagggctttcggttttggaaactctctcattctctctctctctctcacacacactctttctttctctctctcttatttcatttgatttattatccttactttcaattagattgtattttatcatgtcatcttgcattccaacatcatagtaaaataagttctcctccttagatcattgccactgctcygttttttttcgggaagccaaggagcccacgagcctactgcccccctgtcacgagcacagatttatctagataactctgtgacaaatttcccacagatttagtagcatcaagaaagccttaacagcaayctacctcattgtctctcagatgagccggaacagtgaggacattgagttgctcataacagaaggaaactgtgctacgcttattgtattaataaaacaatgatcagaataaaatatcagtaaacttaaaaaaaaaacaaaaaaaaaacagatgatttagaacaataccactgaa

SEQ ID NO: 12930 - DNA, 600 bp, Chicken  19866894217014_5
ggaaactctctcattctctctctctctctcacacacactctttctttctctctctcttatttcatttgatttattatccttactttcaattagattgtattttatcatgtcatcttgcattccaacatcatagtaaaataagttctcctccttagatcattgccactgctcygttttttttcgggaagccaaggagcccacgagcctactgcccccctgtcacgagcacagatttatctagataactctgtgacaaatttcccacagatttagtagcatcaagaaagccttaacagcaayctacctcattgtctctcagatgagccggaacagtgaggacattgagttgctcataacagaaggaaactgtgctacgcttattgtattaataaaacaatgatcagaataaaatatcagtaaacttaaaaaaaaaacaaaaaaaaaacagatgatttagaacaataccactgaaagagggaaaacaggcaaacaattatttaaactaattcaacaaataaatgtccattattcagggtgtttgtagaagcaacatgatgctttttctctttattagaagaaaggccataggtcaatccagaa

SEQ ID NO: 12931 - DNA, 600 bp, Chicken  19866894217014_6
tcatagtaaaataagttctcctccttagatcattgccactgctcygttttttttcgggaagccaaggagcccacgagcctactgcccccctgtcacgagcacagatttatctagataactctgtgacaaatttcccacagatttagtagcatcaagaaagccttaacagcaayctacctcattgtctctcagatgagccggaacagtgaggacattgagttgctcataacagaaggaaactgtgctacgcttattgtattaataaaacaatgatcagaataaaatatcagtaaacttaayaaaaaaacaaaaaaaaaacagatgatttagaacaataccactgaaagagggaaaacaggcaaacaattatttaaactaattcaacaaataaatgtccattattcagggtgtttgtagaagcaacatgatgctttttctctttattagaagaaaggccataggtcaatccagaacaaaggttttgaattttcagataagtaaaatctattaaaaatgtttggactgaattccaaacaatgaacaaattcaatttgatttatcagaagtgcaggcacttttttattgttttaacgtgctttt

SEQ ID NO: 12932 - DNA, 600 bp, Chicken  19866894217014_7
aaataagttctcctccttagatcattgccactgctcygttttttttcgggaagccaaggagcccacgagcctactgcccccctgtcacgagcacagatttatctagataactctgtgacaaatttcccacagatttagtagcatcaagaaagccttaacagcaayctacctcattgtctctcagatgagccggaacagtgaggacattgagttgctcataacagaaggaaactgtgctacgcttattgtattaataaaacaatgatcagaataaaatatcagtaaacttaaaaaaaaaayaaaaaaaaaacagatgatttagaacaataccactgaaagagggaaaacaggcaaacaattatttaaactaattcaacaaataaatgtccattattcagggtgtttgtagaagcaacatgatgctttttctctttattagaagaaaggccataggtcaatccagaacaaaggttttgaattttcagataagtaaaatctattaaaaatgtttggactgaattccaaacaatgaacaaattcaatttgatttatcagaagtgcaggcacttttttattgttttaacgtgctttttttttggt

SEQ ID NO: 12933 - DNA, 600 bp, Chicken  19866894217016_1
gctcagcgtttcagaaacctgactggtctaataagtgctctcaaaaaggataatcttcagtggggaaaacgggttcttaaactgtttgctagaacatacaaacacctatctacaaagtaaatcttgggaagacactaaagaggaaatgaatttcaggctggaacacagagagatgacagcatatacaaactatttgttatttaatgcatttggaaggggttgttcttttttgtaggttttctctgttttattttttgtttggtttttatacgtgttcagtactgtgtatgttcatgcttwgactgctgtgaatgctggcagatgatgttgttagggtgagcgaaatagccccagaacctttccttctcatggacacccaagcacagggtgtatataggcagcagggcgactacacacattcgcttgtgagttgtttaaaggagagtacttgtgtgacattgcagctatttctgttgtcaccacagagcagaattaaggctctctggatccatttacagggtggtttaacctcagatttcatttgagttataacttcttatatcatcttctttaagttgcatctatctgatttataacgga

SEQ ID NO: 12934 - DNA, 600 bp, Chicken  19866894217022_1
tgcagcaaatattcccttgggatctgctattgtgcaaaatgagattcctgctgaatacaagtaaagaactacatatgatgaaaatgattgtggagaacgttgcatgagctcagcaggtttgattttaattgaaatagttaatgttctctgcaagtaaaataaataaatcaaaatacttctgaccactcaaactctccaaagtgattagacactaaaaagtgtatcaaagggaagttaatgcagcactgtctcctttctgcaagcttttaagttagcacagtttattgtgtaacttaaacrtttagttttgcttaaataataaaattaactgtacrgtgttagttatttggaatcttaagatacagttgtcgaataccaggtacctcaatgcatgtcatacctaaatgatgattacattgttatttcccaaaagaaatggcacaaatgcagataaaatgctaaagaaagctatataaattgctaaaaaagtgwatacagtggatctgtgggcaaattctctaaatcttttacatatgtactcagtttaaatgctcataactgaaagycagagcaaaggattaatatgaagactggctgacc

SEQ ID NO: 12935 - DNA, 600 bp, Chicken  19866894217022_2
aaaatgagattcctgctgaatacaagtaaagaactacatatgatgaaaatgattgtggagaacgttgcatgagctcagcaggtttgattttaattgaaatagttaatgttctctgcaagtaaaataaataaatcaaaatacttctgaccactcaaactctccaaagtgattagacactaaaaagtgtatcaaagggaagttaatgcagcactgtctcctttctgcaagcttttaagttagcacagtttattgtgtaacttaaacrtttagttttgcttaaataataaaattaactgtacrgtgttagttatttggaatcttaagatacagttgtcgaataccaggtacctcaatgcatgtcatacctaaatgatgattacattgttatttcccaaaagaaatggcacaaatgcagataaaatgctaaagaaagctatataaattgctaaaaaagtgwatacagtggatctgtgggcaaattctctaaatcttttacatatgtactcagtttaaatgctcataactgaaagycagagcaaaggattaatatgaagactggctgacctgctggcctaagattacatcaccttgagtcagtat

SEQ ID NO: 12936 - DNA, 600 bp, Chicken  19866894217022_3
tctccaaagtgattagacactaaaaagtgtatcaaagggaagttaatgcagcactgtctcctttctgcaagcttttaagttagcacagtttattgtgtaacttaaacrtttagttttgcttaaataataaaattaactgtacrgtgttagttatttggaatcttaagatacagttgtcgaataccaggtacctcaatgcatgtcatacctaaatgatgattacattgttatttcccaaaagaaatggcacaaatgcagataaaatgctaaagaaagctatataaattgctaaaaaagtgwatacagtggatctgtgggcaaattctctaaatcttttacatatgtactcagtttaaatgctcataactgaaagycagagcaaaggattaatatgaagactggctgacctgctggcctaagattacatcaccttgagtcagtattttgtgaacattattgaagtgacaaagactacaaattccagtaatatattatgagtatgtaatgtgtggggagcatgtacaggttgcactgtacgtggacacccccttccaactatttaagaagtagaaactctgacacactttgaacatcttgaat

SEQ ID NO: 12937 - DNA, 600 bp, Chicken  19866894217022_4
ttaagttagcacagtttattgtgtaacttaaacrtttagttttgcttaaataataaaattaactgtacrgtgttagttatttggaatcttaagatacagttgtcgaataccaggtacctcaatgcatgtcatacctaaatgatgattacattgttatttcccaaaagaaatggcacaaatgcagataaaatgctaaagaaagctatataaattgctaaaaaagtgwatacagtggatctgtgggcaaattctctaaatcttttacatatgtactcagtttaaatgctcataactgaaagycagagcaaaggattaatatgaagactggctgacctgctggcctaagattacatcaccttgagtcagtattttgtgaacattattgaagtgacaaagactacaaattccagtaatatattatgagtatgtaatgtgtggggagcatgtacaggttgcactgtacgtggacacccccttccaactatttaagaagtagaaactctgacacactttgaacatcttgaatatagtctgtatcccctatactatattcatactttcctctagagcactcaattgaattataactggattagtcga

SEQ ID NO: 12938 - DNA, 600 bp, Chicken  19866894217022_5
tcaaccagcagttttctcctgagcatttcagcacagctaagataaaaccagattgtcttgcaagcacgccattaccttctttctgaggtagagtacaactgcagaaacatctgtgctgctgatgcatactcgcctggctttagaaatacaaccataggattgttttcagttggaagagatatttaatagtcatctagcccatctcccctgcactgaacatggacacctacagctagatccagttgctcagaggccatccagcctgaccttgcatgtctccagggacaggggatccaccasctctctggacaacccattccagtgctttactacctttaacgtaaaggactttttgcttatatccagtctatatcttccctcctttgattttaaaccatttccccttgttctatcacaacagatcctgctgaagagtctgttcccttcttycctgtagctcccttttagatattgaaatatatactactatcagccaccttggagccaggttgaatagcctcagctctttcaagcygtcctcataggagaggtgttccatcccttggatcatttctctggacctcctctgggcaaactcca

SEQ ID NO: 12939 - DNA, 600 bp, Chicken  19866894217022_6
accataggattgttttcagttggaagagatatttaatagtcatctagcccatctcccctgcactgaacatggacacctacagctagatccagttgctcagaggccatccagcctgaccttgcatgtctccagggacaggggatccaccasctctctggacaacccattccagtgctttactacctttaacgtaaaggactttttgcttatatccagtctatatcttccctcctttgattttaaaccatttccccttgttctatcacaacagatcctgctgaagagtctgttcccttcttycctgtagctcccttttagatattgaaatatatactactatcagccaccttggagccaggttgaatagcctcagctctttcaagcygtcctcataggagaggtgttccatcccttggatcatttctctggacctcctctgggcaaactccaaaaggttcacatcttttctgtactgaggaccccgcatctagatgcagtactgcaggtgaggcctcaccagcgcagagcagaggcaggatcacctcctgctggtcatgcttcctttatgtggcccaggattggatttactgcgctacaagg

SEQ ID NO: 12940 - DNA, 600 bp, Chicken  19866894217022_7
gatccagttgctcagaggccatccagcctgaccttgcatgtctccagggacaggggatccaccasctctctggacaacccattccagtgctttactacctttaacgtaaaggactttttgcttatatccagtctatatcttccctcctttgattttaaaccatttccccttgttctatcacaacagatcctgctgaagagtctgttcccttcttycctgtagctcccttttagatattgaaatatatactactatcagccaccttggagccaggttgaatagcctcagctctttcaagcygtcctcataggagaggtgttccatcccttggatcatttctctggacctcctctgggcaaactccaaaaggttcacatcttttctgtactgaggaccccgcatctagatgcagtactgcaggtgaggcctcaccagcgcagagcagaggcaggatcacctcctgctggtcatgcttcctttatgtggcccaggattggatttactgcgctacaagggtgtattgctggctcacgtacaacttgccccccaccagtatgacaaagtccttttcaacagggctcagaccataatcatagaaaa

SEQ ID NO: 12941 - DNA, 599 bp, Chicken  19866894217025_1
  misc_feature (1)..(171): n is any nucleotide
nnnnnnnnnnnnnnnnnnnnnnnnnnnnnnnnnnnnnnnnnnnnnnnnnnnnnnnnnnnnnnnnnnnnnnnnnnnnnnnnnnnnnnnnnnnnnnnnnnnnnnnnnnnnnnnnnnnnnnnnnnnnnnnnnnnnnnnnnnnnnnnnnnnnnnnnnnnnnnnnnnnnnnnnnnnctgcaaaggaagccgagaggaacttgggctctgtgaagtcctggcatctgatcagtgcctgagctgaagcaggctgcattacccagcctggctcccctgcacaaggaaggctgcagaagacacatcaasctggcatccacaagccagcagagcagcacaggtcagtaaattggaacatgcaagtttgcagagcatgcagatacctttttttaaaatccatgtgccagaggaaagtgaagatggatgatgggaagacttaggcatagttactgtgtactttgcatgcttgccttaaatcaaaatcttaaactgcaaaatgcactgacacttctttagctcagagggatgggattccttatgtgtttggggcttttttccttaccatcagaaaagcatgtgarctgtagaaaatatactttaaaatcccg

SEQ ID NO: 12942 - DNA, 497 bp, Chicken  19866894217025_2
ctgcaaaggaagccgagaggaacttgggctctgtgaagtcctggcatctgatcagtgcctgagctgaagcaggctgcattacccagcctggctcccctgcacaaggaaggctgcagaagacacatcaasctggcatccacaagccagcagagcagcacaggtcagtaaattggaacatgcaagtttgcagagcatgcagatacctttttttaaaatccatgtgccagaggaaagtgaagatggatgatgggaagacttaggcatagttactgtgtactttgcatgcttgccttaaatcarctgtagaaaatatactttaaaatcccgtctttcaaatgcacaccattttacagaagctggcaaagtcctgtggctccttacttgttatagatcttctatctgactgccatgggagccagccacataatagctgatgcttacaattcacttagcagcagctatcctgcttttttttttttttcctccaaaagagaata

SEQ ID NO: 12943 - DNA, 600 bp, Chicken  19866894217033_1
ccatgtaagcatccaattcctagcactgtgtgttgcacagtaaggaaacaagaaagaaaactgaagttttacaaatactactactacagctgctagattttgtacaataaatttgtttcactaaacacttgcttactaaagtgtctaagcttactaagtggctaaattaatctgttatattttttaaagtttatataaaatctgtctttaggaacaaagcaaattaactgttcatctcctaaaatactttgcttccagatctcagctatattttttcaaggcactggaaatccatccttkccgtattattacaattggtgatactatctctaggctcatcatcttcagagacagaaaactgctttccactacagtacgttataagtttggggcatctctatacagcagattccccagtgctgaagagttttaatgaaacacagagttaacaacatacaagcaaagcaaagctgtctttcctaacccaaaagctgttgatgtgatttcagtatgtaatggagtcttgtgtgtcttaaagctgtcataagacagaggcagaaggttacccagaaatgatcgatgaaagagagaatctccatg

SEQ ID NO: 12944 - DNA, 599 bp, Chicken  19866894217045_1
  misc_feature (1)..(56): n is any nucleotide
nnnnnnnnnnnnnnnnnnnnnnnnnnnnnnnnnnnnnnnnnnnnnnnnnnnnnnnntttatttattttttgcttattttcttattattgaaaattgctccaggctgcacgtgtattcctttgactgccagtacaaagaagaaatacttgctggttttgctttagtatacagtatttttttgcccagatgcaaaaataatagaagtagccaggcagtgctctaaattgactggctcattatccaaaatatattatggtactagcatgcacagttcaaacagcacttaatcatttctcatgygaatcatgcagtacataggcactgtactgtctatgaagctttcttcaattattccctccctcttattccaatccacacccttcatctagaaaggcaggaataatgagcaacacagagtgacaagccatcataagaagagaagagataaagatggaatgacacttagtttcgacagtacattctgtacatagcataaatcagacataaagtcgtttgaaaaaggcagaaaagaacagaattaagatggaaaaggcttacatatttcattgatttctccaarttgagaaaatgagtgattc

SEQ ID NO: 12945 - DNA, 600 bp, Chicken  19866894217045_2
cacttaatcatttctcatgygaatcatgcagtacataggcactgtactgtctatgaagctttcttcaattattccctccctcttattccaatccacacccttcatctagaaaggcaggaataatgagcaacacagagtgacaagccatcataagaagagaagagataaagatggaatgacacttagtttcgacagtacattctgtacatagcataaatcagacataaagtcgtttgaaaaaggcagaaaagaacagaattaagatggaaaaggcttacatatttcattgatttctccaarttgagaaaatgagtgattctagcaaagaacagtcaggcacaatttatgcatgaaatttatacattaaccctttctatttgaaaagttagttcctgaagactttgtgtctgaagtcctagaaaacagtcagcttcagctcgcagaatcatgttatgccatatttcaacatgtgtgggatagaggagctgtcataggaatgtataaagaactgtcagtttctaaagggcaagaggcagcaactctgcatgaaaaaggcatttcctaaaatccccaagagcaaattttgctgctaggacacaa

SEQ ID NO: 12946 - DNA, 600 bp, Chicken  19866894217056_1
cagctctgtgttcagcctgctcagtgctgggaccaaatgcatgcaaaggggagaagtgcagcaaggagcacagcctggggctggctgtaagccctctccagttgcagggcggcagggatctgccccccccctgctgctcttcttacaggctttggatgtggtgctggtcatgcatgctgagctcttattaaagaatcatagaacggttggcttggaagagaccttagagctcacccagtctcaacctcatagaccgggctgttcagggccccatccagcctggccttgagcacctccagrgatggggcacccacagctctgggcagcagtgccagcgcctcattgccctctgaagagtttcttccaacatctaacataaacctgcagtttttagtttaaaatggtcccccttgtcctctgtcacatacaaagttggtctccatgttcactaaggatggatatgaggctggtcgtctgtattcgagcatttctgtgtattgctgtgtttaagtgtctgttggttgtaccttgaagtaggatccttgtggtgctggggagaaggggagtgggtctcttcctctcctttataagacaagctca

SEQ ID NO: 12947 - DNA, 600 bp, Chicken  19866894217056_2
ctgaagagtttcttccaacatctaacataaacctgcagtttttagtttaaaatggtcccccttgtcctctgtcacatacaaagttggtctccatgttcactaaggatggatatgaggctggtcgtctgtattcgagcatttctgtgtattgctgtgtttaagtgtctgttggttgtaccttgaagtaggatccttgtggtgctggggagaaggggagtgggtctcttcctctcctttataagacaagctcacaactgctttgctagaaagcagtgaagagagcaaggtagttatttgctygatgacaaatataaaytcaggactcattgatccagaaacattgcttttctctgtagagaccgtcgcagaagcttaattttaaatgtggatgcatgctcttgaaaggatgtggttgggatattctcttagatgccaacttttctcaagtgttttctcagaggtttctccttgattgcctgcaattcatcttctaaaaccaagggcagcgcttttgccgagcaggctgtcacgtctctgagtaattacctcccgtgtcttgcatatgtgcctgctaatgcatcctggaatgaacttgtgtct

SEQ ID NO: 12948 - DNA, 600 bp, Chicken  19866894217056_3
aacatctaacataaacctgcagtttttagtttaaaatggtcccccttgtcctctgtcacatacaaagttggtctccatgttcactaaggatggatatgaggctggtcgtctgtattcgagcatttctgtgtattgctgtgtttaagtgtctgttggttgtaccttgaagtaggatccttgtggtgctggggagaaggggagtgggtctcttcctctcctttataagacaagctcacaactgctttgctagaaagcagtgaagagagcaaggtagttatttgctygatgacaaatataaaytcaggactcattgatccagaaacattgcttttctctgtagagaccgtcgcagaagcttaattttaaatgtggatgcatgctcttgaaaggatgtggttgggatattctcttagatgccaacttttctcaagtgttttctcagaggtttctccttgattgcctgcaattcatcttctaaaaccaagggcagcgcttttgccgagcaggctgtcacgtctctgagtaattacctcccgtgtcttgcatatgtgcctgctaatgcatcctggaatgaacttgtgtcttctgcatcgctgccaa

SEQ ID NO: 12949 - DNA, 600 bp, Chicken  19866894217056_4
ttaattttaaatgtggatgcatgctcttgaaaggatgtggttgggatattctcttagatgccaacttttctcaagtgttttctcagaggtttctccttgattgcctgcaattcatcttctaaaaccaagggcagcgcttttgccgagcaggctgtcacgtctctgagtaattacctcccgtgtcttgcatatgtgcctgctaatgcatcctggaatgaacttgtgtcttctgcatcgctgccaagcggtggattctcagtttgcaaagtgcttctttttggttgtgttgttacttggccrggttttgctcatcctgtaattgtgcgtttgaccattattgttatttaggtgggagggatcttcccatttctgatcgagccttgcgcctgtttgccagcttgtcattgaattcttcttgccgtgttcccaagtgtgacctctgtggtgtgatgtcacgtctgagatttaaatgcaactttaatgcattatcattaaatagtgaactaccacaccatgctgggtataatccatctaaaagcagatgatgactgaatgggctttttaagcagatgagtgctcgctttagggtattcatgcaga

SEQ ID NO: 12950 - DNA, 599 bp, Chicken  19866894217060_1
  misc_feature (1)..(67): n is any nucleotide
nnnnnnnnnnnnnnnnnnnnnnnnnnnnnnnnnnnnnnnnnnnnnnnnnnnnnnnnnnnnnnnnnnnatttagtagagttcatgagtaatgccacactaaggagctttcaatcagtagcgaggtagataggacctgtcatgcccatttgcaatagaagctgggatctgatgatataaaattatcttcagactgctctccctgagccagccgagatcctgtcagattcctgtgccactgcacacataataacacagtcacatttaaagacattcagatttgaagtctttgtattcagcttytgtgttgtagtatataatatcttcactgtttcaaattgaactgaatttcatttcatatttaagctttagctcagtgtcacgcaaactctggcctaaccaatggtgaaaggggcttactggctcatttaaattccagtattctaggcatgaagatttcccagttactagctcttcattaaaaaaaaaaaaaaaaggaaaaaaaaatcagatatatctttaaggatggcatttaaatgttcctttcatgtcacgagcagttagcacaacatgacttgtcctcatatctgatgtttctaaat

SEQ ID NO: 12951 - DNA, 600 bp, Chicken  19866894217061_1
aaactttaattttgctcccttggtagttaactttcatgctagtagacttgctacatcgatggtcttcctggaggaaaaacacctgtttgcacatagtatcagccttactgtttttatagctaactgatattattaattctgttcaatgcagcctgtagtcatgtctgtatcatctcaagtttgggtttgctccaagtcttgatgtcactctgatgaattatgtttgaaaataggatttatggttaagatacatgttttggtgagtagctggttagtcttccctactttctcccagcacartcttcaagggaagtgcaactctcataaatgaaggcacacagttgcttttcagttgaacgtaattttcctaccactggaaatgaaacaattgcttagactccagaattgctctgtgagtgacaactaactgtgcatcacaaaatttctaccagatttgaattgctaacatatcatattcccagatgagagaaagaaatgaaggtagtggttgatatccacagtttttaatayagactgctcagaagagtcaccagttacatttctttaataaaacggtggccaaataaaacaatctgcaaa

SEQ ID NO: 12952 - DNA, 373 bp, Chicken  19866894217061_2
aggatttatggttaagatacatgttttggtgagtagctggttagtcttccctactttctcccagcacartcttcaagggaagtgcaactctcataaatgaaggcacacagttgcttttcagttgaacgtaattttcctaccactggaaatgaaacaattgcttagactccagaattgctctgtgagtgacaactaactgtgcatcacaaaatttctaccagatttgaattgctaacatatcatattcccagatgagagaaagaaatgaaggtagtggttgatatccacagtttttaatayagactgctcagaagagtcaccagttacatttctttaataaaacggtggccaaataaaacaatctgcaaagcat

SEQ ID NO: 12953 - DNA, 600 bp, Chicken  19866894217066_1
agtaaaatgtgctgggagcagcccactccttctggcccctgctagctggaacaggcgatcgcattacaactggctcattcattcagagcgaaacatgggaccagccctcctcttagttctaggtcaaagagaggaagaaacaagctgcatgactcagagagcacacccagagccaagtcgggaaggagggaggagagaaccgcttggaggagcatttcgttttggttttcatagggaaaactgccccaagcagagaggaacagaggtgggataacagcacagccgaccgcaatggctctraatgaacttcccagagctgcccagacgatggagtgaccgctgtgccgttggcatttgggcaggaaaagagaaggaattgctgcacagccatgggcagaagctcccagcccyatgtgggacctgcacagtgctcactgctctgcaggatggatgcaaatgctgtgctttgcacactctggtgcaaacagggctattttcagcatgtatcttcagttcctaatggcagtgggatgtgatcccagcagcacgagctcatgtgggtgagcagagccccaaagcatccccacctgggatgtacag

SEQ ID NO: 12954 - DNA, 585 bp, Chicken  19866894217066_2
cttagttctaggtcaaagagaggaagaaacaagctgcatgactcagagagcacacccagagccaagtcgggaaggagggaggagagaaccgcttggaggagcatttcgttttggttttcatagggaaaactgccccaagcagagaggaacagaggtgggataacagcacagccgaccgcaatggctctraatgaacttcccagagctgcccagacgatggagtgaccgctgtgccgttggcatttgggcaggaaaagagaaggaattgctgcacagccatgggcagaagctcccagcccyatgtgggacctgcacagtgctcactgctctgcaggatggatgcaaatgctgtgctttgcacactctggtgcaaacagggctattttcagcatgtatcttcagttcctaatggcagtgggatgtgatcccagcagcacgagctcatgtgggtgagcagagccccaaagcatccccacctgggatgtacagcacccagaattccacacatagcccaactcctttcactctgggatgagacagcacaaattctacctttggttatcatattaacgcactctgtaagct

SEQ ID NO: 12955 - DNA, 600 bp, Chicken  19866894217067_1
tacttgttattccttatatatatacacacacacacacacacacacacatatatatataggcagactgcatttttttcctgtattttttgttcttataagtcaattataagaggatctgtagttacaaaacatgcagtggttctttactttgtatcttgctaggaaataataaatcaaatagagtttctctaggtttattgtttctacgagtgacaaaattctctttccttcatacctggctgtctgaattgaattctgtgctgctcactggtagagatgagaatttagctcatgttttawaaatgaatgaagtgttttactaggttttccttttcttcctgtgtgagtcaattacacaatactcactccagctgggactttgcacagtaatccacattactcatataccaatctcaaatttatactagaaagaatatttaaacagttcaacaaaacagaaattcagagttcaatgtcagagaattaatctttttccagatgcaacagaatctggtcattgtagatgatctcagtccatgcagctgaaaatgcagcttcatttctgtaaagtgaagcaatccttaaatgttatttttgact

SEQ ID NO: 12956 - DNA, 600 bp, Chicken  19866894217067_2
tcagagaattaatctttttccagatgcaacagaatctggtcattgtagatgatctcagtccatgcagctgaaaatgcagcttcatttctgtaaagtgaagcaatccttaaatgttatttttgactgaattaaggatccagttcttgatatcactttcgtgcaatagtcatgatactagagttgactaaaaaatcaacatatggaatttctctaacatagacaaagcctaactatgccaaggccgagtggttatttgacatttatttagggcacatatacccttaagtatggaaagttacmcttattttcagatggaaaatatctggcagactactgaagaacctttcttgtacaatgcaacattcagctttgtgttttaataagtgtgagtgttaaaggacaaagtgagagaaaaaagcctcaatgtgctattgctgtctgctttttaaagacatcctgtagttctttctgtgcattctgcagttcttgtaatttgaaatactcttctgtataggtgatttcatccagtagcatttggtaagagtctagtcacgctggcaattgtacacacgcagaatttttaatattctgatcttaata

SEQ ID NO: 12957 - DNA, 600 bp, Chicken  19866894217081_1
taccatgattctcttgcaacaaagagcaaaagtcatttgcagcctcattaacgggaatgtcagttgtaagaaataattactgtgcttagctgggaatgtcagagcctccacatgaatacgacattggtctgggcatctctctatgtggaagatagggcatgctgaagaaaggaagaaaacctataggaataaaatgttcattaaatagccattcatgccatgatgctagaataatggtggccaagagtaagaggcattattttcagagtctgagattaggcctgctatcagtgtctgctycgccctccccctccacaacaccagcccccaacagtgcactcggtaggaattctgggagcaggcagaggcaaaggcttcctttagctgtgcttcagacaccatggctatgtagctcactgagggcatgtgcacacaggctgcatgtgacacaaacatctgctcaagcaagacaagcatacggatgtttgcattttgttcttagaaatgatttaagaagtgccctggcctgactttctggagtttcaagtgctcacaatttccattaacttcggtgaggggtgggggcaagcatgcagcact

SEQ ID NO: 12958 - DNA, 494 bp, Chicken  19866894217081_2
accatggctatgtagctcactgagggcatgtgcacacaggctgcatgtgacacaaacatctgctcaagcaagacaagcatacggatgtttgcattttgttcttagaaatgatttaagaagtgccctggcctgactttctggagtttcaagtgctcacaatttccattaacttcggtgaggggtgggggcaagcatgcagcacttctgcaaacaataagtcactgttctaagccctgtgccataacaagaactatctgtctccaagggcgacattttgtagttatttatattgctttaaaygattttaactcttttgggagcaagaggatttagcagtgagaagattttttttggtagagcaatttttggtgaaaaaaaaatctggctatgatgttctgcaggtcttctaaggcttttattttccatatttcattggggggtgatgatactgctagtttgaagaaaagcaactcctttttaccatgttcctgtga

SEQ ID NO: 12959 - DNA, 600 bp, Chicken  19866894217085_1
cttgtatacccagactttccacgttcgtctgttccttctgtaacattccagttcagattccaggacctcaaatcagtcactcagaatctgagaagctctcaaagcattttgagcactttgtttaacatcacggacgaccacagcagtagaagtgacattctccttcactgcagtttatcttctgtagctacaaatttgtcttctctttctgttttctgttcttcaggccacgtacagctaacttgcttataatgagaacaagagggccatcttccaatgcagttctggttcattctcagmtcttgtccatttttgtcaggaatgaaccagtgtttttgtacggagaaaagaatctctcttttagccaccagtcactgcttatgaagttcagaccttatgcaatctctagcttgatcatagaatggcttgggttggaagggacctcaaggatcatcaagctccaaccyccatgctgcaggcagggctgccagcctccatatctaatcacctarcttttagaaaaagaaatacagaagaaaaaaacctcaacaaaaacaaacaaaaaaccccctcaaaccaccaaaccttcatgacagaaaa

SEQ ID NO: 12960 - DNA, 571 bp, Chicken  19866894217085_2
ctgcagtttatcttctgtagctacaaatttgtcttctctttctgttttctgttcttcaggccacgtacagctaacttgcttataatgagaacaagagggccatcttccaatgcagttctggttcattctcagmtcttgtccatttttgtcaggaatgaaccagtgtttttgtacggagaaaagaatctctcttttagccaccagtcactgcttatgaagttcagaccttatgcaatctctagcttgatcatagaatggcttgggttggaagggacctcaaggatcatcaagctccaaccyccatgctgcaggcagggctgccagcctccatatctaatcacctarcttttagaaaaagaaatacagaagaaaaaaacctcaacaaaaacaaacaaaaaaccccctcaaaccaccaaaccttcatgacagaaaaagctgatgccctaaaaaactgtcaacaacctcactgcaaatctgtgtcccttttgaagtgatttgataactgtagaagaacactctcatcctccagagctaattgggggaggagaaggagatgttaatattttccaga

SEQ ID NO: 12961 - DNA, 526 bp, Chicken  19866894217085_3
tttctgttcttcaggccacgtacagctaacttgcttataatgagaacaagagggccatcttccaatgcagttctggttcattctcagmtcttgtccatttttgtcaggaatgaaccagtgtttttgtacggagaaaagaatctctcttttagccaccagtcactgcttatgaagttcagaccttatgcaatctctagcttgatcatagaatggcttgggttggaagggacctcaaggatcatcaagctccaaccyccatgctgcaggcagggctgccagcctccatatctaatcacctarcttttagaaaaagaaatacagaagaaaaaaacctcaacaaaaacaaacaaaaaaccccctcaaaccaccaaaccttcatgacagaaaaagctgatgccctaaaaaactgtcaacaacctcactgcaaatctgtgtcccttttgaagtgatttgataactgtagaagaacactctcatcctccagagctaattgggggaggagaaggagatgttaatattttccaga

SEQ ID NO: 12962 - DNA, 600 bp, Chicken  19866894217086_1
taaaaataggtaacagtttggaatactttgagaacaaaaataaatatgagctggtacaattcttgagcaattcagtatcagatatttcttttcctgttgtgacttaggttctgaaagaagaaacgatcatctggatgcagtgaactcatgctcataacaactgagtggaaattcgcttatgctattgagtatcatggaacactgcaccagacaacacaggtaagaatttaaccttttaagagagtagcctcttggactttaatactgtcttcacagtctttgcaaattgccatccccccmaaaaaagaaaaccacaaatctctccaacaggactctgcaggtagtagattctgcttcatttgctatgcttttttcatttatacctcagtttgtctttcacaacaaatgcaaagttgatactttttacaagtttgaacagtcatttactattctggagacaatctgaaatctttggaatgactttttcagaagcatactatttgagtatgaaaattaaatgtgtacattacttcttaaacaaattcctctaaactatttattatgtctctgtcaacaaaatgctaacaagtgagctcaact

SEQ ID NO: 12963 - DNA, 600 bp, Chicken  19866894217090_1
ccgctgcaggaccttgcactgagccttattgaacttcatgaggttggcatgggcccacctctcaagcgtgtccgggtccttctggatggcatcccttccctctactgtgtcaactgcactgctcagcttggtatcatatgcaaatttgctgagggaaacagatagaattatcatatgtatccaattaagtacagagtgtacacagtgacaaaaaaccataggaagcagtgtaattacaatgatgagctcattattctcacagtgaagtctaaaacatgcaatacaataaatcattggtgytccttagtaggcatctctctttgattctagcagttcttctgtataggcagtagggacaagaaattgtctatagacctgtckttgtctattcaatgacactgcatctagctcattcttacatgctggactacttagagatactgggaagaaagatggttgcatgtcattggaaaacaaatgtgaaccgtaacaccttcagagaacgcatccacatggtgacaaagtattctttctttatttttccttaatagaacattgtcagaaaagaactgcatttactagagcagcagttggatgttt

SEQ ID NO: 12964 - DNA, 600 bp, Chicken  19866894217090_2
ctggatggcatcccttccctctactgtgtcaactgcactgctcagcttggtatcatatgcaaatttgctgagggaaacagatagaattatcatatgtatccaattaagtacagagtgtacacagtgacaaaaaaccataggaagcagtgtaattacaatgatgagctcattattctcacagtgaagtctaaaacatgcaatacaataaatcattggtgytccttagtaggcatctctctttgattctagcagttcttctgtataggcagtagggacaagaaattgtctatagacctgtckttgtctattcaatgacactgcatctagctcattcttacatgctggactacttagagatactgggaagaaagatggttgcatgtcattggaaaacaaatgtgaaccgtaacaccttcagagaacgcatccacatggtgacaaagtattctttctttatttttccttaatagaacattgtcagaaaagaactgcatttactagagcagcagttggatgtttcccatataaacgttagtaggcccaaattcatctcattcgaagracaaagctactacggctaaaatttaggtgaatcatttg

SEQ ID NO: 12965 - DNA, 600 bp, Chicken  19866894217090_3
taggcagtagggacaagaaattgtctatagacctgtckttgtctattcaatgacactgcatctagctcattcttacatgctggactacttagagatactgggaagaaagatggttgcatgtcattggaaaacaaatgtgaaccgtaacaccttcagagaacgcatccacatggtgacaaagtattctttctttatttttccttaatagaacattgtcagaaaagaactgcatttactagagcagcagttggatgtttcccatataaacgttagtaggcccaaattcatctcattcgaagracaaagctactacggctaaaatttaggtgaatcatttgagagcagtrttctgctgctgctgcttccttacggaactatcactgcaggcaaccaactgatgatacctttggcagaaccccttccacataaacaatgagagagaaaacagaaaagctaaaaatagcaaaggatgaagtttaaattgcattcaggtctataaaatatacctcctattgacgttgcaattcttctccctacacataagattttcgttatatgagcatcatatgtgacaaactgatgctttacaataacaacgta

SEQ ID NO: 12966 - DNA, 600 bp, Chicken  19866894217090_4
caatgacactgcatctagctcattcttacatgctggactacttagagatactgggaagaaagatggttgcatgtcattggaaaacaaatgtgaaccgtaacaccttcagagaacgcatccacatggtgacaaagtattctttctttatttttccttaatagaacattgtcagaaaagaactgcatttactagagcagcagttggatgtttcccatataaacgttagtaggcccaaattcatctcattcgaagracaaagctactacggctaaaatttaggtgaatcatttgagagcagtrttctgctgctgctgcttccttacggaactatcactgcaggcaaccaactgatgatacctttggcagaaccccttccacataaacaatgagagagaaaacagaaaagctaaaaatagcaaaggatgaagtttaaattgcattcaggtctataaaatatacctcctattgacgttgcaattcttctccctacacataagattttcgttatatgagcatcatatgtgacaaactgatgctttacaataacaacgtacagcaacaccctttattttgtatcgtaaataaacattttcaggctta

SEQ ID NO: 12967 - DNA, 600 bp, Chicken  19866894217097_1
tggaccttctgtgggctgtggggagaagtcatggcttcctccagaattctgatggtagcgtcaggccctcaaggggaatctctcaccatcacttctctcacaaacacccaggatttgcaggagacaattctgttcttttggcctcttaccagatggccaggactaggtaaagttattacagcatacctcagttctgagtctcttaagttcacagagatttgcttgtgaaactagagggaggcctagacagaagttgcatgatgccatacaaactgaactgccagaggtacctgcttactrttagctaacaaggcttgacaatcagcatgatcgttcacagcagagtcattgtggttctgcaggacatcctccattagaaactgcatggcagctagctccccatgagcaactctcctgtctgcatcattcaggtcgcacaggcataactggagaggaagagagaggctgtaaaggtttattgctcagagcccaaccgtagcaaatctgagctattatgattatgggtcatttttttggtgtatgttataagcccaaatgaagttaaagcttttagcaccgtggtcctaaaacacatatgca

SEQ ID NO: 12968 - DNA, 600 bp, Chicken  19866894217104_1
tgcttttagtcatccaatccaatgtgcctttttagcagccacgtgtctttgtgtggtactgaagcacaaagggttgagctgcccggctgagttgcatttatgtgtgcttgagagcagagtcatgctgtctgtcttgtagttcacctcagactctttgctgtaaacagttcttcagcgtggtggatgtgcagatgtctgtatagtaccgaatgagaaaagctaacagcacagctacagtgaaatccactgggactgtatttcttgcaacatcaaaataatttttccaggcaattactggartgaaattactaaactaaatcagtagtattgctgtcctgagaggtaggctttcttttcccagttcttccccytgtckttgtgatatttctgtacagtgttcctgaatctgtgtatctcatagccgttgcatgtagtgtgttttcctrttatattccagaagcattggaatacattcccacaatcattggtcagtatctgcttttctgggacaaatcatgcacacattacacaagggaatgacacarttaaaattaacgtgactcatggacataggatttggctcagggtcagcactttcct

SEQ ID NO: 12969 - DNA, 600 bp, Chicken  19866894217104_2
ggttgagctgcccggctgagttgcatttatgtgtgcttgagagcagagtcatgctgtctgtcttgtagttcacctcagactctttgctgtaaacagttcttcagcgtggtggatgtgcagatgtctgtatagtaccgaatgagaaaagctaacagcacagctacagtgaaatccactgggactgtatttcttgcaacatcaaaataatttttccaggcaattactggartgaaattactaaactaaatcagtagtattgctgtcctgagaggtaggctttcttttcccagttcttccccytgtckttgtgatatttctgtacagtgttcctgaatctgtgtatctcatagccgttgcatgtagtgtgttttcctrttatattccagaagcattggaatacattcccacaatcattggtcagtatctgcttttctgggacaaatcatgcacacattacacaagggaatgacacarttaaaattaacgtgactcatggacataggatttggctcagggtcagcactttcctgttttgtttcatacagtacttctgagtaacaggtatagaattgcaaacacyaaataaytgaagatcttgtg

SEQ ID NO: 12970 - DNA, 600 bp, Chicken  19866894217104_3
agctgcccggctgagttgcatttatgtgtgcttgagagcagagtcatgctgtctgtcttgtagttcacctcagactctttgctgtaaacagttcttcagcgtggtggatgtgcagatgtctgtatagtaccgaatgagaaaagctaacagcacagctacagtgaaatccactgggactgtatttcttgcaacatcaaaataatttttccaggcaattactggartgaaattactaaactaaatcagtagtattgctgtcctgagaggtaggctttcttttcccagttcttccccytgtckttgtgatatttctgtacagtgttcctgaatctgtgtatctcatagccgttgcatgtagtgtgttttcctrttatattccagaagcattggaatacattcccacaatcattggtcagtatctgcttttctgggacaaatcatgcacacattacacaagggaatgacacarttaaaattaacgtgactcatggacataggatttggctcagggtcagcactttcctgttttgtttcatacagtacttctgagtaacaggtatagaattgcaaacacyaaataaytgaagatcttgtgatctc

SEQ ID NO: 12971 - DNA, 600 bp, Chicken  19866894217104_4
cagactctttgctgtaaacagttcttcagcgtggtggatgtgcagatgtctgtatagtaccgaatgagaaaagctaacagcacagctacagtgaaatccactgggactgtatttcttgcaacatcaaaataatttttccaggcaattactggartgaaattactaaactaaatcagtagtattgctgtcctgagaggtaggctttcttttcccagttcttccccytgtckttgtgatatttctgtacagtgttcctgaatctgtgtatctcatagccgttgcatgtagtgtgttttcctrttatattccagaagcattggaatacattcccacaatcattggtcagtatctgcttttctgggacaaatcatgcacacattacacaagggaatgacacarttaaaattaacgtgactcatggacataggatttggctcagggtcagcactttcctgttttgtttcatacagtacttctgagtaacaggtatagaattgcaaacacyaaataaytgaagatcttgtgatctctgtaagggccatttctgtaagggaratgtgatgaagggcccttgtttggaatggctagatcagaataatt

SEQ ID NO: 12972 - DNA, 600 bp, Chicken  19866894217104_5
actgggactgtatttcttgcaacatcaaaataatttttccaggcaattactggartgaaattactaaactaaatcagtagtattgctgtcctgagaggtaggctttcttttcccagttcttccccytgtckttgtgatatttctgtacagtgttcctgaatctgtgtatctcatagccgttgcatgtagtgtgttttcctrttatattccagaagcattggaatacattcccacaatcattggtcagtatctgcttttctgggacaaatcatgcacacattacacaagggaatgacacarttaaaattaacgtgactcatggacataggatttggctcagggtcagcactttcctgttttgtttcatacagtacttctgagtaacaggtatagaattgcaaacacyaaataaytgaagatcttgtgatctctgtaagggccatttctgtaagggaratgtgatgaagggcccttgtttggaatggctagatcagaataattagttagcataaaacatttccctgagcagttggaagtagtggagcttggtttctagtgaatttggctcgcagattagatttacttttaagatggattacc

SEQ ID NO: 12973 - DNA, 600 bp, Chicken  19866894217104_6
cttttcccagttcttccccytgtckttgtgatatttctgtacagtgttcctgaatctgtgtatctcatagccgttgcatgtagtgtgttttcctrttatattccagaagcattggaatacattcccacaatcattggtcagtatctgcttttctgggacaaatcatgcacacattacacaagggaatgacacarttaaaattaacgtgactcatggacataggatttggctcagggtcagcactttcctgttttgtttcatacagtacttctgagtaacaggtatagaattgcaaacacyaaataaytgaagatcttgtgatctctgtaagggccatttctgtaagggaratgtgatgaagggcccttgtttggaatggctagatcagaataattagttagcataaaacatttccctgagcagttggaagtagtggagcttggtttctagtgaatttggctcgcagattagatttacttttaagatggattaccctaggactgccatgttagttctgctcttggtgtacgctgaaaatacactcaactgaggtggggattctctgatgtcaggctgtaaccgaagtaacaggcagcccct

SEQ ID NO: 12974 - DNA, 600 bp, Chicken  19866894217104_7
cagttcttccccytgtckttgtgatatttctgtacagtgttcctgaatctgtgtatctcatagccgttgcatgtagtgtgttttcctrttatattccagaagcattggaatacattcccacaatcattggtcagtatctgcttttctgggacaaatcatgcacacattacacaagggaatgacacarttaaaattaacgtgactcatggacataggatttggctcagggtcagcactttcctgttttgtttcatacagtacttctgagtaacaggtatagaattgcaaacacyaaataaytgaagatcttgtgatctctgtaagggccatttctgtaagggaratgtgatgaagggcccttgtttggaatggctagatcagaataattagttagcataaaacatttccctgagcagttggaagtagtggagcttggtttctagtgaatttggctcgcagattagatttacttttaagatggattaccctaggactgccatgttagttctgctcttggtgtacgctgaaaatacactcaactgaggtggggattctctgatgtcaggctgtaaccgaagtaacaggcagccccttagccag

SEQ ID NO: 12975 - DNA, 600 bp, Chicken  19866894217104_8
tgaatctgtgtatctcatagccgttgcatgtagtgtgttttcctrttatattccagaagcattggaatacattcccacaatcattggtcagtatctgcttttctgggacaaatcatgcacacattacacaagggaatgacacarttaaaattaacgtgactcatggacataggatttggctcagggtcagcactttcctgttttgtttcatacagtacttctgagtaacaggtatagaattgcaaacacyaaataaytgaagatcttgtgatctctgtaagggccatttctgtaagggaratgtgatgaagggcccttgtttggaatggctagatcagaataattagttagcataaaacatttccctgagcagttggaagtagtggagcttggtttctagtgaatttggctcgcagattagatttacttttaagatggattaccctaggactgccatgttagttctgctcttggtgtacgctgaaaatacactcaactgaggtggggattctctgatgtcaggctgtaaccgaagtaacaggcagccccttagccaggaaagagaaactgctcactcagttcctcccagcctcttggttt

SEQ ID NO: 12976 - DNA, 600 bp, Chicken  19866894217107_1
acaaactctttgtgtttcttgttcaagctgtagctcagtactttgtaccctttgaaagacttctctgcgctcctctgggttgggatttcctctgttctcctcacgtgacaggggacttctgattgagatgatcatgtccgtgcattccattgccttcagtgttttttaagcacgggcttaaataacctctctgagtggagaagcattactgaattatgacctttatttgcaaactacgtattgatttatatcatgaagtcagagaaaaattgtgtccagttattgactgtccagaaagcrtgtgtgtggtctgtcctttaccatacccttctgaatctgccaaaagaagcagtccttttaaaaatgcatatttttccaaactgctatgggagcagcctgagaccactttgtgttctgtaacttccgttagtaatacactcgaagtttgcttttctcattttagtttgatgacctgcgatgaacaaaaattgagcaaggttctccagtttatttcccctgtgcattttaatcctgtgtctaatgcaggttcctccatcaatttattttttttcctaaatcaaaagttgctatttaattttt

SEQ ID NO: 12977 - DNA, 562 bp, Chicken  19866894217107_2
acttccgttagtaatacactcgaagtttgcttttctcattttagtttgatgacctgcgatgaacaaaaattgagcaaggttctccagtttatttcccctgtgcattttaatcctgtgtctaatgcaggttcctccatcaatttattttttttcctaaatcaaaagttgctatttaatttttccaggtatttcagttgtttcaacattacaattgtaaatgcccactaaagcatcaacactcggaagtccagttttcacagagaatttgacattactgactttgttgtctttcaaaattakcattaagagcaactctgttaacatttccctttggaacaggatttgcagagcttgaggagcaataccaccccttcaaccatacgtaaattgagcagagggctgaaaatgcaatgggaatcacatcctttctattgtcagcacagatctctgactttctaacaggggataagggtttgtcttttttccttcctgtcactctttttctcttgctttaagtggacaaccccagtgaactgtggtgttatgcatcaccagaagaaaa

SEQ ID NO: 12978 - DNA, 445 bp, Chicken  19866894217111_1
aattgcccagtggaaatatcacctcacaaaaactgagacttgccttcatttgaagtccttattctgacagtcaaaaggtcagattgcttagaaagctaataaagaggatcactgatcatgaaaaatatgggattagcctgacaattgaaatgtagtctctaatctatactatagtgtggtttccttttcttagcacacgtgaaagttctaattcctgcctaaggtgttagcaattgtgttaaatatttgcaagactttttattctccctaaagatagtgtcatttaaatgtaacaggatraacatcaccttcatcgtttcaccttcattatcatcagtgcttaagttcagtttaatatcatggaaaagtagttaagactattttcaaatagttgcagaatttaagaaggtgaactgtagcactcagcacctcgagccaatgggca

SEQ ID NO: 12979 - DNA, 600 bp, Chicken  19866894217112_1
tttaagactggacagaaaagtctcaaataaaaaaaatctcagcagctaccttcttttaggacaagtcatccagttctgtcatcccaatccaaagtagaacaaaatgagaacaaccaagtgtttgttcaccaagtttcccagggcacttctgaggtgagctttaatatttctttgagggattttttccattcctctggccttgccgcagagacattgttgaaagtagcttaagaagataaagacaaactctctttctggtcagcacagcagtcgcagcggtggtgtgaggagcccttcccytggggctgcagaacaaatgccacattcaagtgccgggaagtcttggtgagggtgcatcttctgtgatccacacggagaagtttgcaatccaccgcacccggaatagcattgcaaccagccttgaagacaacagttcagacagtgtgctcaggaaacctcatcaaaggcactgatccaggggcacatgctttttgagtgcaatttatgggaacattaaccagatttaactagtgatttsagtttttttaactagcagaagagtaagatatctgtccgcctgtctatcagttagtctccatg

SEQ ID NO: 12980 - DNA, 600 bp, Chicken  19866894217112_2
aagacaaactctctttctggtcagcacagcagtcgcagcggtggtgtgaggagcccttcccytggggctgcagaacaaatgccacattcaagtgccgggaagtcttggtgagggtgcatcttctgtgatccacacggagaagtttgcaatccaccgcacccggaatagcattgcaaccagccttgaagacaacagttcagacagtgtgctcaggaaacctcatcaaaggcactgatccaggggcacatgctttttgagtgcaatttatgggaacattaaccagatttaactagtgatttsagtttttttaactagcagaagagtaagatatctgtccgcctgtctatcagttagtctccatgttctttttttctttctgttccctttctgtgcactgttattctaactggatgccaaatgcaaaataaagcatgtgttgaagaacatgatacccaataatttcagttttaaaaagatgttaaaatactcacattgcacattcacaatccagatttcctggccattaatcaaggtgcatgcatttccactgtcgtgttaactgagagacgtactgagtgttttattcatttaaactgtgtt

SEQ ID NO: 12981 - DNA, 600 bp, Chicken  19866894217113_1
tcatttacatggacagcaagatttatcaacagtaagttcaagtaatttagtaaccttaattcccacataatcttctgtagctctgtgtatccacaggtcctttccctaagaacaaaatcacagaaatatcttcagaacccaaaacctaccttcaaaggagaatcaatcacaaagctatttagatgcctatccccctccgaggggctacatatcaatgacctgagtttcagcaacttaagttcagggacactaacaacacccctataaacatgcgaaaagcatgatcttgaaataaaatcwctcagacatttgctcaattatggtaaaagttacttgatctatctactgcacaaacctatatattagctamtattcagttattaaatggcgttatttgatagcatttagttgtttaattctagaggtgcgaaaatgttcctatcacctacaggaaatactaccctcaattcagtaaaataggatcatgagcaacagtagctaaattaatcattacctgtatacaatgttttgacacaaagaacaatttttaaagcacagtcctaagcaagaaggaaatacataaatgtgtggaagaaaaaa

SEQ ID NO: 12982 - DNA, 600 bp, Chicken  19866894217113_2
tcttctgtagctctgtgtatccacaggtcctttccctaagaacaaaatcacagaaatatcttcagaacccaaaacctaccttcaaaggagaatcaatcacaaagctatttagatgcctatccccctccgaggggctacatatcaatgacctgagtttcagcaacttaagttcagggacactaacaacacccctataaacatgcgaaaagcatgatcttgaaataaaatcwctcagacatttgctcaattatggtaaaagttacttgatctatctactgcacaaacctatatattagctamtattcagttattaaatggcgttatttgatagcatttagttgtttaattctagaggtgcgaaaatgttcctatcacctacaggaaatactaccctcaattcagtaaaataggatcatgagcaacagtagctaaattaatcattacctgtatacaatgttttgacacaaagaacaatttttaaagcacagtcctaagcaagaaggaaatacataaatgtgtggaagaaaaaaacaaatagggctgagaaatgatatttgataactgtccacagaaaagcacagtccattctccatgcagaca

SEQ ID NO: 12983 - DNA, 599 bp, Chicken  19866894217119_1
  misc_feature (1)..(55): n is any nucleotide
nnnnnnnnnnnnnnnnnnnnnnnnnnnnnnnnnnnnnnnnnnnnnnnnnnnnnnncgtggtcctggggcttccggaggaagaaaaataaatgggtatcttgaaacatcactgcatcacgttgagagtgccttattttctcagtcttctctgccttaccatcaatgcaatttcagctcctgtgctgtggtgccagtctgttgggctgctgggattactgaacccctgtcagtcttctagaacattctcaccatgttcgcatgtgccccaacacttttggtctttggaaaagagggatatgytgcggctgagcatgggccatagcctggttgagatckggraacataggccacatcctgcwctttaggtggggcgtgcatgggagtagcaggccttgagcaatgctgggggagtgagtggagttgcctgaggaaatggagagaaawgctgagtcagagcagagggagaggggttacgtggarctggttctgtgttatgggtgagggacgcggccctgctcatctccttcacacaggtattgggaaacagctctgctgctttatctgtgtgcccccggggcagctgccatgccgggatggga

SEQ ID NO: 12984 - DNA, 599 bp, Chicken  19866894217119_2
  misc_feature (1)..(19): n is any nucleotide
nnnnnnnnnnnnnnnnnnncgtggtcctggggcttccggaggaagaaaaataaatgggtatcttgaaacatcactgcatcacgttgagagtgccttattttctcagtcttctctgccttaccatcaatgcaatttcagctcctgtgctgtggtgccagtctgttgggctgctgggattactgaacccctgtcagtcttctagaacattctcaccatgttcgcatgtgccccaacacttttggtctttggaaaagagggatatgytgcggctgagcatgggccatagcctggttgagatckggraacataggccacatcctgcwctttaggtggggcgtgcatgggagtagcaggccttgagcaatgctgggggagtgagtggagttgcctgaggaaatggagagaaawgctgagtcagagcagagggagaggggttacgtggarctggttctgtgttatgggtgagggacgcggccctgctcatctccttcacacaggtattgggaaacagctctgctgctttatctgtgtgcccccggggcagctgccatgccgggatgggatttcacaagcaccctgtgtcccactgggctgagcct

SEQ ID NO: 12985 - DNA, 599 bp, Chicken  19866894217119_3
  misc_feature (1)..(16): n is any nucleotide
nnnnnnnnnnnnnnnncgtggtcctggggcttccggaggaagaaaaataaatgggtatcttgaaacatcactgcatcacgttgagagtgccttattttctcagtcttctctgccttaccatcaatgcaatttcagctcctgtgctgtggtgccagtctgttgggctgctgggattactgaacccctgtcagtcttctagaacattctcaccatgttcgcatgtgccccaacacttttggtctttggaaaagagggatatgytgcggctgagcatgggccatagcctggttgagatckggraacataggccacatcctgcwctttaggtggggcgtgcatgggagtagcaggccttgagcaatgctgggggagtgagtggagttgcctgaggaaatggagagaaawgctgagtcagagcagagggagaggggttacgtggarctggttctgtgttatgggtgagggacgcggccctgctcatctccttcacacaggtattgggaaacagctctgctgctttatctgtgtgcccccggggcagctgccatgccgggatgggatttcacaagcaccctgtgtcccactgggctgagcctcac

SEQ ID NO: 12986 - DNA, 600 bp, Chicken  19866894217119_4
gtcctggggcttccggaggaagaaaaataaatgggtatcttgaaacatcactgcatcacgttgagagtgccttattttctcagtcttctctgccttaccatcaatgcaatttcagctcctgtgctgtggtgccagtctgttgggctgctgggattactgaacccctgtcagtcttctagaacattctcaccatgttcgcatgtgccccaacacttttggtctttggaaaagagggatatgytgcggctgagcatgggccatagcctggttgagatckggraacataggccacatcctgcwctttaggtggggcgtgcatgggagtagcaggccttgagcaatgctgggggagtgagtggagttgcctgaggaaatggagagaaawgctgagtcagagcagagggagaggggttacgtggarctggttctgtgttatgggtgagggacgcggccctgctcatctccttcacacaggtattgggaaacagctctgctgctttatctgtgtgcccccggggcagctgccatgccgggatgggatttcacaagcaccctgtgtcccactgggctgagcctcaccaccctctcacatcagggctg

SEQ ID NO: 12987 - DNA, 600 bp, Chicken  19866894217119_5
ttctctgccttaccatcaatgcaatttcagctcctgtgctgtggtgccagtctgttgggctgctgggattactgaacccctgtcagtcttctagaacattctcaccatgttcgcatgtgccccaacacttttggtctttggaaaagagggatatgytgcggctgagcatgggccatagcctggttgagatckggraacataggccacatcctgcwctttaggtggggcgtgcatgggagtagcaggccttgagcaatgctgggggagtgagtggagttgcctgaggaaatggagagaaawgctgagtcagagcagagggagaggggttacgtggarctggttctgtgttatgggtgagggacgcggccctgctcatctccttcacacaggtattgggaaacagctctgctgctttatctgtgtgcccccggggcagctgccatgccgggatgggatttcacaagcaccctgtgtcccactgggctgagcctcaccaccctctcacatcagggctggtgttggcaagagcatgagataagaaaatcatagaatcattaaggctggaaaagaccactaagataacctagtccaaccgtcaac

SEQ ID NO: 12988 - DNA, 600 bp, Chicken  19866894217119_6
tgctgtggtgccagtctgttgggctgctgggattactgaacccctgtcagtcttctagaacattctcaccatgttcgcatgtgccccaacacttttggtctttggaaaagagggatatgytgcggctgagcatgggccatagcctggttgagatckggraacataggccacatcctgcwctttaggtggggcgtgcatgggagtagcaggccttgagcaatgctgggggagtgagtggagttgcctgaggaaatggagagaaawgctgagtcagagcagagggagaggggttacgtggarctggttctgtgttatgggtgagggacgcggccctgctcatctccttcacacaggtattgggaaacagctctgctgctttatctgtgtgcccccggggcagctgccatgccgggatgggatttcacaagcaccctgtgtcccactgggctgagcctcaccaccctctcacatcagggctggtgttggcaagagcatgagataagaaaatcatagaatcattaaggctggaaaagaccactaagataacctagtccaaccgtcaacccattaccaccatacccactgaactatggccctaaa

SEQ ID NO: 12989 - DNA, 600 bp, Chicken  19866894217124_1
agcagcccccagctttgatggaaaggtggcagagctatcacgagcctgatgccaccctgggcccttagaatttctcacttcaggtatctgggcaaccacgctacccccagctttggtacatgttaccagcagctggtgcagacctctgctgcacagtacaggcatgcctggatgacagcccttgcagagggatgtgcctgacacctatattgctgttccagacgcaattagattacaactccttctgactagcattgtaaagagaaactactttcttcgccatcttcatcaaaattcttycyatatcttccctttgctttagacagagctcactctgaagttaggatgggatggacaagtaacaatatttgagatgtgctttcaagactttagcgcattcaaactacctgattatttctagctgagcagaaattgaatgaaattatctgatatcatgctgccaagaaccacctgtaaacacaaagaggcaatctgcagagaagagtcccaccttctgtgtgtgaatgacttaaataaaaaagttacgatatttaatgttaactcatagctgcaaacctgcatgtctttggttgtccaaag

SEQ ID NO: 12990 - DNA, 600 bp, Chicken  19866894217124_2
cagcccccagctttgatggaaaggtggcagagctatcacgagcctgatgccaccctgggcccttagaatttctcacttcaggtatctgggcaaccacgctacccccagctttggtacatgttaccagcagctggtgcagacctctgctgcacagtacaggcatgcctggatgacagcccttgcagagggatgtgcctgacacctatattgctgttccagacgcaattagattacaactccttctgactagcattgtaaagagaaactactttcttcgccatcttcatcaaaattcttycyatatcttccctttgctttagacagagctcactctgaagttaggatgggatggacaagtaacaatatttgagatgtgctttcaagactttagcgcattcaaactacctgattatttctagctgagcagaaattgaatgaaattatctgatatcatgctgccaagaaccacctgtaaacacaaagaggcaatctgcagagaagagtcccaccttctgtgtgtgaatgacttaaataaaaaagttacgatatttaatgttaactcatagctgcaaacctgcatgtctttggttgtccaaagta

SEQ ID NO: 12991 - DNA, 600 bp, Chicken  19866894217128_1
ttctaaatttgaacctgtatgaaaggttgccaagtcttgcttacagagtgaactggtgccaagacagtacacagtccaggtagatacagcatactgaaaggcatctgtaggaggcagcagctctcttggtttccaagatacgtaacatgaaaaaaatctgatctgtatgggcaactgcaggagctttgccacctggtgcaaatcaagaaaagaaccctgaaacaccacagacccaacagatactttactgttgcctaaaaaactttaactgcctcattaggaaaacacaaaaataaaccycagaaaawtcaacaattcaaatagattggattcaaggtttatctacagttcaatgtgtatttaacacttcataaatattagtattaaccatttaagttatgytgtttgctaaattaacctctcatctcaactctaagaatcatccttttgggtagaaacgtaattaatartaaaaaaaaaaatcaatgaattctacaaagtttattagaaacaaatactatcatgaggatcagtataaaaaacaacagcataaacgtaacaatgcaatcagtattctaatttcagtaatacctattttat

SEQ ID NO: 12992 - DNA, 600 bp, Chicken  19866894217128_2
ttgaacctgtatgaaaggttgccaagtcttgcttacagagtgaactggtgccaagacagtacacagtccaggtagatacagcatactgaaaggcatctgtaggaggcagcagctctcttggtttccaagatacgtaacatgaaaaaaatctgatctgtatgggcaactgcaggagctttgccacctggtgcaaatcaagaaaagaaccctgaaacaccacagacccaacagatactttactgttgcctaaaaaactttaactgcctcattaggaaaacacaaaaataaaccycagaaaawtcaacaattcaaatagattggattcaaggtttatctacagttcaatgtgtatttaacacttcataaatattagtattaaccatttaagttatgytgtttgctaaattaacctctcatctcaactctaagaatcatccttttgggtagaaacgtaattaatartaaaaaaaaaaatcaatgaattctacaaagtttattagaaacaaatactatcatgaggatcagtataaaaaacaacagcataaacgtaacaatgcaatcagtattctaatttcagtaatacctattttatgcccaaca

SEQ ID NO: 12993 - DNA, 600 bp, Chicken  19866894217128_3
atctgtaggaggcagcagctctcttggtttccaagatacgtaacatgaaaaaaatctgatctgtatgggcaactgcaggagctttgccacctggtgcaaatcaagaaaagaaccctgaaacaccacagacccaacagatactttactgttgcctaaaaaactttaactgcctcattaggaaaacacaaaaataaaccycagaaaawtcaacaattcaaatagattggattcaaggtttatctacagttcaatgtgtatttaacacttcataaatattagtattaaccatttaagttatgytgtttgctaaattaacctctcatctcaactctaagaatcatccttttgggtagaaacgtaattaatartaaaaaaaaaaatcaatgaattctacaaagtttattagaaacaaatactatcatgaggatcagtataaaaaacaacagcataaacgtaacaatgcaatcagtattctaatttcagtaatacctattttatgcccaacaaggtgtttgatgtttaggagtcctactaagagacccgctagttttgttagttgcccatcacagtaagtgttgcagtaggactactgttgtcatc

SEQ ID NO: 12994 - DNA, 600 bp, Chicken  19866894217128_4
gcaactgcaggagctttgccacctggtgcaaatcaagaaaagaaccctgaaacaccacagacccaacagatactttactgttgcctaaaaaactttaactgcctcattaggaaaacacaaaaataaaccycagaaaawtcaacaattcaaatagattggattcaaggtttatctacagttcaatgtgtatttaacacttcataaatattagtattaaccatttaagttatgytgtttgctaaattaacctctcatctcaactctaagaatcatccttttgggtagaaacgtaattaatartaaaaaaaaaaatcaatgaattctacaaagtttattagaaacaaatactatcatgaggatcagtataaaaaacaacagcataaacgtaacaatgcaatcagtattctaatttcagtaatacctattttatgcccaacaaggtgtttgatgtttaggagtcctactaagagacccgctagttttgttagttgcccatcacagtaagtgttgcagtaggactactgttgtcatcctgtcattccaggacactgctttaaagctacagaaaagcctgtatatagaagaaagggaatcagttga

SEQ ID NO: 12995 - DNA, 598 bp, Chicken  19866894217132_1
gttctgtgaatgtgaggaatgaaacctcagagactacctgtgaaaagctgagttaagtggaaagggaagatggttaatttacatgctaggagtagacatcaagggtagatatgataaattcatgcctatgtgcctaaatcctgtggtggatcttgtgcttgccctgtgacaagcttgcagactccagtggtatttctgacaccagactaggcatctctgaaatgtaagtcgcctatgattttgctttgaagggctcctcaatgaaaccgagtcctacagacaaatccagccccaggaagktttcagtctgctcagagactggctttatactgctgtgcacctgtctgctggagcctgctttcctcctgagaaaatacctcatgaggagttcagcagcccagtgmcagcctggtagccgttctacactgattaatagacatactgaatctgatcctaatcatttcccagcagattttatttacagggtggagatcccattttcttagcttctgtagataaaatacaagaaaacatgactcagcaaaacctcctttctcacagtccaaggcagactaaccacaccacagaatataccaca

SEQ ID NO: 12996 - DNA, 494 bp, Chicken  19866894217132_2
gtagatatgataaattcatgcctatgtgcctaaatcctgtggtggatcttgtgcttgccctgtgacaagcttgcagactccagtggtatttctgacaccagactaggcatctctgaaatgtaagtcgcctatgattttgctttgaagggctcctcaatgaaaccgagtcctacagacaaatccagccccaggaagktttcagtctgctcagagactggctttatactgctgtgcacctgtctgctggagcctgctttcctcctgagaaaatacctcatgaggagttcagcagcccagtgmcagcctggtagccgttctacactgattaatagacatactgaatctgatcctaatcatttcccagcagattttatttacagggtggagatcccattttcttagcttctgtagataaaatacaagaaaacatgactcagcaaaacctcctttctcacagtccaaggcagactaaccacaccacagaatataccaca

SEQ ID NO: 12997 - DNA, 600 bp, Chicken  19866894217137_1
aggtgttgcaagcacactgctctacttccaccctccataggaccaataaagcaaagagggatgtgcacatgaaacagacagcagttgcctgccagatacgtctacactaagtgaattgaacaagagtattctgaagcttttaaacagaaggaacacctaacaagtcaaagaaaaaatggttcagagattaaagcggttatttcatactcaaagtaaaaccctcctacctgtaagaagcaggcagtttcataaagctgttctactgtgctgtcacttattgccaagttacccgtgtatgcrtaagttattatgatttgtaaagtggctgcatccacattcctcaggtgcacgtgtgtttgtttactttcacttagcccactcatgaacatagctctgaagaaaaacatacaaattaagacaagaaccatcagtaaataatcacttygtaactcttcagtgattacactctaaaaggtaaacaatttttttggttgcctgtttacaaatatttagtatttttcctcaggcttccatccagtattaaagcacttgtactgaacatttgaaaagtaatgtcagtgccttctgtagaattatttc

SEQ ID NO: 12998 - DNA, 516 bp, Chicken  19866894217137_2
agaaggaacacctaacaagtcaaagaaaaaatggttcagagattaaagcggttatttcatactcaaagtaaaaccctcctacctgtaagaagcaggcagtttcataaagctgttctactgtgctgtcacttattgccaagttacccgtgtatgcrtaagttattatgatttgtaaagtggctgcatccacattcctcaggtgcacgtgtgtttgtttactttcacttagcccactcatgaacatagctctgaagaaaaacatacaaattaagacaagaaccatcagtaaataatcacttygtaactcttcagtgattacactctaaaaggtaaacaatttttttggttgcctgtttacaaatatttagtatttttcctcaggcttccatccagtattaaagcacttgtactgaacatttgaaaagtaatgtcagtgccttctgtagaattatttcatatatatatatatatgtgtgtgtgtgtgtgtgtgtgtgtgtgtgtgtgtgcgcactaatt

SEQ ID NO: 12999 - DNA, 600 bp, Chicken  19866894217138_1
ttagttcatgacaggagatgtcttttagttgctttgtaattgcatgacacacagtacttaacttgtcctgtacagcgctgcaaagagatgaataatttcttgcctgagcctagcttagcatttccatttttatctcccagtatagcatctgtctctaatgacagcactgcactgaatgcattggtttctagtccacaataccacccattactgatattaatctatcgcttttggcatcttctcctatttctatgtttagtttctttcccctcacaaggagatactttgttctgttccagmaaatcaatatatttataaaacttcacagaaaccatccttgaaccagcacaaagcttcccattcctycccatttctgcaygaccaatcctgctcgaccaggtgccatgctaccagcagcacytccagcactgagaaggacaacgttgttctacaaagcattcagctggtacaaaatggagaaatctcatctttggaaagcacaaaggtcacttcagcacaaacactggagagttcgacctttctgttaactcccacaggcctaactgtatgtgcaggtgtmtagaaactagctgttttgct

SEQ ID NO: 13000 - DNA, 600 bp, Chicken  19866894217138_2
cctgtacagcgctgcaaagagatgaataatttcttgcctgagcctagcttagcatttccatttttatctcccagtatagcatctgtctctaatgacagcactgcactgaatgcattggtttctagtccacaataccacccattactgatattaatctatcgcttttggcatcttctcctatttctatgtttagtttctttcccctcacaaggagatactttgttctgttccagmaaatcaatatatttataaaacttcacagaaaccatccttgaaccagcacaaagcttcccattcctycccatttctgcaygaccaatcctgctcgaccaggtgccatgctaccagcagcacytccagcactgagaaggacaacgttgttctacaaagcattcagctggtacaaaatggagaaatctcatctttggaaagcacaaaggtcacttcagcacaaacactggagagttcgacctttctgttaactcccacaggcctaactgtatgtgcaggtgtmtagaaactagctgttttgctaaatggtgggctgcaatttatggcgtgcagaacagtttccccagcctttttttgtcttttttttct

SEQ ID NO: 13001 - DNA, 600 bp, Chicken  19866894217138_3
gcaaagagatgaataatttcttgcctgagcctagcttagcatttccatttttatctcccagtatagcatctgtctctaatgacagcactgcactgaatgcattggtttctagtccacaataccacccattactgatattaatctatcgcttttggcatcttctcctatttctatgtttagtttctttcccctcacaaggagatactttgttctgttccagmaaatcaatatatttataaaacttcacagaaaccatccttgaaccagcacaaagcttcccattcctycccatttctgcaygaccaatcctgctcgaccaggtgccatgctaccagcagcacytccagcactgagaaggacaacgttgttctacaaagcattcagctggtacaaaatggagaaatctcatctttggaaagcacaaaggtcacttcagcacaaacactggagagttcgacctttctgttaactcccacaggcctaactgtatgtgcaggtgtmtagaaactagctgttttgctaaatggtgggctgcaatttatggcgtgcagaacagtttccccagcctttttttgtcttttttttcttctctaaacagta

SEQ ID NO: 13002 - DNA, 600 bp, Chicken  19866894217138_4
ttccatttttatctcccagtatagcatctgtctctaatgacagcactgcactgaatgcattggtttctagtccacaataccacccattactgatattaatctatcgcttttggcatcttctcctatttctatgtttagtttctttcccctcacaaggagatactttgttctgttccagmaaatcaatatatttataaaacttcacagaaaccatccttgaaccagcacaaagcttcccattcctycccatttctgcaygaccaatcctgctcgaccaggtgccatgctaccagcagcacytccagcactgagaaggacaacgttgttctacaaagcattcagctggtacaaaatggagaaatctcatctttggaaagcacaaaggtcacttcagcacaaacactggagagttcgacctttctgttaactcccacaggcctaactgtatgtgcaggtgtmtagaaactagctgttttgctaaatggtgggctgcaatttatggcgtgcagaacagtttccccagcctttttttgtcttttttttcttctctaaacagtattaccctttgcagtcatatggtgctttgcttaggacccagag

SEQ ID NO: 13003 - DNA, 521 bp, Chicken  19866894217138_5
atactttgttctgttccagmaaatcaatatatttataaaacttcacagaaaccatccttgaaccagcacaaagcttcccattcctycccatttctgcaygaccaatcctgctcgaccaggtgccatgctaccagcagcacytccagcactgagaaggacaacgttgttctacaaagcattcagctggtacaaaatggagaaatctcatctttggaaagcacaaaggtcacttcagcacaaacactggagagttcgacctttctgttaactcccacaggcctaactgtatgtgcaggtgtmtagaaactagctgttttgctaaatggtgggctgcaatttatggcgtgcagaacagtttccccagcctttttttgtcttttttttcttctctaaacagtattaccctttgcagtcatatggtgctttgcttaggacccagaggacccctaaaaattctcatcagtgtagtaactaccccagctacattcacaaggcagcttctagaactcaacattagccag

SEQ ID NO: 13004 - DNA, 599 bp, Chicken  19866894217151_1
  misc_feature (1)..(42): n is any nucleotide
nnnnnnnnnnnnnnnnnnnnnnnnnnnnnnnnnnnnnnnnnnacaaacacacacacacacacacacacaagaaattaaccctaaactgtaattcagatatactacctttaggtaatatagcatagtattctaattctgcatgtagcactgaaacaccatagcaacagacacttcagatgtgcattggcagataatttagatctagtaaaatattcacatagagataaatattaaaagatctcatttacacgttgcttattctgtaatggccagtgaaaactatgttcacttagttgtatratgccttgcaatataaatctgtgtagtttaaacactgactgttgtcttatactgtgacggaaacgttggtgctactgcagtaactgacaaaacaattgcaattgctaagatatgtatgaattaatttgagatttgtttcaggctgttacagtattagtttgcagtattatggatggctttgtggaaaaataaaagtgaatactctactaatctgatgtgtgtaagcacaggtgcagccagcttcagtagtaaatctccctaaaaaatgccataaacatgacacactcgtcagtgactca

SEQ ID NO: 13005 - DNA, 599 bp, Chicken  19866894217154_1
  misc_feature (1)..(1): n is any nucleotide
nggtttcacactgacgctgagatttggatgacgtgggggtggtgatggtgctgttgtcacctgaggaagccacgttgctgttccactgctgcattctggatgtctttgtcacttctcatcccctgtctgctcaccaagttgacagtagaagttcgtggtgcttcctgctcccctcgggagttttcagcttcgttctttcctccttgcaaaggaacacggttgcctggattaatgtaactgactttactgatgctcttccagatttgttcagagactactggacgatgacattttctccaractgggccatactcwacttgtgtgtttgggatttgtagcaccgtgcgctccaaaccgccccgttgcatggcaaggtttgacttccaagtaatggcaaaatatgacctagaaaaatctggctgcaaaggttttatttgtttaaacaaaggcgttgtgattccagaattctctcccctttcatatgctataaaccacctcctccacctcctctctgaaatatgaattttggagcaatctatcatgaaaaagagaggcagagccttgatcccttgacttcagttgagctgtgcaatttatat

SEQ ID NO: 13006 - DNA, 600 bp, Chicken  19866894217154_2
gctgagatttggatgacgtgggggtggtgatggtgctgttgtcacctgaggaagccacgttgctgttccactgctgcattctggatgtctttgtcacttctcatcccctgtctgctcaccaagttgacagtagaagttcgtggtgcttcctgctcccctcgggagttttcagcttcgttctttcctccttgcaaaggaacacggttgcctggattaatgtaactgactttactgatgctcttccagatttgttcagagactactggacgatgacattttctccaractgggccatactcwacttgtgtgtttgggatttgtagcaccgtgcgctccaaaccgccccgttgcatggcaaggtttgacttccaagtaatggcaaaatatgacctagaaaaatctggctgcaaaggttttatttgtttaaacaaaggcgttgtgattccagaattctctcccctttcatatgctataaaccacctcctccacctcctctctgaaatatgaattttggagcaatctatcatgaaaaagagaggcagagccttgatcccttgacttcagttgagctgtgcaatttatatctactgagcatctggc

SEQ ID NO: 13007 - DNA, 600 bp, Chicken  19866894217155_1
ctgttccactcctccaagtggaggccactgatgcagagctgtagcagttgtaaagctgagcttccaagcagctgaaaacatttggccttctaatcccaggctgctttgggctctaagggattggtgctggcaatgggagcgaggctgggcacagcgctcagcacagtgattgctggggtgcagggaatgaaggctctgctctgggtttctgtggggtcggagatgctggttgtgcagccattgcagggcgtcggtgttggcacagcagtcataatggctaagattgcatgggtttctttmaggatttgtttaacttctcattgttcttttagaaatcttccaagcataagaagaaaaagcacaagaaagagaaagaagagaaatcgaaggataaaaagaaatccaaaaagaagcatcaccacagcgaggaggagatggcrgagtctgtgcagaatggaacactagatgatgagccactaccagtgagtagctgtgctggcagcccagctttgggaggagggcagaagctgaactgttctttggggagggagtgaaatcagccctactgtggtgtgactgccatgtgtttcttcgcagccc

SEQ ID NO: 13008 - DNA, 600 bp, Chicken  19866894217155_2
gaggctgggcacagcgctcagcacagtgattgctggggtgcagggaatgaaggctctgctctgggtttctgtggggtcggagatgctggttgtgcagccattgcagggcgtcggtgttggcacagcagtcataatggctaagattgcatgggtttctttmaggatttgtttaacttctcattgttcttttagaaatcttccaagcataagaagaaaaagcacaagaaagagaaagaagagaaatcgaaggataaaaagaaatccaaaaagaagcatcaccacagcgaggaggagatggcrgagtctgtgcagaatggaacactagatgatgagccactaccagtgagtagctgtgctggcagcccagctttgggaggagggcagaagctgaactgttctttggggagggagtgaaatcagccctactgtggtgtgactgccatgtgtttcttcgcagcccatgtccagctaccgcctccttgcygaaaacccatacattaaaacggtgagtttggcatccaaatccagagaattgcttttgttctctttcttaacagaggatggcactgcagcttcatctaggcagctgatagcaaataa

SEQ ID NO: 13009 - DNA, 449 bp, Chicken  19866894217155_3
tcttttagaaatcttccaagcataagaagaaaaagcacaagaaagagaaagaagagaaatcgaaggataaaaagaaatccaaaaagaagcatcaccacagcgaggaggagatggcrgagtctgtgcagaatggaacactagatgatgagccactaccagtgagtagctgtgctggcagcccagctttgggaggagggcagaagctgaactgttctttggggagggagtgaaatcagccctactgtggtgtgactgccatgtgtttcttcgcagcccatgtccagctaccgcctccttgcygaaaacccatacattaaaacggtgagtttggcatccaaatccagagaattgcttttgttctctttcttaacagaggatggcactgcagcttcatctaggcagctgatagcaaataattggatcccaggaggcagatgcttagcagggct

SEQ ID NO: 13010 - DNA, 600 bp, Chicken  19866894217162_1
agaaatgcatggaaatggccaagtgagatctaattacatactataaatttgcagatgctgggcaggtcatgaagtctggggcagtccacactgtctgaggatcttccccagtgcgttcagaaaattcccaccatgtattagattgggatcaacaacagaggggtggtggcagcaaaattgaaagtacctcatcaaaaggactaagttgctagcagagtgaaatccctttatgggtctcattgcagctggactgcagataaacagtttaagatgtcagaggaaattgtgtcaatattatcwagggactgacccctataccacataccgctgactgactcaaaggagtaatggtgcctgtacagcatgagtgatgatgttttgatgctgttgcatctgcaaaaatgatttgggattgagaaaggcagtgcatgctcacattgtaggtggtggtaacacacaggcaatgatctcagacatccatataacatacagccagcattattcatctctatctttccaatttcctctgcccaccatttttcttctgttgggattgtttccaaaaatgcagatactcactagaattcatgttattagctg

SEQ ID NO: 13011 - DNA, 600 bp, Chicken  19866894217163_1
gtgacaccagtggtggagcaccgacgtctcaccacgtgctgctgaccccccagcagaccctcacacccctctggctgcacctggaggccaccgtggctcccctggagctctgccgcagccccaaagcatttctccatacagcctcactcagtcttttgcagcacgcagctctgctctcccctaggcccttctggaagggaaaagagcactgccacacctctaacagcatggctagaggatgtttctccccacctgcgtgcatgagctgcccacaccccagcacttccacagtctgcaaaygtagggagaaaggatattcctgctgcaagcagcgcaccaggatgggcagcgcygcagagcatggcaagggagctgcctgcaggctgccctgatgctgctggcaacgagcacagcctgccccatgcctgtgccatatgtcctgcactgcagggctggccaagagcactgcctcaacgaccttcagctgcaggcactgagctgacctgtgctccatcagcaccccaatgccctcccgttccttgctgctacaccacctccagcacaggtcacatcctcactgcttcccgcagccaccagcca

SEQ ID NO: 13012 - DNA, 600 bp, Chicken  19866894217163_2
cagaccctcacacccctctggctgcacctggaggccaccgtggctcccctggagctctgccgcagccccaaagcatttctccatacagcctcactcagtcttttgcagcacgcagctctgctctcccctaggcccttctggaagggaaaagagcactgccacacctctaacagcatggctagaggatgtttctccccacctgcgtgcatgagctgcccacaccccagcacttccacagtctgcaaaygtagggagaaaggatattcctgctgcaagcagcgcaccaggatgggcagcgcygcagagcatggcaagggagctgcctgcaggctgccctgatgctgctggcaacgagcacagcctgccccatgcctgtgccatatgtcctgcactgcagggctggccaagagcactgcctcaacgaccttcagctgcaggcactgagctgacctgtgctccatcagcaccccaatgccctcccgttccttgctgctacaccacctccagcacaggtcacatcctcactgcttcccgcagccaccagccatggccatgccctgcatgcagagcagggtgcccacgccccgcaacaaaacaagg

SEQ ID NO: 13013 - DNA, 600 bp, Chicken  19866894217168_1
cacttttcctgtgggcagtctcctacgctggcgattgcattttcattccgaagtctcttctttttgtactggctgccaagtcctgcccacggagcccaagcactggtctgaagctgggacttcagtgcaaatgctttctatccctcagactgcaccccgggatgctccgagtggccatgccaggctggcccttccctttatgccgtgcgtcttcaggagtgcttctgtttcaggaaggttttccatgtgccaccttcaacctcttctttcccaaacacaatctgtccttccacaccgcgragtggcaggtagtaaagtgctttatacaatgaaatatttacaggaggctgggttcatatcttaacacttcaaggacaaaagctcagagacactgcgccccacggagccagctcttctctgcagtgtggcagagaaccggcatccaccacatgtgcatgagggcagaggaactcgcatcacccaacaagtccaccctcgagagcacaggcagggagctgagccccaaaatcccccacagcatggtggggtgaagggcagcagcaycygactctcagccacgtgctccygctgctctgcagc

SEQ ID NO: 13014 - DNA, 600 bp, Chicken  19866894217168_2
tctttcccaaacacaatctgtccttccacaccgcgragtggcaggtagtaaagtgctttatacaatgaaatatttacaggaggctgggttcatatcttaacacttcaaggacaaaagctcagagacactgcgccccacggagccagctcttctctgcagtgtggcagagaaccggcatccaccacatgtgcatgagggcagaggaactcgcatcacccaacaagtccaccctcgagagcacaggcagggagctgagccccaaaatcccccacagcatggtggggtgaagggcagcagcaycygactctcagccacgtgctccygctgctctgcagcatcttcttggagcccctggaagtgaccccagatccatcctggtggcactggcagcggctcgtcacctctcatctggggccaaaccaagggtcgcccttccttctcttcccctcaacgcaacaaaacctgggctcagggagtgccttgcaaggaagctacaggcgagtgaatgggcattggccaggaagggttaaatcagtcagcgcctacaaattgtaatgcctcgctacacgctttggcgctattttcttatgttccagtttt

SEQ ID NO: 13015 - DNA, 600 bp, Chicken  19866894217168_3
tttcccaaacacaatctgtccttccacaccgcgragtggcaggtagtaaagtgctttatacaatgaaatatttacaggaggctgggttcatatcttaacacttcaaggacaaaagctcagagacactgcgccccacggagccagctcttctctgcagtgtggcagagaaccggcatccaccacatgtgcatgagggcagaggaactcgcatcacccaacaagtccaccctcgagagcacaggcagggagctgagccccaaaatcccccacagcatggtggggtgaagggcagcagcaycygactctcagccacgtgctccygctgctctgcagcatcttcttggagcccctggaagtgaccccagatccatcctggtggcactggcagcggctcgtcacctctcatctggggccaaaccaagggtcgcccttccttctcttcccctcaacgcaacaaaacctgggctcagggagtgccttgcaaggaagctacaggcgagtgaatgggcattggccaggaagggttaaatcagtcagcgcctacaaattgtaatgcctcgctacacgctttggcgctattttcttatgttccagttttca

SEQ ID NO: 13016 - DNA, 600 bp, Chicken  19866894217168_4
ttccacaccgcgragtggcaggtagtaaagtgctttatacaatgaaatatttacaggaggctgggttcatatcttaacacttcaaggacaaaagctcagagacactgcgccccacggagccagctcttctctgcagtgtggcagagaaccggcatccaccacatgtgcatgagggcagaggaactcgcatcacccaacaagtccaccctcgagagcacaggcagggagctgagccccaaaatcccccacagcatggtggggtgaagggcagcagcaycygactctcagccacgtgctccygctgctctgcagcatcttcttggagcccctggaagtgaccccagatccatcctggtggcactggcagcggctcgtcacctctcatctggggccaaaccaagggtcgcccttccttctcttcccctcaacgcaacaaaacctgggctcagggagtgccttgcaaggaagctacaggcgagtgaatgggcattggccaggaagggttaaatcagtcagcgcctacaaattgtaatgcctcgctacacgctttggcgctattttcttatgttccagttttcatcctcgaggccttctctctgt

SEQ ID NO: 13017 - DNA, 599 bp, Chicken  19866894217171_1
  misc_feature (1)..(167): n is any nucleotide
nnnnnnnnnnnnnnnnnnnnnnnnnnnnnnnnnnnnnnnnnnnnnnnnnnnnnnnnnnnnnnnnnnnnnnnnnnnnnnnnnnnnnnnnnnnnnnnnnnnnnnnnnnnnnnnnnnnnnnnnnnnnnnnnnnnnnnnnnnnnnnnnnnnnnnnnnnnnnnnnnnnnnnnaaaaccttgtagccctcctataccttcgtttagcagagcaaaccatgaccacccatgtgttggccctgaaatagagagtttagtaggacagtgacagctctaggattttcaatcttacatccagcaagaataktacattagttcataaaaatgtgggacaaaaggaagaacagatattgcttattttctttaaagtaaggtgtagggtgaaacatatatcaccacaacaattctctcacagatgacatcagaaaaaatgaagaggtatcccagctatgcaatattcatgggagttaactctctgtggataacccatattattctttttttcacagagctatgatctaatacttaacttttccagcaaactgcatttttactatgatttttttttaattatctggcataagatcaaaattgttttgtagcttt

SEQ ID NO: 13018 - DNA, 600 bp, Chicken  19866894217171_2
ccacaacaattctctcacagatgacatcagaaaaaatgaagaggtatcccagctatgcaatattcatgggagttaactctctgtggataacccatattattctttttttcacagagctatgatctaatacttaacttttccagcaaactgcatttttactatgatttttttttaattatctggcataagatcaaaattgttttgtagctttaggatgacaaactaaactgctgcaaggtaatactgaaaaattgagagaaaaaaaggagacttcagtgatgcacagtccttatgtgttgwtttgttacaagacatatatcatcatcttgctacacatttttttatgcataagatatatgggatgctcagcttggcactctacagcatgccatcaccctcaaacaaatgacagaaaattggcagcaggctgtggatttgctttctgaaactgaatggaaaatacacttccatacagacctcctgcccttttttacctctccacacactcctgccatataccttcaggtaccaaaagcagctctcaagctgaagaaagtcttagacctttataagttcagtttagtttgtcagtgtactata

SEQ ID NO: 13019 - DNA, 600 bp, Chicken  19866894217184_1
aaatagacatggtcaaatattttttgtaaattctgaagagtagcttaagttctgggtgttccagggcccactgttgtttggactgctttagtcactgcactctccttatgttttattctgtattgtttgagcaagtcacagaacttctgatctttattaaagacctttttttcttcttgaaacaattgctaggtatcctcgagactgtcacattaaggccatcctggcatctgatttgagtatttaatacttgttggtttaaagaaattctaaggcaaatcttggaacaggtcacagagrctcaaggctgcagtataaatccaacactgtagcaaaataaacaggaatttagtattttctagactctgtgggagaaagtgagtcaacaaatactgagtacaaagactaagtaataggaaataacaggaaatgattatatttttaactyttgcctcctaaccttaagcacaaacctaaacctccttacgagttcaagttcaccaaaggcattttggtatggtgacaccaaacgaggttatgcttactttcttgtgggattctctataaaaccaaatcaaatgcataaattctgtatatatg

SEQ ID NO: 13020 - DNA, 600 bp, Chicken  19866894217184_2
gatctttattaaagacctttttttcttcttgaaacaattgctaggtatcctcgagactgtcacattaaggccatcctggcatctgatttgagtatttaatacttgttggtttaaagaaattctaaggcaaatcttggaacaggtcacagagrctcaaggctgcagtataaatccaacactgtagcaaaataaacaggaatttagtattttctagactctgtgggagaaagtgagtcaacaaatactgagtacaaagactaagtaataggaaataacaggaaatgattatatttttaactyttgcctcctaaccttaagcacaaacctaaacctccttacgagttcaagttcaccaaaggcattttggtatggtgacaccaaacgaggttatgcttactttcttgtgggattctctataaaaccaaatcaaatgcataaattctgtatatatggtgtgtgaatggggaaggagttaaaatgggattaacaatagtgagaatgctgaactgaaagatgccagaaagatcaggaagaaagttagcaatgcaataaaatacttctttttctggatgtgggaacttaaatgtagtctgaaattgg

SEQ ID NO: 13021 - DNA, 600 bp, Chicken  19866894217184_3
gtgggattctctataaaaccaaatcaaatgcataaattctgtatatatggtgtgtgaatggggaaggagttaaaatgggattaacaatagtgagaatgctgaactgaaagatgccagaaagatcaggaagaaagttagcaatgcaataaaatacttctttttctggatgtgggaacttaaatgtagtctgaaattgggagtaattatggaaactggaatctggggtgtggaacctcctcttgcacagttatttcattggcatggcaaactgacacttttttatttcacaaggcagccggygtaatattaactataattacacttctagaacagacattcaggaaacagagacatgagtataatgcattcctcaaacacattaaaatccaattttgttgttatgtagggagagcatcctgcttgttgagatgcacatcgcgttttgtagagatgcaaaccctctggccaagactgtgatagtagtcttggctgcagaacaattggaagatcgtaaggtcatgaaaatgaaatgggaaggagaacctgcctatatcccagtggttagggcattctcgtgccaagattctggtgttctgatct

SEQ ID NO: 13022 - DNA, 600 bp, Chicken  19866894217186_1
gtgctcccctgttgtgtattgtaacaatgtatggtgaacagaatcctagaatcatagaatcgtggaatcactaaggttggaaaagacatccaaagtcttctagtccaaccatcaacccatccccactgtgctacattactcagtgccacatctcaatgtttcttgaacacctccagggcctgtgactccaccacctcccttggcagcctcaccattctgagaagaaatttttcctaatatccaacctgtattggaagggacctataaggatcactgagtccaactcctggctccacacargactacacaaaaatcagaccatatgactgagagcgttgtccaaacactccttgaactccaacagcttgggtctatgacctgggaagcctgttccatgcccaccatcctctggcaaatatcctttccataataaccaagctgcccctcccctgacatagctccatgctgttcccttgagccctgtcaccatccccagagagcagagttcagagctacccctccattcccctcatgaggagctgtaggctactgtgaggcctctcagcctcctctgcaccaggctgagccaaccaagggacc

SEQ ID NO: 13023 - DNA, 600 bp, Chicken  19866894217187_1
aaccattaaatactggctggataaagaaatgtgtatctatatttaagaaggactagggaaactgtacattggtctgggcctggtactgtgacagtggcaccaaccaccactttctaagcatccaagggattcttaagaacaaacactatgtcattaacctgatcgatactgctcaggagtgagaatgtggtggtacaatagcttgatacataaaacaattctcagtactcagtagcagccaaaaaagaaaaccgaagattggcaaatactagcaaatgagacaaaattcaaatgtgcctrgtactgtgtgtagcactgggatcctcagataaaaacaatcaccagcactacaccaccaatgagatgaggggctctgctagaggggctctgctagaggctggtataattgtgggcatagagggcaaacaggcacttcccatcccaatggaagaagaaggtggtctcatgtgaagctcctgcatcagccaggaagctccctgctcttctttttctgaaggccatttagggaagaaaatatgctaggctatatgtcactttaccttaaattaatatagacacaaataagtttcttctttgacc

SEQ ID NO: 13024 - DNA, 600 bp, Chicken  19866894217200_1
cctccagagatgggtcatccacagcctccttgggcaacctgttccagtgcgtcaccaccctctgagtgaaaaacttcctcctaatatccaacctaaacctcccctgtctcagtttaaaaccattcccccttgtcctatcactatccaccctcgtaaacagtcgttcccctattttcaggctttctgtttatccatcagtgaagaagcccagcccttgtgttacaaatcagttaggaaacatcctgacaaagtttgcagcaaaacgaatggtccttaaagacaatacttagatttataaaygatgacagcagaaataaaactcgttggctaccttttatgggcagccattaacaaaagcccttatttaacaaattcaaggtaatggtgatggaatgggtttctcagattcaaggtgaatcagaggaaaattgtgtcctggaggacagggatgctcggtcagtgccaccatagcgtggccacatgacatccccagtggcagccaggggctgttggtgcagctgcccgcacaccctgccaaggagccagatgatgttggaagaaaatccttcccagccctggatcgggctgctcttggcttgt

SEQ ID NO: 13025 - DNA, 600 bp, Chicken  19866894217202_1
ccctcttttccagccagcactcaacccaaaaagctcacttcatcagtctcatttcaaggtcatgcttcatgtgcttctttagttatccttgactttttcagctctctttgctactgtgatatttctcatgatgtttttcctacttttttttcccctcctcctttaccctacctccttccccttcccaccttcctcccaaaaccctgcatgaattcattcacttctttaaaggaaacttaaacccttagcgctgagcacctggctaaccatgctatgtgctttaggcaaaggcttctattrcttcagagaactaattctccctccaaaagtagccactttttccttttattagctgcaaaagtagctttcaggcattcaaccttcagtgaagcatctccttatgcctctgacagtggctttattccttcagccaccatcacttgatcttgccagatgcctctgattcttactacctttttttctcctttttcttgtatcctcaggagtctttccagagggaaaggcagaattttgttctggtctttaagtcaggcttcactcctgcacggcgttttgtttttgctttccacttgagctggt

SEQ ID NO: 13026 - DNA, 600 bp, Chicken  19866894217205_1
ccccaaaagataataaaaggttaaaacatactatggttctctatatggaccacaattttcaattatcactagattaagatggcttttcttccaaaacaatactgattatctctgagattcttaactgaaaaaataaaacaacttgcatgtgcactgaccaagatggagttaactttctccaaaacagcccatatggtgttgtattttggatttgtggctagaatagatttgataacacagttttggcaaatgttgaacagcacttgcacagcaccaggtcattctctttgtatctattgwaactttcttcttcctcccactccactctagaagtaggctggtgatgggcaagatgctgggaggaaatgcagcttggacagctgacccagcttggccaaaaggataatttatactgtatataacaccaggaacagcaataatattggattagaggaaacatgaaggggattgcattccaagatagacattgctcatggctgggcatcaatctgcctgtgggaagtggtgattgatacactttgcaccatttgtgatttgtttttcactttactttacttttactttaattttacttcacct

SEQ ID NO: 13027 - DNA, 600 bp, Chicken  19866894217205_2
gacagctgacccagcttggccaaaaggataatttatactgtatataacaccaggaacagcaataatattggattagaggaaacatgaaggggattgcattccaagatagacattgctcatggctgggcatcaatctgcctgtgggaagtggtgattgatacactttgcaccatttgtgatttgtttttcactttactttacttttactttaattttacttcacctttccttcacctattgaactgtctttacctctgcctacctgttttctcacttctggtcttcctcttctctcccctktcctgctggagaaggactgagtgaatgagcagctgtgtggatgattggctgctgactgtggccaacccaccacactattgtaaggggaagctaataaggtgattatgttaagagtaataatgactcaatattaagcaattggaagtattatcatttcagatttgcctggtatacctacactgtggattgcctgtatttaatagatctcttaataataagtgtacaggtaacttttcttcatgattagcatattttgcaatatatatgtgctagcatgagtatttctttcaaaattatttg

SEQ ID NO: 13028 - DNA, 599 bp, Chicken  19866894217208_1
  misc_feature (1)..(49): n is any nucleotide
nnnnnnnnnnnnnnnnnnnnnnnnnnnnnnnnnnnnnnnnnnnnnnnnncagaagacagatggagtggaccttgctgaaagttcacagagttgcaaagaggatgccattgccagagttggttggagtctattaaaagtcttgttgggaacagaagattttagctaaattaagaaactttgctgaaaacatttcagcagcataccatcactccagcatcctggagtaggaaaggatagtaaaggaaagtaagtcaaggaaaacttcctttccatttgggtatcagcactcaagggagggarcactgtgagagaagtagtctgagaataagaaggtggaaggcaacgtgggagttacaatgaaaaggtagatctattgattcttgggaagtcaaggcaaaagaggagaaaggccaaacccattgggcytcagaaaggcagatctcagtaaatttaaggctagcatagggaaggaacagccttaggagcaggtagaaaagaaagactttgcaacgtagaggaaaagctgttgtgttaccatacagtttagtaaaacatctgactccagaatgatggtaaaaaagttgaagaaatagccttaa

SEQ ID NO: 13029 - DNA, 600 bp, Chicken  19866894217208_2
tctattaaaagtcttgttgggaacagaagattttagctaaattaagaaactttgctgaaaacatttcagcagcataccatcactccagcatcctggagtaggaaaggatagtaaaggaaagtaagtcaaggaaaacttcctttccatttgggtatcagcactcaagggagggarcactgtgagagaagtagtctgagaataagaaggtggaaggcaacgtgggagttacaatgaaaaggtagatctattgattcttgggaagtcaaggcaaaagaggagaaaggccaaacccattgggcytcagaaaggcagatctcagtaaatttaaggctagcatagggaaggaacagccttaggagcaggtagaaaagaaagactttgcaacgtagaggaaaagctgttgtgttaccatacagtttagtaaaacatctgactccagaatgatggtaaaaaagttgaagaaatagccttaaaaaagtgtacaaagcaagatcaagagataaaatccaggtagtaaatgaattgctctgcagattgtataggtaaattgtaggatgctaaaaacagagaaggaaattttagttagaaaggattatctgt

SEQ ID NO: 13030 - DNA, 535 bp, Chicken  19866894217211_1
aaaggcataagcaattctacgggagactggatgacaacgtacatctttttcctggatggtgcactccttgcagtagtaggcatcagacacccctgggcccccgcagatgacgcagcgcccttggtacgagccgtagttacactcatcacatatgcgcacgagggtgcagggccgcacgtacgagtcacagatcacacatttgccatcacctgcaagtaaagcagtctttggttacagagcatccttttttccaccccacataaaagaggaaaagccttctggacaaagaacttgcctgtmtgctcaaagacaatgcagttagaccgcagaactttagcttacaggcacaaggtgcaactytgtatttgcacactgacttcagaggaacaagggccaacagcctgccatatccaagatgctttctggtgtttttttttaatcacatatgcacatccagagaagaaagccacaggcatgtccttcgtgactagctaacactgcttacctcatgccatcacttttactctgcaaactt

SEQ ID NO: 13031 - DNA, 475 bp, Chicken  19866894217211_2
gcactccttgcagtagtaggcatcagacacccctgggcccccgcagatgacgcagcgcccttggtacgagccgtagttacactcatcacatatgcgcacgagggtgcagggccgcacgtacgagtcacagatcacacatttgccatcacctgcaagtaaagcagtctttggttacagagcatccttttttccaccccacataaaagaggaaaagccttctggacaaagaacttgcctgtmtgctcaaagacaatgcagttagaccgcagaactttagcttacaggcacaaggtgcaactytgtatttgcacactgacttcagaggaacaagggccaacagcctgccatatccaagatgctttctggtgtttttttttaatcacatatgcacatccagagaagaaagccacaggcatgtccttcgtgactagctaacactgcttacctcatgccatcacttttactctgcaaactt

SEQ ID NO: 13032 - DNA, 600 bp, Chicken  19866894217216_1
aatagactgcaatgtgattgttcccacactggaagtgggaggctgttaactctatgaagtgcttttcttttttgtctcagggaatcagctaatgttttaaggttatacattttctccagcatttgagcaagtaggttcattaagggaaatgaagttctggaatttctgttttgtttaatttggccccagggagatacacagcgcagtgtgtttttttccattttgtgtatataaaatgagatatgtcataatatgttaagactgggcttttaaattgttggagagcagattaatttgaartgaataagtttaaataatattatcttcagctcgatattcatgtgtacccagcccatccattcctcttcatttagtgtgttggccctttcataatttgctttctgaggttctaataaagtttgctttttctttatcgtggtatcaaatcaggtaggcttgataygcacgcatcagaagcagcaaaatgttctttaggattatttaaaaactcagaaatctttgaccaacctttgctgagatattatcttcattcacagcaaaacagaacgtgggtaatcttacacttacgtcacagctttc

SEQ ID NO: 13033 - DNA, 600 bp, Chicken  19866894217216_2
ttctgttttgtttaatttggccccagggagatacacagcgcagtgtgtttttttccattttgtgtatataaaatgagatatgtcataatatgttaagactgggcttttaaattgttggagagcagattaatttgaartgaataagtttaaataatattatcttcagctcgatattcatgtgtacccagcccatccattcctcttcatttagtgtgttggccctttcataatttgctttctgaggttctaataaagtttgctttttctttatcgtggtatcaaatcaggtaggcttgataygcacgcatcagaagcagcaaaatgttctttaggattatttaaaaactcagaaatctttgaccaacctttgctgagatattatcttcattcacagcaaaacagaacgtgggtaatcttacacttacgtcacagctttccaggagccggtcccaaattcaaaactgaaacaattctctggkcttttcttttagttgtgttctgaaataaaataataaaatgcataatatcttyatgcaagtcacttgcttttccattatctggaaggaaataattccctgccatttcctttgctactgagca

SEQ ID NO: 13034 - DNA, 600 bp, Chicken  19866894217216_3
tgtacccagcccatccattcctcttcatttagtgtgttggccctttcataatttgctttctgaggttctaataaagtttgctttttctttatcgtggtatcaaatcaggtaggcttgataygcacgcatcagaagcagcaaaatgttctttaggattatttaaaaactcagaaatctttgaccaacctttgctgagatattatcttcattcacagcaaaacagaacgtgggtaatcttacacttacgtcacagctttccaggagccggtcccaaattcaaaactgaaacaattctctggkcttttcttttagttgtgttctgaaataaaataataaaatgcataatatcttyatgcaagtcacttgcttttccattatctggaaggaaataattccctgccatttcctttgctactgagcagccatgttgacattgccgtatcagaaagtttgaaggagggctgtgtgtagtagccgttttctattcaatgctgtatgctagcaacaagatattctcttgctggtagcagcttctgtttattttttgcaccgggatgttccagttaccaagtgtgaattataccgtgctttgtttgaaat

SEQ ID NO: 13035 - DNA, 600 bp, Chicken  19866894217216_4
ttgctttctgaggttctaataaagtttgctttttctttatcgtggtatcaaatcaggtaggcttgataygcacgcatcagaagcagcaaaatgttctttaggattatttaaaaactcagaaatctttgaccaacctttgctgagatattatcttcattcacagcaaaacagaacgtgggtaatcttacacttacgtcacagctttccaggagccggtcccaaattcaaaactgaaacaattctctggkcttttcttttagttgtgttctgaaataaaataataaaatgcataatatcttyatgcaagtcacttgcttttccattatctggaaggaaataattccctgccatttcctttgctactgagcagccatgttgacattgccgtatcagaaagtttgaaggagggctgtgtgtagtagccgttttctattcaatgctgtatgctagcaacaagatattctcttgctggtagcagcttctgtttattttttgcaccgggatgttccagttaccaagtgtgaattataccgtgctttgtttgaaatcaaatagaaatggcattcacccgcagcggtctagttttgttctctctcccca

SEQ ID NO: 13036 - DNA, 600 bp, Chicken  19866894217217_1
caggatatttggtgctgctgtggtgctgcaaacagcttttgaaggccccacaaagcccagcccagccctaaagccctttcctgcttggtgccaaataatgaaaccctcatttctgtgcttgctttaggagctggtacctaaaacattgccagcattcctgtcagcaatgcagcacatacaggggctgctcaggcagtgaggcagctgcaccaggaccagcagcatggggtggccgaggcattcagccatgcacacaatggcccaaagggatttctgcatcactctgtgcaaggaggagarccttcagcagcaacccaagcagctacagagggcttctggggaaggatttaattactttaccaaggagcacagccataggattggctttttctgctgacttgctggcatcccctgtgcaccagcacagaacgtgagcaaaacacacagcagagagaaacacctggacacagcagaaggctgtgggggatctgcacatttctccccacgttccctaatccacacactcaaaagcattctggctcagggagagctctacagaaaaggactcggggtgtccctgtggccacaagggtgaccatg

SEQ ID NO: 13037 - DNA, 600 bp, Chicken  19866894217218_1
tctctgactggagatccttttctggaaatgcctggcctccagccttcacaaatcaacactaaagagagttaaatgtcatcacagattatatcttgcatcaacaattttccctgtacactatatcccatatgtagatgttatttccttccatatgggcaggaaaaacctgcctcagctgcagtgagcagagaccttaactaaaacatcagctgaaggaggagcctccagctggtaggagatgaactcctactatgctccagctactcctgggacagcagaaatctgttcatggccatggartcaaataataatttaagaaaaaaatgttctggcttttgttaattggaagccattcatagaggaatmaaaatctgagaaccagactttggatgggcgatgggggaattcattggtcagctgtcaagtcagatgtcagaaaacactaaacttactcttcttaaatagtgcagtcccgaaagtcagcaaagttgattctttctcctggggcctttgcttcagaatgtccctctggctgcaatttgtctcttcaaaccacctttccatgtagatgtgctctgagatcattactacctcaaggaa

SEQ ID NO: 13038 - DNA, 600 bp, Chicken  19866894217218_2
agttaaatgtcatcacagattatatcttgcatcaacaattttccctgtacactatatcccatatgtagatgttatttccttccatatgggcaggaaaaacctgcctcagctgcagtgagcagagaccttaactaaaacatcagctgaaggaggagcctccagctggtaggagatgaactcctactatgctccagctactcctgggacagcagaaatctgttcatggccatggartcaaataataatttaagaaaaaaatgttctggcttttgttaattggaagccattcatagaggaatmaaaatctgagaaccagactttggatgggcgatgggggaattcattggtcagctgtcaagtcagatgtcagaaaacactaaacttactcttcttaaatagtgcagtcccgaaagtcagcaaagttgattctttctcctggggcctttgcttcagaatgtccctctggctgcaatttgtctcttcaaaccacctttccatgtagatgtgctctgagatcattactacctcaaggaatctaaaacattcctttcttcagaacagtaaccacgtggctggaaaacaggagaggagagagtggga

SEQ ID NO: 13039 - DNA, 600 bp, Chicken  19866894217221_1
tgctcatattggaagaaaaattactgggcagcaaatatttaggcatccccaggtaagcttgtgtgctgttgttagggctgcatgtcctgccgcttctgcactggaggccaggaaaatagaagctggagaatcatctttgtactaaataaataaataaaaaggtctcactgttaggtttgggttgtgccctacagacgttttccataaagtgccttagttatgtgggtgctgcagagacttactgattgagactttacccttaaatgctttatttcttactctcttaatgcttgcatttasaatccatgtttccaaaggtctaagttgtcctgtaaatagctttggttgggaatgctcatagtttctgttctgttatcaccaatctaagaaattttaaaatctttgcatgcttgtttcaatggagaaaagagttttcttgcagttgctgtatgcattacgcaggtattgaatactgcagcagtttctgtttttttacctgacagatttatatattattttttgaagtaatcgttacttaaggatttaacagttttccagaaggctgcctataagcagcctaagtccttgtcgtggcttttt

SEQ ID NO: 13040 - DNA, 600 bp, Chicken  19866894217221_2
gcaggtattgaatactgcagcagtttctgtttttttacctgacagatttatatattattttttgaagtaatcgttacttaaggatttaacagttttccagaaggctgcctataagcagcctaagtccttgtcgtggctttttacatttaatagagaacttattaagatcttatatttacctttgtttcgtttttaggcagaatttttctctcccttattgcacaatcattttggaccaattcttacctttttcaaataaaccagataattgtttttctatgagggatggctgcgagcatrtattttaatttttctctttacaaggtcagtgtttatattattatgtccttgtttcacctgaaacagtgttaattgctcacctcgtggtactggccagcctcatgttggtgctttgtgctggttggtaggtgggaagtaattgcattgtggctatatgtattgctaccattgcatttttgctttcattttcctcttctgtgttagcaaacaacttttttttatctcaacccacgagttctgttttgtttccaattctctccctcatcccactcgagtgggatggatkgggtgaatggctgg

SEQ ID NO: 13041 - DNA, 600 bp, Chicken  19866894217221_3
tggctgcgagcatrtattttaatttttctctttacaaggtcagtgtttatattattatgtccttgtttcacctgaaacagtgttaattgctcacctcgtggtactggccagcctcatgttggtgctttgtgctggttggtaggtgggaagtaattgcattgtggctatatgtattgctaccattgcatttttgctttcattttcctcttctgtgttagcaaacaacttttttttatctcaacccacgagttctgttttgtttccaattctctccctcatcccactcgagtgggatggatkgggtgaatggctgggaggttaaaccgctgctgggttaaaccacaactgtgagtcactgaataattctgtcatgatttgctaccttaactaagggggaaaagtgtaggacaatagattaaattggcttacagtacttctgtattgacctcttatgtcattacacattagcctgtgtagctgggtaacctctctgaactggattgtgcgatccactgctgataatattttgtttcaagggagcagaataggcatctgttagactggatccttacaattggctttccatttgtaatttatcag

SEQ ID NO: 13042 - DNA, 600 bp, Chicken  19866894217226_1
tatgcctggttttcctccagcccaagtgcaaaaccttgcactttgctgtgttgaacctcattagattcacccaggcccacctttcaagtctgttgaggtccctctgaatggcatcccttccttccattgtgtcagccgcacctcccagcttggtgtcatcagcaaacttactgagggtgcgctcaattccatcattgatgtaattgatgttaaagagcactggtcccaagacgtcatctgtatgatatatataatctaaatggcatcatctaccccacctcattctttgcaaaagtgcarggagaggttccaggttcattctgccacataacaaggtgatttgatgggaaaattccaggtctyatttgacatgattttatgtagatgtattcctggagttgattttattttattggatctcagcctctgtatcattcctgagctttagctgggccttattgaattttattagcttcagaatttcatgtctgtgcagctcactggcaaggaacagaagttattacaatggttttaataggagtgtgttttttcatctttagttttatgtagctttcatttgtagtttctgtttaaatgtca

SEQ ID NO: 13043 - DNA, 600 bp, Chicken  19866894217226_2
gattcacccaggcccacctttcaagtctgttgaggtccctctgaatggcatcccttccttccattgtgtcagccgcacctcccagcttggtgtcatcagcaaacttactgagggtgcgctcaattccatcattgatgtaattgatgttaaagagcactggtcccaagacgtcatctgtatgatatatataatctaaatggcatcatctaccccacctcattctttgcaaaagtgcarggagaggttccaggttcattctgccacataacaaggtgatttgatgggaaaattccaggtctyatttgacatgattttatgtagatgtattcctggagttgattttattttattggatctcagcctctgtatcattcctgagctttagctgggccttattgaattttattagcttcagaatttcatgtctgtgcagctcactggcaaggaacagaagttattacaatggttttaataggagtgtgttttttcatctttagttttatgtagctttcatttgtagtttctgtttaaatgtcattcttaaaacatgaactggtctgattgttctactaaggattgtggacactggagatatgtgtc

SEQ ID NO: 13044 - DNA, 599 bp, Chicken  19866894217230_1
  misc_feature (1)..(80): n is any nucleotide
nnnnnnnnnnnnnnnnnnnnnnnnnnnnnnnnnnnnnnnnnnnnnnnnnnnnnnnnnnnnnnnnnnnnnnnnnnnnnnnntcgattctgtaactactgggctatgatttattttatttcgatgataaaagggtaaataaaacttatgcttatctgattactaaccaattgctgagtatcttctggaacctttacggaaaggaaatagtttaactaagcttctatatatcctgatggacacagttatctgtggtcaggagttaatcaaatgttatctcttgctgcagaaggatattctgcwgttgactctctgaaatgtttggggccttataaaagcacaaaggcagtacaactgttaaaaaataattaaataaacaataccaaaaagggacattgttacgagaaatatatagtacaatgcatcttctaaaggtcatgtgaaaaaaaatgtttcaaaaaattgcactttcagggcaatatctaaatgaatgataggtgtcattaacatcaaacatggacaaaaataatgacacatttaaactcacaaactcatttaaattacatgccagtcacgctcacaaacttcccatctatggcata

SEQ ID NO: 13045 - DNA, 456 bp, Chicken  19866894217230_2
ttcaaaaaattgcactttcagggcaatatctaaatgaatgataggtgtcattaacatcaaacatggacaaaaataatgacacatttaaactcacaaactcatttaaattacatgccagtcacgctcacaaacttcccatctatggcataatgatgcgcctttctttctgtagtctgtcttaggaggtatgggagctgaagtagacaatctttaatgaccctttctaaaccaaaccgttctatgattctttgatttgtgtgattgaatcaatcaccttgagaacccagttaacctgattawtaacaaaaagttattcaccggtggttttaagtcaaataacctttacagaaacaatattaatattcaccttatgaggtcaagaaaatgttcaggtaaagaaataacttattgaaacctcacaactctcaattacagtctagcagtattgatatttca

SEQ ID NO: 13046 - DNA, 521 bp, Chicken  19866894217232_1
aatggaaaaatgacattcctccttctaactggactgaaatatttttttactgcttgagtgatctttaaatatgcttaagggcaacctttctgccttcctaaatgcttcctaaaataatgaaataattaagagctcttaaagattatgttgaaactcattttactcaagttttcactaaacttgcttgcttcaggtgctcattaatataaacataaggagataaactgagtgctttttttctactaaatgcagaaggttgtaatttactttttttttttaagtggtaaagtcagatgacawtcttaaatcgcattttcatgagatttamtttgcctattacacttcttcaatattaataacaataaacagtttattaactcatgacttttatctacaacttttaaaatatttgctatttaatatattccttttttgttgttgttgtcatttacctattccatcagtatttatttccttttgcctcatttctttcaagtggttgacactgccttggagtagaa

SEQ ID NO: 13047 - DNA, 493 bp, Chicken  19866894217232_2
ctggactgaaatatttttttactgcttgagtgatctttaaatatgcttaagggcaacctttctgccttcctaaatgcttcctaaaataatgaaataattaagagctcttaaagattatgttgaaactcattttactcaagttttcactaaacttgcttgcttcaggtgctcattaatataaacataaggagataaactgagtgctttttttctactaaatgcagaaggttgtaatttactttttttttttaagtggtaaagtcagatgacawtcttaaatcgcattttcatgagatttamtttgcctattacacttcttcaatattaataacaataaacagtttattaactcatgacttttatctacaacttttaaaatatttgctatttaatatattccttttttgttgttgttgtcatttacctattccatcagtatttatttccttttgcctcatttctttcaagtggttgacactgccttggagtagaa

SEQ ID NO: 13048 - DNA, 600 bp, Chicken  19866894217237_1
gcacatttggcagtgctgtactactgactcaatttttcaaagccacaagggttgggtgctttttgctgttgtttagtaagtatgaagaaagatacatctctgatagactagaaaagtcaaacagttcaaagcaaacaagaaagtgctagaaaagaacctttgaccctttgaatccaagcactttcagaccttccaggaaatatcttattcttcagtacttgcaaatttaattaaacaacagctggtgcatgtcgctcatagtgttaagtcccacgattcagctatatgatctacggcttyggacaaacccagtagagccactgtgcaagaytgcctcccggtggtggtaccacgaacctgcagaatgacagaatttgcacacagaaaaggcaaaaaacccattccaaaagaaggcttcctttttgaattcaggtctaggtagagtaagggaaaaatttcagtgaggttttaatggcttgaattgaggacaaaccttttgatatgtgactgaagcagagcttctagtggaatagcactaacaaggaaagctcaragagactttcagtacaacattaaaaaaagttaaaaatcagtaagatg

SEQ ID NO: 13049 - DNA, 600 bp, Chicken  19866894217237_2
atttttcaaagccacaagggttgggtgctttttgctgttgtttagtaagtatgaagaaagatacatctctgatagactagaaaagtcaaacagttcaaagcaaacaagaaagtgctagaaaagaacctttgaccctttgaatccaagcactttcagaccttccaggaaatatcttattcttcagtacttgcaaatttaattaaacaacagctggtgcatgtcgctcatagtgttaagtcccacgattcagctatatgatctacggcttyggacaaacccagtagagccactgtgcaagaytgcctcccggtggtggtaccacgaacctgcagaatgacagaatttgcacacagaaaaggcaaaaaacccattccaaaagaaggcttcctttttgaattcaggtctaggtagagtaagggaaaaatttcagtgaggttttaatggcttgaattgaggacaaaccttttgatatgtgactgaagcagagcttctagtggaatagcactaacaaggaaagctcaragagactttcagtacaacattaaaaaaagttaaaaatcagtaagatgtacycaattgcacactgtccgcagcaatgag

SEQ ID NO: 13050 - DNA, 600 bp, Chicken  19866894217237_3
gctcatagtgttaagtcccacgattcagctatatgatctacggcttyggacaaacccagtagagccactgtgcaagaytgcctcccggtggtggtaccacgaacctgcagaatgacagaatttgcacacagaaaaggcaaaaaacccattccaaaagaaggcttcctttttgaattcaggtctaggtagagtaagggaaaaatttcagtgaggttttaatggcttgaattgaggacaaaccttttgatatgtgactgaagcagagcttctagtggaatagcactaacaaggaaagctcaragagactttcagtacaacattaaaaaaagttaaaaatcagtaagatgtacycaattgcacactgtccgcagcaatgagcctcctgaagtctgaaacaatacctattaagcacaaggcagatggctgagtgccataacttggatacaaaaacactacagcagatttcccattctaccaattccacgtaacccaaattttcagttacaaagttagcacaagtgaaaaaaagacaacagaaagccccaaactgcctttcaaattgattgttcttttaggcaaaagcaggaaaagactccagca

SEQ ID NO: 13051 - DNA, 600 bp, Chicken  19866894217237_4
aaacccagtagagccactgtgcaagaytgcctcccggtggtggtaccacgaacctgcagaatgacagaatttgcacacagaaaaggcaaaaaacccattccaaaagaaggcttcctttttgaattcaggtctaggtagagtaagggaaaaatttcagtgaggttttaatggcttgaattgaggacaaaccttttgatatgtgactgaagcagagcttctagtggaatagcactaacaaggaaagctcaragagactttcagtacaacattaaaaaaagttaaaaatcagtaagatgtacycaattgcacactgtccgcagcaatgagcctcctgaagtctgaaacaatacctattaagcacaaggcagatggctgagtgccataacttggatacaaaaacactacagcagatttcccattctaccaattccacgtaacccaaattttcagttacaaagttagcacaagtgaaaaaaagacaacagaaagccccaaactgcctttcaaattgattgttcttttaggcaaaagcaggaaaagactccagcagatggatttccaattccagttcttcaagtaaagagaaacacacagttaaag

SEQ ID NO: 13052 - DNA, 600 bp, Chicken  19866894217243_1
tcccggaatcctcggggacaaatcagaggttttcccctcttgcttcctaaagtgactgtattccctggcttttctttgtcactcagcagttcatcccctttccctgttaaatcttgcttgaagctctgatagtaagcccagccagcttgctgcccagcatattcttgcccctcctggtcagttgcatcccatccagtgtcagcattcacagtaatttgaaggtgcatcctaggtgatggaacccaaagccctggacatgacaccatccacacagccattcattcagctgttctgttctcyttcgrcccacatcccagcctccagccaggaggactgagcagaatgctacctgtgctccggatcccttcaaygtattcctaagggacttaaaatcttttttgatgttttttgatttcccagtcagagcctcacagcttgaaagaccaggattggatagtagtcctccagctttatcatacacaatatcctcttcctgacatcacaaatgtgggcttgtggcagtcagcagactctagggaggtttgggcagagatactcttgatcacagctacctatccagtagcctcctcctcaaatgta

SEQ ID NO: 13053 - DNA, 600 bp, Chicken  19866894217243_2
gaatcctcggggacaaatcagaggttttcccctcttgcttcctaaagtgactgtattccctggcttttctttgtcactcagcagttcatcccctttccctgttaaatcttgcttgaagctctgatagtaagcccagccagcttgctgcccagcatattcttgcccctcctggtcagttgcatcccatccagtgtcagcattcacagtaatttgaaggtgcatcctaggtgatggaacccaaagccctggacatgacaccatccacacagccattcattcagctgttctgttctcyttcgrcccacatcccagcctccagccaggaggactgagcagaatgctacctgtgctccggatcccttcaaygtattcctaagggacttaaaatcttttttgatgttttttgatttcccagtcagagcctcacagcttgaaagaccaggattggatagtagtcctccagctttatcatacacaatatcctcttcctgacatcacaaatgtgggcttgtggcagtcagcagactctagggaggtttgggcagagatactcttgatcacagctacctatccagtagcctcctcctcaaatgtataaat

SEQ ID NO: 13054 - DNA, 600 bp, Chicken  19866894217243_3
ttctttgtcactcagcagttcatcccctttccctgttaaatcttgcttgaagctctgatagtaagcccagccagcttgctgcccagcatattcttgcccctcctggtcagttgcatcccatccagtgtcagcattcacagtaatttgaaggtgcatcctaggtgatggaacccaaagccctggacatgacaccatccacacagccattcattcagctgttctgttctcyttcgrcccacatcccagcctccagccaggaggactgagcagaatgctacctgtgctccggatcccttcaaygtattcctaagggacttaaaatcttttttgatgttttttgatttcccagtcagagcctcacagcttgaaagaccaggattggatagtagtcctccagctttatcatacacaatatcctcttcctgacatcacaaatgtgggcttgtggcagtcagcagactctagggaggtttgggcagagatactcttgatcacagctacctatccagtagcctcctcctcaaatgtataaatctgcaatatcccattattcagatggtaaagtgcaaagctgctcagtagtttcctaattccttggtc

SEQ ID NO: 13055 - DNA, 599 bp, Chicken  19866894217249_1
  misc_feature (1)..(153): n is any nucleotide
nnnnnnnnnnnnnnnnnnnnnnnnnnnnnnnnnnnnnnnnnnnnnnnnnnnnnnnnnnnnnnnnnnnnnnnnnnnnnnnnnnnnnnnnnnnnnnnnnnnnnnnnnnnnnnnnnnnnnnnnnnnnnnnnnnnnnnnnnnnnnnnnnnnnnnnnntaaagtagtgaataataaaggaataaaactgctcaaagagtttatctttctttctctgaagctaactgtgtaacagcactcagcggcatttaatctccaagggcctcaggaaagacacgaacgtgaaggtagcttagaatcaataakagggaactttcmtgaggcctgcactgcctgctgctggttgccgacagccatgttgcagtagcacacttgcccattctgcaccaccaccatttgccatcctgagcctttttcaaaatctggtggtaagctgataattctcagggcatccctgtgaaatggagaagcgtgattcttccagtgtgacatgtggggaaactgagatawgrtgaggataaagccttggcctctttgttccgrcatgtaacatggttgtgaaggcctccatcttactgcagcattttaacatgttccaaatgtgg

SEQ ID NO: 13056 - DNA, 599 bp, Chicken  19866894217249_2
  misc_feature (1)..(141): n is any nucleotide
nnnnnnnnnnnnnnnnnnnnnnnnnnnnnnnnnnnnnnnnnnnnnnnnnnnnnnnnnnnnnnnnnnnnnnnnnnnnnnnnnnnnnnnnnnnnnnnnnnnnnnnnnnnnnnnnnnnnnnnnnnnnnnnnnnnnnnnnnnnnntaaagtagtgaataataaaggaataaaactgctcaaagagtttatctttctttctctgaagctaactgtgtaacagcactcagcggcatttaatctccaagggcctcaggaaagacacgaacgtgaaggtagcttagaatcaataakagggaactttcmtgaggcctgcactgcctgctgctggttgccgacagccatgttgcagtagcacacttgcccattctgcaccaccaccatttgccatcctgagcctttttcaaaatctggtggtaagctgataattctcagggcatccctgtgaaatggagaagcgtgattcttccagtgtgacatgtggggaaactgagatawgrtgaggataaagccttggcctctttgttccgrcatgtaacatggttgtgaaggcctccatcttactgcagcattttaacatgttccaaatgtggtttccctgtatg

SEQ ID NO: 13057 - DNA, 600 bp, Chicken  19866894217249_3
ttctctgaagctaactgtgtaacagcactcagcggcatttaatctccaagggcctcaggaaagacacgaacgtgaaggtagcttagaatcaataakagggaactttcmtgaggcctgcactgcctgctgctggttgccgacagccatgttgcagtagcacacttgcccattctgcaccaccaccatttgccatcctgagcctttttcaaaatctggtggtaagctgataattctcagggcatccctgtgaaatggagaagcgtgattcttccagtgtgacatgtggggaaactgagatawgrtgaggataaagccttggcctctttgttccgrcatgtaacatggttgtgaaggcctccatcttactgcagcattttaacatgttccaaatgtggtttccctgtatgctacaaaacaggattgcctttgaattacatctgtattttagctatgggatctccctcagtcttgaaatggaagcagagtatcaactttatcttagtggctgcctgattaaaaaactctttcaatacactgtaaaactctatgagtgggcttcaaaggcttactttacagaggcaaaaggagtgcatcccaggg

SEQ ID NO: 13058 - DNA, 600 bp, Chicken  19866894217249_4
ctctgaagctaactgtgtaacagcactcagcggcatttaatctccaagggcctcaggaaagacacgaacgtgaaggtagcttagaatcaataakagggaactttcmtgaggcctgcactgcctgctgctggttgccgacagccatgttgcagtagcacacttgcccattctgcaccaccaccatttgccatcctgagcctttttcaaaatctggtggtaagctgataattctcagggcatccctgtgaaatggagaagcgtgattcttccagtgtgacatgtggggaaactgagatawgrtgaggataaagccttggcctctttgttccgrcatgtaacatggttgtgaaggcctccatcttactgcagcattttaacatgttccaaatgtggtttccctgtatgctacaaaacaggattgcctttgaattacatctgtattttagctatgggatctccctcagtcttgaaatggaagcagagtatcaactttatcttagtggctgcctgattaaaaaactctttcaatacactgtaaaactctatgagtgggcttcaaaggcttactttacagaggcaaaaggagtgcatcccaggggg

SEQ ID NO: 13059 - DNA, 600 bp, Chicken  19866894217249_5
ggcatttaatctccaagggcctcaggaaagacacgaacgtgaaggtagcttagaatcaataakagggaactttcmtgaggcctgcactgcctgctgctggttgccgacagccatgttgcagtagcacacttgcccattctgcaccaccaccatttgccatcctgagcctttttcaaaatctggtggtaagctgataattctcagggcatccctgtgaaatggagaagcgtgattcttccagtgtgacatgtggggaaactgagatawgrtgaggataaagccttggcctctttgttccgrcatgtaacatggttgtgaaggcctccatcttactgcagcattttaacatgttccaaatgtggtttccctgtatgctacaaaacaggattgcctttgaattacatctgtattttagctatgggatctccctcagtcttgaaatggaagcagagtatcaactttatcttagtggctgcctgattaaaaaactctttcaatacactgtaaaactctatgagtgggcttcaaaggcttactttacagaggcaaaaggagtgcatcccaggggggatacagttctctgctacgttgctggactgt

SEQ ID NO: 13060 - DNA, 600 bp, Chicken  19866894217250_1
atgaacacagtgaaggagggaaggattttccttgcagtactgtgatttttggggaagtagcatcctttgttgatgattgtaggaggcactttgtcccctccatgagcaatgcatcctacagactctctcccaagagcaatgcacactgtgttgttcagtgtctctttcattttccctatttgtgcactgagatagcagtgctgatcattaaaaataataataataataataagagtcctttggaatgcaacacacagagccctcaggtctgggatttccagtgcatggctccagctcatytgttaactaataagggtagaytgtggggttaggggccaagtttgttcctcagtgtcctacagcagagtgcatagagctttaccactgactcctcccttgactgataggcagacttctcctccacccctcgtgcaggtaagagccatataccagttctctacaatcatggcactgccaacccaagcagctttgcccccccaggctgagggcagccagaggtgagacagcccctaggagctcctttacttgttgaccttgggacgctgccattcctttgagcccagctgtgtaatggcaagc

SEQ ID NO: 13061 - DNA, 600 bp, Chicken  19866894217250_2
aggattttccttgcagtactgtgatttttggggaagtagcatcctttgttgatgattgtaggaggcactttgtcccctccatgagcaatgcatcctacagactctctcccaagagcaatgcacactgtgttgttcagtgtctctttcattttccctatttgtgcactgagatagcagtgctgatcattaaaaataataataataataataagagtcctttggaatgcaacacacagagccctcaggtctgggatttccagtgcatggctccagctcatytgttaactaataagggtagaytgtggggttaggggccaagtttgttcctcagtgtcctacagcagagtgcatagagctttaccactgactcctcccttgactgataggcagacttctcctccacccctcgtgcaggtaagagccatataccagttctctacaatcatggcactgccaacccaagcagctttgcccccccaggctgagggcagccagaggtgagacagcccctaggagctcctttacttgttgaccttgggacgctgccattcctttgagcccagctgtgtaatggcaagctgagacaggttttaataagaa

SEQ ID NO: 13062 - DNA, 600 bp, Chicken  19866894217256_1
aggccggtgatttttagggtgaacagaaccacggaaggatttaaggcactgaagccagtaggaagagttcctgcaatcccagcagtgtacggactggacacacctggatttggctgaaaaaaatatttaatgtaatagtgctgtatggtggggtagctcccagtgagcacatgatagcggtggaccttgaggtttcctgggacaatggcatttcagcttagaaatggggtacaaagatcactatggagagtgggtttgacagacaccatttcactaaattaattagaaaaacgaaggaaygagggagaatgacagctgactcttaagataataggaaaactgtctctttaaatgtgcctgtgtttttcaatacagaccaggcagggctataatcagagcaccagagggtcggatttaggttcagtacagtataattccattgcatggcccatccaagaatactttggcaagctcaaatatattggaaattgccttggccagtggcttgcaaaatggctgtggaaagtcaagataattagagcattgtgaagaggagagacagtaaaatgaagggtagcagacaaaaaaagacaagcaaat

SEQ ID NO: 13063 - DNA, 599 bp, Chicken  19866894217259_1
  misc_feature (1)..(5): n is any nucleotide
nnnnnttatattatattccttcctgcagtcttcctcctatgagctgaaacataaggaaaaatagcatagtgttatatagatctgcatttgagtcgtatagcaaagagaaattgcaacaaacatttcaaccatctcccacacagtgggaattgaataacaattcagttttgcacttaagcaaatgaataaactaaaaactcactggacagacaaaaaaaaaaaccttgttgccctacaaactccagacatttcagctgcacagaaagtgaacccaagctgcttcaccctggcagtggaagwacttcaactaggcaacgccacgccaagttttacaaggcaaaaaagcacgttcaaatcgccagataaatcaacattgcccccagttacatgagaacatagatgcctatgagcaaagtacaaaccaccagatgaataagaaactaaaactctttccacaacttcaactttaaaacggttctattacaacacaggcttccattgttgtataaaatgatacactgcaaatcttctggtaagaccagacatcttcgtattatcagtaagatttacttgcactgagaatagggcaggctcatgaa

SEQ ID NO: 13064 - DNA, 572 bp, Chicken  19866894217264_1
ctgttctgatacagatagggatgatagattctgttccccccacaccccccactggagtgacttccaagcataaataaagtattaaatgcagaactagtcctctgttaaaatgaataaacgtctaataaatcattaatattattcagaatgccttcatgcatgaaaacatctgatctattactaagctatttaataaattttaggaaatacactcttcaaaacaaatttgttatcaataactataattactgctacaattagttggagtgccttgagagtgcaaattatttataatcatcrtttcaaaaataaaattaagaattcttattctcagaaactttgaaaaaaatgttatattggaatttaatcacaagttccttcctcagtattccacacaagctttaataaaataatacattataaaccccactaaacttgaggtttctaaaaacaaatgttgtagtcaataatgtcctcgaaaggctattaaattctgcaatgcaaatataaaaccatgcagtgatactccataacactcagtaataatgctccaaggccacacaaaaatgcaa

SEQ ID NO: 13065 - DNA, 600 bp, Chicken  19866894217265_1
accgcacagtactgtaactctcaatctcagccgtgcatctcatctgtgtttgcaagacaaaacacagcatgttacagtgttagcaatatatcagaaaaaatacattaaaaagctttttgaatacaatgaaaaaggctactttagcagtacattggttattttaatttgaaatgataaatacacatctcctagaagacaataaaggctttatacttgactaacccgtgccctatttatactactttttgccacgatgtatttctgtgctttgtacaataaaatacaaatgactcaaatttrttaggaagggattaattggcatataatagggaatgtggttactataacagcaagatcccaaaataaaagaagaaagaagcttgtataaaagggggcattaaaatacaagtgagtgctgttttttagcagttataggataagcctacatggaaactgagtccaactgtgtggcttggcttatgtcagaggacagtaaagacattaatagattcccaacgtggaattgtttctatgggccattcatatatttcattttatttaggcttaaactaaattgctgaacagacaggtggagatttg

SEQ ID NO: 13066 - DNA, 600 bp, Chicken  19866894217265_2
ttaaaatacaagtgagtgctgttttttagcagttataggataagcctacatggaaactgagtccaactgtgtggcttggcttatgtcagaggacagtaaagacattaatagattcccaacgtggaattgtttctatgggccattcatatatttcattttatttaggcttaaactaaattgctgaacagacaggtggagatttgatgtagttgttcagaaagagtaggaacctggatgagtaaacaccacagccttgctgacatgctggccacatctcttcaagttaaaaggcccaatgcygcacatctttggctttctgattagacattttgcttagctgcagcctaaatcaggaaaactcattactgtggttttttttttttccattttttacttttcccatcttatttcatatgactatattccctattcatttttttgcactgctttagattttcaacaatgaccacattattggtcaaacccagactctcttttccatcccccttcagaaaaaaaraaaagaacaaacagaaaggccatacagtttcttaaaaatctgctgttgcacttatgaactttagctgtcaggcatttaga

SEQ ID NO: 13067 - DNA, 600 bp, Chicken  19866894217265_3
gagtaggaacctggatgagtaaacaccacagccttgctgacatgctggccacatctcttcaagttaaaaggcccaatgcygcacatctttggctttctgattagacattttgcttagctgcagcctaaatcaggaaaactcattactgtggttttttttttttccattttttacttttcccatcttatttcatatgactatattccctattcatttttttgcactgctttagattttcaacaatgaccacattattggtcaaacccagactctcttttccatcccccttcagaaaaaaaraaaagaacaaacagaaaggccatacagtttcttaaaaatctgctgttgcacttatgaactttagctgtcaggcatttagatgcaatgtttttcaggagggaatacaaatctgcccatttcagtgctattctgcttgcccttaattctcttccttcattctgaataaataaaaagattaattcccacacattcctgaagctctgcttggccttaaattagatcaagttgggagttttgctcattacagctcttcttccctgctggcagagagactcttgtctttgtcacttgtcttctgcc

SEQ ID NO: 13068 - DNA, 488 bp, Chicken  19866894217265_4
cacattcctgaagctctgcttggccttaaattagatcaagttgggagttttgctcattacagctcttcttccctgctggcagagagactcttgtctttgtcacttgtcttctgcctgtcctcctgtccttacaattcaattgcaaatcccacatgaccatcattcaaccaaagaacagactatcatctaggctttttaacatgttcctcactgtaaaatacatacacataaatgcacatttcttccagacaaactcttacactgctaataaagtttagatgcatagaaaacagagcagtkgaaaatatgccatagcacaaattttaaatatctgcttaactcattagaatggcatttcagcatttcagtgtgccagaatgtcacttcagttttgtgggcccttcccttcagaagaattaccatctctccttatgcaggcgtattcagtgacaacagttcccaccatgtttttaatacatatgtatata

SEQ ID NO: 13069 - DNA, 599 bp, Chicken  19866894217266_1
  misc_feature (1)..(99): n is any nucleotide
nnnnnnnnnnnnnnnnnnnnnnnnnnnnnnnnnnnnnnnnnnnnnnnnnnnnnnnnnnnnnnnnnnnnnnnnnnnnnnnnnnnnnnnnnnnnnnnnnnncatccccagcagtccgtctgttccatgatgaaatgccacctaagggtgagcaggggttattccaagtgctcctagcagatatctcactgatggcagtcaggcacgtctttctggaagaccttgatgattgttacagtccttaactggaatgaaagatgaacagaggcaaattccccaaagagtaatattctaaaatcgtgytcatttggagctagagagtgacaaaacagatctctgttacaataaaaygtatattataaaaggcattaaaaatatttatccagcaattctctacagatttcaaaattaattaatcctgactcagctttcctagcagttctcttccaagataaaacctacttagtttcagcttttggaaatgcacattcaaaatgaatatgattccactgtcttttccagaatggttggccatcaggctgccctacactcagacagaggtccattggtgcctttttrtctttctcaggtttacaggtgat

SEQ ID NO: 13070 - DNA, 599 bp, Chicken  19866894217266_2
  misc_feature (1)..(51): n is any nucleotide
nnnnnnnnnnnnnnnnnnnnnnnnnnnnnnnnnnnnnnnnnnnnnnnnnnncatccccagcagtccgtctgttccatgatgaaatgccacctaagggtgagcaggggttattccaagtgctcctagcagatatctcactgatggcagtcaggcacgtctttctggaagaccttgatgattgttacagtccttaactggaatgaaagatgaacagaggcaaattccccaaagagtaatattctaaaatcgtgytcatttggagctagagagtgacaaaacagatctctgttacaataaaaygtatattataaaaggcattaaaaatatttatccagcaattctctacagatttcaaaattaattaatcctgactcagctttcctagcagttctcttccaagataaaacctacttagtttcagcttttggaaatgcacattcaaaatgaatatgattccactgtcttttccagaatggttggccatcaggctgccctacactcagacagaggtccattggtgcctttttrtctttctcaggtttacaggtgattgatcacactgaaaccatttcaagaagtcacaaagttattgaggccag

SEQ ID NO: 13071 - DNA, 600 bp, Chicken  19866894217266_3
aagagtaatattctaaaatcgtgytcatttggagctagagagtgacaaaacagatctctgttacaataaaaygtatattataaaaggcattaaaaatatttatccagcaattctctacagatttcaaaattaattaatcctgactcagctttcctagcagttctcttccaagataaaacctacttagtttcagcttttggaaatgcacattcaaaatgaatatgattccactgtcttttccagaatggttggccatcaggctgccctacactcagacagaggtccattggtgcctttttrtctttctcaggtttacaggtgattgatcacactgaaaccatttcaagaagtcacaaagttattgaggccagaactcagaagcaaggctgagtttgcttcctagcagcgtgttgccccgcatactgacagtcctctgatctcccatagcagcaggatgagccctcagtacaaatgactccatagaagttccgaattgttcttttatatctccaattgttttccttccatattcatttaaactcatatgtggcccgagtgtccatgaaggatgcttagttccatttatccactgttcatcca

SEQ ID NO: 13072 - DNA, 600 bp, Chicken  19866894217269_1
tagatatattgactcaggtgaacacctacacctggactacagtaaaagaaagatgtttatgaaggtctgcgatgacatacatcagtgaaaatgagatgtgctttttacaaggggaaacaagccttgtaggaaatatataaacattgggactttatttctggttctactcaatatcgcaagagatctttaccctagtaaaatggtgcatttgtagtaggaggtaatgagtgttcagctctccacaggcatgctgaaaggattcaaaatctgtcagtttcatcagtttggtacagttagacrgaagattaaaaaacttcatcctgtgtacctcccctcattcacgtgttcccagggcctctctgctacctatgcaagtctgacttgaagagagttaaacagatgcaattgtcaaagcagtgagggcctttagatcttgagtttagttcagataatatctttgttactttaccttttgtaaagatttcagttcataagtatttttatatcgtcttcattgtcttctaatgacaaggaagaatgttactctattgtatcctgtacacactttcaaggaatattatcccttggtgtaaagttgtg

SEQ ID NO: 13073 - DNA, 600 bp, Chicken  19866894217270_1
ggggagcctatggccttgccatgaaagtcgcttccccacctcccaccgtcatgcagcagaacaagaaaggtattatgtgtcctcctccttcccacgccaagatgctttctattgtttctattgagagccagactgcccttgggtatgcgctgatgcggcagcatccctccctgccagcctctgccgttcccctctgccgtcccccatgggggacataccacacagagggctgggggacatcttccccttggctttggcatagtgaaatgagcacagcgcacctgcagcacagcttggggwgtacagaggatctggttccaagagggtcactgtggggtgagcccatgggattgcagtgggatggtggagggagaaggatgagggcagctccggtgttgacaacatttggtctcttcttaggagacattaccaatgaactggtgaggcacttcctcatcgagaccagcccacggggtgtgaaactaaaaggatgccccaatgagcctaattttggtgagtaccccaggtgtggttgggatgcctttcctttgctggaatgtctgagcagagcaatcaggtatctggaagagctgcccctca

SEQ ID NO: 13074 - DNA, 600 bp, Chicken  19866894217270_2
cggtgttgacaacatttggtctcttcttaggagacattaccaatgaactggtgaggcacttcctcatcgagaccagcccacggggtgtgaaactaaaaggatgccccaatgagcctaattttggtgagtaccccaggtgtggttgggatgcctttcctttgctggaatgtctgagcagagcaatcaggtatctggaagagctgcccctcagctttctggaggacaagtgatgctgctgggcagggtggagatgagcccccatgggcacagtggcttgagggaggggaaatgccacgtgtwgttctgtccactcagagcaccaacaccctgacaatctcctatgctgggcaggcttgtccccaaccctgcgctcaccttctccctctctccccaggctgcttgtcggctctggtctaccagcactccatcatgcctctggccctgccctgcaagctggtcattcctgaccgaggtaagaactagggccagcagtacagggtggcactgcacctctgctctttgggatgggagctcctcctccagccaggaaccacacatgggctgtgtttccccatctagaccaactgtggggacatgctc

SEQ ID NO: 13075 - DNA, 599 bp, Chicken  19866894217277_1
  misc_feature (1)..(43): n is any nucleotide
nnnnnnnnnnnnnnnnnnnnnnnnnnnnnnnnnnnnnnnnnnntgtggaaaagcagagtatctgaatcagattagcctgctgggtacctaagaaaaacaagtgcaagcatgcagagcatactgaccacctactgctcatgcatggggctgatagggaacatatgtgaagacactgtggtgctgggaggatctgaagaccccccttccccaccacaagcaagctttcttttgactgcacagtttgagcctgggtcactcccacttctcctgtgatctccaccgcagtgactgtgcaactasttggagttttcccttgtgcaagcagaaagttttacatagtttttcccctggaaacattcatctcagcagtcctcctccacccacctgcatctcctctaaatcctgctgctccctctgcattcattaattccccagatagttctgcactggctgaactgatagctgggaacaggaagctttccccagtggatacaagggcaagaaagaaaaaaagacaaaaaaaaatgttaaagcttattttcagatgtgcttttaatgtctgggtgacagaatccactgagacagcatggaactgtttc

SEQ ID NO: 13076 - DNA, 485 bp, Chicken  19866894217277_2
aagttttacatagtttttcccctggaaacattcatctcagcagtcctcctccacccacctgcatctcctctaaatcctgctgctccctctgcattcattaattccccagatagttctgcactggctgaactgatagctgggaacaggaagctttccccagtggatacaagggcaagaaagaaaaaaagacaaaaaaaaatgttaaagcttattttcagatgtgcttttaatgtctgggtgacagaatccactgagacagcatggaactgtttcttgtgcagtagctagtaccaaagcctsggctctattctccttggaccagggagctttgtggaacagagtacttttcccatgagaccccacctcctgggaaggtttatttccttacagcctgagatctgagaccacatgtctggaagcccagaaaggcaccttcctcctcctcgtccctcaggacgatgcacatcatccacctgccagcccag

SEQ ID NO: 13077 - DNA, 600 bp, Chicken  19866894217278_1
acacgctactacaaatgcaaagagcctttaaaattactaggttgaatttgtcatcaaaccaacttacgcaaaagctttggcttttctgcttagaaatgaactcagtatcatttcactcagccattagccgggattctttagttctgaggcagaattcatacgcggtcgatacaactgaagcacataaacaagccgagggggttttctaaaataaaagtgtaggatgtcaatgcaaatcgactgtcagtgccaaaaaaaaaaaggtatttcacagtgcaataaattcactatacagcatcwaatgaacaaaagggatatggattgttttccagtccacttctgaaagcaaaacagaggagggagggggaactagctcagacagctattgagagttgtccaacttaaagaaytttcctgtagatgtgctctaaatattatttacactttattccctggccagggctgattttcccttgatatcagggattcacatcaactccacttcagcaaagtgcagcttcgcagggaagaacatgcaacacctcacagatcacagccctaagaaggatccaaaaccagcagctgcatcttatgtatgtg

SEQ ID NO: 13078 - DNA, 600 bp, Chicken  19866894217278_2
tttcactcagccattagccgggattctttagttctgaggcagaattcatacgcggtcgatacaactgaagcacataaacaagccgagggggttttctaaaataaaagtgtaggatgtcaatgcaaatcgactgtcagtgccaaaaaaaaaaaggtatttcacagtgcaataaattcactatacagcatcwaatgaacaaaagggatatggattgttttccagtccacttctgaaagcaaaacagaggagggagggggaactagctcagacagctattgagagttgtccaacttaaagaaytttcctgtagatgtgctctaaatattatttacactttattccctggccagggctgattttcccttgatatcagggattcacatcaactccacttcagcaaagtgcagcttcgcagggaagaacatgcaacacctcacagatcacagccctaagaaggatccaaaaccagcagctgcatcttatgtatgtgaaactactccatcttataaaatcatctataggagagaaaatatctaacagtaatatcaaactaacgtaacaaaaaccaaaaccaaacaagtggaattgtgcctaatgcaa

SEQ ID NO: 13079 - DNA, 600 bp, Chicken  19866894217278_3
ccatagaccaaatgaagagctcacacgtttcagaacgtgacttggaaatgtaggatgaaaactgttttcctaaggaagtgattttcactttattatattgaaactgtccatacaaggcagataggaagagaattgggcaaatccaccaagcagggctttgtttgtttgtttttcagttggagagaaaactaaggcaatttagaatcaagatgaaaattagaaatctgtggtaatataagctaagcatgaggcaaagttcaccattaacgtgcaaaatttcaaaaggaggctcgaggctcrctcataaaagactcagcaataaatakgttttacagtgcagtgcaaatccagatgctgcctctctctctctgaactcattgctgattaactgaatgcacagcattagcagaacagcagagttaattcaaagagagccaggaaacgcaacacgagcctaggtgctactctgttgagctgcaagaactttgctagccactaacctacatctcacattttccagctaactcagcaccaccccaactaaagaacaccccataaatacctgaggtcagaattccctttcttctgaatagggttaaa

SEQ ID NO: 13080 - DNA, 600 bp, Chicken  19866894217278_4
gtttcagaacgtgacttggaaatgtaggatgaaaactgttttcctaaggaagtgattttcactttattatattgaaactgtccatacaaggcagataggaagagaattgggcaaatccaccaagcagggctttgtttgtttgtttttcagttggagagaaaactaaggcaatttagaatcaagatgaaaattagaaatctgtggtaatataagctaagcatgaggcaaagttcaccattaacgtgcaaaatttcaaaaggaggctcgaggctcrctcataaaagactcagcaataaatakgttttacagtgcagtgcaaatccagatgctgcctctctctctctgaactcattgctgattaactgaatgcacagcattagcagaacagcagagttaattcaaagagagccaggaaacgcaacacgagcctaggtgctactctgttgagctgcaagaactttgctagccactaacctacatctcacattttccagctaactcagcaccaccccaactaaagaacaccccataaatacctgaggtcagaattccctttcttctgaatagggttaaagctctctgacaaactgtgtgcaaaac

SEQ ID NO: 13081 - DNA, 528 bp, Chicken  19866894217283_1
tttcagtaatgctgcttattccaagaaacttagagaaacttctctgtagaggcttggaagtaccaaagttatgaaatgcagagactctgagcagcttcagagataatacattctgttctcttttattagaggttctttctgttcttcaggcttttagtcttcaaactcatagcaacgtttttcttagctttgtctctggaaaagaaaaagtccttttctatccattacttggtgttcactggtccaaggaagaacaattccaatttgcagactttatgggaaagcagcttttgaggagcrttgtttactgagctgcactaatttggagtcacacatctgaataaatcgcatgcaaaagagtagaaaagggtcaggaattttaagggtgggactactgctctgcaaaggcggtcatatcaagaaggcagcgtgcagatcattttgacagttctttggggatcttcattttcttcaaaaagaatccgattgcaaagatgatttttccatctcaagctgataaaaagcatg

SEQ ID NO: 13082 - DNA, 600 bp, Chicken  19866894217284_1
gtgcagagccctagagagctcagcacttgcactgtggcacagaaaggactgagcgagccctgggtctgcccacctgtgctgcgcaggccagaggtggctgctccctgagagctagtttgaatgttatctgtttgctggtctgccccaagtccttagaaagcaaacatccacgaagccacctatgccagttattccccgggcgttctcagaagctgtaaagacaacaagccaaccgagccttaagctgcacaccacccaggcggagagaatggagatgtgacttcagggagcaggaagtgktacggcaccccattaccttccccctgcagggtacatttggctggatcaacagctttgcagataacggccccaaaaacttcatagccgtgacattgccctgccctctcctggggagagaattgaatgctgtcatccacgctggggtgggtgctgtaagcagcactgtttagctttgccagccggcttgccaccacccctttggtgacgaggatccccaggtctgagccacttgtcagcaagygctccgtgaactccacgcctgtcctcatgtccagcaacagctgctgcagctgggccttc

SEQ ID NO: 13083 - DNA, 600 bp, Chicken  19866894217284_2
aagctgcacaccacccaggcggagagaatggagatgtgacttcagggagcaggaagtgktacggcaccccattaccttccccctgcagggtacatttggctggatcaacagctttgcagataacggccccaaaaacttcatagccgtgacattgccctgccctctcctggggagagaattgaatgctgtcatccacgctggggtgggtgctgtaagcagcactgtttagctttgccagccggcttgccaccacccctttggtgacgaggatccccaggtctgagccacttgtcagcaagygctccgtgaactccacgcctgtcctcatgtccagcaacagctgctgcagctgggccttctgcaagtgcagcaggttttctttctgcaccttcaggtcctccagctgcttcagcagccggtcccggtgctcttcaatcgctttcacatatcctctggcaaacagacagatctccgtggccacggcctctgcacgagcgcggatggcactgcccacgccatcagtctggcccagcacatcttctaacgcgytcatgcgctgctgggtgcttctcagcagctcccgcagggagtccccrtgcc

SEQ ID NO: 13084 - DNA, 495 bp, Chicken  19866894217284_3
ccacccctttggtgacgaggatccccaggtctgagccacttgtcagcaagygctccgtgaactccacgcctgtcctcatgtccagcaacagctgctgcagctgggccttctgcaagtgcagcaggttttctttctgcaccttcaggtcctccagctgcttcagcagccggtcccggtgctcttcaatcgctttcacatatcctctggcaaacagacagatctccgtggccacggcctctgcacgagcgcggatggcactgcccacgccatcagtctggcccagcacatcttctaacgcgytcatgcgctgctgggtgcttctcagcagctcccgcagggagtccccrtgccggtgsacagcgttgcttgtgaagtcataggggtgctgccggtgcctttctgcaacacagtcctggcacacgggctggtcacactgctcgcagaacagccctagttcctctgagggatgggaagggcagaagaaaggcttcccag

SEQ ID NO: 13085 - DNA, 448 bp, Chicken  19866894217284_4
aagygctccgtgaactccacgcctgtcctcatgtccagcaacagctgctgcagctgggccttctgcaagtgcagcaggttttctttctgcaccttcaggtcctccagctgcttcagcagccggtcccggtgctcttcaatcgctttcacatatcctctggcaaacagacagatctccgtggccacggcctctgcacgagcgcggatggcactgcccacgccatcagtctggcccagcacatcttctaacgcgytcatgcgctgctgggtgcttctcagcagctcccgcagggagtccccrtgccggtgsacagcgttgcttgtgaagtcataggggtgctgccggtgcctttctgcaacacagtcctggcacacgggctggtcacactgctcgcagaacagccctagttcctctgagggatgggaagggcagaagaaaggcttcccag

SEQ ID NO: 13086 - DNA, 439 bp, Chicken  19866894217284_5
gtgaactccacgcctgtcctcatgtccagcaacagctgctgcagctgggccttctgcaagtgcagcaggttttctttctgcaccttcaggtcctccagctgcttcagcagccggtcccggtgctcttcaatcgctttcacatatcctctggcaaacagacagatctccgtggccacggcctctgcacgagcgcggatggcactgcccacgccatcagtctggcccagcacatcttctaacgcgytcatgcgctgctgggtgcttctcagcagctcccgcagggagtccccrtgccggtgsacagcgttgcttgtgaagtcataggggtgctgccggtgcctttctgcaacacagtcctggcacacgggctggtcacactgctcgcagaacagccctagttcctctgagggatgggaagggcagaagaaaggcttcccag

SEQ ID NO: 13087 - DNA, 600 bp, Chicken  19866894217285_1
tccttcccaaagtgtaagcagaaagcccaggaggccattctgctggccatatggaggagctgcccaccttgttatgtcaggattgtgttcccttggaatagttctcctctgcagccctttagatttctgtaaatgcacttactgcatcaagccaaaaccagaaaactgctgaaagaaagggaggtggtttgcagagagccaggaaaaggctgtgttcctgcagcttccacaactgactgagtgtttaggcatttgcctgatgcagaatccaaaggaatgtaagacatatgggagagtagwtataatcaaggatattctgactcagatctcatgttactagcggtgattggactaartgtttgggcttttggatgaagagggtttttgaaattataatgggccacatcgcatgtaggagaatactgtctcagtgtcagatcttctcccagattttacaatgtgagagatatagtaagtttggaacaaattaaaagtaaaatatagatcaaatacatcagtgatattcatacatatccccctggtatcaacatcctgatttgtacttgtacttgtgtrtgagagaggtgtcctcatacagca

SEQ ID NO: 13088 - DNA, 600 bp, Chicken  19866894217285_2
gagctgcccaccttgttatgtcaggattgtgttcccttggaatagttctcctctgcagccctttagatttctgtaaatgcacttactgcatcaagccaaaaccagaaaactgctgaaagaaagggaggtggtttgcagagagccaggaaaaggctgtgttcctgcagcttccacaactgactgagtgtttaggcatttgcctgatgcagaatccaaaggaatgtaagacatatgggagagtagwtataatcaaggatattctgactcagatctcatgttactagcggtgattggactaartgtttgggcttttggatgaagagggtttttgaaattataatgggccacatcgcatgtaggagaatactgtctcagtgtcagatcttctcccagattttacaatgtgagagatatagtaagtttggaacaaattaaaagtaaaatatagatcaaatacatcagtgatattcatacatatccccctggtatcaacatcctgatttgtacttgtacttgtgtrtgagagaggtgtcctcatacagcaggagatgttccttggctgagctggtaaaaggtgttaggtaagggttctcagctgga

SEQ ID NO: 13089 - DNA, 600 bp, Chicken  19866894217285_3
atgtaagacatatgggagagtagwtataatcaaggatattctgactcagatctcatgttactagcggtgattggactaartgtttgggcttttggatgaagagggtttttgaaattataatgggccacatcgcatgtaggagaatactgtctcagtgtcagatcttctcccagattttacaatgtgagagatatagtaagtttggaacaaattaaaagtaaaatatagatcaaatacatcagtgatattcatacatatccccctggtatcaacatcctgatttgtacttgtacttgtgtrtgagagaggtgtcctcatacagcaggagatgttccttggctgagctggtaaaaggtgttaggtaagggttctcagctggagtgatttctgttatgtttctgtgcacattgaagaaatgtgtttcagagttcaagaggtgggtgcatgttggtactctcttggaccacagtgctgctggaaaagtacctggcaagcacaggctcaaactggagttaatggagttttgccagtgcttaagatgaagtcagatttccttctcaagcatcaagctcttcactacctctccagttaggctacatg

SEQ ID NO: 13090 - DNA, 600 bp, Chicken  19866894217285_4
cagcagcacgtgtgctcagccctgtgagccagcaggagcacattacaccacgctgcatactttatactgcctgcatccaaaacagcagattgattttaagttggctctttcagatcttaaagccttaaacaatacaggccctggatatggctgatccccttctctctgagccctgtcaattgggagctgtgttcccacaccacctgttttctctggaaccctaccgcaccagatttttacttttctgtgctggatggcctaacacatctcaccccctctatcactgttttccgagcaagmttttccatttatatttcacacaatactagcagaatctcattaagtgaccacttccatccaacaaacacaaattagccagatttttaatggagatgccactacagcaagctagacatcgtggcatcagagtaccaggtcctgaccttagcctcctgcagggagagagggggcatagcatatcaatagacccatgttaggctggattttgtttaccatcagctaagataaggcaaatagaagttaaagcagagtaggtgactgtgttaatctataccctaatttaacttgcagtaacttgtt

SEQ ID NO: 13091 - DNA, 502 bp, Chicken  19866894217285_5
tccatccaacaaacacaaattagccagatttttaatggagatgccactacagcaagctagacatcgtggcatcagagtaccaggtcctgaccttagcctcctgcagggagagagggggcatagcatatcaatagacccatgttaggctggattttgtttaccatcagctaagataaggcaaatagaagttaaagcagagtaggtgactgtgttaatctataccctaatttaacttgcagtaacttgttagtatagtcatacctttgggtgactctgttcagtgtactctatgtctcttcytcctacatcagtgaaatgggacaaatgattctttctgtgtaagatacttgctgatctagggataagaaagtgaagtttcagtcaaggtattattaataatcacttattagcccatcaatgttctaattgccacatccatctttcaggagtgtgccttccttgtgatcgtattgcagctttatcctcttctaacaactagtat

SEQ ID NO: 13092 - DNA, 600 bp, Chicken  19866894217289_1
gattagatttgtttttgaagtgaacttctgcacctcgtgcactgtaaccctgcattgactttaatggagcagggtgagttccacttgggtgcagccatttgagttctgtgtgacttgaaggtttctttttttctctttttctacaatttctttttgtatcgaccttataaatgttgtaatttgttctcacattccctttaagttttcttctgggcaggctgagtagctctgatttgtttggattttccctgtaattcatgcttaagagctccattttggtcttcaagttccttgaatatwtgcttccccacaccaggtgccgccctccagctgcagcctaagcgcagaaggactcttgggttttgcaagctgtacccttaatgtgaggtctcttcctctttcataacgttgttcacttgcattcgctttgcaaactgcagcttcgtgttctctgtgcttcgaatgtcttgctgagtggcattcagtgctctcctccatagggaacactgtcctcgcctcccttcagcccagctgtttgtgtaaggcgttgggggtggttatatattctgctcctgcctccagcatgctcgtagtcacttg

SEQ ID NO: 13093 - DNA, 600 bp, Chicken  19866894217291_1
ctttgatgtctgaagccccacctttactgctgctttcactctcagaacactggacagagagaaggatggatatacggaggccaatgtttactctgcacaacaaacaaaaaagactacagtatttaaaaaataagataatcgtgtgtagataacgcaacatatgaatgtggagacaggatgtgggaaggtagttccctgcagaagcaggtggggaagaaatatgccaaggaataaccagggagtatcgatattgtaacacgaaagacatcactagaaggtaatctcctattgccatagggstgcctggcagtccccgcracatttagctgctgtsggatctgtgctaaactttgtgcawtgtgttgaattaaaaagaaaaagtttataaaatcttagaaaatgcctcatctagacagcaaacaattatgtttggtcatatatatataaagtctaacgcacattgtatttatgattacgttttacgggagtataactgcacgataacatcgcaaacaatcagtagtattagcattgcaatatggctattcccagaagaaaaatgaaaggaatgtaatgatgaaagtgtgtgtgtggaggcag

SEQ ID NO: 13094 - DNA, 600 bp, Chicken  19866894217291_2
cacctttactgctgctttcactctcagaacactggacagagagaaggatggatatacggaggccaatgtttactctgcacaacaaacaaaaaagactacagtatttaaaaaataagataatcgtgtgtagataacgcaacatatgaatgtggagacaggatgtgggaaggtagttccctgcagaagcaggtggggaagaaatatgccaaggaataaccagggagtatcgatattgtaacacgaaagacatcactagaaggtaatctcctattgccatagggstgcctggcagtccccgcracatttagctgctgtsggatctgtgctaaactttgtgcawtgtgttgaattaaaaagaaaaagtttataaaatcttagaaaatgcctcatctagacagcaaacaattatgtttggtcatatatatataaagtctaacgcacattgtatttatgattacgttttacgggagtataactgcacgataacatcgcaaacaatcagtagtattagcattgcaatatggctattcccagaagaaaaatgaaaggaatgtaatgatgaaagtgtgtgtgtggaggcagcaccactgtgtcagtaca

SEQ ID NO: 13095 - DNA, 600 bp, Chicken  19866894217291_3
ttcactctcagaacactggacagagagaaggatggatatacggaggccaatgtttactctgcacaacaaacaaaaaagactacagtatttaaaaaataagataatcgtgtgtagataacgcaacatatgaatgtggagacaggatgtgggaaggtagttccctgcagaagcaggtggggaagaaatatgccaaggaataaccagggagtatcgatattgtaacacgaaagacatcactagaaggtaatctcctattgccatagggstgcctggcagtccccgcracatttagctgctgtsggatctgtgctaaactttgtgcawtgtgttgaattaaaaagaaaaagtttataaaatcttagaaaatgcctcatctagacagcaaacaattatgtttggtcatatatatataaagtctaacgcacattgtatttatgattacgttttacgggagtataactgcacgataacatcgcaaacaatcagtagtattagcattgcaatatggctattcccagaagaaaaatgaaaggaatgtaatgatgaaagtgtgtgtgtggaggcagcaccactgtgtcagtacatttacacacagagcac

SEQ ID NO: 13096 - DNA, 594 bp, Chicken  19866894217291_4
gagaaggatggatatacggaggccaatgtttactctgcacaacaaacaaaaaagactacagtatttaaaaaataagataatcgtgtgtagataacgcaacatatgaatgtggagacaggatgtgggaaggtagttccctgcagaagcaggtggggaagaaatatgccaaggaataaccagggagtatcgatattgtaacacgaaagacatcactagaaggtaatctcctattgccatagggstgcctggcagtccccgcracatttagctgctgtsggatctgtgctaaactttgtgcawtgtgttgaattaaaaagaaaaagtttataaaatcttagaaaatgcctcatctagacagcaaacaattatgtttggtcatatatatataaagtctaacgcacattgtatttatgattacgttttacgggagtataactgcacgataacatcgcaaacaatcagtagtattagcattgcaatatggctattcccagaagaaaaatgaaaggaatgtaatgatgaaagtgtgtgtgtggaggcagcaccactgtgtcagtacatttacacacagagcacagccacgaggtaccagga

SEQ ID NO: 13097 - DNA, 600 bp, Chicken  19866894217296_1
cggaagtgagacaagcaatggtcagcgtcagttcattctaacatccactagagtcgtggaatcacagaataccccgcattgggagtgactcatgaagatcattgagtccaactcttagctccgcacaggatcacccaaaaatcagaccttgtgtctgaaagcagtgtctggacaccccttgagctccaccacttggggctgtgcccacagctctgggcagactgttccatgcccgctgccctctggagcaggccctgtccctcaccccagctgcccctctcctggcacagctccatgccrtyccctcgggcyctgtcgctgtcacacagagcagagctcagcgctgcccctccgctccctgtgaggagctgcagccgccatgaggcctcccctcagctcctctgctctgggctgagcaaacccagggcccccagycactccttgcacaccctgcyctccagacccagccactgctgatcagttccttccttactataggaaatgcttttcctatacctggagggcaacagcagcaacctagcaggtgagkctggaggtgaggctgcaggagtgccctgggtgactacagctgctcatttc

SEQ ID NO: 13098 - DNA, 600 bp, Chicken  19866894217296_2
gaagtgagacaagcaatggtcagcgtcagttcattctaacatccactagagtcgtggaatcacagaataccccgcattgggagtgactcatgaagatcattgagtccaactcttagctccgcacaggatcacccaaaaatcagaccttgtgtctgaaagcagtgtctggacaccccttgagctccaccacttggggctgtgcccacagctctgggcagactgttccatgcccgctgccctctggagcaggccctgtccctcaccccagctgcccctctcctggcacagctccatgccrtyccctcgggcyctgtcgctgtcacacagagcagagctcagcgctgcccctccgctccctgtgaggagctgcagccgccatgaggcctcccctcagctcctctgctctgggctgagcaaacccagggcccccagycactccttgcacaccctgcyctccagacccagccactgctgatcagttccttccttactataggaaatgcttttcctatacctggagggcaacagcagcaacctagcaggtgagkctggaggtgaggctgcaggagtgccctgggtgactacagctgctcatttcct

SEQ ID NO: 13099 - DNA, 600 bp, Chicken  19866894217296_3
aagcaatggtcagcgtcagttcattctaacatccactagagtcgtggaatcacagaataccccgcattgggagtgactcatgaagatcattgagtccaactcttagctccgcacaggatcacccaaaaatcagaccttgtgtctgaaagcagtgtctggacaccccttgagctccaccacttggggctgtgcccacagctctgggcagactgttccatgcccgctgccctctggagcaggccctgtccctcaccccagctgcccctctcctggcacagctccatgccrtyccctcgggcyctgtcgctgtcacacagagcagagctcagcgctgcccctccgctccctgtgaggagctgcagccgccatgaggcctcccctcagctcctctgctctgggctgagcaaacccagggcccccagycactccttgcacaccctgcyctccagacccagccactgctgatcagttccttccttactataggaaatgcttttcctatacctggagggcaacagcagcaacctagcaggtgagkctggaggtgaggctgcaggagtgccctgggtgactacagctgctcatttcctcttttgttcc

SEQ ID NO: 13100 - DNA, 600 bp, Chicken  19866894217296_4
caaaaatcagaccttgtgtctgaaagcagtgtctggacaccccttgagctccaccacttggggctgtgcccacagctctgggcagactgttccatgcccgctgccctctggagcaggccctgtccctcaccccagctgcccctctcctggcacagctccatgccrtyccctcgggcyctgtcgctgtcacacagagcagagctcagcgctgcccctccgctccctgtgaggagctgcagccgccatgaggcctcccctcagctcctctgctctgggctgagcaaacccagggcccccagycactccttgcacaccctgcyctccagacccagccactgctgatcagttccttccttactataggaaatgcttttcctatacctggagggcaacagcagcaacctagcaggtgagkctggaggtgaggctgcaggagtgccctgggtgactacagctgctcatttcctcttttgttcctgtgggcagcgctctgccttttccacagtccgcccttctgtacttattatattctgcagcctcttgccagaatttgcaaactcatggacagtaaaaccatgcacctccacagagcagtgagga

SEQ ID NO: 13101 - DNA, 600 bp, Chicken  19866894217296_5
tgaaagcagtgtctggacaccccttgagctccaccacttggggctgtgcccacagctctgggcagactgttccatgcccgctgccctctggagcaggccctgtccctcaccccagctgcccctctcctggcacagctccatgccrtyccctcgggcyctgtcgctgtcacacagagcagagctcagcgctgcccctccgctccctgtgaggagctgcagccgccatgaggcctcccctcagctcctctgctctgggctgagcaaacccagggcccccagycactccttgcacaccctgcyctccagacccagccactgctgatcagttccttccttactataggaaatgcttttcctatacctggagggcaacagcagcaacctagcaggtgagkctggaggtgaggctgcaggagtgccctgggtgactacagctgctcatttcctcttttgttcctgtgggcagcgctctgccttttccacagtccgcccttctgtacttattatattctgcagcctcttgccagaatttgcaaactcatggacagtaaaaccatgcacctccacagagcagtgaggaacaaaggagtaattcctgtc

SEQ ID NO: 13102 - DNA, 575 bp, Chicken  19866894217296_6
ggccctgtccctcaccccagctgcccctctcctggcacagctccatgccrtyccctcgggcyctgtcgctgtcacacagagcagagctcagcgctgcccctccgctccctgtgaggagctgcagccgccatgaggcctcccctcagctcctctgctctgggctgagcaaacccagggcccccagycactccttgcacaccctgcyctccagacccagccactgctgatcagttccttccttactataggaaatgcttttcctatacctggagggcaacagcagcaacctagcaggtgagkctggaggtgaggctgcaggagtgccctgggtgactacagctgctcatttcctcttttgttcctgtgggcagcgctctgccttttccacagtccgcccttctgtacttattatattctgcagcctcttgccagaatttgcaaactcatggacagtaaaaccatgcacctccacagagcagtgaggaacaaaggagtaattcctgtctgcacaagctgtctctgacttgtgatttatacctgaagaaagtcagtggttgtatttgcagaatgctgtg

SEQ ID NO: 13103 - DNA, 600 bp, Chicken  19866894217298_1
atgcaaaatagcagctcatcaaaaattctgttttattggtatcaaaaatttatgatatcctgaggcatgaggggcagagagcaagggaggaaagccgtgtcctttcaccaagtttggctctttctttaaaggaacctctcaaacttcttcctcccttccgccacgctctgggaggcagcgggtaaaggtttattccagagaggtcccaaatggtgatggcaccacatggatacaatgcaccactctatgagctccccgcagactcccatttccagcatggaaatgaagggagctgggagracacgtttgcacagatacagagatgggcttcttcctaaacttgggtgttttcgttcagcatcgcagtgatgcacacacattgcaaatgcgtcgcgtagctggtgcctgtctctgayggctgaatcctgcagcctcccagcagcaaaacagatctgattctgctcttcccactaatgagacttttccaggaaggctttataatggatattaaacactcacttgcaaaggtgtggtgtgcagtgtgatttttttccaaggtgttgcaagaaatcagcgccaagcgtctgaaagctgcacaca

SEQ ID NO: 13104 - DNA, 600 bp, Chicken  19866894217298_2
gctctttctttaaaggaacctctcaaacttcttcctcccttccgccacgctctgggaggcagcgggtaaaggtttattccagagaggtcccaaatggtgatggcaccacatggatacaatgcaccactctatgagctccccgcagactcccatttccagcatggaaatgaagggagctgggagracacgtttgcacagatacagagatgggcttcttcctaaacttgggtgttttcgttcagcatcgcagtgatgcacacacattgcaaatgcgtcgcgtagctggtgcctgtctctgayggctgaatcctgcagcctcccagcagcaaaacagatctgattctgctcttcccactaatgagacttttccaggaaggctttataatggatattaaacactcacttgcaaaggtgtggtgtgcagtgtgatttttttccaaggtgttgcaagaaatcagcgccaagcgtctgaaagctgcacacatggaattaaacagtatttgatgcctcttcagtagggctggtggaaacgatggagstggccacactgtgagtgtccttgggcagctggaggaactgaggcatagagccccacgggga

SEQ ID NO: 13105 - DNA, 561 bp, Chicken  19866894217298_3
cagcatcgcagtgatgcacacacattgcaaatgcgtcgcgtagctggtgcctgtctctgayggctgaatcctgcagcctcccagcagcaaaacagatctgattctgctcttcccactaatgagacttttccaggaaggctttataatggatattaaacactcacttgcaaaggtgtggtgtgcagtgtgatttttttccaaggtgttgcaagaaatcagcgccaagcgtctgaaagctgcacacatggaattaaacagtatttgatgcctcttcagtagggctggtggaaacgatggagstggccacactgtgagtgtccttgggcagctggaggaactgaggcatagagccccacggggatctgctcccacagtgccatcacagctgcagaatgggaacrgtgtcactcacagcaaggggtgctgagtgcaagccctcgtcagtctgtgtgttaatggggcccatctcatttggtagtgagtggagcagaaacttccctgctgggtcaggggactcgttcaggagagaagttacagagggcaataaatccgcaccttgga

SEQ ID NO: 13106 - DNA, 460 bp, Chicken  19866894217298_4
ttctgctcttcccactaatgagacttttccaggaaggctttataatggatattaaacactcacttgcaaaggtgtggtgtgcagtgtgatttttttccaaggtgttgcaagaaatcagcgccaagcgtctgaaagctgcacacatggaattaaacagtatttgatgcctcttcagtagggctggtggaaacgatggagstggccacactgtgagtgtccttgggcagctggaggaactgaggcatagagccccacggggatctgctcccacagtgccatcacagctgcagaatgggaacrgtgtcactcacagcaaggggtgctgagtgcaagccctcgtcagtctgtgtgttaatggggcccatctcatttggtagtgagtggagcagaaacttccctgctgggtcaggggactcgttcaggagagaagttacagagggcaataaatccgcaccttgga

SEQ ID NO: 13107 - DNA, 599 bp, Chicken  19866894217303_1
  misc_feature (1)..(107): n is any nucleotide
nnnnnnnnnnnnnnnnnnnnnnnnnnnnnnnnnnnnnnnnnnnnnnnnnnnnnnnnnnnnnnnnnnnnnnnnnnnnnnnnnnnnnnnnnnnnnnnnnnnnnnnnnnncacataccaccacttccaagactaatcccaagcaatttcctacagggagttatgaaactcaaacaaacaattccacaaaaattcccaaagcaattttcattgtaaaaaactgttatttattttttttcctgaaaatctatatcaggaagcaaactcacccactgtagctctctgtagagcttaaccttttggrttccacacatggacacagggctgcacgcagccttgctttgtgcagtcacatcttctcatgtcattaacgtgctgctcccccacccactgcccccagccacagcacccgggtgacttccaggagcaagcatctggtttgtcctccgtgctttacaacgacttttggttaggtgacagcactgtgagtagggttcaagagccatgagctccccatcttggctttccatggtgagcagctggttctcacctgaaaacactgaaattacacccagtggcatttacttaaggaacactgtctac

SEQ ID NO: 13108 - DNA, 600 bp, Chicken  19866894217306_1
tactgtcttcctttcacaacacagggatcttgtgctgtaatgtacatcccttacttaggggagccgtctgagccttgctgctgtcaaccatactaaccaaaacttactattaaatataataaatcggtgttttaaaatcccccttgcataacagcagtaagtttaaagcattcaggcattttaaagtgatccttaagtgatgatgtaccagtcaaattagaagtattatgtacatttctgtcttacttgggtatatttctcagactactcatcatttcctgctattatatttaataacastacatcattgttatgcaaaatatttttcttctaaatttcagtattaaattcacttgtattgcattctgttgacttgttcataggtccttttttgttgagcctaaatstatggatgtaattcctttgttgtgaaagagtcaagtaatacatgtaaggatttagtcatcattatactgtctttaaatagtatcagactaaccaaaatttcagaacagctattgatgagggcaggatataaattttctgtaattattgggttctcaacttaccacaaacaatcaatttccaccttggcccagg

SEQ ID NO: 13109 - DNA, 600 bp, Chicken  19866894217306_2
tattaaatataataaatcggtgttttaaaatcccccttgcataacagcagtaagtttaaagcattcaggcattttaaagtgatccttaagtgatgatgtaccagtcaaattagaagtattatgtacatttctgtcttacttgggtatatttctcagactactcatcatttcctgctattatatttaataacastacatcattgttatgcaaaatatttttcttctaaatttcagtattaaattcacttgtattgcattctgttgacttgttcataggtccttttttgttgagcctaaatstatggatgtaattcctttgttgtgaaagagtcaagtaatacatgtaaggatttagtcatcattatactgtctttaaatagtatcagactaaccaaaatttcagaacagctattgatgagggcaggatataaattttctgtaattattgggttctcaacttaccacaaacaatcaatttccaccttggcccaggtatcttatgatatggatggattctgcgagagaaatcgggatgttcttttcatggacttgattgaactcatgcagagcagtgatttgtacgtaagcaaaatttgctta

SEQ ID NO: 13110 - DNA, 599 bp, Chicken  19866894217309_1
  misc_feature (1)..(113): n is any nucleotide
nnnnnnnnnnnnnnnnnnnnnnnnnnnnnnnnnnnnnnnnnnnnnnnnnnnnnnnnnnnnnnnnnnnnnnnnnnnnnnnnnnnnnnnnnnnnnnnnnnnnnnnnnnnnnnnnnacatactattcctttagattaactgcaattgtctagtgcagaaaatagtagttttccagagcaattactgtgctctaaaagggaacaattaagaagacaagctacgtctcttagtctaaagaacataagggtttacactgttcaggtttgaaagacagttattaaaacacccaggttaaccagctgrcaattttccgcaccatcagtgaaagcactgtgaacaatgaaggaaccacagcatggagcaatagactcatcttccatatagccaggaaactracagcaatttggcccaagaatacctgaatacaaacttaagcccactggatctaatgttgtttcacagtgttcctaccaaacttaactaaaacccctcaataycttagcaggaaaacaacaagaacgagaaactaactgcagttcagatatgggaacattactaccactgggtctgctttttctgatgtctttacttacataaagcac

SEQ ID NO: 13111 - DNA, 599 bp, Chicken  19866894217309_2
  misc_feature (1)..(21): n is any nucleotide
nnnnnnnnnnnnnnnnnnnnnacatactattcctttagattaactgcaattgtctagtgcagaaaatagtagttttccagagcaattactgtgctctaaaagggaacaattaagaagacaagctacgtctcttagtctaaagaacataagggtttacactgttcaggtttgaaagacagttattaaaacacccaggttaaccagctgrcaattttccgcaccatcagtgaaagcactgtgaacaatgaaggaaccacagcatggagcaatagactcatcttccatatagccaggaaactracagcaatttggcccaagaatacctgaatacaaacttaagcccactggatctaatgttgtttcacagtgttcctaccaaacttaactaaaacccctcaataycttagcaggaaaacaacaagaacgagaaactaactgcagttcagatatgggaacattactaccactgggtctgctttttctgatgtctttacttacataaagcacttctcactgaattgttgccatttggtaaagaagtcattagaacaataaacttcacattaagcagtggtttaatacaaagagtaactatatga

SEQ ID NO: 13112 - DNA, 600 bp, Chicken  19866894217309_3
ggaacaattaagaagacaagctacgtctcttagtctaaagaacataagggtttacactgttcaggtttgaaagacagttattaaaacacccaggttaaccagctgrcaattttccgcaccatcagtgaaagcactgtgaacaatgaaggaaccacagcatggagcaatagactcatcttccatatagccaggaaactracagcaatttggcccaagaatacctgaatacaaacttaagcccactggatctaatgttgtttcacagtgttcctaccaaacttaactaaaacccctcaataycttagcaggaaaacaacaagaacgagaaactaactgcagttcagatatgggaacattactaccactgggtctgctttttctgatgtctttacttacataaagcacttctcactgaattgttgccatttggtaaagaagtcattagaacaataaacttcacattaagcagtggtttaatacaaagagtaactatatgattgcatgatttctttacattaataggtgatgccacagtacctcatattttaaggatcctgatgctgctcagttatcccgtgaattaacctatgctgccacagt

SEQ ID NO: 13113 - DNA, 600 bp, Chicken  19866894217310_1
catctgttgcaactcccttgcaatgaacagggacaccaccaggtagatcagggttgcccagggccttaactagcctggccttgaaagtctctagggacaggacattaaccacatggctaggcaacctgtcacagtgcctcaccaccctcactgtataagactttttctttatagctttgcaaaatcttcccctctctgagcttgaaaccatttccccttgttctgtcacacagaccctgctaaaaagtctgtcccttctttcctgtagttcccctttagatactgacacaccgctcttakgtcacctcacagccttttcttctccaggctgcacagccccagctctctcagcctgtcctgacaggggaggtgttccatcccttggatcatttttgtggccctcctctggttacactccagtgggtccatgtctctcctgcactgaggactccacatgtggacgcagtgctccaggtgaggcctcaccagcacagagcagaggagcatgatcacctccctcgccctacttgtcacgcttctttggacgcagcccaggatacgattggctttctgaactatgagggcacactgctgcctcat

SEQ ID NO: 13114 - DNA, 600 bp, Chicken  19866894217310_2
atcatttttgtggccctcctctggttacactccagtgggtccatgtctctcctgcactgaggactccacatgtggacgcagtgctccaggtgaggcctcaccagcacagagcagaggagcatgatcacctccctcgccctacttgtcacgcttctttggacgcagcccaggatacgattggctttctgaactatgagggcacactgctgcctcatgtctagcttgccatccaccagcagccccaggcctttttcgacagggctgtgcttaatcctttcatccccagcttgtattggtagygaggattgccttgacccaggtgcagaccttgcattagccctgcggagaaggacttgagggtcctgctggacaagaagctggacatgagccagcagtgtgtgcttgcagcccggaatgccaactgtgttttgggctgcattaaaaaggggtggccagcagggagagggaggtgattgtcgccctctacttggctcttgtgaggccccatctggagtactgtatccaggcctggggcccccagcacaagaaaaacatggagctcttggaacaggtccagaggaggaccactgagatgatcag

SEQ ID NO: 13115 - DNA, 600 bp, Chicken  19866894217311_1
tactattagcatattttcctgctgagttttctgtttgcttatcaaaatatgatgtttaagaagccaaaactgaagcagaacttgtttccactgaaatgagtgaggtcattgcatgcatttcttctagagagagtttcaaactttctgaagggaggaaacgtttctagctcagaaataagttaaaatttcaggattccacaatcttccctgagtcagttttgtatctcagagggtgaagcaccagcaaatacttattgctaaatggaagaggatccacaagacggcccttgtttgaagtcrctgtttggtactgtagaaaaaagatagctggcacgagtgtgctctgccagctatttgggtattcacaacagtactcccctgttgagccacatctgataaagcagatctacacgcaacctgccatggctgttggtgcacaaataatcagaagggagaatggcatgaatatgagcatcttagtccataaagtgcagcagtctgagcaaagtaggtgttgcagcactgcagactaggatgatcccaggtgctcctataaatcacaaaagtaaaggcttatgtttctgattctttcatgccaag

SEQ ID NO: 13116 - DNA, 600 bp, Chicken  19866894217315_1
cacagtcagcagaaagaaaagtaaaaacagctttccactcccacttctccagggaaggctgaacattaggctattaggcagtcagatacattattttatagctagcaatgcccctgggtaatgaagaatgagtgcaactgccacaggcagctttacaggaaattgtgtgaaacaatgacagatgttccagaattgtttcaaaacaaaggcagcccaaagagcactggatcagctgagggctggtttcccttcctcccagactacattctccactataccgacagaacacaaacaaatttwagttcaaaattatatgcacatatgcatgcaaacttaaaagcttctgccaataagtaactaacaaatgtctgtttattttgccactctcaagagcagaactttccccttttaagacaaacagtttgtgtcaaagaacacaagctaatatgaataagtgacaaaagtcatgtttttctataaagctttacacaaaatgtccaagtcccattttcaatggtattgagagtactaagcctccccaacccaggctgcagtgagtgcagccctcactcactgccaaatgtgggacttagagcacca

SEQ ID NO: 13117 - DNA, 599 bp, Chicken  19866894217318_1
  misc_feature (1)..(23): n is any nucleotide
nnnnnnnnnnnnnnnnnnnnnnntgatggaaggatttgtaagaaatgctgcagacggttgaaaatgaaacccatagatccaagcaagagttaagttttaatttgcactcagtcacttccttggcagctctattgcctgaaacttatcagccttgcttcctgatgacaatgtgttactgacatcagctcaagttggtggcaaagatattaccgatttagaaaataagctgtcatccagcggaaatggtctgttgtttgatgcacagcgtcaccatgacctgggatagtcggggggatgacygagctggcagcagtgttcatcttcactttatgttgtctttatgttgagtccataatgaggtggagatctggcttgtaaaattcaggcagtaaggaaagctaacaaattttacgtactatttttttattcttttttttgtgcttgcatcacacttctaccttttccttacgttcataagaactcataactttctattttatgtgaaagctgagattcccatgtagtcacttaactctatagctgaggtttgaagaaaaatagatgttgtgaaactcactataaaaccacaagagctgcca

SEQ ID NO: 13118 - DNA, 599 bp, Chicken  19866894217323_1
  misc_feature (1)..(132): n is any nucleotide
nnnnnnnnnnnnnnnnnnnnnnnnnnnnnnnnnnnnnnnnnnnnnnnnnnnnnnnnnnnnnnnnnnnnnnnnnnnnnnnnnnnnnnnnnnnnnnnnnnnnnnnnnnnnnnnnnnnnnnnnnnnnnnnnnnnncacccgcagcaatacctggggatgtactgaaggtctcaaagcaggaaaaaaatcctgcaaagcaacccctgggagatgactgtaatctgggccaacttgttatcctattcccagtttgcatgatgctgcgatatgtaaatcaaacaaaaaatgaccctggtttccagrcacactttaaatttagtatctcagaagcattgcatttaggcttaataaaagttatgatttgttgattaaataccagctgaaagctgaaagagtgcttcctgagctttatagggccgcaggcaataaattgtgttgccgcctaattattctgtctgactgcgatctccaaaagagaacacgatgcgtatttgtcacaatgctgggggaggaggaccctgggcattctgaactytatcatcactgtgtttgtgagggaggcagggggacctgggcacaatyccacacatcagcatgcagag

SEQ ID NO: 13119 - DNA, 600 bp, Chicken  19866894217323_2
tatcctattcccagtttgcatgatgctgcgatatgtaaatcaaacaaaaaatgaccctggtttccagrcacactttaaatttagtatctcagaagcattgcatttaggcttaataaaagttatgatttgttgattaaataccagctgaaagctgaaagagtgcttcctgagctttatagggccgcaggcaataaattgtgttgccgcctaattattctgtctgactgcgatctccaaaagagaacacgatgcgtatttgtcacaatgctgggggaggaggaccctgggcattctgaactytatcatcactgtgtttgtgagggaggcagggggacctgggcacaatyccacacatcagcatgcagagccttagcacacaatcagcagagccatctcatcctacctccgagttccccaggagcttcatgcaatccatgaatttctcacctcaaatcagaaagcctccagtgggtcaaacatgaaccccaagtgtgatggaactctatgaggtgtctgtgccatcccaccagtttcctgaaagggaacaacaagccttccctattgcaaagccaaggacaccccagaagtgtattctctatt

SEQ ID NO: 13120 - DNA, 600 bp, Chicken  19866894217323_3
aaaatgaccctggtttccagrcacactttaaatttagtatctcagaagcattgcatttaggcttaataaaagttatgatttgttgattaaataccagctgaaagctgaaagagtgcttcctgagctttatagggccgcaggcaataaattgtgttgccgcctaattattctgtctgactgcgatctccaaaagagaacacgatgcgtatttgtcacaatgctgggggaggaggaccctgggcattctgaactytatcatcactgtgtttgtgagggaggcagggggacctgggcacaatyccacacatcagcatgcagagccttagcacacaatcagcagagccatctcatcctacctccgagttccccaggagcttcatgcaatccatgaatttctcacctcaaatcagaaagcctccagtgggtcaaacatgaaccccaagtgtgatggaactctatgaggtgtctgtgccatcccaccagtttcctgaaagggaacaacaagccttccctattgcaaagccaaggacaccccagaagtgtattctctattctctctaatcgatagagatcgttaactatgcctgtcacagtgatttc

SEQ ID NO: 13121 - DNA, 599 bp, Chicken  19866894217330_1
  misc_feature (1)..(111): n is any nucleotide
nnnnnnnnnnnnnnnnnnnnnnnnnnnnnnnnnnnnnnnnnnnnnnnnnnnnnnnnnnnnnnnnnnnnnnnnnnnnnnnnnnnnnnnnnnnnnnnnnnnnnnnnnnnnnnnaatcccagtataatcaatggagtgagtaatatttactggttttgtgatgaatggctctctctggaagaaaagatatttttatgtatgaattctgacagccaaggtagctgtaagatacagtctgaaataaatagctgttttattttaagcaagctggatgattcaaacaatgcaggcgaagatgcagtwactcacacctccactaatagtttatttacaatcctacrgttacttttgtttaactctgttctacctcccactgttattgaggcaacttctatttttcaggaaaagttcaytgcaagatcattcttaagtagaaaggacaaagaagttaaacaacagtgttacaggttgccacctaccagggctctgtgtacaggatggtagattggaactgaaacatgtacattgggttgcagggctttgcaccacttaagcaagtttatgctctttcagcatgggcayggttaggagtgcatagccaa

SEQ ID NO: 13122 - DNA, 599 bp, Chicken  19866894217330_2
  misc_feature (1)..(73): n is any nucleotide
nnnnnnnnnnnnnnnnnnnnnnnnnnnnnnnnnnnnnnnnnnnnnnnnnnnnnnnnnnnnnnnnnnnnnnnnnaatcccagtataatcaatggagtgagtaatatttactggttttgtgatgaatggctctctctggaagaaaagatatttttatgtatgaattctgacagccaaggtagctgtaagatacagtctgaaataaatagctgttttattttaagcaagctggatgattcaaacaatgcaggcgaagatgcagtwactcacacctccactaatagtttatttacaatcctacrgttacttttgtttaactctgttctacctcccactgttattgaggcaacttctatttttcaggaaaagttcaytgcaagatcattcttaagtagaaaggacaaagaagttaaacaacagtgttacaggttgccacctaccagggctctgtgtacaggatggtagattggaactgaaacatgtacattgggttgcagggctttgcaccacttaagcaagtttatgctctttcagcatgggcayggttaggagtgcatagccaaccattcctgcagtgtagcaacaacaggtgaagatgcca

SEQ ID NO: 13123 - DNA, 599 bp, Chicken  19866894217330_3
  misc_feature (1)..(1): n is any nucleotide
naatcccagtataatcaatggagtgagtaatatttactggttttgtgatgaatggctctctctggaagaaaagatatttttatgtatgaattctgacagccaaggtagctgtaagatacagtctgaaataaatagctgttttattttaagcaagctggatgattcaaacaatgcaggcgaagatgcagtwactcacacctccactaatagtttatttacaatcctacrgttacttttgtttaactctgttctacctcccactgttattgaggcaacttctatttttcaggaaaagttcaytgcaagatcattcttaagtagaaaggacaaagaagttaaacaacagtgttacaggttgccacctaccagggctctgtgtacaggatggtagattggaactgaaacatgtacattgggttgcagggctttgcaccacttaagcaagtttatgctctttcagcatgggcayggttaggagtgcatagccaaccattcctgcagtgtagcaacaacaggtgaagatgccactacccagctgtgagtcataaccaactttactaatttttacgtgwtaagactatcccctaattacatttatt

SEQ ID NO: 13124 - DNA, 600 bp, Chicken  19866894217330_4
aatgcaggcgaagatgcagtwactcacacctccactaatagtttatttacaatcctacrgttacttttgtttaactctgttctacctcccactgttattgaggcaacttctatttttcaggaaaagttcaytgcaagatcattcttaagtagaaaggacaaagaagttaaacaacagtgttacaggttgccacctaccagggctctgtgtacaggatggtagattggaactgaaacatgtacattgggttgcagggctttgcaccacttaagcaagtttatgctctttcagcatgggcayggttaggagtgcatagccaaccattcctgcagtgtagcaacaacaggtgaagatgccactacccagctgtgagtcataaccaactttactaatttttacgtgwtaagactatcccctaattacatttattcagtagtatatttagatgaaataatctgccatactggatattcaaccacgtagctatacyttgagaaagtggagaacagatatgccataggaaccacatacatacatgtgggcaatatattttgcatgggccagaaattgggagaaaggtgctttctctcactgtgctcc

SEQ ID NO: 13125 - DNA, 600 bp, Chicken  19866894217330_5
caacttctatttttcaggaaaagttcaytgcaagatcattcttaagtagaaaggacaaagaagttaaacaacagtgttacaggttgccacctaccagggctctgtgtacaggatggtagattggaactgaaacatgtacattgggttgcagggctttgcaccacttaagcaagtttatgctctttcagcatgggcayggttaggagtgcatagccaaccattcctgcagtgtagcaacaacaggtgaagatgccactacccagctgtgagtcataaccaactttactaatttttacgtgwtaagactatcccctaattacatttattcagtagtatatttagatgaaataatctgccatactggatattcaaccacgtagctatacyttgagaaagtggagaacagatatgccataggaaccacatacatacatgtgggcaatatattttgcatgggccagaaattgggagaaaggtgctttctctcactgtgctccatctcagtcaaacgaaaggctgctagaaattaaaatgctagggttttttttgtttgtttgtttgtttttagtttacttttggctttgtttttctggagagtaa

SEQ ID NO: 13126 - DNA, 600 bp, Chicken  19866894217330_6
cacctaccagggctctgtgtacaggatggtagattggaactgaaacatgtacattgggttgcagggctttgcaccacttaagcaagtttatgctctttcagcatgggcayggttaggagtgcatagccaaccattcctgcagtgtagcaacaacaggtgaagatgccactacccagctgtgagtcataaccaactttactaatttttacgtgwtaagactatcccctaattacatttattcagtagtatatttagatgaaataatctgccatactggatattcaaccacgtagctatacyttgagaaagtggagaacagatatgccataggaaccacatacatacatgtgggcaatatattttgcatgggccagaaattgggagaaaggtgctttctctcactgtgctccatctcagtcaaacgaaaggctgctagaaattaaaatgctagggttttttttgtttgtttgtttgtttttagtttacttttggctttgtttttctggagagtaaaggctgtactcagaggtatttttcctgcatgtttatgctaaaacacccttgaagcaggcatgatcttttacatgtcaagaatactga

SEQ ID NO: 13127 - DNA, 600 bp, Chicken  19866894217330_7
ctcactgctgtctttctcctaatgtttttctctaagtttttctcctcctctttgtgtacccatataatgcaagaaagccggctggaaagctccaattcattttagcagaaacatgtaaaaccagatgcaatacttcaggtttgcaagatctcttagaacagttgtattcttgtctgtaggtgaagatatctgctgctatcacccttcccttttaagcagtggttaggacaaccctctggactgcaaaagctgcacattcaagtccatgttctaaaacttgttgtaagcaataagccattyatgtaaggaagtaaggagytcaaaatcagtgacagtggaaaagatatttgttaaattcttctttttcctttttgggcaggtctccaaaaagtgccactgaagccttagagaaaagaagttcatttgccccctcctcagctgtatatatagtttatacagtagaggagatcacctctccttgcatgtcctcactgagatagccatttttttttctccacctctggtctgacaatccctagtctcccctttctgcatttcattacttggctggctttgcccctgttgaacacaagctgtgac

SEQ ID NO: 13128 - DNA, 600 bp, Chicken  19866894217330_8
taatgtttttctctaagtttttctcctcctctttgtgtacccatataatgcaagaaagccggctggaaagctccaattcattttagcagaaacatgtaaaaccagatgcaatacttcaggtttgcaagatctcttagaacagttgtattcttgtctgtaggtgaagatatctgctgctatcacccttcccttttaagcagtggttaggacaaccctctggactgcaaaagctgcacattcaagtccatgttctaaaacttgttgtaagcaataagccattyatgtaaggaagtaaggagytcaaaatcagtgacagtggaaaagatatttgttaaattcttctttttcctttttgggcaggtctccaaaaagtgccactgaagccttagagaaaagaagttcatttgccccctcctcagctgtatatatagtttatacagtagaggagatcacctctccttgcatgtcctcactgagatagccatttttttttctccacctctggtctgacaatccctagtctcccctttctgcatttcattacttggctggctttgcccctgttgaacacaagctgtgacacctcctttctcttctcta

SEQ ID NO: 13129 - DNA, 599 bp, Chicken  19866894217338_1
  misc_feature (1)..(123): n is any nucleotide
nnnnnnnnnnnnnnnnnnnnnnnnnnnnnnnnnnnnnnnnnnnnnnnnnnnnnnnnnnnnnnnnnnnnnnnnnnnnnnnnnnnnnnnnnnnnnnnnnnnnnnnnnnnnnnnnnnnnnnnnnnngacagggggaaatggtttcgaactataggaggggagatttagactggatataagaaataagctttttatgatgagggtgagacactgacacaagttgcccagagaggtggtgggtgctccgtatctggagacactccagggtcaggctggatggggttctaagcacctgatcagctrtaggtgtccctgttcaatgcaagggagttggaccagaggatctttaaagatcccttccaactcaaatgagtgtatggttttatgattctacttattaatttaatagggatctgatggatggaactcagggctgtatatatcagtatgaggactcaggagtgaaattcttgaccgactgagatctgcggctcaatttacagtttccaggaaggataggattgaagttcagatatctttggcygctcatcttcatggatattgaactttttttttaatctaaaaaatgacttttttttcct

SEQ ID NO: 13130 - DNA, 600 bp, Chicken  19866894217338_2
ccgtatctggagacactccagggtcaggctggatggggttctaagcacctgatcagctrtaggtgtccctgttcaatgcaagggagttggaccagaggatctttaaagatcccttccaactcaaatgagtgtatggttttatgattctacttattaatttaatagggatctgatggatggaactcagggctgtatatatcagtatgaggactcaggagtgaaattcttgaccgactgagatctgcggctcaatttacagtttccaggaaggataggattgaagttcagatatctttggcygctcatcttcatggatattgaactttttttttaatctaaaaaatgacttttttttcctgctgctaccattttcagccgtatgaacagctatgatgacaccctacaaagttgccattatgttggtgatattagtattaatcacacattgctggatactgtaattgaatagtttttacacagatgatattaactgataaaatatggcatcctcatgagaaaacattaccttgaaatattagcgttataatatgttaatttctatggaggatacgactacagatatatgaggagatgtaaatt

SEQ ID NO: 13131 - DNA, 600 bp, Chicken  19866894217340_1
gccgctcacctcctctccccatcgtcaccaactgcagaacacagcaccttcacaccccaactgccagcagcggagcagccatccagctgggcgttgcttcccagccccaaggcctgcaggcactctgcgctggctgctctacccatcactgaacccccggcgagcacacagggagctctgccagagggagacggcccctgcagacagagctgggcccaaaagagcagagcaagcagctgtgtgcgtacacggctttaatgggtaaccagcctggcctgcacacacagctctgcagcagaragggccatctgggagcaaaacgagctgcaatgtgagcaaaggcagtttattagcagcggccgtggaaccagcaggatttctggcagccccgcttgctgtgggatcaaggtattatttcagctattgacagactgcccagcaaggcacccaaacaaaagtctgtttcaaagacaaaagtctgacagcacaacacactgccaggaggggctgcagccacagccactgctcctccacagccccatccaacgcacagcacagcgcgggcacagcgagcaccgggagctctgcagggaagcaggg

SEQ ID NO: 13132 - DNA, 525 bp, Chicken  19866894217340_2
agcaaaggcagtttattagcagcggccgtggaaccagcaggatttctggcagccccgcttgctgtgggatcaaggtattatttcagctattgacagactgcccagcaaggcacccaaacaaaagtctgtttcaaagacaaaagtctgacagcacaacacactgccaggaggggctgcagccacagccactgctcctccacagccccatccaacgcacagcacagcgcgggcacagcgagcaccgggagctctgcagggaagcagggcaacaaacacagctgtcagtgagctgcaataccygcaggctgggagagcttcgagcagggcgggatgcacggagcgagatgtgctctgctcccctgacagcacccagctcctgcccagctctgctccccggaatctgagtgcacagggaagggcccagcagcagccagccaggagctgctcccagagcacacagcactacagcacagctcctccagactgcctgagaacgccctgtgtcagcagcatgcacggaacgca

SEQ ID NO: 13133 - DNA, 600 bp, Chicken  19866894217342_1
atatggaccagggagaagtatccaacattcagctgctttctcaagtatgtctagttgtggcctgcagtttaaagattgttacttgatttgaaagcccgttacatctcatgaaacttagatatttagcttctggctgctttcagagtttaaatgctgtcatttcaccttatgcacatagaaatatttttcctttctatgccaaagcgatccatccacctctcccacaggttcttatagcagtttctggggtacagtagcacaggatttcttccgtgagagcaatttgctctgccattctaytgtctgcaatgtatgcagctgtactgttttaccatgttggtcttggaaggagctggaaaacaactggtttccagcttaagctttactccttcctagcccactgtgctctccaagggaatctctgcgggattctgttaaagaggaaaaggaagatgaagttgtgttcagagctagggcagacacaatattacaccaaatcagtggttacatcccactctgctttttacttgtttcttctgttagctcacatagacgatgaacacacctcatcctgtgtccacatcagctgccttcaactcc

SEQ ID NO: 13134 - DNA, 600 bp, Chicken  19866894217344_1
acggcttgaagcagtagtaaccataatacacgctgtggcaggtctcctcttcagggcattgttccagtgatactatgctttatttgactgcataaaactctgaattagggatggatggatggctgcagcactacattgagaagttctcactgcctagagcttcaagctcaaaagcctgtcaagacgattcagctatgtatcaacattctgagcaagaaggaagacattaatgcacagtttcctgggtggactgctaaagcacaaaagacaacctcaggaacagtttcttctctactacasgtaaatattacagatcccttccgtttcttggagaaacagaatyttaggaaaagtcctcttcaggccaaacttttactttgatacctccttctataagcaggattccatactaaaaatgtccttagccctcacctatatgctccaactcagtgttcttcagtttcaagaagagtcctattaactgaatcaagaattaagatattcagaattttaatgcttaatatctcaactaaaagctttatcaccccttcattacttcacaaccagtttctagaaaggtacgctccctctctttctctc

SEQ ID NO: 13135 - DNA, 600 bp, Chicken  19866894217344_2
ctcctcttcagggcattgttccagtgatactatgctttatttgactgcataaaactctgaattagggatggatggatggctgcagcactacattgagaagttctcactgcctagagcttcaagctcaaaagcctgtcaagacgattcagctatgtatcaacattctgagcaagaaggaagacattaatgcacagtttcctgggtggactgctaaagcacaaaagacaacctcaggaacagtttcttctctactacasgtaaatattacagatcccttccgtttcttggagaaacagaatyttaggaaaagtcctcttcaggccaaacttttactttgatacctccttctataagcaggattccatactaaaaatgtccttagccctcacctatatgctccaactcagtgttcttcagtttcaagaagagtcctattaactgaatcaagaattaagatattcagaattttaatgcttaatatctcaactaaaagctttatcaccccttcattacttcacaaccagtttctagaaaggtacgctccctctctttctctcttctcaagcagagaatgaagggggaagaaaagaggcatctatc

SEQ ID NO: 13136 - DNA, 600 bp, Chicken  19866894217353_1
gctatattttccataatgcttgtgagttctcttgagaaaacttcactaggcttctgtggactacatgacaatactaaattattgttactcttaataatctgttgctctgctgtgatctcttgctcctcttagtccaatcctgcaaaaaaagttaagatccaggaagaaaaaaaaaaattgaatatttgaatgaattgcaattaacccaaaccaatggggacagatttatagaagtatttggcaatacctccagtggaattcataacaaagactacagaggtagctttttgagttctgtgsgcacaaagacattgacaggatattaaaactggggcatggttttcagatacagagtgaatcagtttttaccaaagctcattcaactagaaagcatcctacatcccaccttcaggctgtcaagcactgtatgctacatttacagatggctgaatgaggactgcctgcagcagggggttggagcctgatgatccttgaggtcccttccaacccaagccattctatgactctatgattctagggagcaggggtatgtccagtgaattcctttggagaggcacagacacaacagcaaaatccagg

SEQ ID NO: 13137 - DNA, 600 bp, Chicken  19866894217354_1
gtctcaaaatgctccattactgcaacatgtccccacaaaacatgtcccccaaagccatgtgtttcaccagctggcaggtaagtggaactggttcaccatgcaaccaaaacacatggctccagatctatgagaggcacaatccactgcttgtagcctggcagaacaaagggaagtgacagaggtggtattgaggtggggaacatatgaactactgagagacacaggatcaagtcagtgtgtgcagagggtggctgtgggggtgcaggaagcagagggagaggatacactgagcttttgaarggtcctctgcacaggcacaaactagagttgcaaactctgcagatgctgtgataacagacagccaatagaaaactcttgagggtaaagtggattaaatgattttcaaagcttgttcgtaggccagatggtaaatcccagatgcgtttcaatacctacacgaaacccttcccctatctgtcagtagatactttgagcacgtttccttgtgtataacaggggctcttgacaatgcagttaaaaaagaagcaaccacaatgcacaaagccatggaaaacaggcttttattatcagataactatg

SEQ ID NO: 13138 - DNA, 600 bp, Chicken  19866894217354_2
cacgaaacccttcccctatctgtcagtagatactttgagcacgtttccttgtgtataacaggggctcttgacaatgcagttaaaaaagaagcaaccacaatgcacaaagccatggaaaacaggcttttattatcagataactatgtcctatatctgatgcactatggtggctagaataatttcttcctcgtctttgaaagggtgagaaaaaaagctgaaatatttaagattttttggtaaatacgatgaaacagaaaatgcttgttgttttttccttcagaataattacaccattctccygcatacctggcawaactcactgcagatgcaccatctggcttccaatcaggctttggaaaacgttaaacccacttttatccacaggtattaacagaccctaagagagggcaagtggctttcctgaggtcacccaaccatttaacgctgcagagcagattagaaactcttggccagcagactctgttgcaaccagttctcacacctggctctggtctagaagcatggataaatattcacagttctctaaatctttgaagccttacctttgaagacaccgaacgttatcgcaggctgctgctt

SEQ ID NO: 13139 - DNA, 600 bp, Chicken  19866894217354_3
ccctatctgtcagtagatactttgagcacgtttccttgtgtataacaggggctcttgacaatgcagttaaaaaagaagcaaccacaatgcacaaagccatggaaaacaggcttttattatcagataactatgtcctatatctgatgcactatggtggctagaataatttcttcctcgtctttgaaagggtgagaaaaaaagctgaaatatttaagattttttggtaaatacgatgaaacagaaaatgcttgttgttttttccttcagaataattacaccattctccygcatacctggcawaactcactgcagatgcaccatctggcttccaatcaggctttggaaaacgttaaacccacttttatccacaggtattaacagaccctaagagagggcaagtggctttcctgaggtcacccaaccatttaacgctgcagagcagattagaaactcttggccagcagactctgttgcaaccagttctcacacctggctctggtctagaagcatggataaatattcacagttctctaaatctttgaagccttacctttgaagacaccgaacgttatcgcaggctgctgcttgtttcaataatgc

SEQ ID NO: 13140 - DNA, 599 bp, Chicken  19866894217363_1
  misc_feature (1)..(50): n is any nucleotide
nnnnnnnnnnnnnnnnnnnnnnnnnnnnnnnnnnnnnnnnnnnnnnnnnnacttaaagccttgattggaaaaatgccatcatgataaaataaaaatgaagactgtaattccctgagcagccgtgctcacataacagctcactgctgctcagagaccctacccccgactccctcttgtacagtcatgtccctgtccttggtatggcacttactgcagatgaattttaaaaaactgtgtgtgtgaatatttttctgccattctgtcctttgacaagtcagtacattaagtcatgtcagtggrtccaatgaaagtgagtggatgagggagaaatgggagcgatgctctcacaggatatcaaaagggaattaagtaagcttctgtgtttcatgaaacttggtttgacagaacgtcatctttctcagtgtagcagctctctgactttggaagttgagtttctgtgacaaaatcatgtttgctacttgctagccaggatgatttcgtagcactgttagatagaaactggcttaccttgtacctctcaaargaagtttcagaaggcagtgaatggctgaactatccacttttggtaatgatataaa

SEQ ID NO: 13141 - DNA, 552 bp, Chicken  19866894217363_2
tatttttctgccattctgtcctttgacaagtcagtacattaagtcatgtcagtggrtccaatgaaagtgagtggatgagggagaaatgggagcgatgctctcacaggatatcaaaagggaattaagtaagcttctgtgtttcatgaaacttggtttgacagaacgtcatctttctcagtgtagcagctctctgactttggaagttgagtttctgtgacaaaatcatgtttgctacttgctagccaggatgatttcgtagcactgttagatagaaactggcttaccttgtacctctcaaargaagtttcagaaggcagtgaatggctgaactatccacttttggtaatgatataaaggcagtaaatgactttcaccttccatctgtacatcccagttagtgtttgtagcagtggcatttggaagagtaatatttatacgtggaaactgttttctcaaaattactgaaagagtaagaaaaatagctctgtggcattatcttgaataagcattgttatattcagaacaaagaaagtaggaaaactgcaggattaa

SEQ ID NO: 13142 - DNA, 600 bp, Chicken  19866894217374_1
tgcctccccagctattgcacgagctttgagctaaagccaccggcggcacatggcgcgtcaccactgagggccccgagtcacaagcagtccctgcacagagccacctggccctcgcggtagtcgcggcaggggcagaggcgccggtacttggtgttgtgccccgcgcagctgaagagcagcggctccttctggaggtagcactcgtgaacgttctctgccactgccgggtagagatggttcatctcgtactcggtgctgtcgcaggtgatgctgagcctgggaaggaagagaaaggtgggraggctgcggttccagggctgggaggctgccgsgtgcttcactaaagggtttctggtgctcaacctgtccttccaggagcgttcccagtgataagccttgggttggatctttgctgggtgcaggatctgtgagctctgtgcttggcaccctttgactccacgtcaagccccaaaccccatgcaatcaacccaaagaccacccaagccttgagtggaccacagaccagacgccattccctggaagcgcacccaacmtcagtgaatgtcccaatgtctcctggatcagcaaaacgggacacac

SEQ ID NO: 13143 - DNA, 600 bp, Chicken  19866894217374_2
aaagccaccggcggcacatggcgcgtcaccactgagggccccgagtcacaagcagtccctgcacagagccacctggccctcgcggtagtcgcggcaggggcagaggcgccggtacttggtgttgtgccccgcgcagctgaagagcagcggctccttctggaggtagcactcgtgaacgttctctgccactgccgggtagagatggttcatctcgtactcggtgctgtcgcaggtgatgctgagcctgggaaggaagagaaaggtgggraggctgcggttccagggctgggaggctgccgsgtgcttcactaaagggtttctggtgctcaacctgtccttccaggagcgttcccagtgataagccttgggttggatctttgctgggtgcaggatctgtgagctctgtgcttggcaccctttgactccacgtcaagccccaaaccccatgcaatcaacccaaagaccacccaagccttgagtggaccacagaccagacgccattccctggaagcgcacccaacmtcagtgaatgtcccaatgtctcctggatcagcaaaacgggacacacacccaaaaaaaccccaggaraagcaagagctg

SEQ ID NO: 13144 - DNA, 600 bp, Chicken  19866894217374_3
gctgtcgcaggtgatgctgagcctgggaaggaagagaaaggtgggraggctgcggttccagggctgggaggctgccgsgtgcttcactaaagggtttctggtgctcaacctgtccttccaggagcgttcccagtgataagccttgggttggatctttgctgggtgcaggatctgtgagctctgtgcttggcaccctttgactccacgtcaagccccaaaccccatgcaatcaacccaaagaccacccaagccttgagtggaccacagaccagacgccattccctggaagcgcacccaacmtcagtgaatgtcccaatgtctcctggatcagcaaaacgggacacacacccaaaaaaaccccaggaraagcaagagctgcccctgctctgtgcctccgtggccccrtcagcccatccacggctgccctgrctccagggatggggggcacacagggaacacaagccccggccctaattcatcctataaagctgtcaccagggctccaatcgcctgcctggctggcgtgacgaaaatggtaatgttggcatcttaattgtccgcagagcagccaggagcctggtggcagatttatactctatt

SEQ ID NO: 13145 - DNA, 600 bp, Chicken  19866894217374_4
ggaggctgccgsgtgcttcactaaagggtttctggtgctcaacctgtccttccaggagcgttcccagtgataagccttgggttggatctttgctgggtgcaggatctgtgagctctgtgcttggcaccctttgactccacgtcaagccccaaaccccatgcaatcaacccaaagaccacccaagccttgagtggaccacagaccagacgccattccctggaagcgcacccaacmtcagtgaatgtcccaatgtctcctggatcagcaaaacgggacacacacccaaaaaaaccccaggaraagcaagagctgcccctgctctgtgcctccgtggccccrtcagcccatccacggctgccctgrctccagggatggggggcacacagggaacacaagccccggccctaattcatcctataaagctgtcaccagggctccaatcgcctgcctggctggcgtgacgaaaatggtaatgttggcatcttaattgtccgcagagcagccaggagcctggtggcagatttatactctattaaaacttcaccgctgtgtgttcgaaatgcagttttcagagagaaagatgtaaaaaagacagaaagg

SEQ ID NO: 13146 - DNA, 600 bp, Chicken  19866894217374_5
caacctgtccttccaggagcgttcccagtgataagccttgggttggatctttgctgggtgcaggatctgtgagctctgtgcttggcaccctttgactccacgtcaagccccaaaccccatgcaatcaacccaaagaccacccaagccttgagtggaccacagaccagacgccattccctggaagcgcacccaacmtcagtgaatgtcccaatgtctcctggatcagcaaaacgggacacacacccaaaaaaaccccaggaraagcaagagctgcccctgctctgtgcctccgtggccccrtcagcccatccacggctgccctgrctccagggatggggggcacacagggaacacaagccccggccctaattcatcctataaagctgtcaccagggctccaatcgcctgcctggctggcgtgacgaaaatggtaatgttggcatcttaattgtccgcagagcagccaggagcctggtggcagatttatactctattaaaacttcaccgctgtgtgttcgaaatgcagttttcagagagaaagatgtaaaaaagacagaaagggagagagagcgggcgggaggtggggagaaagcggggtgg

SEQ ID NO: 13147 - DNA, 600 bp, Chicken  19866894217374_6
ccagtgataagccttgggttggatctttgctgggtgcaggatctgtgagctctgtgcttggcaccctttgactccacgtcaagccccaaaccccatgcaatcaacccaaagaccacccaagccttgagtggaccacagaccagacgccattccctggaagcgcacccaacmtcagtgaatgtcccaatgtctcctggatcagcaaaacgggacacacacccaaaaaaaccccaggaraagcaagagctgcccctgctctgtgcctccgtggccccrtcagcccatccacggctgccctgrctccagggatggggggcacacagggaacacaagccccggccctaattcatcctataaagctgtcaccagggctccaatcgcctgcctggctggcgtgacgaaaatggtaatgttggcatcttaattgtccgcagagcagccaggagcctggtggcagatttatactctattaaaacttcaccgctgtgtgttcgaaatgcagttttcagagagaaagatgtaaaaaagacagaaagggagagagagcgggcgggaggtggggagaaagcggggtgggagcgggacggcagcaaatgccat

SEQ ID NO: 13148 - DNA, 600 bp, Chicken  19866894217379_1
tgacagatcaagaactagactggattgcccagggccccattcaacctggccttgaatatctccagggatagaacatccacaacctcttttggcaacctgtttcagcatttgaccatcttctcagtggaaaaaattctccccagcatctaatctaaatcttccctcctttagtttaaagccattcctcctggtcttatcactacctaccaatgtaaaaagttgattgcccttgtgtttataatctcccttggaagtctgtaatgaggtctcccctgagctttctcttcactagactgaacragcccagctccttcatcctgtcttcatagtagaggtgctccagccctctgatcatctttgtgatcatcctctggaccccatccaacagctctgcatctttcctgcattggggtactccagtgcagtcctccagatgggtcctcatgggggcggagtagaaatggacaatcgcttccctctctctgctggccatctctcttctgatgcagcccagggtgctgctggccttctgcactgcaagtgcacgctgcaggctcacattaagtttttcatctaccagaacccttaagtcctactcag

SEQ ID NO: 13149 - DNA, 599 bp, Chicken  19866894217390_1
  misc_feature (1)..(29): n is any nucleotide
nnnnnnnnnnnnnnnnnnnnnnnnnnnnnaatacaaaattcatttatttgagaacaggagtgagccacacatttgtttgtttgtttgtttgtttgtttaattttggtcaggttgtttctgtgctacattcactttattctctacatctctctctgtttttgtttgtttgtttgtttgtttttgtttttgttttactggaggtataacagagcagatcccgggtctgtgaaatgctgagaatgaacaagaaatactgcagtgggcatttcagaaaccacattaaggctagtctaggacaarctgttgttatttccttgttcatttcctattgatgcttatagtttacttttataaatgggcagtgccttgtaaaagtactctcaaacctataacacctattatgccagggtcatcttaccctgaaactccttttttttttttctttttttaaagaagaggggaaggaggaagacaattaaaggaaccgcgttgtcagtaggaggaggttgttcactatcacatcagtccactcctaagcaattagtgttgaaaacattaggaaaggcttagctgtgacacaaatcaggattatcacacta

SEQ ID NO: 13150 - DNA, 600 bp, Chicken  19866894217391_1
caactgtcttagacatatggcttccaacagtcagatccatggaagaaaggctgtgttgccacaaaacaaaatgatctcagattatttgttgggaaaaaaaaaaaaaagataactattgctcttttctgagatttggaccagttaggatgacagttttcttagaaattcagtcccagatgtaattaaaaagtcatcagacttctgcatcacagaagtctatgtaaggttgaacacacagccaaaaggaaatgtgtttaagagctttcataaaatgaggccagcaccagatcttctttgatyrttaggcaacctatttcacaactgcctttagtcatctgacttcatgatagaaagcagatttggtgcatgtttgtgcgttttaaaagaggtaaccaggtcatggcacgggatcatgtcagctgaacagtattgtattatggacatcgctttattaggtccattctacaacttctcatcaatttacaaagatgtcaagaagcatacttcctgacattaaaagaaaaggttgtttgtttttttgtttttctctatcaacatgaagaacaggataagaaccataagaactttaaaactagtgtt

SEQ ID NO: 13151 - DNA, 600 bp, Chicken  19866894217391_2
aactgtcttagacatatggcttccaacagtcagatccatggaagaaaggctgtgttgccacaaaacaaaatgatctcagattatttgttgggaaaaaaaaaaaaaagataactattgctcttttctgagatttggaccagttaggatgacagttttcttagaaattcagtcccagatgtaattaaaaagtcatcagacttctgcatcacagaagtctatgtaaggttgaacacacagccaaaaggaaatgtgtttaagagctttcataaaatgaggccagcaccagatcttctttgatyrttaggcaacctatttcacaactgcctttagtcatctgacttcatgatagaaagcagatttggtgcatgtttgtgcgttttaaaagaggtaaccaggtcatggcacgggatcatgtcagctgaacagtattgtattatggacatcgctttattaggtccattctacaacttctcatcaatttacaaagatgtcaagaagcatacttcctgacattaaaagaaaaggttgtttgtttttttgtttttctctatcaacatgaagaacaggataagaaccataagaactttaaaactagtgttg

SEQ ID NO: 13152 - DNA, 600 bp, Chicken  19866894217399_1
aagctaagagtgaaccactcagaaaaagtctctatgtccttccacatttcttcaaaagagttattttgcttggcagatgtaatttttgtaggaaaacagtgcagctttgtgtgttagctcacaagacctttagaacttacattaataagatatttcattaataagatattctaacaaatcgtgtttaagtctggctttggtagatgtgttcaaagttgtaattactcaacagtgctctaaaaattataaactctcaacaggaacagaactgagtgcttaactaagctacaaaatgaatgyattaataaagctcttattccaccatgcaaagtgtactacttagtacttaaatttagtaatgtatacaatattcacagtacttcagaatagaaactgatattcccacagtgttagagccctcccactgctctaagtgagaaatcagtgagaaatgcagagaggcagagtaacacaaagggagttattgccagtgcacaattgaaacaaagcttgctagcagaggcttacctggcacttgtgccctttcaaaatatcatcagatcacacacagtcaaatcgacagtataaaaaattacttct

SEQ ID NO: 13153 - DNA, 600 bp, Chicken  19866894217401_1
acgagtcagactctcttgagctgcttttgccttcttgaaactgcctgtctaacgctcatcttcattaaaaaaatgaaaactacattcatttttaactgagcaatttctcttaggctgagtttctttctgtgtggaatcaacctcacaatgtctggcactgcatttagttatcaaaatgtgtagtaacatttaacacctataaagtggattattggaataagtgagatttttgccaacgagaaacccctaggattatttcatctggtaaatactgtaagagaactttttcaaacaagataycaactttgctgctgacatgggggaaaaaaaaaagatccaagtgtgggccctttgagtagattgcgttgctttttagattacagtgctttttcatgcagagggtaaggatccaaaggcatttgtgagatgaaamaaaagcattatcgtagccattctcaagtgttacctcacaagaacatgagttactgagtatgttaggataggcacaaaacactactttcctgcaaatactgatttcaggtattacatactacagcttttgtttagctgagcacaaaaccctacacttcccattagaat

SEQ ID NO: 13154 - DNA, 600 bp, Chicken  19866894217401_2
gaatcaacctcacaatgtctggcactgcatttagttatcaaaatgtgtagtaacatttaacacctataaagtggattattggaataagtgagatttttgccaacgagaaacccctaggattatttcatctggtaaatactgtaagagaactttttcaaacaagataycaactttgctgctgacatgggggaaaaaaaaaagatccaagtgtgggccctttgagtagattgcgttgctttttagattacagtgctttttcatgcagagggtaaggatccaaaggcatttgtgagatgaaamaaaagcattatcgtagccattctcaagtgttacctcacaagaacatgagttactgagtatgttaggataggcacaaaacactactttcctgcaaatactgatttcaggtattacatactacagcttttgtttagctgagcacaaaaccctacacttcccattagaataacccatttgaatcaccttgccaagcaactctactttcccagtttacttcacacctccaatcccagttatctttatgatagttttgactcattcttctaacctttcacttctgtccccattttttttcctgat

SEQ ID NO: 13155 - DNA, 600 bp, Chicken  19866894217402_1
cagtgtttctacacttatcacaagtgagttatctgcctgcacgaagctagagagtgtgctaagctgtcggcttgatcgtggtctgctctgggaggtgacaccctcaaggatccccagtgccttctcccgcatgagtagttttatattttagagcatagcaagtgtggggtgaaaaccatacaaagatgatgaaagttgttttctgcaaatgtgttctgtcttgcttttgaagctgctgcagtcactttactgatggtattgcactgtgtgcaggctaatatcactaactgttcacaagcrctttaattaaacccaagtgtagaaaagttcagcgacacaaagaatcatctttatgatttatgtattttactggccaatgcgtggagctcagtttctgtatatttttaccaaaagcaagtactgttgagctgctcttggcacccaggctggtgcacgacaaaccgcgtataaatgtgcctaatggcaatacattttcatactttcagggtacgtgcaatccacagactgactcactgctcgtcatctgccagcgtacgtggcaaatggcttacacgggctgaagaaagggaaggcatgaaa

SEQ ID NO: 13156 - DNA, 600 bp, Chicken  19866894217403_1
gaccatggtttggtatctaatgtcatttgaaatgtcctgggatattcaagatgcatctgacatctcaaagatgaacatctgtgaagaaccacatccacagtgagtcattccacagcatctcagatactgctagaccccatgagagggcagttgaatcaggcttcttatcaaaactgtccataatattcagagaactcagctgaccaagtgtgatacacacattgtggtgagctaaatatctctccaggctctagtaactatacatccactaacttcatagtaacctaacaccaagcataygtgtcagtagcagcatttgaaaactaaacaaaacaaaatttttggtagcacaattacaaagtgcatacatagatttccatgtctgcacagatagttgttattctggaacctttaaagtttgctatcatcaaaatacaactatgtttaatcagaattctcctttcactatttactgtgttagcaataaggattgcttacaaacatttttcaggaaccccttggataatataataaaaatgttcttgtctgttcatagtaaagtttagcttttccacctgttggaaattccctcagtagtaa

SEQ ID NO: 13157 - DNA, 600 bp, Chicken  19866894217408_1
gctcaaaaccagagaactggagaatggaccagcaggattttcagagtaccctacagtcacagcacaactcaggtgactcaactccccagaaaaatcacataactttccccttgaaaaatatctaactaggctcagaggctcacaaaaaaataaaaaaatataaaagggaagtttatgactggcttactgaggttgaggcttgcaggtccttctgaagagcttcaattctattggtttgttgtttggctgcagcttccaatctggcattttcaatttcaagtcttaaagaaaaacacagaycttattagagaaacccrtaatagcacaaattgtaaaagaacagtgtgaaakaacgcaatttaaagcaagagcttctttcaaaataatgtattaccatgatgatgaaacaaggcaatcctgatgttttcaaataatcccagaaagcaaaaccttgcttcattctgctattttcttaccgttgtacatgttcttccagttgttttatagtagtattggttccagaagttgctaacagaaggtcttgcagtttctgggaagaagctgatacttctctttccttattatctaggacagtcttca

SEQ ID NO: 13158 - DNA, 600 bp, Chicken  19866894217408_2
tggagaatggaccagcaggattttcagagtaccctacagtcacagcacaactcaggtgactcaactccccagaaaaatcacataactttccccttgaaaaatatctaactaggctcagaggctcacaaaaaaataaaaaaatataaaagggaagtttatgactggcttactgaggttgaggcttgcaggtccttctgaagagcttcaattctattggtttgttgtttggctgcagcttccaatctggcattttcaatttcaagtcttaaagaaaaacacagaycttattagagaaacccrtaatagcacaaattgtaaaagaacagtgtgaaakaacgcaatttaaagcaagagcttctttcaaaataatgtattaccatgatgatgaaacaaggcaatcctgatgttttcaaataatcccagaaagcaaaaccttgcttcattctgctattttcttaccgttgtacatgttcttccagttgttttatagtagtattggttccagaagttgctaacagaaggtcttgcagtttctgggaagaagctgatacttctctttccttattatctaggacagtcttcaagtcatgaacacaatgc

SEQ ID NO: 13159 - DNA, 600 bp, Chicken  19866894217408_3
tacagtcacagcacaactcaggtgactcaactccccagaaaaatcacataactttccccttgaaaaatatctaactaggctcagaggctcacaaaaaaataaaaaaatataaaagggaagtttatgactggcttactgaggttgaggcttgcaggtccttctgaagagcttcaattctattggtttgttgtttggctgcagcttccaatctggcattttcaatttcaagtcttaaagaaaaacacagaycttattagagaaacccrtaatagcacaaattgtaaaagaacagtgtgaaakaacgcaatttaaagcaagagcttctttcaaaataatgtattaccatgatgatgaaacaaggcaatcctgatgttttcaaataatcccagaaagcaaaaccttgcttcattctgctattttcttaccgttgtacatgttcttccagttgttttatagtagtattggttccagaagttgctaacagaaggtcttgcagtttctgggaagaagctgatacttctctttccttattatctaggacagtcttcaagtcatgaacacaatgctcagactgaatacgctgttcttcagattcctgta

SEQ ID NO: 13160 - DNA, 599 bp, Chicken  19866894217417_1
  misc_feature (1)..(83): n is any nucleotide
nnnnnnnnnnnnnnnnnnnnnnnnnnnnnnnnnnnnnnnnnnnnnnnnnnnnnnnnnnnnnnnnnnnnnnnnnnnnnnnnnnntttcccaagcagattgttctagttttctgcttattcttttttatcccagaagagtgaaatggctaggaagtgaaaagttatgttcacaaggaattaacataacatatagtatgctgaattgctttacagttcaacatttttggagtttgcattaatttgttttatagcacttgttacatgaaaaatttgcatctgaattctcagtaggataagcatkcagatatgtttctctacatcccatttcttttcctatgacagtgttcaaacacagatgatctagatatagaactgcaagaccttaaaaaaaaaactatacaaaaaaactgtatatccagtgatttgggagaatgcacaaattattcacctcaaagcagggtaccgcattaaggaagattctaaacaagagagatgtactgtatatactattcccatgttcacaggagaatagcacattgtggctttccctatgctattgctataatataaattttttgtcagctgatctactctataaag

SEQ ID NO: 13161 - DNA, 600 bp, Chicken  19866894217420_1
agaaaagtccataatggcccctttggagtttctgaaatcatttgtattaatccagtgtctgtgcatgtcaaatgataatcagtacttaaaaaaaaaaatccatactttttattcttgccagcagctcgtattaaaacgttttcaacctatagagttattgttctacttggaaagctgtgagaaaatggaaaaaggttaaaaagagaaagaaaatccaggtgggattagtgtgtaaactggacaataataatttgcacttcataagggtgtttttgtctttgtaagtaggcaccacttcartgagtgtttgttctgcaaacaatatcatgaagtaatttttatttccttgaaattttgattttaaaaagccttggtgtacttaaactgattgttaaagcaagctgaaactgaggcttagtacagtactgtgagtgtatgactatagtagagtaagatgcaaatgccgtcagacttttatgtgtagtgaacaatacatctacaagccacttcattaactccagaaaactatttttgggtgtatattcaactgagtaatgtgtaaattgtaagttagggagaacttagctctacaaatacaac

SEQ ID NO: 13162 - DNA, 600 bp, Chicken  19866894217426_1
caacactcaagggggtggttccttccaagcataaggcttcctgtgacaagagctggcaggaaaagccctttgtttcccttttgcttcctttcccattgcttgagaggatcctgaatcctgcaagacatagcacaatacctaaagtattagtccaaaaagcaactggctgggttgcagcaagacatcaatgatcctgtccatgcttaagtttcgcttctcactcagggcctgctcactgcagcatccttgagtaacatctaaccctgagggcgtttcccctttggggaaggagaaagagtmccacttgcaactgcattctcaccaggccctcaacactgagtacaggctgttcccaaagcagaactgttacgatgtggaggcctcagtaaaacagcaccctgctatgctgggtcccagccctgaaacagcacaagccatraagattcacctgtggtaacagtaagactgaaggaaggcagcccacctcccctgctggctgtaggaagaaagaacactaggagggctgtttcactggctgctgagagtttcccaagaaatcatcayagcacaagtccaggtgaagcagagagctatcgctgc

SEQ ID NO: 13163 - DNA, 600 bp, Chicken  19866894217426_2
taaagtattagtccaaaaagcaactggctgggttgcagcaagacatcaatgatcctgtccatgcttaagtttcgcttctcactcagggcctgctcactgcagcatccttgagtaacatctaaccctgagggcgtttcccctttggggaaggagaaagagtmccacttgcaactgcattctcaccaggccctcaacactgagtacaggctgttcccaaagcagaactgttacgatgtggaggcctcagtaaaacagcaccctgctatgctgggtcccagccctgaaacagcacaagccatraagattcacctgtggtaacagtaagactgaaggaaggcagcccacctcccctgctggctgtaggaagaaagaacactaggagggctgtttcactggctgctgagagtttcccaagaaatcatcayagcacaagtccaggtgaagcagagagctatcgctgcttgggtaaagtagagaaccctcaccaacggagccacattccacagcaacacagcttaaatgggactgcaggcyctrgacctggcagacatcccccttaccagagcactccagcactggtttactacctggaagacataa

SEQ ID NO: 13164 - DNA, 600 bp, Chicken  19866894217426_3
tgagggcgtttcccctttggggaaggagaaagagtmccacttgcaactgcattctcaccaggccctcaacactgagtacaggctgttcccaaagcagaactgttacgatgtggaggcctcagtaaaacagcaccctgctatgctgggtcccagccctgaaacagcacaagccatraagattcacctgtggtaacagtaagactgaaggaaggcagcccacctcccctgctggctgtaggaagaaagaacactaggagggctgtttcactggctgctgagagtttcccaagaaatcatcayagcacaagtccaggtgaagcagagagctatcgctgcttgggtaaagtagagaaccctcaccaacggagccacattccacagcaacacagcttaaatgggactgcaggcyctrgacctggcagacatcccccttaccagagcactccagcactggtttactacctggaagacataaaataaccagaccaatcagctcagacattgcccaaaagcaccaagctgtgtaaacccaacawgctggcccacgccacaagaaaattaactgctgataaaggtaggaacaaacctctgtttgatttt

SEQ ID NO: 13165 - DNA, 600 bp, Chicken  19866894217426_4
gtggaggcctcagtaaaacagcaccctgctatgctgggtcccagccctgaaacagcacaagccatraagattcacctgtggtaacagtaagactgaaggaaggcagcccacctcccctgctggctgtaggaagaaagaacactaggagggctgtttcactggctgctgagagtttcccaagaaatcatcayagcacaagtccaggtgaagcagagagctatcgctgcttgggtaaagtagagaaccctcaccaacggagccacattccacagcaacacagcttaaatgggactgcaggcyctrgacctggcagacatcccccttaccagagcactccagcactggtttactacctggaagacataaaataaccagaccaatcagctcagacattgcccaaaagcaccaagctgtgtaaacccaacawgctggcccacgccacaagaaaattaactgctgataaaggtaggaacaaacctctgtttgatttttccccttcccacattattctgtacctggcactaacagtcatctctccaaagagttagctgcatctcaacaacatccttatccattagatttgctttctcagcaattcta

SEQ ID NO: 13166 - DNA, 600 bp, Chicken  19866894217426_5
gaggcctcagtaaaacagcaccctgctatgctgggtcccagccctgaaacagcacaagccatraagattcacctgtggtaacagtaagactgaaggaaggcagcccacctcccctgctggctgtaggaagaaagaacactaggagggctgtttcactggctgctgagagtttcccaagaaatcatcayagcacaagtccaggtgaagcagagagctatcgctgcttgggtaaagtagagaaccctcaccaacggagccacattccacagcaacacagcttaaatgggactgcaggcyctrgacctggcagacatcccccttaccagagcactccagcactggtttactacctggaagacataaaataaccagaccaatcagctcagacattgcccaaaagcaccaagctgtgtaaacccaacawgctggcccacgccacaagaaaattaactgctgataaaggtaggaacaaacctctgtttgatttttccccttcccacattattctgtacctggcactaacagtcatctctccaaagagttagctgcatctcaacaacatccttatccattagatttgctttctcagcaattctagaa

SEQ ID NO: 13167 - DNA, 600 bp, Chicken  19866894217426_6
aggaagaaagaacactaggagggctgtttcactggctgctgagagtttcccaagaaatcatcayagcacaagtccaggtgaagcagagagctatcgctgcttgggtaaagtagagaaccctcaccaacggagccacattccacagcaacacagcttaaatgggactgcaggcyctrgacctggcagacatcccccttaccagagcactccagcactggtttactacctggaagacataaaataaccagaccaatcagctcagacattgcccaaaagcaccaagctgtgtaaacccaacawgctggcccacgccacaagaaaattaactgctgataaaggtaggaacaaacctctgtttgatttttccccttcccacattattctgtacctggcactaacagtcatctctccaaagagttagctgcatctcaacaacatccttatccattagatttgctttctcagcaattctagaacacccattcctatagaaaaaaaacacaggtgggtgatactgtgttctggtgcatctaatttgaatttgcacaatatttagtcttcttattttttttatttttatttttaaactctgaaagatcc

SEQ ID NO: 13168 - DNA, 599 bp, Chicken  19866894217437_1
  misc_feature (1)..(92): n is any nucleotide
nnnnnnnnnnnnnnnnnnnnnnnnnnnnnnnnnnnnnnnnnnnnnnnnnnnnnnnnnnnnnnnnnnnnnnnnnnnnnnnnnnnnnnnnnnnnctgcttggggcacctcatctggggagagcagggtctatttgggtgcaaccgtggcagcgaagctgcagtgtagccacctctctcagtgagcacatcctgttgggcagctcaggagggtgagagtcctcccagggcaggcgcagagctctgtcccttgctgtgggcaccatcacagtgggggacgattccctgacacctagaaaaaaamcacagctgagatttttcacagttacatcatagaatcacagcaccagagaatgtcttggcttggaagggacattaaagaattggtacrtccaaccccaccactgcgcgcagggatgccacccactgggccaggccaagcagcccaggacaccacccaaccaggccttgaacacctccacggatggggcatccacaactttgcttggcaaacttktatagtgccttgacaacctcaagaaggaattttttcttgctcagcgggcccatgacaccccaggccaacaaggaagagatgcaata

SEQ ID NO: 13169 - DNA, 599 bp, Chicken  19866894217437_2
  misc_feature (1)..(5): n is any nucleotide
nnnnnctgcttggggcacctcatctggggagagcagggtctatttgggtgcaaccgtggcagcgaagctgcagtgtagccacctctctcagtgagcacatcctgttgggcagctcaggagggtgagagtcctcccagggcaggcgcagagctctgtcccttgctgtgggcaccatcacagtgggggacgattccctgacacctagaaaaaaamcacagctgagatttttcacagttacatcatagaatcacagcaccagagaatgtcttggcttggaagggacattaaagaattggtacrtccaaccccaccactgcgcgcagggatgccacccactgggccaggccaagcagcccaggacaccacccaaccaggccttgaacacctccacggatggggcatccacaactttgcttggcaaacttktatagtgccttgacaacctcaagaaggaattttttcttgctcagcgggcccatgacaccccaggccaacaaggaagagatgcaatacagaaacagggtctggatcaaggacgctattgcacaggatatccatgaatgtgaaacttgccctgaaaaccaagcagataaagcctc

SEQ ID NO: 13170 - DNA, 600 bp, Chicken  19866894217437_3
agtcctcccagggcaggcgcagagctctgtcccttgctgtgggcaccatcacagtgggggacgattccctgacacctagaaaaaaamcacagctgagatttttcacagttacatcatagaatcacagcaccagagaatgtcttggcttggaagggacattaaagaattggtacrtccaaccccaccactgcgcgcagggatgccacccactgggccaggccaagcagcccaggacaccacccaaccaggccttgaacacctccacggatggggcatccacaactttgcttggcaaacttktatagtgccttgacaacctcaagaaggaattttttcttgctcagcgggcccatgacaccccaggccaacaaggaagagatgcaatacagaaacagggtctggatcaaggacgctattgcacaggatatccatgaatgtgaaacttgccctgaaaaccaagcagataaagcctcactagcatggacgatgatgtctgaaaaataaatatggggaggtaggttatatgacctacccacaaacctggcaacttatgtgtcatgtccttacatgttttttcaatagacctgatggacgttccgt

SEQ ID NO: 13171 - DNA, 600 bp, Chicken  19866894217437_4
attttccatcccatcatttttatcagttgccataaccccaacggttacgcaacttgaggaaatgtttaaatgctgaactaagggacatggtttagtgaggaaacggtggtggtaggtgcacggttggactggatgatctttgaggtcttttcctgccttcatgattctgattccctctgtcttgtcaatgccaagtagagcgaggcaatttgagagaggacgaggtgtggaaacaggtaccagctcggagaagtaggcaacccccaccctgaccatccttgcctccccaggtgcctctgyaaaataggtttgaagccctgtaactcgagggaggggtgagtgagggtacagtgggaggcctacccgtgaggttgccttgggtaaagcagtcaaccgcatggactgactccacccagaaggaaagaagggtggtcgtcaaaggcaacttccttctgagaggaacggtgggccctatatttcagcctgaccctaccctagggagttgtgcttcctccatggggcacgggtcagggatatttctagaaaacttctggtctgattcrcccctgagattgttaccccttactgatagttcaggcc

SEQ ID NO: 13172 - DNA, 600 bp, Chicken  19866894217437_5
ccaccctgaccatccttgcctccccaggtgcctctgyaaaataggtttgaagccctgtaactcgagggaggggtgagtgagggtacagtgggaggcctacccgtgaggttgccttgggtaaagcagtcaaccgcatggactgactccacccagaaggaaagaagggtggtcgtcaaaggcaacttccttctgagaggaacggtgggccctatatttcagcctgaccctaccctagggagttgtgcttcctccatggggcacgggtcagggatatttctagaaaacttctggtctgattcrcccctgagattgttaccccttactgatagttcaggccgatagtgatgaagtcgctgagaaaagcctgaggactaacaaggaagacttcaggagactggggtaggtagttgatggaaagggcgtgcagatggttttttcttctataccttcagtggcggggaaggatactgagaggatcagaaaacccacctcataaattagaggcttagagggcttagaggttggtgcaaacacaggaattttggtttttttgaccatggggcaatttactcagcatctggcatgatgtctgcagatgga

SEQ ID NO: 13173 - DNA, 600 bp, Chicken  19866894217448_1
aggagtactgttatgacaacatccacttcatgaaagcctttcagaagatagtggtactcttttataaaggtaaaagtatatctgctgctatatactttgcatggacattggacttggtactgacttgactacattgaactaagttaataagcaagttatggagatgcgttacagacaggattgaaccgttagaagcagttaatcagaaagagatcccttgagtaactcctttgtaggtagaccgtaattttgaactcataaatcattatccagtggcgtagttgctatctgtgccaactrctcacctgtgatgtaaaaggaaactgtattctgtagataactgcttgctcaacgattagttgaactctgaaatagtgtatgctttcttagctcaaaggttcatgtggcagcaggagaagtcaaaccaagcctttctttctctgttgcgtttatcttgcattcaggaagcatgagcaggatctcaagcagtgtctgcaatctgagtgggcttttgtcctaatagaaaactaggactaagaaaaagattctattaagttctggcagctgtaaaaataataataataaaataagacaaaaatt

SEQ ID NO: 13174 - DNA, 600 bp, Chicken  19866894217455_1
gtgtccaccagagacgtggcatccaagactcattccagctgaaggtctgctagcagcacgagatgtgtgcagaacgttgcaattcatcatcagctcgagagatctgagccgttctgatgaagaaagcacagacacggagaacaccccgagctggaatggacccacaggagtcatctagtccaacacttcaaacccaaataaaaaacatcattcatcctattctcgggactgcttgcattctataaatggagaaatagacatagagataagcgacaacgctgcgccaatggaaaccacagygtcgtgcacttgggctgccattcctgaccagggctgtgctcccagaggagcacctcacgttcagaaagctgcaagaagtgctttccatacacagagagcagagaaccattgctggtgaccgcaacgtggggcacatctgctgccctttcgtgttacctacgaataactccaaagagaaaaccactgctcgttttctgattagatatggaggttggctgccctgcctgtgttagggggttggagcctgatgatctttgatgtccctttcaacccaagccattttatcattcaaactaccag

SEQ ID NO: 13175 - DNA, 600 bp, Chicken  19866894217465_1
taatatttagccagaatttaatagcagagtagcattgaaaattatttgtctttactattacagagtgttcattttgacagtaaattgcatcatttttgtcatcattaatcatatcttggcaatacacatagagattttcatactagtaaggacatgtctacaaatagtaattgtctttaagtgatgcaaaggaaatcagatgtcaggtagcttctggaaagtaagcaaagcagagcgttggaatagctggaggtgttgtggaatctcccttgcttgaagtttgcaaagcggtttggggcraacatctgtcacaaataaaacaatttattctgcttttgaaggtggattgagtttgttcacttgccaaggtgttctctgttgttgtgttctgcagttagcataataatgcttctgagaaggagtattwttattttaccttatttcttttaatgaaatgaaattcaaattagatagctaatcattggttacagtaattattcctgtgtttttatttagaatacataggtttgtttggtttgtttttatgagtaattcaaacagtatgacaaagaagctgcatcttttagtctcagaataaaa

SEQ ID NO: 13176 - DNA, 600 bp, Chicken  19866894217465_2
atagagattttcatactagtaaggacatgtctacaaatagtaattgtctttaagtgatgcaaaggaaatcagatgtcaggtagcttctggaaagtaagcaaagcagagcgttggaatagctggaggtgttgtggaatctcccttgcttgaagtttgcaaagcggtttggggcraacatctgtcacaaataaaacaatttattctgcttttgaaggtggattgagtttgttcacttgccaaggtgttctctgttgttgtgttctgcagttagcataataatgcttctgagaaggagtattwttattttaccttatttcttttaatgaaatgaaattcaaattagatagctaatcattggttacagtaattattcctgtgtttttatttagaatacataggtttgtttggtttgtttttatgagtaattcaaacagtatgacaaagaagctgcatcttttagtctcagaataaaaatgtgagttttattcagacaatctcttagtagtttctttggaaattcccactttcacatagaaaaaaaagaggcaagtagaagtctgtacagaacatacttattcacataggtctgtgcacttacta

SEQ ID NO: 13177 - DNA, 600 bp, Chicken  19866894217465_3
ggagtgctgtatatgcttttctatcagtctccaatatgtagtaaatcacagttcttatcttcttgtgaaaggaaaaataatacttttattttaataaatatgtagcgacatgcttaacaaaaatacattattgaagtaatatgtaaaatattttaaggtaagttaatgagaatatggtcaaacattgccaccatcaaactattatatgtatacaaaactggagaaaatgtgttcctagatgctacaccattaatgtgattcatctttagaatgagttagctaaaatgaaagtactctacmcgttttatttaaagatccatgcttaaaatgactaattttatagcatgtattttctgtttatgtgcctatcagttttaaacagccttttatatgcaaatgtgtgatgacagttctatattctgtgtcatttctccactagagtttttcatgcttttggaataatccctgaacagatatttatagagtttttactgttattttgacaaatcagacattgttattaaaatgataaaagaaagtaattttaatacttttttgcactggaagttctaaacttctcaaaaaatacatgtttctcaa

SEQ ID NO: 13178 - DNA, 600 bp, Chicken  19866894217470_1
ttaataccagggtaacatgaaggaacacacacacagctctgtgagggaggaacgaggtgcaaaacctcagctgaggattccctttaagaagcacactgctataacacctccatgtgctgctgcctaagaactgccatgaattcctaatgatttgcactaggtaaataaatataacactgaaatacctttctattcagacaagataacgtatacattacaccagaaagggaagtgctaattgcagtgctgagtgccaagtgctgagatttgcagtcacactgaccctaacacagtgcacaygggcaggagagcatttggagctgtcttcatcatcttccccttgactcccagaggtgcaggtgagccacatgagaacagcatggaatgcagccaccagcactgcacagcactcacctgcttggtgtgcacaataagcactgcattctgccttagcagtcattcctcagggtttgtgcacagctttcctgcaacaatgctgtgttgcattaacacacaaattcccttccctgctgctcacactccagttgcatgtcacgactgcttcctgctgacccctacrggctgcccagccctactgta

SEQ ID NO: 13179 - DNA, 600 bp, Chicken  19866894217470_2
gaccctaacacagtgcacaygggcaggagagcatttggagctgtcttcatcatcttccccttgactcccagaggtgcaggtgagccacatgagaacagcatggaatgcagccaccagcactgcacagcactcacctgcttggtgtgcacaataagcactgcattctgccttagcagtcattcctcagggtttgtgcacagctttcctgcaacaatgctgtgttgcattaacacacaaattcccttccctgctgctcacactccagttgcatgtcacgactgcttcctgctgacccctacrggctgcccagccctactgtatcccactctctttgcttttgctgtccccaagagcagtccgtttggctttcaacactccaactgtgcagttcctaccacacagtacataatgagatcacaacctccatgaactgcaatatttccatctacctactgagttcttcccaagccttctagattagaatctggatcacagaagtgtatgggttggaagggacctctggagatcatctagtccaatcctctgctaaagcacattccctacagcaggttgagcaggaaagcacccaggcagtttttg

SEQ ID NO: 13180 - DNA, 600 bp, Chicken  19866894217472_1
tcaccaaaaataaaggcaatagaaaagccaagacatgagttggagcaagagttcataaaaaacagtgtgatgagatattgaaggcagaaaatttagaaaggagcatgggtcctgagattattctagaagaattgtagagacttgaaacaactctcaacagcgtgaagaggaagaatatgattatgtagggcaattattccaagtattttatgcatcttgaaagaccttttcaacattacaagtagctaaagaatactgttgcagctatgatctagattgacaagaggagctgcagagtgyaaatgaatgcatcacatttgattgccttagaaaagagagggaagcactgcrtataggtggagccaacagctacatttaaaaatgaaaaagtagttatacagaaagaaagagaagtcataatagggaagtggagtaaaaaagagaaatcaaagtgaggggaatacacagagaggaagagcagtgggtagcgtaaagtgattgaaaaaactagaaaatgtaatgcatagtagggctggattcactggaacctctccaccagagagattgattctaaacaaagttcttataaagtgaattaaa

SEQ ID NO: 13181 - DNA, 600 bp, Chicken  19866894217472_2
ttcataaaaaacagtgtgatgagatattgaaggcagaaaatttagaaaggagcatgggtcctgagattattctagaagaattgtagagacttgaaacaactctcaacagcgtgaagaggaagaatatgattatgtagggcaattattccaagtattttatgcatcttgaaagaccttttcaacattacaagtagctaaagaatactgttgcagctatgatctagattgacaagaggagctgcagagtgyaaatgaatgcatcacatttgattgccttagaaaagagagggaagcactgcrtataggtggagccaacagctacatttaaaaatgaaaaagtagttatacagaaagaaagagaagtcataatagggaagtggagtaaaaaagagaaatcaaagtgaggggaatacacagagaggaagagcagtgggtagcgtaaagtgattgaaaaaactagaaaatgtaatgcatagtagggctggattcactggaacctctccaccagagagattgattctaaacaaagttcttataaagtgaattaaatgtagtaaattggcaacaagatgtctgaacttgtgacttcaggaaaacaaa

SEQ ID NO: 13182 - DNA, 600 bp, Chicken  19866894217474_1
tgttttgttttccttggaggaagaattcgtatttgtcttgacattactgaagaatcaaatcctccactgtgtcctactgactattagcttttaccgcatttagactctgcccgagtaacacttttctgcagtgcttcaaaatccaggaatagatatgggttgagcttatgtctggagacaggacatgcccagggattcttccgcacaactctgacactattctcattcctctgcctgacacagttcagtccacgtgcaaagtattaaccaccagcaatccgtaccgcagtcccaaggggmtttggaggagggagagaaagggtatacttctggggcaaaagcttgctttttgctgtcttgtgcaaaattcttatgagaattcagcatgcaagagtgcctttttcttatttgctgtatgtcagagtcgtcccctagccagtgctagtcagtggaaaagacatcatcctctscagacccctctgatacttactctcaacctgagctaacctgcttcagaaggacacgttctcttaattttagatcagcaacgttttgctctcagccatttaccttgaaatcactcttacatcaggtgaaagt

SEQ ID NO: 13183 - DNA, 600 bp, Chicken  19866894217474_2
tctggagacaggacatgcccagggattcttccgcacaactctgacactattctcattcctctgcctgacacagttcagtccacgtgcaaagtattaaccaccagcaatccgtaccgcagtcccaaggggmtttggaggagggagagaaagggtatacttctggggcaaaagcttgctttttgctgtcttgtgcaaaattcttatgagaattcagcatgcaagagtgcctttttcttatttgctgtatgtcagagtcgtcccctagccagtgctagtcagtggaaaagacatcatcctctscagacccctctgatacttactctcaacctgagctaacctgcttcagaaggacacgttctcttaattttagatcagcaacgttttgctctcagccatttaccttgaaatcactcttacatcaggtgaaagtaaaatacaaatgtaaatatttatatgcaactccccaaacagaccacacagtttaaaaagatgcacacacggaaaggctccagtctttccgtagccattctggcaggtccagagagactcaaagctttccatcaaaatacattcacttcctctccaaaagcttgattacct

SEQ ID NO: 13184 - DNA, 600 bp, Chicken  19866894217474_3
ccttcccctggaaaaaaaaaaaaaaaaaagaaaaaaaaaaagtgatgcagtgtgactcatcttcagtgcaagtgcctctgtctgttacatgctgtattttattttgctccaaacatcagccaacacacttactacaagcatctgctagggacaaacacacatcgttcattaatcattcttgactgaaaccagacatcacagttgttgcctagtgcaaggcgacagtaggacagaggggttctaccctaacattctcttttcaagactacagggacagtcttatttcctacttgcctcagkctccgacccctgggatatgtgttcccactccctagcagcaagggaagaatgagtaagtaaatagtacataggaaagctgcactgagacactgttgtccatttgtagggcagatgttggctaccagcaacatagccagtgcatgtagaaaggggaaaagaagagagtagtaagtactcttctagctaagtctgtgtctaagctggtccctttggtttgtgagtgtctgtgagctctgaacaccgctgtatcccacctttcctctgtttcagaaagtagcgtgtagcgtggagaagcagata

SEQ ID NO: 13185 - DNA, 599 bp, Chicken  19866894217476_1
  misc_feature (1)..(210): n is any nucleotide
nnnnnnnnnnnnnnnnnnnnnnnnnnnnnnnnnnnnnnnnnnnnnnnnnnnnnnnnnnnnnnnnnnnnnnnnnnnnnnnnnnnnnnnnnnnnnnnnnnnnnnnnnnnnnnnnnnnnnnnnnnnnnnnnnnnnnnnnnnnnnnnnnnnnnnnnnnnnnnnnnnnnnnnnnnnnnnnnnnnnnnnnnnnnnnnnnnnnnnnnnnnnnnnnnntgttgcatctttataaacatttatgcttcagggtttttgctctgtttctttacatgtatgttcctaaataaaatatgaaagcaaaagaawctctctcccggacacttttttttctttttctttaaaccaatgaactgattttcatgtgtcatttcttcatcaagagcacacctacaggctgctgcgtttcggtttgggtttttctttttcatttttcctctttccaagcacaaatatagcagacatttattaaaggactccccagtaagcccccatttttggcaaaatttgttttaatattataatccttggataaaatmataaagattccatatatgttccattagaaaactcacttttagtcacttcttgcctttctctccaaaagc

SEQ ID NO: 13186 - DNA, 600 bp, Chicken  19866894217476_2
ttatgcttcagggtttttgctctgtttctttacatgtatgttcctaaataaaatatgaaagcaaaagaawctctctcccggacacttttttttctttttctttaaaccaatgaactgattttcatgtgtcatttcttcatcaagagcacacctacaggctgctgcgtttcggtttgggtttttctttttcatttttcctctttccaagcacaaatatagcagacatttattaaaggactccccagtaagcccccatttttggcaaaatttgttttaatattataatccttggataaaatmataaagattccatatatgttccattagaaaactcacttttagtcacttcttgcctttctctccaaaagccttcatgtcaaactgcctgctttagtacagacattaaggagaatcattcagcattgactgtttgctgcaaactattttttaactatagaccaatcaaatttgctaataayacttttaggtgtccaacytctttttttctttgcaaagcacaattaaaactcatttaggctaaaattatgaaattccaaaggctaaaaatataaaacaagaagttcagctgtcacgagattg

SEQ ID NO: 13187 - DNA, 600 bp, Chicken  19866894217476_3
ttttctttttcatttttcctctttccaagcacaaatatagcagacatttattaaaggactccccagtaagcccccatttttggcaaaatttgttttaatattataatccttggataaaatmataaagattccatatatgttccattagaaaactcacttttagtcacttcttgcctttctctccaaaagccttcatgtcaaactgcctgctttagtacagacattaaggagaatcattcagcattgactgtttgctgcaaactattttttaactatagaccaatcaaatttgctaataayacttttaggtgtccaacytctttttttctttgcaaagcacaattaaaactcatttaggctaaaattatgaaattccaaaggctaaaaatataaaacaagaagttcagctgtcacgagattgggctttatggtagcgtggcagaacaaaaaccccacagcagttactaatatgatgaataaaaggttttccattcaattttcagacatccacatattcagggccacagatgactacagcagtcttttatttcctctttcagttcctttctaattcctgagaaggcaaacttccttaccctt

SEQ ID NO: 13188 - DNA, 600 bp, Chicken  19866894217476_4
ctctttccaagcacaaatatagcagacatttattaaaggactccccagtaagcccccatttttggcaaaatttgttttaatattataatccttggataaaatmataaagattccatatatgttccattagaaaactcacttttagtcacttcttgcctttctctccaaaagccttcatgtcaaactgcctgctttagtacagacattaaggagaatcattcagcattgactgtttgctgcaaactattttttaactatagaccaatcaaatttgctaataayacttttaggtgtccaacytctttttttctttgcaaagcacaattaaaactcatttaggctaaaattatgaaattccaaaggctaaaaatataaaacaagaagttcagctgtcacgagattgggctttatggtagcgtggcagaacaaaaaccccacagcagttactaatatgatgaataaaaggttttccattcaattttcagacatccacatattcagggccacagatgactacagcagtcttttatttcctctttcagttcctttctaattcctgagaaggcaaacttccttaccctttcagttcctttctttcca

SEQ ID NO: 13189 - DNA, 600 bp, Chicken  19866894217480_1
gtggaaacttgccagcattatttcattaatctcacacattattttaattcctgtgaatttctgacacctttaggatgaaatagaatccctgcaaaaagaagtggaagaactgaaagacagaaatctcaatttacagacacaactgaaatctcttctggatcctacagtaccagctttgtgttgccaaaatgaagaaactagccaatcagcagatgaagcaagtaccagtggcccagaaaccccagaagaatggagcaaaaagctgaaagctgccaacgatatatgtgaaaaagtaatagwtaatgtagaaaagttaaaggaggtaaaaaaataaatttcttaatccatcttgaagtacrgttttcgcgttagttgaaggggtgaragctggcatgacctctggatacttcatagatccaggaaaaaacagggaaaaaattgaattccagtggctgttgatgtatcatagtatttccatacagcatttgcaagtgtcagatactattgcttgttttagtgagccttacatgtggctcttcctcaactcccctgtcactctatgactgggtaattggattatagtagcgcttgtcaccagta

SEQ ID NO: 13190 - DNA, 600 bp, Chicken  19866894217480_2
ttaatctcacacattattttaattcctgtgaatttctgacacctttaggatgaaatagaatccctgcaaaaagaagtggaagaactgaaagacagaaatctcaatttacagacacaactgaaatctcttctggatcctacagtaccagctttgtgttgccaaaatgaagaaactagccaatcagcagatgaagcaagtaccagtggcccagaaaccccagaagaatggagcaaaaagctgaaagctgccaacgatatatgtgaaaaagtaatagwtaatgtagaaaagttaaaggaggtwaaaaaataaatttcttaatccatcttgaagtacrgttttcgcgttagttgaaggggtgaragctggcatgacctctggatacttcatagatccaggaaaaaacagggaaaaaattgaattccagtggctgttgatgtatcatagtatttccatacagcatttgcaagtgtcagatactattgcttgttttagtgagccttacatgtggctcttcctcaactcccctgtcactctatgactgggtaattggattatagtagcgcttgtcaccagtattgatggccagatttttcaggcttg

SEQ ID NO: 13191 - DNA, 600 bp, Chicken  19866894217480_3
tctgacacctttaggatgaaatagaatccctgcaaaaagaagtggaagaactgaaagacagaaatctcaatttacagacacaactgaaatctcttctggatcctacagtaccagctttgtgttgccaaaatgaagaaactagccaatcagcagatgaagcaagtaccagtggcccagaaaccccagaagaatggagcaaaaagctgaaagctgccaacgatatatgtgaaaaagtaatagwtaatgtagaaaagttaaaggaggtaaaaaaataaatttcttaatccatcttgaagtacrgttttcgcgttagttgaaggggtgaragctggcatgacctctggatacttcatagatccaggaaaaaacagggaaaaaattgaattccagtggctgttgatgtatcatagtatttccatacagcatttgcaagtgtcagatactattgcttgttttagtgagccttacatgtggctcttcctcaactcccctgtcactctatgactgggtaattggattatagtagcgcttgtcaccagtattgatggccagatttttcaggcttgcaataatctatataatatatctattttacaacat

SEQ ID NO: 13192 - DNA, 600 bp, Chicken  19866894217480_4
tccctgcaaaaagaagtggaagaactgaaagacagaaatctcaatttacagacacaactgaaatctcttctggatcctacagtaccagctttgtgttgccaaaatgaagaaactagccaatcagcagatgaagcaagtaccagtggcccagaaaccccagaagaatggagcaaaaagctgaaagctgccaacgatatatgtgaaaaagtaatagwtaatgtagaaaagttaaaggaggtaaaaaaataaatttcttaatccatcttgaagtacrgttttcgcgttagttgaaggggtgaragctggcatgacctctggatacttcatagatccaggaaaaaacagggaaaaaattgaattccagtggctgttgatgtatcatagtatttccatacagcatttgcaagtgtcagatactattgcttgttttagtgagccttacatgtggctcttcctcaactcccctgtcactctatgactgggtaattggattatagtagcgcttgtcaccagtattgatggccagatttttcaggcttgcaataatctatataatatatctattttacaacattcaatggccaaacacrgtacagttgg

SEQ ID NO: 13193 - DNA, 600 bp, Chicken  19866894217480_5
aaggggtgaragctggcatgacctctggatacttcatagatccaggaaaaaacagggaaaaaattgaattccagtggctgttgatgtatcatagtatttccatacagcatttgcaagtgtcagatactattgcttgttttagtgagccttacatgtggctcttcctcaactcccctgtcactctatgactgggtaattggattatagtagcgcttgtcaccagtattgatggccagatttttcaggcttgcaataatctatataatatatctattttacaacattcaatggccaaacacrgtacagttggcttaggcagattttgcactattgccctccttgctagccaatatttttggtgcaatttgctgagacagagtaacttgacctgttgatcgaaaatagaccagcttcagcattttataatcagagcatccttcactggaagcctgcagctttttcatgcaaaactgaagttttatgttcaggatcagtttttttcttttcttaggattagtaaygttcacactttccctctacttcaaactcaaaggtgcacattatgccgttctgtcattgttatgttagttgtcagtgtta

SEQ ID NO: 13194 - DNA, 600 bp, Chicken  19866894217480_6
agtattgatggccagatttttcaggcttgcaataatctatataatatatctattttacaacattcaatggccaaacacrgtacagttggcttaggcagattttgcactattgccctccttgctagccaatatttttggtgcaatttgctgagacagagtaacttgacctgttgatcgaaaatagaccagcttcagcattttataatcagagcatccttcactggaagcctgcagctttttcatgcaaaactgaagttttatgttcaggatcagtttttttcttttcttaggattagtaaygttcacactttccctctacttcaaactcaaaggtgcacattatgccgttctgtcattgttatgttagttgtcagtgttaatggaacacttctagatttgtatctttgtaatctaaaggaaattctggtcctgactagaccaaataaaatctttgcatattaaacactaaaagtgtgaccaaaaagtaagtcgagtttccaagttgagctttttcagtagttttgctaggcttggacttcagcgttacaggcagagacacagctggccttctgagaggatacttcagaagcttcggagtaa

SEQ ID NO: 13195 - DNA, 600 bp, Chicken  19866894217484_1
atatcatggaaatagtatcaaggtcctagtaaatccttcttttaactgcagtagcaactaaataaatgttcttttgtaaacaatataaatcagatcaggcagtttaaactttagcaatcataaaatggtgtttgtttttctgaactgataattagaaaaataccttcccatagaataggcatttgcgaagtacagaacagtagtgtgaaatcagccagaaagcaattgccagtttttgctcccttctgtactgtagtcatctgttcctgtgttttgtaactgcaacatatctgaatttgrtgagagagctttgaactgggttccagagccaggcattgctaatctgaacaattgtgcgtctcctcagacttcaagcaagggtttgtgccacagtgtaagcaagggtattgccaatttaataagcagtacaggaccaaagcattcagttgaagaatgcaagtatgttagaagtcagtttagccactagacactcagaggtgagaaatgggagtattttgagtcttgtttcactttaaaagttttagccttaatctagtgtaacaatactagctctccaagtctaagtgcggcatgcttttt

SEQ ID NO: 13196 - DNA, 600 bp, Chicken  19866894217485_1
agcttcctaaaagtggtttattgcctttctggttagccagcagatgtcatcacaagcctgagcctgaaccaggagctttatggcacccttccctaatccctgacatccttgccaactcatgactggcaggaactgtactgtactgaggcacttgagctagttttttctgcctggcagcacaagtaggctaacaaagtagttcaaagtgtaagtcatgggaaacgccacttgctgaggcatttttacaatgaagagctgctccttgggatctgcaataatacgatgcgataacgatgcctrtgcaaattaggaaacagtaaggacaacatacttagtaatataggggctcaccagcatcttataggcaaggtagagactccagatataccaaacatctatagctgtggaatccagctgtgtgctatgctccagaatggaagggtgcaatctgtaaaagcatccagcattaacttaattctgtccttgctgaatggcaataagaagtatattgcggatcttaccagtgacaaaaaataaatactttcctgyayttttaattttaaaaacatattctcagtcctwataaaacaagaagagaaa

SEQ ID NO: 13197 - DNA, 600 bp, Chicken  19866894217485_2
gaagagctgctccttgggatctgcaataatacgatgcgataacgatgcctrtgcaaattaggaaacagtaaggacaacatacttagtaatataggggctcaccagcatcttataggcaaggtagagactccagatataccaaacatctatagctgtggaatccagctgtgtgctatgctccagaatggaagggtgcaatctgtaaaagcatccagcattaacttaattctgtccttgctgaatggcaataagaagtatattgcggatcttaccagtgacaaaaaataaatactttcctgyayttttaattttaaaaacatattctcagtcctwataaaacaagaagagaaaaacaccagtttttaaagtgagccacctatatgarcacaactcataatagctcaggtagggtagaactgtgaggtggacttctcacatctagctgccacttcagagcaattcagattttccrtagatcctgcctgccattctccatggatgtctsgtttccatagccatcttaaattgcactggatgccagtgtttaagcatccaaatcccaccaatatgattctctcttctttcagattctgcaagcat

SEQ ID NO: 13198 - DNA, 600 bp, Chicken  19866894217485_3
agagctgctccttgggatctgcaataatacgatgcgataacgatgcctrtgcaaattaggaaacagtaaggacaacatacttagtaatataggggctcaccagcatcttataggcaaggtagagactccagatataccaaacatctatagctgtggaatccagctgtgtgctatgctccagaatggaagggtgcaatctgtaaaagcatccagcattaacttaattctgtccttgctgaatggcaataagaagtatattgcggatcttaccagtgacaaaaaataaatactttcctgyayttttaattttaaaaacatattctcagtcctwataaaacaagaagagaaaaacaccagtttttaaagtgagccacctatatgarcacaactcataatagctcaggtagggtagaactgtgaggtggacttctcacatctagctgccacttcagagcaattcagattttccrtagatcctgcctgccattctccatggatgtctsgtttccatagccatcttaaattgcactggatgccagtgtttaagcatccaaatcccaccaatatgattctctcttctttcagattctgcaagcatgc

SEQ ID NO: 13199 - DNA, 600 bp, Chicken  19866894217485_4
atgcgataacgatgcctrtgcaaattaggaaacagtaaggacaacatacttagtaatataggggctcaccagcatcttataggcaaggtagagactccagatataccaaacatctatagctgtggaatccagctgtgtgctatgctccagaatggaagggtgcaatctgtaaaagcatccagcattaacttaattctgtccttgctgaatggcaataagaagtatattgcggatcttaccagtgacaaaaaataaatactttcctgyayttttaattttaaaaacatattctcagtcctwataaaacaagaagagaaaaacaccagtttttaaagtgagccacctatatgarcacaactcataatagctcaggtagggtagaactgtgaggtggacttctcacatctagctgccacttcagagcaattcagattttccrtagatcctgcctgccattctccatggatgtctsgtttccatagccatcttaaattgcactggatgccagtgtttaagcatccaaatcccaccaatatgattctctcttctttcagattctgcaagcatgctgaagcaactagcatatatacgacctgttcc

SEQ ID NO: 13200 - DNA, 600 bp, Chicken  19866894217485_5
gtaatataggggctcaccagcatcttataggcaaggtagagactccagatataccaaacatctatagctgtggaatccagctgtgtgctatgctccagaatggaagggtgcaatctgtaaaagcatccagcattaacttaattctgtccttgctgaatggcaataagaagtatattgcggatcttaccagtgacaaaaaataaatactttcctgyayttttaattttaaaaacatattctcagtcctwataaaacaagaagagaaaaacaccagtttttaaagtgagccacctatatgarcacaactcataatagctcaggtagggtagaactgtgaggtggacttctcacatctagctgccacttcagagcaattcagattttccrtagatcctgcctgccattctccatggatgtctsgtttccatagccatcttaaattgcactggatgccagtgtttaagcatccaaatcccaccaatatgattctctcttctttcagattctgcaagcatgctgaagcaactagcatatatacgacctgttccatgttgtgcatctcagttaacactgaggccckctcagacaatcattgcagaa

SEQ ID NO: 13201 - DNA, 600 bp, Chicken  19866894217485_6
ctatgctccagaatggaagggtgcaatctgtaaaagcatccagcattaacttaattctgtccttgctgaatggcaataagaagtatattgcggatcttaccagtgacaaaaaataaatactttcctgyayttttaattttaaaaacatattctcagtcctwataaaacaagaagagaaaaacaccagtttttaaagtgagccacctatatgarcacaactcataatagctcaggtagggtagaactgtgaggtggacttctcacatctagctgccacttcagagcaattcagattttccrtagatcctgcctgccattctccatggatgtctsgtttccatagccatcttaaattgcactggatgccagtgtttaagcatccaaatcccaccaatatgattctctcttctttcagattctgcaagcatgctgaagcaactagcatatatacgacctgttccatgttgtgcatctcagttaacactgaggccckctcagacaatcattgcagaaacagctgtgctrgtataagatattattgtccttcagctgttcattactaaacctcttctaaaggctgaaacctcataggagagacag

SEQ ID NO: 13202 - DNA, 600 bp, Chicken  19866894217485_7
aagcatccagcattaacttaattctgtccttgctgaatggcaataagaagtatattgcggatcttaccagtgacaaaaaataaatactttcctgyayttttaattttaaaaacatattctcagtcctwataaaacaagaagagaaaaacaccagtttttaaagtgagccacctatatgarcacaactcataatagctcaggtagggtagaactgtgaggtggacttctcacatctagctgccacttcagagcaattcagattttccrtagatcctgcctgccattctccatggatgtctsgtttccatagccatcttaaattgcactggatgccagtgtttaagcatccaaatcccaccaatatgattctctcttctttcagattctgcaagcatgctgaagcaactagcatatatacgacctgttccatgttgtgcatctcagttaacactgaggccckctcagacaatcattgcagaaacagctgtgctrgtataagatattattgtccttcagctgttcattactaaacctcttctaaaggctgaaacctcataggagagacagcagaactttgcctttctctacttgagcacaagg

SEQ ID NO: 13203 - DNA, 600 bp, Chicken  19866894217485_8
aagtgagccacctatatgarcacaactcataatagctcaggtagggtagaactgtgaggtggacttctcacatctagctgccacttcagagcaattcagattttccrtagatcctgcctgccattctccatggatgtctsgtttccatagccatcttaaattgcactggatgccagtgtttaagcatccaaatcccaccaatatgattctctcttctttcagattctgcaagcatgctgaagcaactagcatatatacgacctgttccatgttgtgcatctcagttaacactgaggccckctcagacaatcattgcagaaacagctgtgctrgtataagatattattgtccttcagctgttcattactaaacctcttctaaaggctgaaacctcataggagagacagcagaactttgcctttctctacttgagcacaaggccatctgagtttccttaacttgatgatgaaaggggtttaaactaacctgattcatttgcactggtgtggatgagaggtactcacaagatctattcattcaaacttctagactgatgacagcatccagcagaggagcagaaataagtagctaagatatatt

SEQ ID NO: 13204 - DNA, 600 bp, Chicken  19866894217485_9
tagctcaggtagggtagaactgtgaggtggacttctcacatctagctgccacttcagagcaattcagattttccrtagatcctgcctgccattctccatggatgtctsgtttccatagccatcttaaattgcactggatgccagtgtttaagcatccaaatcccaccaatatgattctctcttctttcagattctgcaagcatgctgaagcaactagcatatatacgacctgttccatgttgtgcatctcagttaacactgaggccckctcagacaatcattgcagaaacagctgtgctrgtataagatattattgtccttcagctgttcattactaaacctcttctaaaggctgaaacctcataggagagacagcagaactttgcctttctctacttgagcacaaggccatctgagtttccttaacttgatgatgaaaggggtttaaactaacctgattcatttgcactggtgtggatgagaggtactcacaagatctattcattcaaacttctagactgatgacagcatccagcagaggagcagaaataagtagctaagatatattagcttctaatgccatctcactcatttccccca

SEQ ID NO: 13205 - DNA, 544 bp, Chicken  19866894217486_1
atgtaagaaagatgcatatccacgtggacatgtgtgcacacgtgtatgaggtaaaggagtgcatcagcaaaagtgcattttgcagatgtactgtctgaataactaaatgtgttttcggagaaggggaaagagtgaggtaggtaagacacaacatagaaaacttcctgtaatgaatgaacaaaaagtagatgagaagtaggatggtctgcagtagttgtttgcctccagcatgcttgaggcatatttaagacacttaaggccacatcagcttaagaaataacattactttgttctatggtsttatgaactaacttggcttcttgaaaaacttccatagcttttgatcatctttttttcttctcctcatgttcttctgtcaaagtagaaaaaggggcagaatctgaatgcataaatgcatggcttttatgtgaactgcatgtctaatgagttccctttgtacttgtataaatttaagcaactctgaccaagttgttcttattaaatctagccttctgagtctgtataatgcctggagtgagttcaa

SEQ ID NO: 13206 - DNA, 599 bp, Chicken  19866894217487_1
  misc_feature (1)..(177): n is any nucleotide
nnnnnnnnnnnnnnnnnnnnnnnnnnnnnnnnnnnnnnnnnnnnnnnnnnnnnnnnnnnnnnnnnnnnnnnnnnnnnnnnnnnnnnnnnnnnnnnnnnnnnnnnnnnnnnnnnnnnnnnnnnnnnnnnnnnnnnnnnnnnnnnnnnnnnnnnnnnnnnnnnnnnnnnnnnnnnnnnntgtgcatcttcaatggacatgattacaagaacaaggaagactgcatataagacatccaatacgagttttccttatatttgctatagaaacaaaattacctattccagtccataaataaagatrtacatttgaggtaccaaactgaaatgtttccagaagaggtaattttaaattctcatttcatttactacacaatgtagaatttactttggtacactctctgtggctgccattctgtcagaagtcagactgccaacagaccttgtctattaagggagtaaaaaatgtagaacaaaaatccaatatggtcactggagaaaaaggtctcaagttctcaaggtaagtacagtaattaaaataaactttgctagatttcaaggcaacaaaagaaattcactacttgacctttacataaataaatg

SEQ ID NO: 13207 - DNA, 600 bp, Chicken  19866894217487_2
atgtttccagaagaggtaattttaaattctcatttcatttactacacaatgtagaatttactttggtacactctctgtggctgccattctgtcagaagtcagactgccaacagaccttgtctattaagggagtaaaaaatgtagaacaaaaatccaatatggtcactggagaaaaaggtctcaagttctcaaggtaagtacagtaattaaaataaactttgctagatttcaaggcaacaaaagaaattcactacttgacctttacataaataaatgcaaagatttcttgcattattttgsttgattctgtacaagtttctgtgattaattttatttaaatataactcttacaacaatttaatccagggtcttaatgaaaatgagaagcaaaggttgacagttctaatatagaacttgcacaacagttatctttcaacactgactaaacaaacaatggcatataaaaaggtttagaaattacacactttaaaatggaagatgttttatcttgattaactgttgttacgagatgaatttttccctttagtatgcaacatcattccttacttgccaacaatgtgtacaaattatcgcagcaaa

SEQ ID NO: 13208 - DNA, 600 bp, Chicken  19866894217490_1
tactaatgaggaaataagttgtatggctatttctattacaaaattataggaatcttggaacaaaattttgggaactcctgcttttgccttgtcataagtatttatgcatggtttatatttatctttaaagcttcaggagaacaaatagttaacaaaaatgatgcattatactaaagggaaagaataattaccaaatgtacctggggtgatgattcttttcagatcatcaatactttatttgctgtgtattgaagtactccttaaccatacagccacctcaggaaaacggctcatcagaamacatcaacaggatttacttaccgttgcactaagctcataaagtaaaagaggtgtatcagcactctcctttacaaatatttgaaaatatctggcatctgtgcaatgtgagaccatctgagtgtctcatctgtgtccacagcagtagagcaaaagtcaacagaagatcagccctatctaagtcagggcatgggtgaacaacattcctctgccagagtacggggacaggcgccctgagagttacagactgggtctcaggtgggaggaaccaaagtaaacatgtacaaatctcttcatcggtgt

SEQ ID NO: 13209 - DNA, 600 bp, Chicken  19866894217491_1
ggctggcacttagcaagtgaatcctctgtgcttctgcacatacgtccattgcccaactctaatgatctgtctctttctttctgctgtgttcctgtaataatcctcttcctcttcatatgctgcaggttctttgggtggacccgtaggttttgaaagccttagcatttaaaggatttagtaccactttcacactggaggctctggcaatgtctctgtacttcgactcctgtggattatctagtttacagtcctaagacagggatggcagctggtataaatggatcaaggatcccttagcgyatgttaattatamgacttgctcttgatggcttatttgaatgctgctgattcagggctgggcccggtgagaaagttattttggcgtataattcggcggggtgtgtgtggatacatcctatccatgttatgtcatgcgtggagaaagttagagccctgttgtggagcacgggggagttgtatcactttaattagcccagtggtgttatgtagtggggttggttaaaaacttatcgatggaaacaaactggccgttaaaccgctggccctcttctgcatacagaaatgtttggtgtgtgtgag

SEQ ID NO: 13210 - DNA, 600 bp, Chicken  19866894217491_2
caagtgaatcctctgtgcttctgcacatacgtccattgcccaactctaatgatctgtctctttctttctgctgtgttcctgtaataatcctcttcctcttcatatgctgcaggttctttgggtggacccgtaggttttgaaagccttagcatttaaaggatttagtaccactttcacactggaggctctggcaatgtctctgtacttcgactcctgtggattatctagtttacagtcctaagacagggatggcagctggtataaatggatcaaggatcccttagcgyatgttaattatamgacttgctcttgatggcttatttgaatgctgctgattcagggctgggcccggtgagaaagttattttggcgtataattcggcggggtgtgtgtggatacatcctatccatgttatgtcatgcgtggagaaagttagagccctgttgtggagcacgggggagttgtatcactttaattagcccagtggtgttatgtagtggggttggttaaaaacttatcgatggaaacaaactggccgttaaaccgctggccctcttctgcatacagaaatgtttggtgtgtgtgagcttcacgtggatg

SEQ ID NO: 13211 - DNA, 600 bp, Chicken  19866894217492_1
cactcttgctgcaccgatccaaaggtctgaacgcacagtagcattaaaccttcactgctttagacagattcctctgttttgttggaacaaattaactctgcgagactcacttggtgtttgtaagaggaatggggggagcaggaaaggggttgttgttgctgaaggagacgagcaggatgaagcaagccaggtgccaagatgctgctgaccacagaaagtcctggtttagggccacctatgagctaagtttttaatgtctccttaatgtaaaccgtctggttgggacatctggctgtcagygtgtcttctcgcgagcagctgtttgcagtaacctgtggctttcatggaaactgggctcacgaggactccagtgtgatgtatttattacatggaggcaatcaacttccctcttgtcgctcagttttatgagcgaacatttactgcgaatctgaggctcatctgataaacatttcaaggtatgaaaatgaatgttcctctgggaaggagaacagcccgtcaattaaaatcgcgttacgagatggcctcccttggcaaatcctccctacgtcagtgcctctgcttctgtcccagctcccggcg

SEQ ID NO: 13212 - DNA, 600 bp, Chicken  19866894217492_2
cgctcgtgtccaacaagcagacagcagtcgaggagaaagaaggaaattcttttccagttattcacgcacagcccaaccccactcctccatccttccctgctccagtctgtcagagaacaacaaagaatcatagaacggctgaggttggaagggatcttgttccagtggttgccaaccactaaattcagcaccagataggctgcctagggccgcatccaaagttagatgaggatgattcaagagcagtgtctacaaaagcttcaaagctacttgaatttttaagagatcttaacttgtccrcagggctgtaactatttytaagcacttcttgctgagtgtttaccaagggctacgtctagcataaggctgtacataggtaacagatgaggcactgtgcacccatggtatccttgcatggcaccaggggtaccacagcagtgaaattcagggcaaccttcttagtgcctccatcaatgagttgaattattgttatgggagagtgaaggtggaaaagggaacttgggaaatatttagagtttgtacagcaatcatatgccacagtgaggataaagatgtgtcaggtccaatggggagagaaac

SEQ ID NO: 13213 - DNA, 600 bp, Chicken  19866894217492_3
agacagcagtcgaggagaaagaaggaaattcttttccagttattcacgcacagcccaaccccactcctccatccttccctgctccagtctgtcagagaacaacaaagaatcatagaacggctgaggttggaagggatcttgttccagtggttgccaaccactaaattcagcaccagataggctgcctagggccgcatccaaagttagatgaggatgattcaagagcagtgtctacaaaagcttcaaagctacttgaatttttaagagatcttaacttgtccrcagggctgtaactatttytaagcacttcttgctgagtgtttaccaagggctacgtctagcataaggctgtacataggtaacagatgaggcactgtgcacccatggtatccttgcatggcaccaggggtaccacagcagtgaaattcagggcaaccttcttagtgcctccatcaatgagttgaattattgttatgggagagtgaaggtggaaaagggaacttgggaaatatttagagtttgtacagcaatcatatgccacagtgaggataaagatgtgtcaggtccaatggggagagaaaccagtagaaggaaaagtcc

SEQ ID NO: 13214 - DNA, 600 bp, Chicken  19866894217492_4
agcataaggctgtacataggtaacagatgaggcactgtgcacccatggtatccttgcatggcaccaggggtaccacagcagtgaaattcagggcaaccttcttagtgcctccatcaatgagttgaattattgttatgggagagtgaaggtggaaaagggaacttgggaaatatttagagtttgtacagcaatcatatgccacagtgaggataaagatgtgtcaggtccaatggggagagaaaccagtagaaggaaaagtccatgaaaaatactacctagtagcattttagccagttttamcccttagaaattgcttggytgttgatcctctctgatagcatctgagtcttgacttacacacagagcacrtactgtccctgattaagaccctctggtctccccatggtgcttccagtgccctgcagtaccacccagctcagattagttttccacccagctcattgatatcccacaagtgtttatcaaagaccaagcagggtctggtcaacatcactggatggcaaataacaggaggggacttctctcagctgtgaggaggcagcagggctgggaggatgcaggataagggtgggtacctgg

SEQ ID NO: 13215 - DNA, 600 bp, Chicken  19866894217492_5
gtaacagatgaggcactgtgcacccatggtatccttgcatggcaccaggggtaccacagcagtgaaattcagggcaaccttcttagtgcctccatcaatgagttgaattattgttatgggagagtgaaggtggaaaagggaacttgggaaatatttagagtttgtacagcaatcatatgccacagtgaggataaagatgtgtcaggtccaatggggagagaaaccagtagaaggaaaagtccatgaaaaatactacctagtagcattttagccagttttamcccttagaaattgcttggytgttgatcctctctgatagcatctgagtcttgacttacacacagagcacrtactgtccctgattaagaccctctggtctccccatggtgcttccagtgccctgcagtaccacccagctcagattagttttccacccagctcattgatatcccacaagtgtttatcaaagaccaagcagggtctggtcaacatcactggatggcaaataacaggaggggacttctctcagctgtgaggaggcagcagggctgggaggatgcaggataagggtgggtacctgggccccagctcgtcctcact

SEQ ID NO: 13216 - DNA, 600 bp, Chicken  19866894217492_6
gtaccacagcagtgaaattcagggcaaccttcttagtgcctccatcaatgagttgaattattgttatgggagagtgaaggtggaaaagggaacttgggaaatatttagagtttgtacagcaatcatatgccacagtgaggataaagatgtgtcaggtccaatggggagagaaaccagtagaaggaaaagtccatgaaaaatactacctagtagcattttagccagttttamcccttagaaattgcttggytgttgatcctctctgatagcatctgagtcttgacttacacacagagcacrtactgtccctgattaagaccctctggtctccccatggtgcttccagtgccctgcagtaccacccagctcagattagttttccacccagctcattgatatcccacaagtgtttatcaaagaccaagcagggtctggtcaacatcactggatggcaaataacaggaggggacttctctcagctgtgaggaggcagcagggctgggaggatgcaggataagggtgggtacctgggccccagctcgtcctcactgcgccagacaaagtctccaaacttctcatagtgggagttgtagtgatgct

SEQ ID NO: 13217 - DNA, 600 bp, Chicken  19866894217497_1
tataaggtactctgtaaaaatccaacccccctcttttacacgcaaatcacaatcaaattcatacttttctagaacaacgaacagcaggaaacctaattcagatttctaattcctttattacatgatataattatatttcaccagattacttctgcctcgcaacgtagctgcatttataattatttgttgcccagctcaaggttaagtgaagaaacagccccagctgagattctgtttaagcccttatttttcacaatgtgctacaaaagattaattgctttatattcttcagtgaggacrgaattaaaattgctgtttgatatgaactattaacacggcaatcattttgaaggagcacattgtttcttaaaattaatacgtttcccctccttttgcttaatccataaagtggtacttggcaaccttaaaaatttaatttttgggaggttccttggaagracctgtaaaaaaatccagtctcctgcactcctacagactcactgcctgctgaaaggcagctctcaacaatgagccaaacggcaatccaacaatactgagcagatactactgaagagctttcagagggatgctttattttaa

SEQ ID NO: 13218 - DNA, 600 bp, Chicken  19866894217497_2
caacgtagctgcatttataattatttgttgcccagctcaaggttaagtgaagaaacagccccagctgagattctgtttaagcccttatttttcacaatgtgctacaaaagattaattgctttatattcttcagtgaggacrgaattaaaattgctgtttgatatgaactattaacacggcaatcattttgaaggagcacattgtttcttaaaattaatacgtttcccctccttttgcttaatccataaagtggtacttggcaaccttaaaaatttaatttttgggaggttccttggaagracctgtaaaaaaatccagtctcctgcactcctacagactcactgcctgctgaaaggcagctctcaacaatgagccaaacggcaatccaacaatactgagcagatactactgaagagctttcagagggatgctttattttaacatatatacatatttgcctgaatcattttataaccgaacagggccaaagatgcaccaaagctgctccgaaagtaatgcctcctgttttattgtgttggtttacaacatcaggggtggatgctggtagtatggcagtaggggttgaaccttccccaccaa

SEQ ID NO: 13219 - DNA, 600 bp, Chicken  19866894217499_1
ttatttaggtgtgggaaattgttctttaggaatctggtgtctgtagcaaacctgcactccttgaacctcaatcccacaacgcgtttcagatgtggattttaagtgactgtttctaattagtgcatcacagagccctgtcaaaataccttttggtgaatggcaatagcgtgtgcacgggattttaaacggcatctcgagctcagctgtgtctctccatgttttgaaggtacgccgccagctgcagctgtaaggggcttctccccgaggctgtgcatccctgctcactgccacagcgccgcrtggtacctgcaggccacactgcacgatgggatgtgggcatcacatagcgatgcttcctaatgcacggggacaccgtaagctccccagtgctgcacgacrtggaattagggctttttgtgcacgagaggaggcaagcaaggcacgatgaacacaagcagcccggctgctgcagtgaaccttccctgctgttttggggtttctcttcctgcccagactgatggatgctccctgctcctggtggctcaggaccagccagcgctgagctctcctcacccatttattgacactctggcactgctc

SEQ ID NO: 13220 - DNA, 600 bp, Chicken  19866894217499_2
taagtgactgtttctaattagtgcatcacagagccctgtcaaaataccttttggtgaatggcaatagcgtgtgcacgggattttaaacggcatctcgagctcagctgtgtctctccatgttttgaaggtacgccgccagctgcagctgtaaggggcttctccccgaggctgtgcatccctgctcactgccacagcgccgcrtggtacctgcaggccacactgcacgatgggatgtgggcatcacatagcgatgcttcctaatgcacggggacaccgtaagctccccagtgctgcacgacrtggaattagggctttttgtgcacgagaggaggcaagcaaggcacgatgaacacaagcagcccggctgctgcagtgaaccttccctgctgttttggggtttctcttcctgcccagactgatggatgctccctgctcctggtggctcaggaccagccagcgctgagctctcctcacccatttattgacactctggcactgctcattgcgagcagtggtgacacagcccagagcaccgcagccccatccaggcgcgttcccccacagcctgcgcagcactcatagctgcagaggaaaccagac

SEQ ID NO: 13221 - DNA, 600 bp, Chicken  19866894217505_1
ctaagcagtgttcaccctgctcacctgccgcctcaccccagcagcctccagcacacagcagccaggtgccctaacccagctggagggcgtttgtgtcacgcagttggacagagcttcaaatcagagacctcctgccaagctggcctgcatgacatgcaggttagtaacactacatgaatacgcagcacatctcacggcccacaaacagatccagttggtggttgtaactatgcggaaggaaatggcaggcaagtaaaatacaggaataagagcctgcaagatgacattgacagccaaaaygatacaagagttcacttcacagcaatgaaaagtgaagactctgtggaaaaacagaratcccamatcaaaaactggttatgttgaaccttgccttcttggaaaaaaatcagagatggttcctgaaatgtaattaaaccaacgtgacttttccattaggaaaccaattaggacagcataaaatatgcatgctgggggaagaggagcacattattttaacatattgtgtttcagttcacagaagagaattctcttcacagaagagaattttaaattgtttttaattttgtgcgttgaattgta

SEQ ID NO: 13222 - DNA, 600 bp, Chicken  19866894217505_2
agcagccaggtgccctaacccagctggagggcgtttgtgtcacgcagttggacagagcttcaaatcagagacctcctgccaagctggcctgcatgacatgcaggttagtaacactacatgaatacgcagcacatctcacggcccacaaacagatccagttggtggttgtaactatgcggaaggaaatggcaggcaagtaaaatacaggaataagagcctgcaagatgacattgacagccaaaaygatacaagagttcacttcacagcaatgaaaagtgaagactctgtggaaaaacagaratcccamatcaaaaactggttatgttgaaccttgccttcttggaaaaaaatcagagatggttcctgaaatgtaattaaaccaacgtgacttttccattaggaaaccaattaggacagcataaaatatgcatgctgggggaagaggagcacattattttaacatattgtgtttcagttcacagaagagaattctcttcacagaagagaattttaaattgtttttaattttgtgcgttgaattgtacaatgtgcctcagtagatttctctaacaaagccatatttatggagatgaatcccag

SEQ ID NO: 13223 - DNA, 600 bp, Chicken  19866894217505_3
aggtgccctaacccagctggagggcgtttgtgtcacgcagttggacagagcttcaaatcagagacctcctgccaagctggcctgcatgacatgcaggttagtaacactacatgaatacgcagcacatctcacggcccacaaacagatccagttggtggttgtaactatgcggaaggaaatggcaggcaagtaaaatacaggaataagagcctgcaagatgacattgacagccaaaaygatacaagagttcacttcacagcaatgaaaagtgaagactctgtggaaaaacagaratcccamatcaaaaactggttatgttgaaccttgccttcttggaaaaaaatcagagatggttcctgaaatgtaattaaaccaacgtgacttttccattaggaaaccaattaggacagcataaaatatgcatgctgggggaagaggagcacattattttaacatattgtgtttcagttcacagaagagaattctcttcacagaagagaattttaaattgtttttaattttgtgcgttgaattgtacaatgtgcctcagtagatttctctaacaaagccatatttatggagatgaatcccagcactact

SEQ ID NO: 13224 - DNA, 600 bp, Chicken  19866894217505_4
cagaagagaattctcttcacagaagagaattttaaattgtttttaattttgtgcgttgaattgtacaatgtgcctcagtagatttctctaacaaagccatatttatggagatgaatcccagcactactgggatattggatttagtagcttactgtacattattgcaggcagctcagcactttgacgcgaaattaatttataaatatattctgagtacataccttgtgattgaaatacattaataataagctttgcaagttgatggagaagccacatattaccagacaaattgttgcaagsggcaagttaaagtggggaaacaaattgttgtctccttggcctaagattaaggcttagggataactccgactgcttttacactgcactgatgttccatcgtactgaatgttgttagaattttaaaatgttttgaaagaactgcgattgttcatttttaacccgttagctttccaaaaataatgctttaaattgatatttctgttgttctgaaaggatgaaatttatctgcagaggtaaagtttggacaacccttttaaagatgcagttgagggcaaccacaacgtacttctttacagtgac

SEQ ID NO: 13225 - DNA, 600 bp, Chicken  19866894217510_1
ttagtccatgtcattgaaattttatggataaaactattttagaatatgtcattgtgccaacctcattgtgccaacatttgcagtcagagtattgattaaaatatgaaatgctataattaaagttcattggaattagatttgagaagaaagttgaacttttgttggaaatgtaaactcaacttttgtctaaaaatttttaaaattctttccttagcttttcatgaaatattagtatgtggcaacaattctaattttaagttttcctgaacttttttgcatttcaaacagaaagcgaggaaygagttagaaaagagttctaagaagggatctaatgcagtgatagygaggggaaatgacaagagccaaagagaaagagtaaaaaaaaaaaaatgcagatacttttcaaaagatattacctttaaaaatcagattwaaaaatataaatgtcaattatttctaaataaaataacacatttcagaagaaaaaaaaaagaagaagcaaaaggatctgtctttcatccatttttcagaaattggcaatggaattaacttagcctctccttcaagtggattttataagtacctctgttttttccactg

SEQ ID NO: 13226 - DNA, 600 bp, Chicken  19866894217510_2
tatgtcattgtgccaacctcattgtgccaacatttgcagtcagagtattgattaaaatatgaaatgctataattaaagttcattggaattagatttgagaagaaagttgaacttttgttggaaatgtaaactcaacttttgtctaaaaatttttaaaattctttccttagcttttcatgaaatattagtatgtggcaacaattctaattttaagttttcctgaacttttttgcatttcaaacagaaagcgaggaaygagttagaaaagagttctaagaagggatctaatgcagtgatagygaggggaaatgacaagagccaaagagaaagagtaaaaaaaaaaaaatgcagatacttttcaaaagatattacctttaaaaatcagattwaaaaatataaatgtcaattatttctaaataaaataacacatttcagaagaaaaaaaaaagaagaagcaaaaggatctgtctttcatccatttttcagaaattggcaatggaattaacttagcctctccttcaagtggattttataagtacctctgttttttccactgatgaaccaaatggtagaaaatcacctgttgtactgcttgagcac

SEQ ID NO: 13227 - DNA, 600 bp, Chicken  19866894217510_3
tgcagtcagagtattgattaaaatatgaaatgctataattaaagttcattggaattagatttgagaagaaagttgaacttttgttggaaatgtaaactcaacttttgtctaaaaatttttaaaattctttccttagcttttcatgaaatattagtatgtggcaacaattctaattttaagttttcctgaacttttttgcatttcaaacagaaagcgaggaaygagttagaaaagagttctaagaagggatctaatgcagtgatagygaggggaaatgacaagagccaaagagaaagagtyaaaaaaaaaaaatgcagatacttttcaaaagatattacctttaaaaatcagattwaaaaatataaatgtcaattatttctaaataaaataacacatttcagaagaaaaaaaaaagaagaagcaaaaggatctgtctttcatccatttttcagaaattggcaatggaattaacttagcctctccttcaagtggattttataagtacctctgttttttccactgatgaaccaaatggtagaaaatcacctgttgtactgcttgagcactggccttttcactcaaatgaatactgtattttta

SEQ ID NO: 13228 - DNA, 600 bp, Chicken  19866894217510_4
tagatttgagaagaaagttgaacttttgttggaaatgtaaactcaacttttgtctaaaaatttttaaaattctttccttagcttttcatgaaatattagtatgtggcaacaattctaattttaagttttcctgaacttttttgcatttcaaacagaaagcgaggaaygagttagaaaagagttctaagaagggatctaatgcagtgatagygaggggaaatgacaagagccaaagagaaagagtaaaaaaaaaaaaatgcagatacttttcaaaagatattacctttaaaaatcagattwaaaaatataaatgtcaattatttctaaataaaataacacatttcagaagaaaaaaaaaagaagaagcaaaaggatctgtctttcatccatttttcagaaattggcaatggaattaacttagcctctccttcaagtggattttataagtacctctgttttttccactgatgaaccaaatggtagaaaatcacctgttgtactgcttgagcactggccttttcactcaaatgaatactgtatttttactttcagaaatagctctagacacccacaggtttaaaggcaagcctgtagtacaag

SEQ ID NO: 13229 - DNA, 512 bp, Chicken  19866894217510_5
ttggcaatggaattaacttagcctctccttcaagtggattttataagtacctctgttttttccactgatgaaccaaatggtagaaaatcacctgttgtactgcttgagcactggccttttcactcaaatgaatactgtatttttactttcagaaatagctctagacacccacaggtttaaaggcaagcctgtagtacaagagcttgcagatgtctgacaggccagttctacacaggtaccaaggagaaatgtgcagaagggtcttgtggaaaaagcattgtaagtcatcaggaaggtaakaaaattcgaatcagagatgatttttttctggaaattagctgctagctataaagaaacccaagtatctatttggtgaggcactggaagaggttgcccagaaaaaytgtggatgccccatccttggaggcattcaaggccaggttggatggagccctggacagcttatctgatgggtggcaatgctgcccacaagagggaagctggaactaaat

SEQ ID NO: 13230 - DNA, 408 bp, Chicken  19866894217510_6
tgagcactggccttttcactcaaatgaatactgtatttttactttcagaaatagctctagacacccacaggtttaaaggcaagcctgtagtacaagagcttgcagatgtctgacaggccagttctacacaggtaccaaggagaaatgtgcagaagggtcttgtggaaaaagcattgtaagtcatcaggaaggtaakaaaattcgaatcagagatgatttttttctggaaattagctgctagctataaagaaacccaagtatctatttggtgaggcactggaagaggttgcccagaaaaaytgtggatgccccatccttggaggcattcaaggccaggttggatggagccctggacagcttatctgatgggtggcaatgctgcccacaagagggaagctggaactaaat

SEQ ID NO: 13231 - DNA, 600 bp, Chicken  19866894217512_1
gtttggaatgagagcaggaaagcaagaattcacttgtgcatgcaaatctaccattcagaaactgacaaaaatcaaacaaacagttgtttctttggtacaagaagctaagtaaggaattcaaacaactcctgagtttatttgtactgagctctttgttaccaaaatacttttcctaacgcaaagcactctaaaacacattaaaattacacgggcatgcaaatagccaatgaatgcgcaagagtgaaagacaggaagaaactgattttcagcacatgatcacaggaaacaaattttcagccygaactgcagttttaggaagaattttgcaattactgtcatataccaaaaaattattacctcaagcttggtatatgtgaccataataacgcttcatgtctgacaagttattttagttcacaaaaaccatataatttctgacacatttcttgttggtcaaaaccaacagattgctccacacttgtaaccaatgcattgcaatagacacaaatgttgaaagaaggttttaagaaacatcttcccaccttacagtaatttctttctgactccattatgatgaagcagagagtgtgaagctgcact

SEQ ID NO: 13232 - DNA, 600 bp, Chicken  19866894217514_1
tgctgtgagaaaccaaagtctgaaatagcttgtttgctaattaaataatataaaaaagaaaaagacaaataaacaaacccaatgaagtactatggggaagccagaggcttagatcaggcacctgcagagccccagaaaaatcatatttcttctgtgaaatcatctatttccatttcatgagctcttttcaagtgctaagagcagcaagcatacactattaacttttgtaagagaaaaatgatccctagctgcctatgattaacattcatgaagcatcaggtccgggtcacagggttaaayacgctaactaaaacaactcctttcttctagcagcataatctaaagcggctagcagccttctgtgagatcctgtacagcatattctctaagacctgctcctagaacaaattaagcagcctttaattgagtttgttccttttaccactggagacaacataagatttaacttcatggggtgaaataagagaaacagtaaattaaacagcatactttggacatcttactaacagtattactgagctgaaagcctattctctggcgccttaaagatatccaagaaaccaagaggggaacacagta

SEQ ID NO: 13233 - DNA, 600 bp, Chicken  19866894217518_1
agatcatctctccacaggccatttctgcatctagcatacacaaataatcctctatcgctcctgaaaaccaagaaagtgttcttcaaaactcaaacacttcattgtaaatgttacacagaataatactggttcaattaaaaaatttcttttttttttctttgttgtttttcaacccagataaactccacaaatgcatgaaaaaacacgatatcatcttaatctgtatttattcataagcattatagggatctgaaaaaattgatgttacttcacgggctaaatacacaacccagggacccrgtgctcctagagaacatcccctatcagcacatctgtaaggtcccgtaagcatattttacaaaaatcaccatttatttaattattcctaaatagatatggctataggaaaacagcatgacaaagagttacacaagagcataaagcattccacaattcttatgtacacacaagagcttttagtcaggtctagccaaatttcttaccatttcctgtgctgtaatggcaatggctttagagtatttcaccacagtggtctgataatcaacaaatgtccccttgggatctgcaggtgtactttca

SEQ ID NO: 13234 - DNA, 590 bp, Chicken  19866894217522_1
aaagtctaccagaacagacagaggtatagaagagatctaactatgagtcaatgtgaaattcaggtaaccgtatcgttaccttttgctccattcagaaagtagctcagacaaaacacacacaaaaaagcctctgccagtccttaaggccaccatgcctgaaggatgaccaccagccttggctgattttggcctcatcaactcaggctgtaacaggacgtgtttcagtgcagaagtttaaactgtaaggaaacatgggtatacacaagcgttgcatcctcttcacattaagaaagtagaaayaaacagttacaaccaaaaatggcacacagttgtaaaatytattactctaagctaggaagagtccaaggcagcgttgctcacgctctgctcttttaattcaagtccctttgcaaacgtatcattgtaattgtacttaaagaagaaatacaaaaatgacacatccttttttcctgacaggtcccccctcccattcagcatactggatgaacctgttcagaagaactggggctgctaccagtgaggattttgtccacagtttcttttgtgattcactgacaaggtcaggaaca

SEQ ID NO: 13235 - DNA, 551 bp, Chicken  19866894217522_2
actatgagtcaatgtgaaattcaggtaaccgtatcgttaccttttgctccattcagaaagtagctcagacaaaacacacacaaaaaagcctctgccagtccttaaggccaccatgcctgaaggatgaccaccagccttggctgattttggcctcatcaactcaggctgtaacaggacgtgtttcagtgcagaagtttaaactgtaaggaaacatgggtatacacaagcgttgcatcctcttcacattaagaaagtagaaayaaacagttacaaccaaaaatggcacacagttgtaaaatytattactctaagctaggaagagtccaaggcagcgttgctcacgctctgctcttttaattcaagtccctttgcaaacgtatcattgtaattgtacttaaagaagaaatacaaaaatgacacatccttttttcctgacaggtcccccctcccattcagcatactggatgaacctgttcagaagaactggggctgctaccagtgaggattttgtccacagtttcttttgtgattcactgacaaggtcaggaaca

SEQ ID NO: 13236 - DNA, 600 bp, Chicken  19866894217525_1
cctgccgagttacccagtgccagtcctgagagtggccaggcattccagcaatctgagggcaaaaagtcatagtaaggcaacatcagctgaaagatacatagctctgtggtaagagtctgggaaagaggtgatgtatgattacatcagtgagagaagaaaaagcaacactgggagggagagggtgggagacgcggtcccaaagagatgctcctagccaaaagctggactgaagcttctaagatgagagttcaggcacacataacattagccacatgaaaagaaccatgtctgaaccacagmctcttgcaggatagacccatwacccactcacctcatcaaattgattgcatgtacataggttgctctgaaagtaacgcctcctgtttatctccatggaaagtacaacagaaacaaagagcacaagaacactatttgatagaacaaattctctgctatagaatgctatttatcaatgtagtcaccaccattggctatgcattttcaccagcaatgaacaagagcctgcatgctgcacacataaaaatccgcatggctgtccagaatgtggcttgtctttcacgtcactgttgccactgccga

SEQ ID NO: 13237 - DNA, 600 bp, Chicken  19866894217525_2
agtcctgagagtggccaggcattccagcaatctgagggcaaaaagtcatagtaaggcaacatcagctgaaagatacatagctctgtggtaagagtctgggaaagaggtgatgtatgattacatcagtgagagaagaaaaagcaacactgggagggagagggtgggagacgcggtcccaaagagatgctcctagccaaaagctggactgaagcttctaagatgagagttcaggcacacataacattagccacatgaaaagaaccatgtctgaaccacagmctcttgcaggatagacccatwacccactcacctcatcaaattgattgcatgtacataggttgctctgaaagtaacgcctcctgtttatctccatggaaagtacaacagaaacaaagagcacaagaacactatttgatagaacaaattctctgctatagaatgctatttatcaatgtagtcaccaccattggctatgcattttcaccagcaatgaacaagagcctgcatgctgcacacataaaaatccgcatggctgtccagaatgtggcttgtctttcacgtcactgttgccactgccgaaatgaaacacccacctcctct

SEQ ID NO: 13238 - DNA, 600 bp, Chicken  19866894217527_1
agctgtggagaaagttgaagtcaatattttgctgagaacagcaaaacacctcttcagctacattccccgcatctgaaggcctaagaaagctgagcttactgctgctggggtagggacagctggaaaaaggtgaccaatacattggggcagacaaaattccatctgcagcagaaaactattcttcttctactaataatccctggtagaaacaccaaatcttactctttagagcttccatctcaccttccttgcttctgcttcatcccctattgtgtatggggtagcctgaccgcagcctgmaacgtttgaccagtgccatcctagttgtaccttggctgctcagtttcaagagcaagtctcacaaaccttgacaaggaaagaggcaacagagtagcttgttctccatggccccctgggacacctcccagcagtggccctgaagttgtgctacagcagaggatgctgctctggtgtgtactgatggcatctattgccactgcacccagcacagcagcactgggatgggasgggtgtgctttcatatgatctggctaaataacagactgcagaatttgttccatgttaagtgtttcagcaaga

SEQ ID NO: 13239 - DNA, 600 bp, Chicken  19866894217527_2
gagcttccatctcaccttccttgcttctgcttcatcccctattgtgtatggggtagcctgaccgcagcctgmaacgtttgaccagtgccatcctagttgtaccttggctgctcagtttcaagagcaagtctcacaaaccttgacaaggaaagaggcaacagagtagcttgttctccatggccccctgggacacctcccagcagtggccctgaagttgtgctacagcagaggatgctgctctggtgtgtactgatggcatctattgccactgcacccagcacagcagcactgggatgggasgggtgtgctttcatatgatctggctaaataacagactgcagaatttgttccatgttaagtgtttcagcaagagacagcaagtacacttcttttttaactcatgtggctggttatctgtgtgccatactttgcatccactgactttccatttatttatgtatttatttatttattaataggcttatcctcaaaatgtggctcagattacagtctggatcatttaactagctttttaatctctggagatgtatattgtctgttcccagtgggagggtaattatcttttccccatctaaattc

SEQ ID NO: 13240 - DNA, 600 bp, Chicken  19866894217529_1
gctgcgtggggacggcagatctgagatcttacagataaactgctggtcacgcttgcccttctgagaaggctctcggaccaggccaacccaaaagcaacgtgaaatttccctttcagttcccactgctgggaatctcctacactcagagcccgtgctggtactgccattccttctgctgtgtgatgctaagcgaaacagcccagccaccaagcaatccaggagctgaaggggctctgaaccacagaagcccccaaggcgccacagctcacgtccagttctggccagggagtcacagcctcrcacatccattgaaaataccacggggagccctgcccttaactcaggtcctccccttcacagcactgcaaggaaacctgaaccaggagcatcacctgctcagcacagggcaccacccaccctccatcacctacagcttgctggagcactggtgagaattgcttcaggctgagaacaacaacactgggatttagtaggacttggcagatgagactagatgaccagcatctcattcctacttccctgcagagctccactctgattacttctatccaaaaccagagcttaactttaatcccacag

SEQ ID NO: 13241 - DNA, 600 bp, Chicken  19866894217532_1
ggaatactttacgtgtttctacattggagagaaggaggattttttttccaacacaatgacaaagtttgtgttaacataaaagctcattctaaattgttttttctcctttaccttatttccataggaaatcagacttacatagctattatccatagtcaattgttgttaaaagtattgttaattattgtggtgtagtagaaaaaaaggaaaaaaagaataaaaggaaaattagcaactggagaaagaagaaaacaaaaaacagactcgtgtttacagtaagagcaaggcaggtgcagtctrccattgcctttgccmtttgctgccccttacttttaacaagttgacgcagcagcraagttagaaaagaaccaagttggtctgcagttaacagcaaggcagccctgtgccagtttggatcttgaaccatgatcatggtcagtctaaattaattagggctggcattagcagggctcatcagcttgtccacaacactgcagatacagctaaaytgcttcwaattgcagagacagcttcttggattttagttttgaggtttctgtactactgtggcactagggggcatggtctagtgggcatggt

SEQ ID NO: 13242 - DNA, 600 bp, Chicken  19866894217532_2
tttctacattggagagaaggaggattttttttccaacacaatgacaaagtttgtgttaacataaaagctcattctaaattgttttttctcctttaccttatttccataggaaatcagacttacatagctattatccatagtcaattgttgttaaaagtattgttaattattgtggtgtagtagaaaaaaaggaaaaaaagaataaaaggaaaattagcaactggagaaagaagaaaacaaaaaacagactcgtgtttacagtaagagcaaggcaggtgcagtctrccattgcctttgccmtttgctgccccttacttttaacaagttgacgcagcagcraagttagaaaagaaccaagttggtctgcagttaacagcaaggcagccctgtgccagtttggatcttgaaccatgatcatggtcagtctaaattaattagggctggcattagcagggctcatcagcttgtccacaacactgcagatacagctaaaytgcttcwaattgcagagacagcttcttggattttagttttgaggtttctgtactactgtggcactagggggcatggtctagtgggcatggtggtgaacggttgatt

SEQ ID NO: 13243 - DNA, 600 bp, Chicken  19866894217532_3
aatgacaaagtttgtgttaacataaaagctcattctaaattgttttttctcctttaccttatttccataggaaatcagacttacatagctattatccatagtcaattgttgttaaaagtattgttaattattgtggtgtagtagaaaaaaaggaaaaaaagaataaaaggaaaattagcaactggagaaagaagaaaacaaaaaacagactcgtgtttacagtaagagcaaggcaggtgcagtctrccattgcctttgccmtttgctgccccttacttttaacaagttgacgcagcagcraagttagaaaagaaccaagttggtctgcagttaacagcaaggcagccctgtgccagtttggatcttgaaccatgatcatggtcagtctaaattaattagggctggcattagcagggctcatcagcttgtccacaacactgcagatacagctaaaytgcttcwaattgcagagacagcttcttggattttagttttgaggtttctgtactactgtggcactagggggcatggtctagtgggcatggtggtgaacggttgattgttggtctaggtgatcttagtggtcttttccaactgtaa

SEQ ID NO: 13244 - DNA, 600 bp, Chicken  19866894217532_4
aaaaagaataaaaggaaaattagcaactggagaaagaagaaaacaaaaaacagactcgtgtttacagtaagagcaaggcaggtgcagtctrccattgcctttgccmtttgctgccccttacttttaacaagttgacgcagcagcraagttagaaaagaaccaagttggtctgcagttaacagcaaggcagccctgtgccagtttggatcttgaaccatgatcatggtcagtctaaattaattagggctggcattagcagggctcatcagcttgtccacaacactgcagatacagctaaaytgcttcwaattgcagagacagcttcttggattttagttttgaggtttctgtactactgtggcactagggggcatggtctagtgggcatggtggtgaacggttgattgttggtctaggtgatcttagtggtcttttccaactgtaatgattttgtgattctatacctggttattttccatagccttttgaagtccatgaaaatraacaagtgttcttctcatagattggattaacagtaccatctccaaatttctacactgaatgcatattttttctctcatttcataaggaagttgatat

SEQ ID NO: 13245 - DNA, 600 bp, Chicken  19866894217532_5
ataaaaggaaaattagcaactggagaaagaagaaaacaaaaaacagactcgtgtttacagtaagagcaaggcaggtgcagtctrccattgcctttgccmtttgctgccccttacttttaacaagttgacgcagcagcraagttagaaaagaaccaagttggtctgcagttaacagcaaggcagccctgtgccagtttggatcttgaaccatgatcatggtcagtctaaattaattagggctggcattagcagggctcatcagcttgtccacaacactgcagatacagctaaaytgcttcwaattgcagagacagcttcttggattttagttttgaggtttctgtactactgtggcactagggggcatggtctagtgggcatggtggtgaacggttgattgttggtctaggtgatcttagtggtcttttccaactgtaatgattttgtgattctatacctggttattttccatagccttttgaagtccatgaaaatraacaagtgttcttctcatagattggattaacagtaccatctccaaatttctacactgaatgcatattttttctctcatttcataaggaagttgatatctttaca

SEQ ID NO: 13246 - DNA, 600 bp, Chicken  19866894217532_6
tggatcttgaaccatgatcatggtcagtctaaattaattagggctggcattagcagggctcatcagcttgtccacaacactgcagatacagctaaaytgcttcwaattgcagagacagcttcttggattttagttttgaggtttctgtactactgtggcactagggggcatggtctagtgggcatggtggtgaacggttgattgttggtctaggtgatcttagtggtcttttccaactgtaatgattttgtgattctatacctggttattttccatagccttttgaagtccatgaaaatraacaagtgttcttctcatagattggattaacagtaccatctccaaatttctacactgaatgcatattttttctctcatttcataaggaagttgatatctttacagtctgttattttttttagctgacactgttgataagtaagttgttgtaatcacccattccttacaaggatgaagatgaacgatgtttttcacatgttgcctagaataacattttattagattagaacaattcttaagaatgcagtctgcttacttacaaacattccaatcacctttttgaatcagtggatttttctt

SEQ ID NO: 13247 - DNA, 600 bp, Chicken  19866894217532_7
cttgtccacaacactgcagatacagctaaaytgcttcwaattgcagagacagcttcttggattttagttttgaggtttctgtactactgtggcactagggggcatggtctagtgggcatggtggtgaacggttgattgttggtctaggtgatcttagtggtcttttccaactgtaatgattttgtgattctatacctggttattttccatagccttttgaagtccatgaaaatraacaagtgttcttctcatagattggattaacagtaccatctccaaatttctacactgaatgcatartttttctctcatttcataaggaagttgatatctttacagtctgttattttttttagctgacactgttgataagtaagttgttgtaatcacccattccttacaaggatgaagatgaacgatgtttttcacatgttgcctagaataacattttattagattagaacaattcttaagaatgcagtctgcttacttacaaacattccaatcacctttttgaatcagtggatttttcttggagcctcagcacttactttggcatttatattctagtcaattcatccttgatcacatcactattag

SEQ ID NO: 13248 - DNA, 600 bp, Chicken  19866894217535_1
tattggaaaagtttattttctcaaaaagaaataaacagcattagaaaaaaaagaacaagtgttgaaggtcttcttagttatgaagtctttattgactgtaaaccttgcagtctgtatggataaaggagagacatatgatgattacaaagatcacatatagagcaccaggagcaaaaccaaaatggacaatacagaaaaaaactgctactagtgagagaaactgggagtaagaagaaatcattctttgaccaggttagtagtaacagaagatccaaaagaaagtgttagaggtttattctstgcaaaggaatagstatcattcaatgatacgagsaaaaatgttaattataaatgttacttaagacaagtagcaacctcatagttggaaacaatgagtaaaaactcaacctagaataaaagtaaatcatgtttgatgatattttggtatattttatgttttcagtttgtcttggccttctaatcctgatccgagtgcagcgtgaagcgatctcagaaacattggcagttgtctgggctaacgtgtggaagacacgtgaagaattgctcgactggaaaggtgaaatctgaatgtataactgt

SEQ ID NO: 13249 - DNA, 600 bp, Chicken  19866894217535_2
attttctcaaaaagaaataaacagcattagaaaaaaaagaacaagtgttgaaggtcttcttagttatgaagtctttattgactgtaaaccttgcagtctgtatggataaaggagagacatatgatgattacaaagatcacatatagagcaccaggagcaaaaccaaaatggacaatacagaaaaaaactgctactagtgagagaaactgggagtaagaagaaatcattctttgaccaggttagtagtaacagaagatccaaaagaaagtgttagaggtttattctstgcaaaggaatagstatcattcaatgatacgagsaaaaatgttaattataaatgttacttaagacaagtagcaacctcatagttggaaacaatgagtaaaaactcaacctagaataaaagtaaatcatgtttgatgatattttggtatattttatgttttcagtttgtcttggccttctaatcctgatccgagtgcagcgtgaagcgatctcagaaacattggcagttgtctgggctaacgtgtggaagacacgtgaagaattgctcgactggaaaggtgaaatctgaatgtataactgtgtataaatggggga

SEQ ID NO: 13250 - DNA, 600 bp, Chicken  19866894217535_3
acagcattagaaaaaaaagaacaagtgttgaaggtcttcttagttatgaagtctttattgactgtaaaccttgcagtctgtatggataaaggagagacatatgatgattacaaagatcacatatagagcaccaggagcaaaaccaaaatggacaatacagaaaaaaactgctactagtgagagaaactgggagtaagaagaaatcattctttgaccaggttagtagtaacagaagatccaaaagaaagtgttagaggtttattctstgcaaaggaatagstatcattcaatgatacgagsaaaaatgttaattataaatgttacttaagacaagtagcaacctcatagttggaaacaatgagtaaaaactcaacctagaataaaagtaaatcatgtttgatgatattttggtatattttatgttttcagtttgtcttggccttctaatcctgatccgagtgcagcgtgaagcgatctcagaaacattggcagttgtctgggctaacgtgtggaagacacgtgaagaattgctcgactggaaaggtgaaatctgaatgtataactgtgtataaatgggggaaaaatgaactgtaaatttat

SEQ ID NO: 13251 - DNA, 600 bp, Chicken  19866894217536_1
tttctactacctcacttcaccacagctcctcttactcttcctgcaaagacatttcctcaagcacttccataacgaacatgggtacaaaagattttctccttgtcaactcaaatattcacactatagtttgatcatttaacaatgcactataaagcttgctctctgatactccttaaagacaagatttatagttaagaaactactttctcatgcagcctactttacaataaattttacattggctgtgttaggctccatgtttgttgtctcttcttatgcgaggcttacaatgtcaacttraaaggtatttgtgctaattactgcaacagttggtctcatttttatttttatgcgtatgccataacctccccaccagcagaacctacagtcactcctgtacaactgcacctggaataacacagttctatctgccaagtacttaaacatgtattttctttacatacacacaaacacacacacacatctacatagacaaactacacaaatggaaagatacacatgtatttacacacactgtactttatataatacatgcgtatacatatatatgtatcttcactttaaatgcctattaaaaaa

SEQ ID NO: 13252 - DNA, 599 bp, Chicken  19866894217540_1
gagcagacttatgttaacaggcagagcttggaagagctctgtcctctgtgctcagtgtttattgctgatttgccttccatgtatgtaacagacttttttcctgatcctcttttttctcattgggagcttttaaggactacagttaaaggaaagtgaggtatgtatagaagtgagaatggagcacaacttgaagttgtcgttggtgcgacaacaaaatgttaatgaccacttcctgtgagttccaaaatggtgctttcgctttctgacctccactgaaactgcagcaggatgggcttttgrttcttattgaggtaacatttaaaagaagagtcaaaattgggatgaattgagaaatggagctcrtctgatccagcacgctggtatctgacgtgctttgttggttttgctctagaaggaagttagcacagtattttccagggctattttagaagtggaacggagtcatgaagataaagctctctaagctttggcattgatttcagtggagctgaaaattcaccactactttaattgtatttaatgagatttcactgagaattattaaagatatttaatgtagtacaaaatactttataagg

SEQ ID NO: 13253 - DNA, 536 bp, Chicken  19866894217540_2
gctgatttgccttccatgtatgtaacagacttttttcctgatcctcttttttctcattgggagcttttaaggactacagttaaaggaaagtgaggtatgtatagaagtgagaatggagcacaacttgaagttgtcgttggtgcgacaacaaaatgttaatgaccacttcctgtgagttccaaaatggtgctttcgctttctgacctccactgaaactgcagcaggatgggcttttgrttcttattgaggtaacatttaaaagaagagtcaaaattgggatgaattgagaaatggagctcrtctgatccagcacgctggtatctgacgtgctttgttggttttgctctagaaggaagttagcacagtattttccagggctattttagaagtggaacggagtcatgaagataaagctctctaagctttggcattgatttcagtggagctgaaaattcaccactactttaattgtatttaatgagatttcactgagaattattaaagatatttaatgtagtacaaaatactttataagg

SEQ ID NO: 13254 - DNA, 600 bp, Chicken  19866894217542_1
tgggtggcaggcagccctgcccaaggctgggggttgaggctgggagggctttaaagtcccttccaactcaaaccattctttgatagacagaaactggtctgctctctctatgatgattttccccacgtcggagctttgttgtggagcaaaattaaactagtaaaggggcatctttgaaatactatcctgactctttggagttaatcggaatgtaatggctgtgttaaaagagctgtagcacagctttggaggtgctgggcctgggctatctcactgtcagtctggctttcctgagcactrtttctgttcacccaccacaggattatttttttttttcctggtgtgagggctctgtgtgcwtgcctttgacctcacttgtcagccaggtatttctaagctctgctcagtgtgacatgttctttgtaaaacccttcttctcagtgtaaccaatctcactgcgtaggactctgattaattttattctgcagtgcagagatcttctgcatattgaatagctgtgcaagatgcagcctggtcacaggcattgtagtttttgagtgcttgattttattacagaagataatgaagcaattctgtgtt

SEQ ID NO: 13255 - DNA, 600 bp, Chicken  19866894217542_2
ttccaactcaaaccattctttgatagacagaaactggtctgctctctctatgatgattttccccacgtcggagctttgttgtggagcaaaattaaactagtaaaggggcatctttgaaatactatcctgactctttggagttaatcggaatgtaatggctgtgttaaaagagctgtagcacagctttggaggtgctgggcctgggctatctcactgtcagtctggctttcctgagcactrtttctgttcacccaccacaggattatttttttttttcctggtgtgagggctctgtgtgcwtgcctttgacctcacttgtcagccaggtatttctaagctctgctcagtgtgacatgttctttgtaaaacccttcttctcagtgtaaccaatctcactgcgtaggactctgattaattttattctgcagtgcagagatcttctgcatattgaatagctgtgcaagatgcagcctggtcacaggcattgtagtttttgagtgcttgattttattacagaagataatgaagcaattctgtgttgcttgttccccatttactgccagggattggacaggtaagaattcagtagtaaaaaaaggg

SEQ ID NO: 13256 - DNA, 524 bp, Chicken  19866894217543_1
tttcctcatatccagtctatctctcctcttttagtttgaaaccattttgccttgtcctatcaccacacactctggtgaagtgtctgcatccttcttttttatagcttcccttttagatacggaaaggccactctcaggtctccccacagccttctcatttccaggctgaacagccccaagtctctcagcctgtcctcgtatgggaggtgttccatcccctggatcatttttgtggccctcctctggacacacgctgacaggtccatgtctcacctgtactgagaactccacatctgaacrcaatactccaggtgaggcctcaccagcgcagagtagagaatcagcatcacctcccttgatctgctggccatgcttctttggatgtagctcaggatacagttggctttctggggtgcgagggcacactgctgactcatgtccagcttactatcttacagtactcccaggtcctttccacaagggctgtgctccacccatacatcctccagcttgtgggggatata

SEQ ID NO: 13257 - DNA, 600 bp, Chicken  19866894217546_1
attagcacaataagctatttacataaaccttcgagcattccacagttgcttcactcttttatactattctgttcccaaaaaatgaagagtcacagggaaaaaactaatgtctgtaaaaactgaggttttgaacttctactatttgctatgtgttccctcaaaaatagatagagatgataactgcaacatacagtaacatgtatattgaaagcaaacattttactgagattctgcatttgtgtctttctttgtactttctgtgatctaacacttgccacaaatcagaagccagttagagamtaggctacagctgaaaagaaaaagatgaccaattattgaaaaagatgatgaaaaacatccttttgtgctacacttgattaaagtcttaactgcatagtgattttatgcaatttatcttacatcatcatcgggaacgatgttctctaagaaaaggatccgagtagacaaaggatcaagtttcagatcttccatggctccttttctgagatgccatgctttctcaatgtactgacggctaagcagcaaaattactcagtttgaagccatggtaccattgtgccatttacactcagtactatt

SEQ ID NO: 13258 - DNA, 600 bp, Chicken  19866894217551_1
acttaggaaagagaggaaaggaaaaaagctgagaatagtaggtagtggaagccttccaaacacgctatattgctagatgtgcacataggaaaatctacattagcactgcaacctttatctgctgtgatttaccagtcccagttttgtaagtgatgcttccttgctctttatgccctaagggaagtctctgttcattacactgcctgagtgaatcgtttatagcagaataaacttgaccatgagaagcaaagaatgttttcaagccaaacacccatgaagagacttgtgtttgtagcaagmgcttaattccagagatgccgtgctccccttcttatatccagcagttaccctgttgtgaccagagtttatcaaaggtaccccagagtccttctcatgatgccctgaagcacttcaggacaaaaggcatgactttgttgtggatgcttttaagccactataaagctatttggggcagtgttggtaaagaactaagcrgggtctatatgctatcttgtgtatcagttggtagatacctccaagcccttgtatcagtcatgctgttctctcagaggccccagtaagccattcagccatggggaa

SEQ ID NO: 13259 - DNA, 578 bp, Chicken  19866894217551_2
tacactgcctgagtgaatcgtttatagcagaataaacttgaccatgagaagcaaagaatgttttcaagccaaacacccatgaagagacttgtgtttgtagcaagmgcttaattccagagatgccgtgctccccttcttatatccagcagttaccctgttgtgaccagagtttatcaaaggtaccccagagtccttctcatgatgccctgaagcacttcaggacaaaaggcatgactttgttgtggatgcttttaagccactataaagctatttggggcagtgttggtaaagaactaagcrgggtctatatgctatcttgtgtatcagttggtagatacctccaagcccttgtatcagtcatgctgttctctcagaggccccagtaagccattcagccatggggaagaagaaatatatatcttgttgtgtctcacttcatttctcaagctactagtgggaaaccatgaaatctcagccatggcatggtggtaaggtcctactctcatttcatcctccctttagctcaaactgccattgaagttatcacatcacctgattttgtttgcagtggactcaat

SEQ ID NO: 13260 - DNA, 599 bp, Chicken  19866894217555_1
  misc_feature (1)..(40): n is any nucleotide
nnnnnnnnnnnnnnnnnnnnnnnnnnnnnnnnnnnnnnnnttagagtgagtatgaactgtgttttatttaatacgtttggagaaacacttaggttaaatgcctcaattgtttaagaggtttctacttaatgttaaatggttcctataatgtgttttactgtattacggaaagaaaaacctgctatttttacatctacagacaataattgtttttatgtacaattctacaacactggcagtacgatggtattttacattgtcaagaccttcttcatttgttggattaaaaccaaaataaaytccaccttgctgtgttttgtgcatttattacatcctgggggtcacctgcagcaactccttgcagygtgagcaatgtgcagtaatgcattgatttgggaatgatgcctgaatgctgcttggaatgctgagggccactgcactacaccatgtgaaggtagcagtgtgcattccctggcagcgtccctgggttttgtatgcgraaggaatatcatcagatgtagatgccaaaaaaaagctaagtttgtagttagcattttctggacgtttgcaaaagtagcttggtggtggtttgggttttc

SEQ ID NO: 13261 - DNA, 600 bp, Chicken  19866894217555_2
atttaatacgtttggagaaacacttaggttaaatgcctcaattgtttaagaggtttctacttaatgttaaatggttcctataatgtgttttactgtattacggaaagaaaaacctgctatttttacatctacagacaataattgtttttatgtacaattctacaacactggcagtacgatggtattttacattgtcaagaccttcttcatttgttggattaaaaccaaaataaaytccaccttgctgtgttttgtgcatttattacatcctgggggtcacctgcagcaactccttgcagygtgagcaatgtgcagtaatgcattgatttgggaatgatgcctgaatgctgcttggaatgctgagggccactgcactacaccatgtgaaggtagcagtgtgcattccctggcagcgtccctgggttttgtatgcgraaggaatatcatcagatgtagatgccaaaaaaaagctaagtttgtagttagcattttctggacgtttgcaaaagtagcttggtggtggtttgggttttctttccttttttaaacttgggatagagggaaaacttcagctgaaatctccacccttgccattcataa

SEQ ID NO: 13262 - DNA, 600 bp, Chicken  19866894217555_3
caataattgtttttatgtacaattctacaacactggcagtacgatggtattttacattgtcaagaccttcttcatttgttggattaaaaccaaaataaaytccaccttgctgtgttttgtgcatttattacatcctgggggtcacctgcagcaactccttgcagygtgagcaatgtgcagtaatgcattgatttgggaatgatgcctgaatgctgcttggaatgctgagggccactgcactacaccatgtgaaggtagcagtgtgcattccctggcagcgtccctgggttttgtatgcgraaggaatatcatcagatgtagatgccaaaaaaaagctaagtttgtagttagcattttctggacgtttgcaaaagtagcttggtggtggtttgggttttctttccttttttaaacttgggatagagggaaaacttcagctgaaatctccacccttgccattcataaaagtgagtaccgttctgttatgtgattacttgaaataacccagaaggtttatagcatgacagattcagtttaggaaagcacttccattcacttctcatcccttaaggaagtgactggaattagctgagcgctctg

SEQ ID NO: 13263 - DNA, 600 bp, Chicken  19866894217556_1
atctttggaatttaactacaaaatatgccttaggatataaagtaaccagaacaacacgttgctcttcctgggctttctactttatatttgaaaataagtactaagtctcccacattctctttctgtagtattttatgttctttcctctttaaagatttactttatagtgttttctgctactgcttagaagcaattggtaccatgatgtttacactgctctatcgtcagtatgacaatactcaataatactatctccaagacagaaatgatgtttcaaagacattggtaaggttttctatyatggaaacaggtctgtccttaaaaagaggccagtttaacattcattccatgaaggttagaatgaacagtcagatataggaacatcatgttgaactgaatgaagtcagtggaaatattcccccagactttattcaacattaggtcaagccttaaagcacacatggtgatctgggggctgatattagtgctcagtgcaaccttttctttttcacatgccaggtaccagaggcagatgacaagctgtagcacaaatgccccgttttcacgtacagcagatgtcaagcttaatctccactgaac

SEQ ID NO: 13264 - DNA, 600 bp, Chicken  19866894217560_1
acaagacacccccatgacaattccagtggtgacactaaagtgaacctcccctgttgggcaactagctagtcttgttatcactgtaaaaacagtgtgtatgaacagataaccaggagttcactttactaatatcatcaaaatctataataggcctatccatattttgtgtgccaacagtgaagcaaaatcatgggacagcaccttggcatcagaatgctgcagtatttaaatgccatacaatggtctcagccaagctcttatgcaccatctagaagtccgaatactgtgggaggcgaacgrcatgccaagatccagtgttccattttttwctgaaagcactaatataatatcagcctgtcctgaaaaatgactagatagcaggttcttcttctgggtttattttcacctctatttcattcatttttcttttgttattttgmaatcttcytttttcaaygattagatgaattttttatgaccaccctcctccatgaaaagcttataagtacctgtgcagcattttcagcatggtttccttattattccctccttgcatcttttgtgtgcttttggcaaagaaagaaaaataaggggagaaga

SEQ ID NO: 13265 - DNA, 600 bp, Chicken  19866894217560_2
tgacactaaagtgaacctcccctgttgggcaactagctagtcttgttatcactgtaaaaacagtgtgtatgaacagataaccaggagttcactttactaatatcatcaaaatctataataggcctatccatattttgtgtgccaacagtgaagcaaaatcatgggacagcaccttggcatcagaatgctgcagtatttaaatgccatacaatggtctcagccaagctcttatgcaccatctagaagtccgaatactgtgggaggcgaacgrcatgccaagatccagtgttccattttttwctgaaagcactaatataatatcagcctgtcctgaaaaatgactagatagcaggttcttcttctgggtttattttcacctctatttcattcatttttcttttgttattttgmaatcttcytttttcaaygattagatgaattttttatgaccaccctcctccatgaaaagcttataagtacctgtgcagcattttcagcatggtttccttattattccctccttgcatcttttgtgtgcttttggcaaagaaagaaaaataaggggagaagacacatttcatgcaactctttcatttcagg

SEQ ID NO: 13266 - DNA, 600 bp, Chicken  19866894217560_3
tctataataggcctatccatattttgtgtgccaacagtgaagcaaaatcatgggacagcaccttggcatcagaatgctgcagtatttaaatgccatacaatggtctcagccaagctcttatgcaccatctagaagtccgaatactgtgggaggcgaacgrcatgccaagatccagtgttccattttttwctgaaagcactaatataatatcagcctgtcctgaaaaatgactagatagcaggttcttcttctgggtttattttcacctctatttcattcatttttcttttgttattttgmaatcttcytttttcaaygattagatgaattttttatgaccaccctcctccatgaaaagcttataagtacctgtgcagcattttcagcatggtttccttattattccctccttgcatcttttgtgtgcttttggcaaagaaagaaaaataaggggagaagacacatttcatgcaactctttcatttcaggcacattcagctaatatttggcatgcttctaattgatttctgtagtcctgagttttgccactcacatttttttttggcatttctaagccaattgagaattgctgttgaaaag

SEQ ID NO: 13267 - DNA, 600 bp, Chicken  19866894217560_4
aggcctatccatattttgtgtgccaacagtgaagcaaaatcatgggacagcaccttggcatcagaatgctgcagtatttaaatgccatacaatggtctcagccaagctcttatgcaccatctagaagtccgaatactgtgggaggcgaacgrcatgccaagatccagtgttccattttttwctgaaagcactaatataatatcagcctgtcctgaaaaatgactagatagcaggttcttcttctgggtttattttcacctctatttcattcatttttcttttgttattttgmaatcttcytttttcaaygattagatgaattttttatgaccaccctcctccatgaaaagcttataagtacctgtgcagcattttcagcatggtttccttattattccctccttgcatcttttgtgtgcttttggcaaagaaagaaaaataaggggagaagacacatttcatgcaactctttcatttcaggcacattcagctaatatttggcatgcttctaattgatttctgtagtcctgagttttgccactcacatttttttttggcatttctaagccaattgagaattgctgttgaaaagagatagga

SEQ ID NO: 13268 - DNA, 600 bp, Chicken  19866894217560_5
catattttgtgtgccaacagtgaagcaaaatcatgggacagcaccttggcatcagaatgctgcagtatttaaatgccatacaatggtctcagccaagctcttatgcaccatctagaagtccgaatactgtgggaggcgaacgrcatgccaagatccagtgttccattttttwctgaaagcactaatataatatcagcctgtcctgaaaaatgactagatagcaggttcttcttctgggtttattttcacctctatttcattcatttttcttttgttattttgmaatcttcytttttcaaygattagatgaattttttatgaccaccctcctccatgaaaagcttataagtacctgtgcagcattttcagcatggtttccttattattccctccttgcatcttttgtgtgcttttggcaaagaaagaaaaataaggggagaagacacatttcatgcaactctttcatttcaggcacattcagctaatatttggcatgcttctaattgatttctgtagtcctgagttttgccactcacatttttttttggcatttctaagccaattgagaattgctgttgaaaagagataggagtaaaatgc

SEQ ID NO: 13269 - DNA, 600 bp, Chicken  19866894217560_6
tttattttcacctctatttcattcatttttcttttgttattttgmaatcttcytttttcaaygattagatgaattttttatgaccaccctcctccatgaaaagcttataagtacctgtgcagcattttcagcatggtttccttattattccctccttgcatcttttgtgtgcttttggcaaagaaagaaaaataaggggagaagacacatttcatgcaactctttcatttcaggcacattcagctaatatttggcatgcttctaattgatttctgtagtcctgagttttgccactcacayttttttttggcatttctaagccaattgagaattgctgttgaaaagagataggagtaaaatgcagaaaacaaattgttagcacrggtgcacatcttcccatctagtttattcttcagagaagaatgaacttcagagattgtaygacttcagagtcagatcctgctttcattaacctaagaggtgygctggcctgcttcgtatttacaacagagtcacatttacaccattctggctatgtagacatgatacaagtatcactcagcatgcacattaactggaaaaattccagatctcctgctt

SEQ ID NO: 13270 - DNA, 600 bp, Chicken  19866894217560_7
ccaccctcctccatgaaaagcttataagtacctgtgcagcattttcagcatggtttccttattattccctccttgcatcttttgtgtgcttttggcaaagaaagaaaaataaggggagaagacacatttcatgcaactctttcatttcaggcacattcagctaatatttggcatgcttctaattgatttctgtagtcctgagttttgccactcacatttttttttggcatttctaagccaattgagaattgctgttgaaaagagataggagtaaaatgcagaaaacaaattgttagcacrggtgcacatcttcccatctagtttattcttcagagaagaatgaacttcagagattgtaygacttcagagtcagatcctgctttcattaacctaagaggtgygctggcctgcttcgtatttacaacagagtcacatttacaccattctggctatgtagacatgatacaagtatcactcagcatgcacattaactggaaaaattccagatctcctgctttccttccacaatgaccaaccacaatattctagtgaccataaatgtttcaaaagttttttttttgagagagagagagagctcca

SEQ ID NO: 13271 - DNA, 600 bp, Chicken  19866894217560_8
tattattccctccttgcatcttttgtgtgcttttggcaaagaaagaaaaataaggggagaagacacatttcatgcaactctttcatttcaggcacattcagctaatatttggcatgcttctaattgatttctgtagtcctgagttttgccactcacatttttttttggcatttctaagccaattgagaattgctgttgaaaagagataggagtaaaatgcagaaaacaaattgttagcacrggtgcacatcttcccatctagtttattcttcagagaagaatgaacttcagagattgtaygacttcagagtcagatcctgctttcattaacctaagaggtgygctggcctgcttcgtatttacaacagagtcacatttacaccattctggctatgtagacatgatacaagtatcactcagcatgcacattaactggaaaaattccagatctcctgctttccttccacaatgaccaaccacaatattctagtgaccataaatgtttcaaaagttttttttttgagagagagagagagctccagcaaccccagagagggcagattagagcatagagaaaacagatttctgaatatggagaag

SEQ ID NO: 13272 - DNA, 600 bp, Chicken  19866894217560_9
aagaaaaataaggggagaagacacatttcatgcaactctttcatttcaggcacattcagctaatatttggcatgcttctaattgatttctgtagtcctgagttttgccactcacatttttttttggcatttctaagccaattgagaattgctgttgaaaagagataggagtaaaatgcagaaaacaaattgttagcacrggtgcacatcttcccatctagtttattcttcagagaagaatgaacttcagagattgtaygacttcagagtcagatcctgctttcattaacctaagaggtgygctggcctgcttcgtatttacaacagagtcacatttacaccattctggctatgtagacatgatacaagtatcactcagcatgcacattaactggaaaaattccagatctcctgctttccttccacaatgaccaaccacaatattctagtgaccataaatgtttcaaaagttttttttttgagagagagagagagctccagcaaccccagagagggcagattagagcatagagaaaacagatttctgaatatggagaagcaggagaggtttttacctgtgtgcatgtgtcatttctttcac

SEQ ID NO: 13273 - DNA, 600 bp, Chicken  19866894217562_1
caccaccagcgctgtgcaaaccatccctgggggctgcacacggcggggtgcagctggctggaagctgtgcagcacctcctgcagcaagcaggggctcagctgagctgcatgcaacccccccaagatgtggttaacaccaccgctcacacctcgcaccttttcttgccttgcttgctggggctgtggtggccaggcacgcactgcttttggactgccagtgtggtcccagacctgcagatgaaggaagtggtgcacgccaggctctgctgactgctggcttgtatttgctttgggggctcyttatctcgcctgtgccagagccccggacatccgtggctgctttgcaaagggggaaagcagagcacagcttctctgggacagaagggtcctttgggttaaattcaggctgcagcagccaggagggagatggggttcaaaggagcaactggatacttcccgtgtggtctgcagctgcctgctctctgggcaaggcagaggggatgttgcatgggcagctgcaatatgtggccagagtgcacggcgtggacagacacccagcactgcaggagctgggagcacgcggggacccatcgctgctcc

SEQ ID NO: 13274 - DNA, 599 bp, Chicken  19866894217563_1
  misc_feature (1)..(108): n is any nucleotide
nnnnnnnnnnnnnnnnnnnnnnnnnnnnnnnnnnnnnnnnnnnnnnnnnnnnnnnnnnnnnnnnnnnnnnnnnnnnnnnnnnnnnnnnnnnnnnnnnnnnnnnnnnnntgaatcaagcatggggagtgattcaggctcgaggcttccaggaaagagataattgttcttttattattataatagatcaaaataaaatcagtttgcacttctgaaatggagtgcatttttttttttagctggagaagtgtacagtaattcttttacagtgttatcaaatggcataataaaatagcaaaaagsttctcattttctaggctatttattttacacactctctttgaattggtgtttatattcaaatctggggttcgttttggagcatcagccaccaaagtgacccaaggagcatctcttggtcctaaagcagctaaattttgtgtgtgcaacagtgtacacattctttcatgcctatatttacacaaacagttaacttacaryggtggatgtataacaaatattaatgcatggtaatggcacttaagcatctgaagtgctatttcagtatgcaaataccagacaaataatgctaaaagagttcc

SEQ ID NO: 13275 - DNA, 600 bp, Chicken  19866894217563_2
agtttgcacttctgaaatggagtgcatttttttttttagctggagaagtgtacagtaattcttttacagtgttatcaaatggcataataaaatagcaaaaagsttctcattttctaggctatttattttacacactctctttgaattggtgtttatattcaaatctggggttcgttttggagcatcagccaccaaagtgacccaaggagcatctcttggtcctaaagcagctaaattttgtgtgtgcaacagtgtacacattctttcatgcctatatttacacaaacagttaacttacaryggtggatgtataacaaatattaatgcatggtaatggcacttaagcatctgaagtgctatttcagtatgcaaataccagacaaataatgctaaaagagttcccagcatttatttagtacctgtggtatctggcacacagctgaaataattgcacataagcctaagtagttccctgcacatcttaataaaaaatcctactttgctctgctgtgtgcttctaaggaaaactcacaaaacttggcattatcaggagttcagattactgcaagatcctgagttgccattctttttttaatcttt

SEQ ID NO: 13276 - DNA, 600 bp, Chicken  19866894217563_3
gtttgcacttctgaaatggagtgcatttttttttttagctggagaagtgtacagtaattcttttacagtgttatcaaatggcataataaaatagcaaaaagsttctcattttctaggctatttattttacacactctctttgaattggtgtttatattcaaatctggggttcgttttggagcatcagccaccaaagtgacccaaggagcatctcttggtcctaaagcagctaaattttgtgtgtgcaacagtgtacacattctttcatgcctatatttacacaaacagttaacttacaryggtggatgtataacaaatattaatgcatggtaatggcacttaagcatctgaagtgctatttcagtatgcaaataccagacaaataatgctaaaagagttcccagcatttatttagtacctgtggtatctggcacacagctgaaataattgcacataagcctaagtagttccctgcacatcttaataaaaaatcctactttgctctgctgtgtgcttctaaggaaaactcacaaaacttggcattatcaggagttcagattactgcaagatcctgagttgccattctttttttaatctttt

SEQ ID NO: 13277 - DNA, 600 bp, Chicken  19866894217568_1
ttatgctgcataatgctatgataaatgctatgatactcccttacagtaataataataattaaaaaaaatagctgaaatggatgattataataccaaaaagacaaaagctgtaattgcagcctgtccattccattcagaatgaaaaaggagattaaaggttagacattgataccactgcaagctcaatgcatcccagcatcgattatgcatccagctatgcaagaaagcgaaccaactgctgtgtcctggtactccaacacattccaaacccaccaggaagatctgcggcagacactcggyctggagcccgctggaagacagctcaagttgtaagttattctccttgcaaaactggcaccaggctattgcattagaattgttttacattactacttattttgacgatgtcaacttckraatgctgtctgcaacgtggtgtgagtaccacgctggcagcactgaactctaggcagttaaaatcataatgtagtagaagtgactgaattaaaataataatagtgagaacaaagcaactaccagaactattgaaaggttagatatctaaatatagcttgttccgaagatgcttcgaattacttc

SEQ ID NO: 13278 - DNA, 600 bp, Chicken  19866894217568_2
cagcctgtccattccattcagaatgaaaaaggagattaaaggttagacattgataccactgcaagctcaatgcatcccagcatcgattatgcatccagctatgcaagaaagcgaaccaactgctgtgtcctggtactccaacacattccaaacccaccaggaagatctgcggcagacactcggyctggagcccgctggaagacagctcaagttgtaagttattctccttgcaaaactggcaccaggctattgcattagaattgttttacattactacttattttgacgatgtcaacttckraatgctgtctgcaacgtggtgtgagtaccacgctggcagcactgaactctaggcagttaaaatcataatgtagtagaagtgactgaattaaaataataatagtgagaacaaagcaactaccagaactattgaaaggttagatatctaaatatagcttgttccgaagatgcttcgaattacttcatctcttgaagttaatctataaaagtggctagaatcaaggccaggttttgacagaacaggttaaaaaaaaaagaagaaaaaaaggaagaagaagagaaagaaaaaaataaaggaag

SEQ ID NO: 13279 - DNA, 600 bp, Chicken  19866894217568_3
agcctgtccattccattcagaatgaaaaaggagattaaaggttagacattgataccactgcaagctcaatgcatcccagcatcgattatgcatccagctatgcaagaaagcgaaccaactgctgtgtcctggtactccaacacattccaaacccaccaggaagatctgcggcagacactcggyctggagcccgctggaagacagctcaagttgtaagttattctccttgcaaaactggcaccaggctattgcattagaattgttttacattactacttattttgacgatgtcaacttckraatgctgtctgcaacgtggtgtgagtaccacgctggcagcactgaactctaggcagttaaaatcataatgtagtagaagtgactgaattaaaataataatagtgagaacaaagcaactaccagaactattgaaaggttagatatctaaatatagcttgttccgaagatgcttcgaattacttcatctcttgaagttaatctataaaagtggctagaatcaaggccaggttttgacagaacaggttaaaaaaaaaagaagaaaaaaaggaagaagaagagaaagaaaaaaataaaggaagt

SEQ ID NO: 13280 - DNA, 600 bp, Chicken  19866894217571_1
ttttttaccggacaattctcttcccgtgttaaatcaggtaatacttatttctttcttctaaacttcaacttattacaagttaactcatcgtagtcctcctattttgctgcgatgtgaaattttaagcagctgagagggttttgctgtttgtttttacaccaggagataacctccagcggacaaagcaccagcagttcatcagctctttccactccaccacctgctgggcagagtccagctcagcaaggctcaggagtcacgggagttcaacaggtcaatggtgtgacagtgggggcactmgctagtggtatgcagactgtaacctccaccattcctgcagtgcctggtgtgggtggaataattggagcgctgccagccagccagctggcaatcaatggaattgtaggggctttaaatggggtaattcagaccccagcaacaatatcacagaacccttctcctctcactcatgcaaccgtgccacccaatgcaacgcatcctctgccaactacattaaacaacaggtaagaatttgctgatttatctttttcttgataatgtctcctgttcttcagtttagctttatttttttactgtctc

SEQ ID NO: 13281 - DNA, 572 bp, Chicken  19866894217571_2
tgtaacctccaccattcctgcagtgcctggtgtgggtggaataattggagcgctgccagccagccagctggcaatcaatggaattgtaggggctttaaatggggtaattcagaccccagcaacaatatcacagaacccttctcctctcactcatgcaaccgtgccacccaatgcaacgcatcctctgccaactacattaaacaacaggtaagaatttgctgatttatctttttcttgataatgtctcctgttcttcagtttagctttatttttttactgtctctgtaaaagaaaggtacrttttcttcttcagcctgcagttgtcaaactgatttatgaaagaaagtaagcagaaaggcgaagcatgaatagtcacgttaaagatgttttctgtttagcttttgtgaatcatcgttatgtccttttctttctgtttttttaatagtcacgttctaaaacaaatgcaattatgcaaatgtgtttcagatctatttttagttcagaaaacaatattctttgtcttgccagttcgtcttccaggattcaagtagcacttggaaagctacccgttt

SEQ ID NO: 13282 - DNA, 600 bp, Chicken  19866894217582_1
tgaggctctattattcattaaaaaaaacaacaataaatttgtaaaataatgtagctaccagcccaatttcaattaggaaaaccaggctgttaacctagctgttaaatcctccttcctttttaagttctcagttgaggaagtactcaaagctgtaatgctactgcaacgcactgcacagaacacaggaccttctgagctcccaaatactcttttgccagctgtgagtagtatttatgagtctcttaaactctgtctttctcaatcccaactgtttcaaataaacatccctgtaatagcagsctagaagaatgccactcccaaagcattctccaccaccttttatgagcttcaaccttcctgaaaccaaacctctttattgtcctttctggttcaccaggtcagagaagggatrtacgttctttgattaatcctacagctcactccagactgccagtttaaacactgtaactgcttaaaaagcaatgacgcaaaaatcccttttcaccctgggcctacagatgcagttcctcaaagaaaatgagcaagcagagccacctgctgcattccagcttcagcttttctattgctctacagccaagg

SEQ ID NO: 13283 - DNA, 600 bp, Chicken  19866894217582_2
ttcctttttaagttctcagttgaggaagtactcaaagctgtaatgctactgcaacgcactgcacagaacacaggaccttctgagctcccaaatactcttttgccagctgtgagtagtatttatgagtctcttaaactctgtctttctcaatcccaactgtttcaaataaacatccctgtaatagcagsctagaagaatgccactcccaaagcattctccaccaccttttatgagcttcaaccttcctgaaaccaaacctctttattgtcctttctggttcaccaggtcagagaagggatrtacgttctttgattaatcctacagctcactccagactgccagtttaaacactgtaactgcttaaaaagcaatgacgcaaaaatcccttttcaccctgggcctacagatgcagttcctcaaagaaaatgagcaagcagagccacctgctgcattccagcttcagcttttctattgctctacagccaaggaataaccatactcaacaatcctcttcaactgccctgaaaacttccattcctaaatgacatcctcttctggaactgtttacagataaagcagtggtactgatttgtttctgca

SEQ ID NO: 13284 - DNA, 600 bp, Chicken  19866894217587_1
tctagctttttaactgtttctgccattgctttcctgtctttggcctcaaaatagcagaggttagtgcccacccagagctgtgggcatccactgccttacaaccagcagctcagattatgcctgtctccacaaaaactgctagagctaccaaatgcaatgctttcagcctacttctggtcacgggaagagttttccaaggtctacagaccatcagaggcctctgtaatcccaaagagctggcactccttttggatgctggtatgcaaaatgttgacctctaacacagaaaactgctatcakataggaccttcataactaatgccacttaaaacatcccagctagaaaagttattgatgygataactaggaaagacctctgtcaatacctaactataagttgcagtctattcagccccaagtttacagttgagaaaaatatgactcaagagccctcaattggctgacaaataataaacactgctagagtcgggggccaggttggattccaagatatggcaacagatgggtcaggtggatggacctcccgatcagtggggcagcagtaaactctaccaccttccaactggctagtggcagtgg

SEQ ID NO: 13285 - DNA, 600 bp, Chicken  19866894217587_2
ggttagtgcccacccagagctgtgggcatccactgccttacaaccagcagctcagattatgcctgtctccacaaaaactgctagagctaccaaatgcaatgctttcagcctacttctggtcacgggaagagttttccaaggtctacagaccatcagaggcctctgtaatcccaaagagctggcactccttttggatgctggtatgcaaaatgttgacctctaacacagaaaactgctatcakataggaccttcataactaatgccacttaaaacatcccagctagaaaagttattgatgygataactaggaaagacctctgtcaatacctaactataagttgcagtctattcagccccaagtttacagttgagaaaaatatgactcaagagccctcaattggctgacaaataataaacactgctagagtcgggggccaggttggattccaagatatggcaacagatgggtcaggtggatggacctcccgatcagtggggcagcagtaaactctaccaccttccaactggctagtggcagtggaactctggccaagggtgtaggtagcaagacaacaggagccacaagtcacccaggctgc

SEQ ID NO: 13286 - DNA, 599 bp, Chicken  19866894217611_1
  misc_feature (1)..(38): n is any nucleotide
nnnnnnnnnnnnnnnnnnnnnnnnnnnnnnnnnnnnnncacagaggaagaaggtacacacaggtaggtggttaggctgctgttaatgtttgcctggagctctgccttccacgttaacagtcattttattaccttctaaaatgtggcatttattgacattttcataattcatcgcgatcagaatctcttttaagcaaacagacctctgctaacctcaaaatccacgcttcatgtttgaacagaagcagccagcagcccatagcatgcttttcatcttagtatgcaaaaagctgacagaatscaggctttcatagcttgcagagaagcaaagttgtagggcgttggcaaatgtttccctacccctgggatacgagagatgtgtaagcaagatcggactgatcccacctcccacgttgtggaagccatacgtacagacccagctacagcaatactggctctataagccctgcacatctgcttaccaagtttatggggctgcttgaacagtgcccgtggtgccagaggaaacgggcacctgagcagagcagaatattcagtgctcaaggtaagcaaagcacaggtaaacayaaagtaaagtct

SEQ ID NO: 13287 - DNA, 588 bp, Chicken  19866894217611_2
agctgacagaatscaggctttcatagcttgcagagaagcaaagttgtagggcgttggcaaatgtttccctacccctgggatacgagagatgtgtaagcaagatcggactgatcccacctcccacgttgtggaagccatacgtacagacccagctacagcaatactggctctataagccctgcacatctgcttaccaagtttatggggctgcttgaacagtgcccgtggtgccagaggaaacgggcacctgagcagagcagaatattcagtgctcaaggtaagcaaagcacaggtaaacayaaagtaaagtctacactggacagctgggaagaaaatgaataggagaatcatattcaaggtatggaaaaatggcaaactgaaagcatcacagctggtgcagccgaaaagcagagctgggcaatggaggcctggggcatgagtgcccatacataattaagaccagtcatttttattttttttttgctgtatttgtaacagcaagctttttcacctgttaagtgccacgatcaaattaccatctccacagtgcaaagccacctcggtcttcctcctcaggtcaaggaaccc

SEQ ID NO: 13288 - DNA, 600 bp, Chicken  19866894217622_1
gtttcctttgcagggacaggacagagagttacagataaaaaatatgacattctgcaattttactcacttggactgttatgtgaggcatagaaaagctaaaaaatattcctactttctgcatcctaaagtgattcttttatggctttataggtctcttgtcaaatacttcttttgatcccttctactctatcctttatttgcttcttctttttctttttctttttctttttctttttctttttctttttctttttctttttctttttctttttctttttctttttctttttctctttttcyttttctttttctttttctttttctttttctttttctttttctttttctttttctttttctttttctttttctttttctttttctttttctttttctttttctttttcttcttcttcttcttcttcttcttcttcttcttcttcttcttctttttctttttctttttcttcttctttttctttttctttttctttttctttttctttttctttttctttttctttttctttttctttttctttttctttttctttttctttttctttttctttttctttttctttttctttttctctttct

SEQ ID NO: 13289 - DNA, 600 bp, Chicken  19866894217625_1
attcagcaaaatttacgcccactcaagctgcattacccagtgcttgcatgtttggaattcatctttactgaaggtaatacattttcttttcccattatgattttagattatagttaattgtctttataagagaagaaaaaaaaaagagagagagaaaagaaaaagaaagagaaaaagaaaaagagaaagaaaaagaaagagaaaaagaaaaagaaaaagaaaaagaaaaagaaaaagaaaaagaaaaagaaaaagaaaaagaaaaagaaaaagaaaaagaaaaagaaaaagaaaaagaaraagaaaaagaaaattctttccctgtggaaaaagtagatttaattatatatctgatgttgtcagtcagcagaagataaaactagatctgtcatattgtatgactgccttctgagcactgcatgaaagcaagagagagaaaagagctgtctgtttgcacagcagtggtccatttaaraagtgaaaaggagaactcactttccgaaaagatatgccaggcagcaatgccaggaggcattttcaagcattccaaatgaaagaaaagggagatcccagactgatgtaggcaacagtgccataagc

SEQ ID NO: 13290 - DNA, 600 bp, Chicken  19866894217625_2
agaaaaagagaaagaaaaagaaagagaaaaagaaaaagaaaaagaaaaagaaaaagaaaaagaaaaagaaaaagaaaaagaaaaagaaaaagaaaaagaaaaagaaaaagaaaaagaaaaagaaraagaaaaagaaaattctttccctgtggaaaaagtagatttaattatatatctgatgttgtcagtcagcagaagataaaactagatctgtcatattgtatgactgccttctgagcactgcatgaaagcaagagagagaaaagagctgtctgtttgcacagcagtggtccatttaaraagtgaaaaggagaactcactttccgaaaagatatgccaggcagcaatgccaggaggcattttcaagcattccaaatgaaagaaaagggagatcccagactgatgtaggcaacagtgccataagcacaattagtatagttgaatcaatagtagagaaatataccttaagtcctcagttgctaaaatggtctgaactctgagaatggcggtctactgggaaaaaaaagcatggtttatcaaaattgcagtgtaacagtgttacaagtcagtgccttccactcctcatatttacaattttac

SEQ ID NO: 13291 - DNA, 600 bp, Chicken  19866894217628_1
cagtttaactctttgtgctgggggaatactgtttgctcccaggcagagactcacatcttccttgtgtgtgcaggaacattgccgtgagttccagaaagtctctcccatctgcaccatggaatacgtaccccactgtggctctgatggcgtaacatacagcaacagatgtttcttctgcaacgcatatgtgtaagtataggagtgaaacccttcctgtaactgctacaaacgcagagttgattttataaggagttctttactaacactttatgggtgtgtgctagacatttcggatgcacygtgasgtgcaaggaggtgcttttttgctttttaagaaaaaatgcaaagcacccacatctgcccatgtrtatgtggcttcctgttttatttagtttcaaagacattttgctaattttcaccagcatagtttgtcccacaagctcatcagggtatggggaaagtacttcaccaaactacctggagygtttcaagtgtgtgaaacctgtcatctttcctttaatgttcataatgaaaggaagtggttggccttctgagactgttctttatcttctgccaacattatcaacatttggactggta

SEQ ID NO: 13292 - DNA, 600 bp, Chicken  19866894217628_2
taactctttgtgctgggggaatactgtttgctcccaggcagagactcacatcttccttgtgtgtgcaggaacattgccgtgagttccagaaagtctctcccatctgcaccatggaatacgtaccccactgtggctctgatggcgtaacatacagcaacagatgtttcttctgcaacgcatatgtgtaagtataggagtgaaacccttcctgtaactgctacaaacgcagagttgattttataaggagttctttactaacactttatgggtgtgtgctagacatttcggatgcacygtgasgtgcaaggaggtgcttttttgctttttaagaaaaaatgcaaagcacccacatctgcccatgtrtatgtggcttcctgttttatttagtttcaaagacattttgctaattttcaccagcatagtttgtcccacaagctcatcagggtatggggaaagtacttcaccaaactacctggagygtttcaagtgtgtgaaacctgtcatctttcctttaatgttcataatgaaaggaagtggttggccttctgagactgttctttatcttctgccaacattatcaacatttggactggtaaggag

SEQ ID NO: 13293 - DNA, 600 bp, Chicken  19866894217628_3
tgcaggaacattgccgtgagttccagaaagtctctcccatctgcaccatggaatacgtaccccactgtggctctgatggcgtaacatacagcaacagatgtttcttctgcaacgcatatgtgtaagtataggagtgaaacccttcctgtaactgctacaaacgcagagttgattttataaggagttctttactaacactttatgggtgtgtgctagacatttcggatgcacygtgasgtgcaaggaggtgcttttttgctttttaagaaaaaatgcaaagcacccacatctgcccatgtrtatgtggcttcctgttttatttagtttcaaagacattttgctaattttcaccagcatagtttgtcccacaagctcatcagggtatggggaaagtacttcaccaaactacctggagygtttcaagtgtgtgaaacctgtcatctttcctttaatgttcataatgaaaggaagtggttggccttctgagactgttctttatcttctgccaacattatcaacatttggactggtaaggagaggaacaaggctgcagcacaaattctattgtgtttaatcctttcttctcttttcattaggcag

SEQ ID NO: 13294 - DNA, 593 bp, Chicken  19866894217628_4
tatgtgtaagtataggagtgaaacccttcctgtaactgctacaaacgcagagttgattttataaggagttctttactaacactttatgggtgtgtgctagacatttcggatgcacygtgasgtgcaaggaggtgcttttttgctttttaagaaaaaatgcaaagcacccacatctgcccatgtrtatgtggcttcctgttttatttagtttcaaagacattttgctaattttcaccagcatagtttgtcccacaagctcatcagggtatggggaaagtacttcaccaaactacctggagygtttcaagtgtgtgaaacctgtcatctttcctttaatgttcataatgaaaggaagtggttggccttctgagactgttctttatcttctgccaacattatcaacatttggactggtaaggagaggaacaaggctgcagcacaaattctattgtgtttaatcctttcttctcttttcattaggcagagcaataggactctcaacctcgtgagtatggcagcgtgttaactctgcactggagtccagcgtgggaaacaatctgccttgcacatgagtcttcgtgggccaatattcc

SEQ ID NO: 13295 - DNA, 600 bp, Chicken  19866894217646_1
aaaggagaaaggagagacatcactcagagactggagaagagaaaataaagaaaagagggaggaaaaaagggagaagaaatgtttgtgttctgatatgggtggcatgaggaggaacagaacgattggtttgaaagaattttttgttatttcctatagcttaatgaagtttctactccaggaaaatcagaaggacatgactacagtaatgtcttatgcaagcatgaccaaaagcttagtttctcaactcaaagcttagatgaaaagtacaagtcacattcacaactgaacattgtgttgcayttttttttgtaatttttcttctcttttccctcatattttacaacgcctatcttttaaagttagctagcaacccccgttatagaaacatcactggtattaatagaataatataatgttagtttcttaactaccctgcagcattctgcatgtagcaataagtagaagttggcaccatctgtatgcaaatgaaaaatgcctgcaaaaactaaaagcaggcagctgattgcagtacgtgctcaaatgcatgtaaaaatgtttaatcaccaaccccactgcttcctgagcaccaagccacgagct

SEQ ID NO: 13296 - DNA, 600 bp, Chicken  19866894217646_2; identical to SEQ ID NO: 13295

SEQ ID NO: 13297 - DNA, 600 bp, Chicken  19866894217646_3; identical to SEQ ID NO: 13295

SEQ ID NO: 13298 - DNA, 600 bp, Chicken  19866894217656_1
gagggatccagggggaaggagaaataaaataggttcttatctgcaaggctgcaagcgagctatctcaaaatttaacaattgcagcattttcctctacagcctttgcaccattaacatctatgctaccatctagctcattataaaatgcctgtttttgccttgattctgaagggcattgtacaaaacccctttctattctgctcttaacaataagacagctcccctcccatccaggcatgtctagcatctatgcacaactccagaatgcatgtgtaaaagtaggtagaagtgttagaatasgttattaaaaatgtagacccataatgtgattaaagaagatgggaagtataaaaagaggttttacacctggaagttattatagttatttagattgagtgagaataataaccaattgttttctaagatgtatgacacatttatgaaaaaccttgaaggataaatggatctttttagtatgctacttccacaaaggactctatgaataaaataatagtgagagaactctcagtggatgctgaatactgctaattgatgaaattattacttattacgctgcaactgaactctgcttagaaacac

SEQ ID NO: 13299 - DNA, 600 bp, Chicken  19866894217656_2
tgtcattttaggtcccagtactgactctcaaggaatgttttcagtaattggtgtgagaatctgtatattgtgtgtagtgtagtattttggaatataactgcttgtgaatgcaagatctgatttcaaccttaaatttattcatcagttttaggagcataattattccatccctgtcaatatcagcaattttcaaactctgagtgacagcacccgcttgtatgagtttgaatacgcacctacatgcgtgtatgctaatgggaacattttgaggtggctgattagagattattcccagacctrttaattccccttctgttttaacatcatgtttgatattgccttttcttcggttccaataaaaattcaaaattttaacaatttcatgaagcttgtacatagctcttctaaacagatggatgtgagagtgacaaaaggctttgggaggaaaaaaaaatccagtgagataaccacagcagaagttggtctagaacactggtgattaaaatgcaggaacaaatatggcagagcagaaaaaatgaaaatactmtctgctcagaaaacctccaggctgactaagtgccggcattttgatgtggcagt

SEQ ID NO: 13300 - DNA, 600 bp, Chicken  19866894217656_3
tatgctaatgggaacattttgaggtggctgattagagattattcccagacctrttaattccccttctgttttaacatcatgtttgatattgccttttcttcggttccaataaaaattcaaaattttaacaatttcatgaagcttgtacatagctcttctaaacagatggatgtgagagtgacaaaaggctttgggaggaaaaaaaaatccagtgagataaccacagcagaagttggtctagaacactggtgattaaaatgcaggaacaaatatggcagagcagaaaaaatgaaaatactmtctgctcagaaaacctccaggctgactaagtgccggcattttgatgtggcagtggtaactgatactactgactgaaggtccaactcctctgttggtagggtacaataagaaaaagttttcagaactgtaaattatttactctcaaatgaagcagagtcgcttgcctgctttcaaaacttggcaccgggtgaggagattctgtcagataaagaagagcaggaaattacctaaagcatttatctaatggttacccgagtacttctcatttgtataattcctagcctactaagtattgttact

SEQ ID NO: 13301 - DNA, 600 bp, Chicken  19866894217656_4
agcgatgctggcctgagacaagggttcctagacatttccattctaaatgaatgacagctttggggtcgtgtatattgtagtctaggagagaagactgtgtcctattaaaaagaggaatgatttttttctgaagatccagtgcttaaagtatgcattttagcaactgaaaattcaaagctttagaatcattacagtacagttataggataattgattgtatttttataaaactttagaaatgataaaagtgataatttttccccattcagaggtgtcatcagatgaatgtaatttgccttwttaagtaaggttgaaaaataatgctactacatccaatgctcttcataaaatctttaaaattttttgtataagaatgagacaaagtagggtagatcagaacccatatgtttgctgtcatattttaagattaagcaccctaatcggattatcctgttttttttaagagtatcacaactgcgtctggcccacacgttctgtaatattcagtgtcagatttaaaaatcaaaattgttgaatacaagtgaagaactccaaggaattgtttccattttccccactaccaatacattttgttgtcat

SEQ ID NO: 13302 - DNA, 600 bp, Chicken  19866894217656_5
taaaaatcaaaattgttgaatacaagtgaagaactccaaggaattgtttccattttccccactaccaatacattttgttgtcatctgaaatgcatatgacaccctatttatttatggaatgtcatatgggatttctttgtttaaagttgacttcataggaataatccgtagctctgcataggaaaagagatattaaaaaaggaaaatttggctacagtgtcctcctgccttacttgcatcagatgctagattttattccttgaaaactgtgttattatcaaatgtttgttaagtgaaaartattttaatmtgtatcctcatatatcaattccttactctttatagtaaataattaacaaattcttcatgttttgactttgcttctacaagcttagtatttcctttttggctagatactcttttgtatgcacaaaattactagaaaatcagtggtgaaactacggtagtgaagctgaaaaaatcagttttgtattttaccactgtattaaacagttgccactgaaatttactcatttgctgcttctttagtgttgcaacagattttggaaagtcaatatagatgtgcttggcacattcttg

SEQ ID NO: 13303 - DNA, 600 bp, Chicken  19866894217656_6
aattgttgaatacaagtgaagaactccaaggaattgtttccattttccccactaccaatacattttgttgtcatctgaaatgcatatgacaccctatttatttatggaatgtcatatgggatttctttgtttaaagttgacttcataggaataatccgtagctctgcataggaaaagagatattaaaaaaggaaaatttggctacagtgtcctcctgccttacttgcatcagatgctagattttattccttgaaaactgtgttattatcaaatgtttgttaagtgaaaartattttaatmtgtatcctcatatatcaattccttactctttatagtaaataattaacaaattcttcatgttttgactttgcttctacaagcttagtatttcctttttggctagatactcttttgtatgcacaaaattactagaaaatcagtggtgaaactacggtagtgaagctgaaaaaatcagttttgtattttaccactgtattaaacagttgccactgaaatttactcatttgctgcttctttagtgttgcaacagattttggaaagtcaatatagatgtgcttggcacattcttggtataagtat

SEQ ID NO: 13304 - DNA, 600 bp, Chicken  19866894217658_1
ctgtgttcagaagcactaaaaccaattcctcctaacaagcttctgatgtgacttggtctttgacagccttaaccaatttactgcctctggaaggatgggaagagctttcaggagactctcctcagcccccccagcccacccctggggtatagtgcagatgtccaggggagcagctgggtgcctgactggatcaattgagctgtatagactcagatcttctgctgggatgtgccagcctgtgaggccaacaacttttggcagagcagaggtggctctcctgccctctctttcccttagtcrcttcccactgcattttagggctttctgctgaatctcagctccctgttwgcagcagttgttcccacgccttcggtccaggctcaaaagcctttccatgggggtgcagctagtgatgcactgaaagccatatctccaggagcagaggtggcatgctggcagctgcctgaactcccacatgtttttctgtaggaagaaaaaggaatgcatcatcatcagtgcatcctggtttcacaaggttagattaaaaatatgtgctgttgagcaatggggtcccttcacctctgcagaccagcaggctgc

SEQ ID NO: 13305 - DNA, 600 bp, Chicken  19866894217658_2
tgacttggtctttgacagccttaaccaatttactgcctctggaaggatgggaagagctttcaggagactctcctcagcccccccagcccacccctggggtatagtgcagatgtccaggggagcagctgggtgcctgactggatcaattgagctgtatagactcagatcttctgctgggatgtgccagcctgtgaggccaacaacttttggcagagcagaggtggctctcctgccctctctttcccttagtcrcttcccactgcattttagggctttctgctgaatctcagctccctgttwgcagcagttgttcccacgccttcggtccaggctcaaaagcctttccatgggggtgcagctagtgatgcactgaaagccatatctccaggagcagaggtggcatgctggcagctgcctgaactcccacatgtttttctgtaggaagaaaaaggaatgcatcatcatcagtgcatcctggtttcacaaggttagattaaaaatatgtgctgttgagcaatggggtcccttcacctctgcagaccagcaggctgcagccccctccccaggctgcccgtggctgtgcagggccggctcccgtgg

SEQ ID NO: 13306 - DNA, 506 bp, Chicken  19866894217658_3
tgaaagccatatctccaggagcagaggtggcatgctggcagctgcctgaactcccacatgtttttctgtaggaagaaaaaggaatgcatcatcatcagtgcatcctggtttcacaaggttagattaaaaatatgtgctgttgagcaatggggtcccttcacctctgcagaccagcaggctgcagccccctccccaggctgcccgtggctgtgcagggccggctcccgtggctgggcctggggtggcaacgtggaacaggaggaccacagtgaaaacggagaacatggcagaaatgctctktgtgccacctgacagcaatagggaagttggatgtgggttttgctttcggaactgctgcggatacctgaagaggcaggatgaaactgggggtaaggaagctgttttcagcacactgggctttcctcctatgctttcctcttggacctaattttgtgctgcagacaaagctgtctgctcactgttgtgctgcttctctgtgaaaatgt

SEQ ID NO: 13307 - DNA, 600 bp, Chicken  19866894217677_1
tacaggcatgttccagtctcgctggatgctgttatccttgcccttttgccaacagaggtccctgagagcagccagcaagtgctgataattgtaagagattattcttttatatgattgactcaaagtttgttgaggaacaagtccaggcaagtcctgggcaaaggcagagaaatcttctgtctggaggacactgatggacaggtcctggctaaaggttgtgaaatcctttaaggagcacagatggacaaggccagggggcaacaagagagggataagctgctgataatggccgggaaacgstctttttgtgtggacttatctcgaggaagatggcyatctcaggaggtatgcacatgactcttgctcaagcacccagggatgtcacataggcaggagaaaatggaggataaaagagggtccaacagccacaacagactagaaggttttctgccgtcagatccctcaccacaacggactcgagggtttctgccatcagatccttcactacggaccgtatgctgacggacttccctgggcctgctacctgagacctgctgcttcctcccagacttactctgcggcttcttcctggacccaccc

SEQ ID NO: 13308 - DNA, 600 bp, Chicken  19866894217677_2
ccttgcccttttgccaacagaggtccctgagagcagccagcaagtgctgataattgtaagagattattcttttatatgattgactcaaagtttgttgaggaacaagtccaggcaagtcctgggcaaaggcagagaaatcttctgtctggaggacactgatggacaggtcctggctaaaggttgtgaaatcctttaaggagcacagatggacaaggccagggggcaacaagagagggataagctgctgataatggccgggaaacgstctttttgtgtggacttatctcgaggaagatggcyatctcaggaggtatgcacatgactcttgctcaagcacccagggatgtcacataggcaggagaaaatggaggataaaagagggtccaacagccacaacagactagaaggttttctgccgtcagatccctcaccacaacggactcgagggtttctgccatcagatccttcactacggaccgtatgctgacggacttccctgggcctgctacctgagacctgctgcttcctcccagacttactctgcggcttcttcctggacccacccggtacctacaccttctcgttgcccaagaccggcct

SEQ ID NO: 13309 - DNA, 600 bp, Chicken  19866894217684_1
gaggatattttcctgactgtgttttggtctagattcaaatattttaaattacatatgaagagaccttcattttgcatggatttctcttttcagaagcagtgagccattaagtctgtggacatttggcttccctcaggttttctgacaagatcatgagcactttggggacctaaaagcatcgctgtgtgtggcagacatagggaacagtcatcaacctatgtgtaaacacgtgctgtcactttagtgttgtcagaaagtcacagttctgtgcaatctatatatagtctgcttaccctagakagttcaagtagaaagagccaagaattcctaaattgtcctttgaaattcattgtacacaaatgtctttgatattttgccaaaatgtattattatttctactactaatgctcaccatattgacctttcagcataggaagagccagttgaccattctttgagagaaaactgtattttccagttttctgaactgatcgtgcattaatattgcaagctaccaaaagaatgtacttaatatttttgtattggttattttggcttattgaaatatgttagactgtcaattgtttgaatgaaaaagga

SEQ ID NO: 13310 - DNA, 600 bp, Chicken  19866894217685_1
ccacagagtcccaaaggccccacttcccccaattagagccccgttttcccccgcagagccccacggagccccgaaggccgcacattaccccctccaggcccacactcactgcgtggcggcgcagcgggacatgctgaggcggaggctgtggcagtccgtctgccacgaagtcgggctggcggccacgcagcgcccgtactgctccatctcgttgcggcagtaccgcgccgtgatctccagggccgcctgcctgagaggcgacaccgaatgagcgcgacccgacccggcccggttcccccmtccatcccctttactcacatcgctccgccgccgctctacgcatgcgcgggtgccggcaccgccgcgctgcgcatgcgcaaaatccgccagctcgccaattgcgcatgygcactcccgttgctttcttttgcgcacgcgcagtcgccggcagccggcctcgcgtgttctcgcgttgcctactgcgcaagcgcggcttctccctaccggaagcggaagtgcgccgtctgcaggcggtccctgggaagatggcggcggccggcccggctcctggccccgcggacgagctggtctcgtcggtga

SEQ ID NO: 13311 - DNA, 528 bp, Chicken  19866894217685_2
ctgcgtggcggcgcagcgggacatgctgaggcggaggctgtggcagtccgtctgccacgaagtcgggctggcggccacgcagcgcccgtactgctccatctcgttgcggcagtaccgcgccgtgatctccagggccgcctgcctgagaggcgacaccgaatgagcgcgacccgacccggcccggttcccccmtccatcccctttactcacatcgctccgccgccgctctacgcatgcgcgggtgccggcaccgccgcgctgcgcatgcgcaaaatccgccagctcgccaattgcgcatgygcactcccgttgctttcttttgcgcacgcgcagtcgccggcagccggcctcgcgtgttctcgcgttgcctactgcgcaagcgcggcttctccctaccggaagcggaagtgcgccgtctgcaggcggtccctgggaagatggcggcggccggcccggctcctggccccgcggacgagctggtctcgtcggtgacgctgtaccgccggcggccgcggctcctccacggca

SEQ ID NO: 13312 - DNA, 600 bp, Chicken  19866894217689_1
ggagagcatggcttactacatgatgtttaatctataaaataggcagcatgttatctcaaaatattttgtatcaaacagacctaagcaatctgtttctaccagttcatatttcctggagagaggagcctactgcagacttgctacagaaagcaattaatatttgctagtaataagccagctccttgggtggcagcaaaagcagcatcgtctctgctgcagtctgatttctttcacagtacttgaattgacttgctagctaaggtcacagaggtgatatgatgaggaagccaaacaataatyctatttgcattcttgctcctgctgttgtttgtggcratgtgaccaaagtaatggtagcacatttttgctaagtaatctgaggcaacagagcacagctcagatgtcttcaaatcttcaaagactgaaagtgattccttggtaaagcacaagatatgtcagctttatttcagaaacacatagctgtgtttgccaagcacagtgctcatgcacagagcttgatgttgataccaagttttccaaagcacctggcctcacaggcatgtggaggtcttgagaatcactgcatccattcagactgag

SEQ ID NO: 13313 - DNA, 600 bp, Chicken  19866894217689_2
aaataggcagcatgttatctcaaaatattttgtatcaaacagacctaagcaatctgtttctaccagttcatatttcctggagagaggagcctactgcagacttgctacagaaagcaattaatatttgctagtaataagccagctccttgggtggcagcaaaagcagcatcgtctctgctgcagtctgatttctttcacagtacttgaattgacttgctagctaaggtcacagaggtgatatgatgaggaagccaaacaataatyctatttgcattcttgctcctgctgttgtttgtggcratgtgaccaaagtaatggtagcacatttttgctaagtaatctgaggcaacagagcacagctcagatgtcttcaaatcttcaaagactgaaagtgattccttggtaaagcacaagatatgtcagctttatttcagaaacacatagctgtgtttgccaagcacagtgctcatgcacagagcttgatgttgataccaagttttccaaagcacctggcctcacaggcatgtggaggtcttgagaatcactgcatccattcagactgagttgcatttggaaagtcatcgctttcattggctgaaa

SEQ ID NO: 13314 - DNA, 600 bp, Chicken  19866894217697_1
ttacagaaatctcagagaagcaattctcctcttctggaggtaaataccacaacaaatttggcttgtctgtaaacctctaaggttttagaagcccatgaaaagtaaacctccaaaaacctagtatgcccatatatacttggttctgtagacacacaagattcacagtttctcatatgaaattgccttttctctctaactgcataatccaccaataatattttaaaattatgaaactccatttcacttaaccttcagctcttcaggttttgaataggaagaagacgaaattaaagaataaasrgaaaaaaaatgaagaaggaaatgcccatacagatgcagaatcacccaaaaagactgccagagaatatgacttcaaagaaagaagatgatcaagcagatcagaatcagttttctcttcaaaattcatcttggaaaaaaaaacactgcagaaatactccagagatctggttaagatagagcagtctatccttgcagtaggatggaaaaattcaactggagagaaaagtctgtctttcagagcgtgactttatcagtagtcatgggacttgtctcgtgtgtgtgtctccagtcagcctaagt

SEQ ID NO: 13315 - DNA, 600 bp, Chicken  19866894217697_2
tacagaaatctcagagaagcaattctcctcttctggaggtaaataccacaacaaatttggcttgtctgtaaacctctaaggttttagaagcccatgaaaagtaaacctccaaaaacctagtatgcccatatatacttggttctgtagacacacaagattcacagtttctcatatgaaattgccttttctctctaactgcataatccaccaataatattttaaaattatgaaactccatttcacttaaccttcagctcttcaggttttgaataggaagaagacgaaattaaagaataaasrgaaaaaaaatgaagaaggaaatgcccatacagatgcagaatcacccaaaaagactgccagagaatatgacttcaaagaaagaagatgatcaagcagatcagaatcagttttctcttcaaaattcatcttggaaaaaaaaacactgcagaaatactccagagatctggttaagatagagcagtctatccttgcagtaggatggaaaaattcaactggagagaaaagtctgtctttcagagcgtgactttatcagtagtcatgggacttgtctcgtgtgtgtgtctccagtcagcctaagta

SEQ ID NO: 13316 - DNA, 600 bp, Chicken  19866894217701_1
aggacttccaaaagaggagataattatgggcattttttgttctgctgaatggaaacaatactgtgaggtaggacaatgacgtacaaggatagttagaggcaaagaaaagaagtgaatgaatggttgtgaggacctttgtattctggggttgtactctgtaacctggaaggtgagtcagttactggagtggttagggcaattgcttaggcactatccaggaaagggatacaaatgacatttctgattccttccacactcctaagtgaaagttgtttgaaactgtggcattgaaaccatgtrtactaaggtgtcraaaggtgacaaactgagacaattccagtactgtgaagagrgcaaaaatggagagrcaattcagacctagagagcatgaagtaatccagggagtatctcgtggtatttgagataaaggtagtcctgactcctagaatttataacattcttcacaaaagattgttttatttttgtattaaagtcatttaaaatatgcatgttttcagactgtactaagtgggaaatgccttgcattttgctgtgtatacttgttctgagccccagaattacagtccttaagctgaaaga

SEQ ID NO: 13317 - DNA, 600 bp, Chicken  19866894217701_2
gaggagataattatgggcattttttgttctgctgaatggaaacaatactgtgaggtaggacaatgacgtacaaggatagttagaggcaaagaaaagaagtgaatgaatggttgtgaggacctttgtattctggggttgtactctgtaacctggaaggtgagtcagttactggagtggttagggcaattgcttaggcactatccaggaaagggatacaaatgacatttctgattccttccacactcctaagtgaaagttgtttgaaactgtggcattgaaaccatgtrtactaaggtgtcraaaggtgacaaactgagacaattccagtactgtgaagagrgcaaaaatggagagrcaattcagacctagagagcatgaagtaatccagggagtatctcgtggtatttgagataaaggtagtcctgactcctagaatttataacattcttcacaaaagattgttttatttttgtattaaagtcatttaaaatatgcatgttttcagactgtactaagtgggaaatgccttgcattttgctgtgtatacttgttctgagccccagaattacagtccttaagctgaaagatataaccttttat

SEQ ID NO: 13318 - DNA, 600 bp, Chicken  19866894217701_3
aacaatactgtgaggtaggacaatgacgtacaaggatagttagaggcaaagaaaagaagtgaatgaatggttgtgaggacctttgtattctggggttgtactctgtaacctggaaggtgagtcagttactggagtggttagggcaattgcttaggcactatccaggaaagggatacaaatgacatttctgattccttccacactcctaagtgaaagttgtttgaaactgtggcattgaaaccatgtrtactaaggtgtcraaaggtgacaaactgagacaattccagtactgtgaagagrgcaaaaatggagagrcaattcagacctagagagcatgaagtaatccagggagtatctcgtggtatttgagataaaggtagtcctgactcctagaatttataacattcttcacaaaagattgttttatttttgtattaaagtcatttaaaatatgcatgttttcagactgtactaagtgggaaatgccttgcattttgctgtgtatacttgttctgagccccagaattacagtccttaagctgaaagatataaccttttataacttcatttccaaagctctaccactggagcgagggatat

SEQ ID NO: 13319 - DNA, 600 bp, Chicken  19866894217701_4
taggacaatgacgtacaaggatagttagaggcaaagaaaagaagtgaatgaatggttgtgaggacctttgtattctggggttgtactctgtaacctggaaggtgagtcagttactggagtggttagggcaattgcttaggcactatccaggaaagggatacaaatgacatttctgattccttccacactcctaagtgaaagttgtttgaaactgtggcattgaaaccatgtrtactaaggtgtcraaaggtgacaaactgagacaattccagtactgtgaagagrgcaaaaatggagagrcaattcagacctagagagcatgaagtaatccagggagtatctcgtggtatttgagataaaggtagtcctgactcctagaatttataacattcttcacaaaagattgttttatttttgtattaaagtcatttaaaatatgcatgttttcagactgtactaagtgggaaatgccttgcattttgctgtgtatacttgttctgagccccagaattacagtccttaagctgaaagatataaccttttataacttcatttccaaagctctaccactggagcgagggatattgctgcttaccacaa

SEQ ID NO: 13320 - DNA, 560 bp, Chicken  19866894217716_1
aagatcagtttcagtactcacacagtattacatgagttcattgtggagccagctattgaatatttagattcaagaaaaaaataaaactttgtcaacttttttcatcacaccttatcatccttaacaaaaattacctgtcagtatcatgggcctaccctttgataaacacaatatatatgataacagcaattagacagtacctggaagaattcctcaggttctgtattttaagcaataatgcaggcagtacgaacaaaatgtataattcagtaatatgttgtcactgactgttaagaaaartaactaaggagctgagttgtgtatgtcatcatmagaagacagaaaggaatcccagtatgatctcacctgcatctatttcacatactccacttgcagtgagttcttgtgatacagtcaactttcagctaactcaacagaatgtattttcttcaccataactgaaaaatgaaagaaaatttgcaataattctattttgaagttggcacccagctctctcaaagtgtctgcatcttgggattaatagataataacacatacaa

SEQ ID NO: 13321 - DNA, 527 bp, Chicken  19866894217716_2
gagttcattgtggagccagctattgaatatttagattcaagaaaaaaataaaactttgtcaacttttttcatcacaccttatcatccttaacaaaaattacctgtcagtatcatgggcctaccctttgataaacacaatatatatgataacagcaattagacagtacctggaagaattcctcaggttctgtattttaagcaataatgcaggcagtacgaacaaaatgtataattcagtaatatgttgtcactgactgttaagaaaartaactaaggagctgagttgtgtatgtcatcatmagaagacagaaaggaatcccagtatgatctcacctgcatctatttcacatactccacttgcagtgagttcttgtgatacagtcaactttcagctaactcaacagaatgtattttcttcaccataactgaaaaatgaaagaaaatttgcaataattctattttgaagttggcacccagctctctcaaagtgtctgcatcttgggattaatagataataacacatacaa

SEQ ID NO: 13322 - DNA, 600 bp, Chicken  19866894217732_1
ccaaaatcagcattcatttcctccagcatttaagtccacctgtttgttgttttgttcttcttccttccaagaccctggcttctatgagattctcaagtttccattataaacctaggagtagcaaatagaatcagcagactctttacagataagagagctggaggcaacctggtactgccatgtaagcaattactctccttggacaagcttatgggacaaacattcacatgtatataaatgtggtgaacatgaatgttgcttatgtgctttgttaccataaacgcgctgttacttgaaccytcatctacattaatatttagcactcccaatcttttcttacatcctcaagcactttcagcatgtaattatagtttaaaatattaactctgatgggatttttttaaatattttgtagggtggyatatgtgcatgctgctgacgagagcaccccggcttactaggacttaatgcagcatttgaaaattcaaatacagtgaaaaaaatggatgaaaattaaaatttcaattacacaagaaagaaattgatatgtaaattaattgttttggcgtaacttaacaaatttattataaaacagtgaga

SEQ ID NO: 13323 - DNA, 600 bp, Chicken  19866894217732_2
caaatagaatcagcagactctttacagataagagagctggaggcaacctggtactgccatgtaagcaattactctccttggacaagcttatgggacaaacattcacatgtatataaatgtggtgaacatgaatgttgcttatgtgctttgttaccataaacgcgctgttacttgaaccytcatctacattaatatttagcactcccaatcttttcttacatcctcaagcactttcagcatgtaattatagtttaaaatattaactctgatgggatttttttaaatattttgtagggtggyatatgtgcatgctgctgacgagagcaccccggcttactaggacttaatgcagcatttgaaaattcaaatacagtgaaaaaaatggatgaaaattaaaatttcaattacacaagaaagaaattgatatgtaaattaattgttttggcgtaacttaacaaatttattataaaacagtgagaaagaacattagatactgatccgtataagtgcaggaattataacatccacgctagattgaatgttaatagagaaatcaagaatgttttgctttgaggctttcctgcaaatgatcactccctg

SEQ ID NO: 13324 - DNA, 599 bp, Chicken  19866894217733_1
  misc_feature (1)..(82): n is any nucleotide
nnnnnnnnnnnnnnnnnnnnnnnnnnnnnnnnnnnnnnnnnnnnnnnnnnnnnnnnnnnnnnnnnnnnnnnnnnnnnnnnnntgcgattggaatttgtcatgagatgtatttagtcagattgcttccatactgtgcatgtggcagagcagtaggtttactttgggccctttcatatcttctctctgattttcttctctctcgtatagcatcactgatcagctgatgcagcaattgaaacgtgcaccagcttcgttccttgctttggtgactcactgtaaggcactaaaatctctctgccygaacctctcatcttcccaaaacgttgatagttcctctacccgtagggaaggattaggaagatcggcaatttagtgttaataaaagtgtttgagagcttctgcttgatctagagaaggataaagaaagacagcattgttggtaaygcatttccttctactgaattttgtttctttctctatggctaattagtgctgcagctctgcttgtgggagagaagttgcaagaagaagcaacgcttgtggtaagggctcgatattctcrtcactttattgctaagatgtaatgatgtgaaaacctt

SEQ ID NO: 13325 - DNA, 600 bp, Chicken  19866894217733_2
gagcagtaggtttactttgggccctttcatatcttctctctgattttcttctctctcgtatagcatcactgatcagctgatgcagcaattgaaacgtgcaccagcttcgttccttgctttggtgactcactgtaaggcactaaaatctctctgccygaacctctcatcttcccaaaacgttgatagttcctctacccgtagggaaggattaggaagatcggcaatttagtgttaataaaagtgtttgagagcttctgcttgatctagagaaggataaagaaagacagcattgttggtaaygcatttccttctactgaattttgtttctttctctatggctaattagtgctgcagctctgcttgtgggagagaagttgcaagaagaagcaacgcttgtggtaagggctcgatattctcrtcactttattgctaagatgtaatgatgtgaaaaccttgctgtgctccagttgatcgctgtaggactctgcttctcacagcctaatgctttgtctccacttttattcagattttgaagactagcattaaactaaaggggagcttcagggttttgtgtgttatctttcattacaggatgaccca

SEQ ID NO: 13326 - DNA, 600 bp, Chicken  19866894217733_3
ttggtgactcactgtaaggcactaaaatctctctgccygaacctctcatcttcccaaaacgttgatagttcctctacccgtagggaaggattaggaagatcggcaatttagtgttaataaaagtgtttgagagcttctgcttgatctagagaaggataaagaaagacagcattgttggtaaygcatttccttctactgaattttgtttctttctctatggctaattagtgctgcagctctgcttgtgggagagaagttgcaagaagaagcaacgcttgtggtaagggctcgatattctcrtcactttattgctaagatgtaatgatgtgaaaaccttgctgtgctccagttgatcgctgtaggactctgcttctcacagcctaatgctttgtctccacttttattcagattttgaagactagcattaaactaaaggggagcttcagggttttgtgtgttatctttcattacaggatgacccatttaagataaaatctggggggatggtggacatgaagaaactgaaagaacgaggcaaggacaggtgggtgcatatgagttctgaagatctttccctggactagaagtaagtcacagcta

SEQ ID NO: 13327 - DNA, 600 bp, Chicken  19866894217733_4
atctttccctggactagaagtaagtcacagctagcgataaattagccaaaaaatgtactgctttgaggaatttaatatactgcagtttcactggctgctactaccccagcttgtcaaattagttaaacaaaaaacaactgtaacagtgtggttttcgtttaggattaatgaagaggaagatctgaacttgggaacttccttctcagctgaaaccaacaggcgggatgaggatgctgacatgtaagttgagctgcatagtgtctgtgatgctgaattctgggttgggtgtcctctcagttygtttatttmtttmttttatcttggatactgaatgtctcagaacaacttcttgattctcacctgctttttcaccttctggctgccagacttsagaaggtatttccatgcacagagttgggaggtgccagtcagccagccagtggggtagcattaaataccagcagcagccttccctgatggttatggaagaacttggaagaccttgatcagagttgcaaatatcttgttttatgctcttgatgttagctgactgcttttggagarattattcatttctctctcttagccactgggagagtg

SEQ ID NO: 13328 - DNA, 600 bp, Chicken  19866894217733_5
tggactagaagtaagtcacagctagcgataaattagccaaaaaatgtactgctttgaggaatttaatatactgcagtttcactggctgctactaccccagcttgtcaaattagttaaacaaaaaacaactgtaacagtgtggttttcgtttaggattaatgaagaggaagatctgaacttgggaacttccttctcagctgaaaccaacaggcgggatgaggatgctgacatgtaagttgagctgcatagtgtctgtgatgctgaattctgggttgggtgtcctctcagttygtttatttmtttmttttatcttggatactgaatgtctcagaacaacttcttgattctcacctgctttttcaccttctggctgccagacttsagaaggtatttccatgcacagagttgggaggtgccagtcagccagccagtggggtagcattaaataccagcagcagccttccctgatggttatggaagaacttggaagaccttgatcagagttgcaaatatcttgttttatgctcttgatgttagctgactgcttttggagarattattcatttctctctcttagccactgggagagtgatgcagctg

SEQ ID NO: 13329 - DNA, 600 bp, Chicken  19866894217733_6
ctagaagtaagtcacagctagcgataaattagccaaaaaatgtactgctttgaggaatttaatatactgcagtttcactggctgctactaccccagcttgtcaaattagttaaacaaaaaacaactgtaacagtgtggttttcgtttaggattaatgaagaggaagatctgaacttgggaacttccttctcagctgaaaccaacaggcgggatgaggatgctgacatgtaagttgagctgcatagtgtctgtgatgctgaattctgggttgggtgtcctctcagttygtttatttmtttmttttatcttggatactgaatgtctcagaacaacttcttgattctcacctgctttttcaccttctggctgccagacttsagaaggtatttccatgcacagagttgggaggtgccagtcagccagccagtggggtagcattaaataccagcagcagccttccctgatggttatggaagaacttggaagaccttgatcagagttgcaaatatcttgttttatgctcttgatgttagctgactgcttttggagarattattcatttctctctcttagccactgggagagtgatgcagctgtgtt

SEQ ID NO: 13330 - DNA, 600 bp, Chicken  19866894217733_7
tggctgctactaccccagcttgtcaaattagttaaacaaaaaacaactgtaacagtgtggttttcgtttaggattaatgaagaggaagatctgaacttgggaacttccttctcagctgaaaccaacaggcgggatgaggatgctgacatgtaagttgagctgcatagtgtctgtgatgctgaattctgggttgggtgtcctctcagttygtttatttmtttmttttatcttggatactgaatgtctcagaacaacttcttgattctcacctgctttttcaccttctggctgccagacttsagaaggtatttccatgcacagagttgggaggtgccagtcagccagccagtggggtagcattaaataccagcagcagccttccctgatggttatggaagaacttggaagaccttgatcagagttgcaaatatcttgttttatgctcttgatgttagctgactgcttttggagarattattcatttctctctcttagccactgggagagtgatgcagctgtgttcagcaattaggactgagtatagaaaacagaactaaataccacatgtccctcatggactgttctttaggatgaagtaca

SEQ ID NO: 13331 - DNA, 600 bp, Chicken  19866894217733_8
tgatgctgaattctgggttgggtgtcctctcagttygtttatttmtttmttttatcttggatactgaatgtctcagaacaacttcttgattctcacctgctttttcaccttctggctgccagacttsagaaggtatttccatgcacagagttgggaggtgccagtcagccagccagtggggtagcattaaataccagcagcagccttccctgatggttatggaagaacttggaagaccttgatcagagttgcaaatatcttgttttatgctcttgatgttagctgactgcttttggagarattattcatttctctctcttagccactgggagagtgatgcagctgtgttcagcaattaggactgagtatagaaaacagaactaaataccacatgtccctcatggactgttctttaggatgaagtacattgagacagagctgaagaagagaaaaggaattgtggagaatgaagaacagaaggtgaagcttaagaacgctgaggactctctgtatgagctgccagagaacatccgtgtctcctcggccaagaagactgaagagatgctgtccaaccagatgctgagtggcattcctgaagtg

SEQ ID NO: 13332 - DNA, 600 bp, Chicken  19866894217740_1
gagatttgatacttagctcccttaactcggcttttcctcaagcatctgctattccctttacctaggaattaccatctttctaatcacaaacttgatttatcacagcatcattattcaggtgtccccattatccacttaatctgacaaactaggaaacatgggtttatggccatatagaattgtccaccggtgaaatgcaagtgtttatttgtgttgttttatacatttactacttggctacactgtattgcctcaggtagacagagaagaagtgatcctgtcagatatctcctggaatasgtggatcacttgcaacacaaggatcccctttttgatagatcttccctctaagttctgtcattattgtcaatatttggcataacagacaagagcagcacaaacaactgtgcaactgggcttctcatttcagctgatacccacactcacatacagtcagtgagatccgattctgaactgtagatccctgttagcatctctttgtcatgtttggtaaaccatccaccctccattgccagctaaaggttgggaaggcactccagcaaaacaccatttgcgtggttgtttctaagagaaaaaaat

SEQ ID NO: 13333 - DNA, 599 bp, Chicken  19866894217744_1
  misc_feature (1)..(148): n is any nucleotide
nnnnnnnnnnnnnnnnnnnnnnnnnnnnnnnnnnnnnnnnnnnnnnnnnnnnnnnnnnnnnnnnnnnnnnnnnnnnnnnnnnnnnnnnnnnnnnnnnnnnnnnnnnnnnnnnnnnnnnnnnnnnnnnnnnnnnnnnnnnnnnnnnnnnccctgcgtgggatgtctggacagtagcccaggtgggggaaggaaagttatgcatggtctggctaagaggcccagacgacacccaaaatttagttgcaaccctggtagcaaagttaggatgaatgcttgtgtttagtcatatctggttataaracttagatacctctgccacatttgaatgaccttgtcagaacatcagggggatggactgagtggaaacagttctgtatccataagawctgcccttatgcaaacagtatagccgtgttttcctgtcagagtatttagcagggtcatggcctttaacaggaaagcagcatgcagaaagaaagttaatgtgtattttctgaagggagtttgccctcctggagaaagaactgccgttgagtgcagagcccttaaatgttcaaggcctttcagggatgggattaaaggttgtttttaaaaggagg

SEQ ID NO: 13334 - DNA, 599 bp, Chicken  19866894217744_2
  misc_feature (1)..(62): n is any nucleotide
nnnnnnnnnnnnnnnnnnnnnnnnnnnnnnnnnnnnnnnnnnnnnnnnnnnnnnnnnnnnnnccctgcgtgggatgtctggacagtagcccaggtgggggaaggaaagttatgcatggtctggctaagaggcccagacgacacccaaaatttagttgcaaccctggtagcaaagttaggatgaatgcttgtgtttagtcatatctggttataaracttagatacctctgccacatttgaatgaccttgtcagaacatcagggggatggactgagtggaaacagttctgtatccataagawctgcccttatgcaaacagtatagccgtgttttcctgtcagagtatttagcagggtcatggcctttaacaggaaagcagcatgcagaaagaaagttaatgtgtattttctgaagggagtttgccctcctggagaaagaactgccgttgagtgcagagcccttaaatgttcaaggcctttcagggatgggattaaaggttgtttttaaaaggaggtttatctctataatcacctgagaatccaccctgtgcttattctggaccttcagtggttgaagtttgagttttcccagatctggaca

SEQ ID NO: 13335 - DNA, 600 bp, Chicken  19866894217745_1
ggggttaacgtgcacaaaccaggcaattctgctaaagcggttagctgtgaaacagctaatgtttccattttcctctgtgagtttcaagattaacaagccacagagagtgaaaagaaacagttcatcatctccaaaggcttgttttcaggctacatgcagaatcataaagataatgcatcagatagtactcattagttttatgtttcagaaatacacttcacaaacatagccattaaacagcacgaagggagcatacctgaaaagtcttacagctgtcccagagcaattccagttcaccamattcctccaaacactggcatcttaacatgggatccctgcccgtggcttgctaacccaccagccagctaacccagcaatgagagcagacagagctctgcagagctattgagcagaggagagggtgcaacaagcccctctgcagcagcaggaagctattgcatcaggtcatggataaattcaatgctggaaaacctggagcaagtaaggcaaagctgcaacaaacactgagtatgctgagtcccagctatttggcatttgcactcagactctgatccaaggatatggcttgtatatctaatt

SEQ ID NO: 13336 - DNA, 599 bp, Chicken  19866894217748_1
  misc_feature (1)..(190): n is any nucleotide
nnnnnnnnnnnnnnnnnnnnnnnnnnnnnnnnnnnnnnnnnnnnnnnnnnnnnnnnnnnnnnnnnnnnnnnnnnnnnnnnnnnnnnnnnnnnnnnnnnnnnnnnnnnnnnnnnnnnnnnnnnnnnnnnnnnnnnnnnnnnnnnnnnnnnnnnnnnnnnnnnnnnnnnnnnnnnnnnnnnnnnnnnnnnnnctaatccttgcactgtacttgcacaagacagattgttaggttattttttgtgcaaaagcagccccaaatctctgctttaaaactaggaagtgaagactggatgagaatasgttacttccatatttattgtgcaaattaaacccattcttaatttctaagctcccttaatacaaacctatccatctgttaccaacctcacttccattaagtaagtgccctgtacaagcttctggcagccttgcatgcctgaggtcagacccagaatcacactgttctcwcctattagagggggaaaaagtgtaatacaaacatatacattgtgtatgcttggaaggagatgaacaaataagtacaggattactgcagaaaagcaggagctgtgagaagcctagcatttttacaaggtggt

SEQ ID NO: 13337 - DNA, 599 bp, Chicken  19866894217748_2
  misc_feature (1)..(22): n is any nucleotide
nnnnnnnnnnnnnnnnnnnnnnctaatccttgcactgtacttgcacaagacagattgttaggttattttttgtgcaaaagcagccccaaatctctgctttaaaactaggaagtgaagactggatgagaatasgttacttccatatttattgtgcaaattaaacccattcttaatttctaagctcccttaatacaaacctatccatctgttaccaacctcacttccattaagtaagtgccctgtacaagcttctggcagccttgcatgcctgaggtcagacccagaatcacactgttctcwcctattagagggggaaaaagtgtaatacaaacatatacattgtgtatgcttggaaggagatgaacaaataagtacaggattactgcagaaaagcaggagctgtgagaagcctagcatttttacaaggtggtgagttcctcaggttcctgctaacatcagcaaatgccaaagcagcactgcatgtcccagctccagcctrcggggactgcaggcagcaggagctcccatttctatcatccctctgcagtgcacataggaggctcttcaatctgcctgaggaggaagaagtgatttcagct

SEQ ID NO: 13338 - DNA, 600 bp, Chicken  19866894217748_3
atccatctgttaccaacctcacttccattaagtaagtgccctgtacaagcttctggcagccttgcatgcctgaggtcagacccagaatcacactgttctcwcctattagagggggaaaaagtgtaatacaaacatatacattgtgtatgcttggaaggagatgaacaaataagtacaggattactgcagaaaagcaggagctgtgagaagcctagcatttttacaaggtggtgagttcctcaggttcctgctaacatcagcaaatgccaaagcagcactgcatgtcccagctccagcctrcggggactgcaggcagcaggagctcccatttctatcatccctctgcagtgcacataggaggctcttcaatctgcctgaggaggaagaagtgatttcagctctctgcttgtgccatgcagggcaycctgggcagagcctgctggccacatcacccttagctgagttatacatgaggaaggagggtaggaggtgctgtgagatgacagttattgcacactggagaccagagctggcagaaccacttctttttccttgtatttatttacatctttctttccagttactgtacaaggcactrtt

SEQ ID NO: 13339 - DNA, 600 bp, Chicken  19866894217748_4
aatacaaacatatacattgtgtatgcttggaaggagatgaacaaataagtacaggattactgcagaaaagcaggagctgtgagaagcctagcatttttacaaggtggtgagttcctcaggttcctgctaacatcagcaaatgccaaagcagcactgcatgtcccagctccagcctrcggggactgcaggcagcaggagctcccatttctatcatccctctgcagtgcacataggaggctcttcaatctgcctgaggaggaagaagtgatttcagctctctgcttgtgccatgcagggcaycctgggcagagcctgctggccacatcacccttagctgagttatacatgaggaaggagggtaggaggtgctgtgagatgacagttattgcacactggagaccagagctggcagaaccacttctttttccttgtatttatttacatctttctttccagttactgtacaaggcactrttatgttcacagaaatatacctctggaaaaaaaaaaagaggaaaaamamcaacaacaacaacaacaaaaacttgcttcaaaagcagctcctgtagtccttatactagcctttggatcctgtctttc

SEQ ID NO: 13340 - DNA, 600 bp, Chicken  19866894217748_5
trcggggactgcaggcagcaggagctcccatttctatcatccctctgcagtgcacataggaggctcttcaatctgcctgaggaggaagaagtgatttcagctctctgcttgtgccatgcagggcaycctgggcagagcctgctggccacatcacccttagctgagttatacatgaggaaggagggtaggaggtgctgtgagatgacagttattgcacactggagaccagagctggcagaaccacttctttttccttgtatttatttacatctttctttccagttactgtacaaggcactrttatgttcacagaaatatacctctggaaaaaaaaaaagaggaaaaamamcaacaacaacaacaacaaaaacttgcttcaaaagcagctcctgtagtccttatactagcctttggatcctgtctttctcatttccatttagcaattgatcttggaccagctcatcccacagcaaggtgtggaaactgctccaaatctggagagagaggaacatggagggaccatgtttctgcgctgcatttaatactgccaaattcagcggatgtaaaacacatatttaagtacataccctacttgaccag

SEQ ID NO: 13341 - DNA, 600 bp, Chicken  19866894217748_6
cagtgcacataggaggctcttcaatctgcctgaggaggaagaagtgatttcagctctctgcttgtgccatgcagggcaycctgggcagagcctgctggccacatcacccttagctgagttatacatgaggaaggagggtaggaggtgctgtgagatgacagttattgcacactggagaccagagctggcagaaccacttctttttccttgtatttatttacatctttctttccagttactgtacaaggcactrttatgttcacagaaatatacctctggaaaaaaaaaaagaggaaaaamamcaacaacaacaacaacaaaaacttgcttcaaaagcagctcctgtagtccttatactagcctttggatcctgtctttctcatttccatttagcaattgatcttggaccagctcatcccacagcaaggtgtggaaactgctccaaatctggagagagaggaacatggagggaccatgtttctgcgctgcatttaatactgccaaattcagcggatgtaaaacacatatttaagtacataccctacttgaccagtttagttaatcacatacttaagaactttgctaaattaggattcaggc

SEQ ID NO: 13342 - DNA, 600 bp, Chicken  19866894217748_7
gtgcacataggaggctcttcaatctgcctgaggaggaagaagtgatttcagctctctgcttgtgccatgcagggcaycctgggcagagcctgctggccacatcacccttagctgagttatacatgaggaaggagggtaggaggtgctgtgagatgacagttattgcacactggagaccagagctggcagaaccacttctttttccttgtatttatttacatctttctttccagttactgtacaaggcactrttatgttcacagaaatatacctctggaaaaaaaaaaagaggaaaaamamcaacaacaacaacaacaaaaacttgcttcaaaagcagctcctgtagtccttatactagcctttggatcctgtctttctcatttccatttagcaattgatcttggaccagctcatcccacagcaaggtgtggaaactgctccaaatctggagagagaggaacatggagggaccatgtttctgcgctgcatttaatactgccaaattcagcggatgtaaaacacatatttaagtacataccctacttgaccagtttagttaatcacatacttaagaactttgctaaattaggattcaggctg

SEQ ID NO: 13343 - DNA, 600 bp, Chicken  19866894217749_1
ctcaactcactgtattaagattactgtaaatcacgtctacagtaagtaagttcttcacttattagggaagtctggaaacaggattggttttaggctgtaaaagtttatagttacctttttttttaaacatggaacttttctgttagaacaggtaagccaagttacagactaccttactggttcactggactgaaaaaaatcactacacagttaactgcctactgtaaaactaataaaagcatcaggacttcacaactggtactatcaatgagatggtctaaatgaagacgtaaacaagaratcaatgtctccactaactacatgacaacttttctgttttgagagtaaaactgagatatattcaccgcatgaaaattagaaaggtagtgtgcaaaaacatccttctgttgagatggctgcatggggatggaaccaaatatctgccattcctacaacaaaaaaagagagataaaaggctgaacattgcgtatgtttcgtttaataacatgatagtagaactagagagaaatgctaagagattaacaagcaagatgaattcatcctctcatcrgaaaccttatttatcagaggtaagtagtt

SEQ ID NO: 13344 - DNA, 600 bp, Chicken  19866894217749_2
gatggtctaaatgaagacgtaaacaagaratcaatgtctccactaactacatgacaacttttctgttttgagagtaaaactgagatatattcaccgcatgaaaattagaaaggtagtgtgcaaaaacatccttctgttgagatggctgcatggggatggaaccaaatatctgccattcctacaacaaaaaaagagagataaaaggctgaacattgcgtatgtttcgtttaataacatgatagtagaactagagagaaatgctaagagattaacaagcaagatgaattcatcctctcatcrgaaaccttatttatcagaggtaagtagttcttaagtaggaacttaggtaggcaaaccaaaagtattgcaacctgtgaatacaaagaactaatggagtgtactattattattattacttggtaatttattattacttggtagtagtaataataatattaaaaaagcatcacaagaacatgcagaaaaacgtagatgggcaaaaggaacaggcacttgtacataatcttttgtctttaaaggaaacgcaattaacctaggctcctgttggtcttataatggaaataaataccacagaagcat

SEQ ID NO: 13345 - DNA, 600 bp, Chicken  19866894217749_3
gttcttaagtaggaacttaggtaggcaaaccaaaagtattgcaacctgtgaatacaaagaactaatggagtgtactattattattattacttggtaatttattattacttggtagtagtaataataatattaaaaaagcatcacaagaacatgcagaaaaacgtagatgggcaaaaggaacaggcacttgtacataatcttttgtctttaaaggaaacgcaattaacctaggctcctgttggtcttataatggaaataaataccacagaagcattgccagaccctgtccagatgtatcaratgtcacctgaacagctcccacctccaaataaagctctcaaataggctgttgaaagaaaactgccagatggatgatgcagaacattaaacttggctagcagcaataagcattacttaataggctgttcagaaagcagagacagccacttacatctgggatcccactcggagtggagatattaaagcctggatagttaatcaacttagagacatcataagtgacatgttttggttgaagatacccttcatccttctgtttcattatcatctataaataaaaaaaacataattattaccaat

SEQ ID NO: 13346 - DNA, 600 bp, Chicken  19866894217750_1
ttaaacagactccttctaattgcccttcctcacacagcagttttcagccatgtaatcacttgtgctctaagaagaggtgaatacgtgccactggtatcacaattacagcccagttacttgtgtcactctttcaactttggaaataagagcttgagaaactaatgataaagtaaagcataaaaaagcagtgagactacaccttccatttagctacagtaaaggaagggatgagcagcctgttcttgactgttcactgagcgcctgaaatgatgcagaccattacttccaccaggcacctcrgatgttagcctggagatttacacaggaggcaaaagccatactgacagagcgatgggaatccgactgcacagtgcatgccagttctatccacaacagtgctctcctctcagaactacaggcatttgcgtgtgggagagaaaaaaaagacttgaatgtggccaaacatcggtaggacaaacagggagaacttgtaccaaacaaaaagtaaatctctgcctcccaacttctgttcaggtgcagcccagaggagctattaaaaaagcagccctcrtatgcacacagccctgtgcaggcttcaga

SEQ ID NO: 13347 - DNA, 600 bp, Chicken  19866894217750_2
gcagaccattacttccaccaggcacctcrgatgttagcctggagatttacacaggaggcaaaagccatactgacagagcgatgggaatccgactgcacagtgcatgccagttctatccacaacagtgctctcctctcagaactacaggcatttgcgtgtgggagagaaaaaaaagacttgaatgtggccaaacatcggtaggacaaacagggagaacttgtaccaaacaaaaagtaaatctctgcctcccaacttctgttcaggtgcagcccagaggagctattaaaaaagcagccctcrtatgcacacagccctgtgcaggcttcagagtcagcagaaccaacccgaccagggtcccacgtccagcactgagagggaaattcacctacagcataactccacccagtgacctcgctgaagtcaagagccaagtctggctcatacagccagtgcacagctgagggacaggaggacagaacgttggaaggataagaatgctctagattcaaccctataaactgggacaaatgacctcagtgacaaagggcatctgttaactactgctccaccacagaagccgtacattctcggccatttcac

SEQ ID NO: 13348 - DNA, 383 bp, Chicken  19866894217750_3
attctcggccatttcacggaactgaggagccagatgatcgcttccatgctgcagacagcctgctgcacacacacagcccagctcctccagcacggccctctcccacaccccacacaccttttcaccattccgaaaaaccaagctttcaggtggccaagggatttacattcaatgcatttctgagcacttctacttaaaaaggtcctttagaaaccccaaacaacccaactaaggccaataccaccgcagaggtcctgctatgagaagcctgagcagaaagcagtgtccaacaggaagccycattcagcatttacacacaccaggctgcagcgggcacagctctgctaaatccataccatcacaacagcacagctgcaggagca

SEQ ID NO: 13349 - DNA, 600 bp, Chicken  19866894217755_1
caaagtaacaattttaacaacctatgagcaagaaacatctgcaccaaaaggccctcggatagttgagctagacaacacctgggaaagaaaacaacacattgttctattgctacaattgaagcaaaagtgatcactaagcatatcaaaggtcttgatttgtgcctgtaaggatgtataactttcaagaagccatagggaaaaataattcccccaaaaaacccggagacttgaaggctttagaaataacaacaggcctagaatctcaagttttaaatatttagttgaaggacaggctgcagrgcaggttactgctgtttgtagctacctgaaaaagaaacagcgttcagatgtgtttgtactacacagcaacacgttacacacaaataagttaaattacagagtgtttgccattaccacatcagacgctagctagccttgtaacctcttctctcagaacacaggttaggaaaactatagagttccatagagtagatagaggtgaacagtcaaacttggaaaccactattattttcctgatgaagcaattgttacttctaacctgggactcgaggaatcctcctaccagacacattggccagt

SEQ ID NO: 13350 - DNA, 489 bp, Chicken  19866894217755_2
agtgtttgccattaccacatcagacgctagctagccttgtaacctcttctctcagaacacaggttaggaaaactatagagttccatagagtagatagaggtgaacagtcaaacttggaaaccactattattttcctgatgaagcaattgttacttctaacctgggactcgaggaatcctcctaccagacacattggccagtctatctgtactgccttgcactatcagcacgtggagcaaccctaacccaaatttgcctcagtgagcgtcaggccaccgctcaaattgaagccaatatagmttgagtaaccacttaaaaaaaacattctttgttctaatttagtcagataactgatatgagctttgtttttaaaacgtggaaaggaatctatgaattgtggcttgcgcagggggaggagatgagcacaaaaggagtttgccaccctgcccagctcagctacacagatgccagcagcgctcctggagccca

SEQ ID NO: 13351 - DNA, 599 bp, Chicken  19866894217763_1
  misc_feature (1)..(145): n is any nucleotide
nnnnnnnnnnnnnnnnnnnnnnnnnnnnnnnnnnnnnnnnnnnnnnnnnnnnnnnnnnnnnnnnnnnnnnnnnnnnnnnnnnnnnnnnnnnnnnnnnnnnnnnnnnnnnnnnnnnnnnnnnnnnnnnnnnnnnnnnnnnnnnnnngggagatgctcgccgctgctgttaacccgtgtttccccttgttgctgcaaagcatggttggttctctgactgttggcaacgacaagccttcctgagatgcgcggtgcaagggttgtgcatctgtgcaaaacagcttccccgttgcatttgctcckcrctgagcaagatgctttgtgtgcaacgcggcaaggtcagatgatgccgcagttggttactgcttcggcaggagctgaagcattgaatatttatattaattggggaattagttatctgtcaagaggcacctcacgaaaggttgttaagggaggaaaaaaaaaaaaaaaggacaataacgtctttaatgactgctcgagttttaaaggcaatctttaagaattaattaaattaagagggctattttgagaactgggagagttctgtacataaaagtaaggctgcttggacttattggaag

SEQ ID NO: 13352 - DNA, 599 bp, Chicken  19866894217763_2
  misc_feature (1)..(143): n is any nucleotide
nnnnnnnnnnnnnnnnnnnnnnnnnnnnnnnnnnnnnnnnnnnnnnnnnnnnnnnnnnnnnnnnnnnnnnnnnnnnnnnnnnnnnnnnnnnnnnnnnnnnnnnnnnnnnnnnnnnnnnnnnnnnnnnnnnnnnnnnnnnnnnngggagatgctcgccgctgctgttaacccgtgtttccccttgttgctgcaaagcatggttggttctctgactgttggcaacgacaagccttcctgagatgcgcggtgcaagggttgtgcatctgtgcaaaacagcttccccgttgcatttgctcckcrctgagcaagatgctttgtgtgcaacgcggcaaggtcagatgatgccgcagttggttactgcttcggcaggagctgaagcattgaatatttatattaattggggaattagttatctgtcaagaggcacctcacgaaaggttgttaagggaggaaaaaaaaaaaaaaaggacaataacgtctttaatgactgctcgagttttaaaggcaatctttaagaattaattaaattaagagggctattttgagaactgggagagttctgtacataaaagtaaggctgcttggacttattggaagag

SEQ ID NO: 13353 - DNA, 600 bp, Chicken  19866894217778_1
aggcttttatgtgtaggaacagtcttcatctagctctctaaaggagctgggcatatttttcctttcttcagctaaaaaaaatcatgaccgattacattggtttatatataaatatattcctgattagtgtaaatccagaatgctccatcttcatgataagcaagcggggtgactgttttttcaccaccattagagagactatttttaagtgacatgcatttatgtctaaaatctctgaatattaataatagcaaagcagaccccacacaatgactacatttgcaaacaaggctaccagastaatgtcacaataattggacatggttctgctcagctagactgtgtgtgccatcagcattagacagatagtaattaagaatgaaattaatttgtttcaaataggcaacatctcactccaaacattatcacgggttttgcttttgctccaagtggagctactaagtgagagaaccacagcagggatttatttatttatttttaacacagagacagagatgataatcagaacatacatgcagaaaccacagagccattttgcattcttttgcccaccagacacgtgcttcctgcctaacatgg

SEQ ID NO: 13354 - DNA, 600 bp, Chicken  19866894217778_2
gcaagaaaaatctatgctaactgtgcagagagttgcttttggtgcacagacagtggctgaaaagcagtgctcgccctccctacctgtttgtcttcacaattggagtaggaaggacgcatgtcagctgccagccgtatatggcaagggaattcagcagtggaacatagtctgtctgcacttccaccccctaggagagaaaaatcagcagttaccatcagctcttgcagcgtgacattcactttgacttatagcttttctggaaggaggagagggtttctgtggtaaagtgaatcattctgyatgtccagctggccaaggaaaacatgaggcacgggaaggcaccagttcatcctaacctgttaaataagtttgcttagaatgataaacatctgtgattttgtagttgtactgcctaaaccatccgtgcttcaaatgattccagatctgaacaggacaaattcattgtattttatcaagtattcctcccaaacaaaaacactgacaacatgacaacaatgctttgcccagattctgcacttatctaggctgcaccaaatcaattgggcaactctacagtgatgcatcaagagcaaaatggac

SEQ ID NO: 13355 - DNA, 600 bp, Chicken  19866894217778_3
tgcatcaagagcaaaatggacaacaacagaaacaaaacctaagtacaagtctgttccttgtattacagaatcacagagttactcatgaatacacactgcctccttgtttattttgaatcgggaaatctgtgggcaagaccaaaaacactgcctttcagatatacacaagacagccttgctaatgctctttccaatagatggcgaagcctgcaattcacacataaagaaacactggtgatttcaacaggctgctcccgtgtctaattgccaagacttccactaacttaagaatagatgctrgggcatatttacttgcttttgatcttaataaatacaaaccagagaaatgataactactagcctctacaaatatagctgtatcccattgcaacaacaatccgatctgccagaaagctcaagcacttaaactggtttaatgtgcacgcaagtagttttaattgccaattctcagcacgataattttctctattttcctcagggctgctccaaaaaatccatttattctgtagtaatagtcatctggtcagaactaatctgaatcctcctgtagtacttcaaattatcttagtgatttccaac

SEQ ID NO: 13356 - DNA, 599 bp, Chicken  19866894217781_1
  misc_feature (1)..(128): n is any nucleotide
nnnnnnnnnnnnnnnnnnnnnnnnnnnnnnnnnnnnnnnnnnnnnnnnnnnnnnnnnnnnnnnnnnnnnnnnnnnnnnnnnnnnnnnnnnnnnnnnnnnnnnnnnnnnnnnnnnnnnnnnnnnnnnnncccccccccccccccacggttccgcacagctccaccagataagcagcgaagtacaatattatgaatgtcaaacaaaagctcatcaggagagctgacaaagctgtgcctctgagaagggaagtaaatcgaattctatagactaaatacacgggcttagtggcatgggtttaawagaaatatactcagacagccgagcttcctcggggcagagcacactgagcaatcctgaagctccccagaggggttggaccagcccggtgtckcctcggtcccactttatcccatctcactgtcctccaagcygatatgtgaaagctggggatgaggagatggcttcattagcggagatcaaaagcagcctctgagcagcgagtgaccaaaacctgggatcatgtgggtcactccggttagaacttgtgatggatgcagcaactttgatgtgattctgtttgctcccagcacacacaaagt

SEQ ID NO: 13357 - DNA, 599 bp, Chicken  19866894217781_2
  misc_feature (1)..(37): n is any nucleotide
nnnnnnnnnnnnnnnnnnnnnnnnnnnnnnnnnnnnncccccccccccccccacggttccgcacagctccaccagataagcagcgaagtacaatattatgaatgtcaaacaaaagctcatcaggagagctgacaaagctgtgcctctgagaagggaagtaaatcgaattctatagactaaatacacgggcttagtggcatgggtttaawagaaatatactcagacagccgagcttcctcggggcagagcacactgagcaatcctgaagctccccagaggggttggaccagcccggtgtckcctcggtcccactttatcccatctcactgtcctccaagcygatatgtgaaagctggggatgaggagatggcttcattagcggagatcaaaagcagcctctgagcagcgagtgaccaaaacctgggatcatgtgggtcactccggttagaacttgtgatggatgcagcaactttgatgtgattctgtttgctcccagcacacacaaagtcccactttatggagcacagggggaacaaggcacatttctgttgcttctgagtctcctcttcatgcgtacggggtgaacacactcgagctgc

SEQ ID NO: 13358 - DNA, 600 bp, Chicken  19866894217781_3
ccccccccccccacggttccgcacagctccaccagataagcagcgaagtacaatattatgaatgtcaaacaaaagctcatcaggagagctgacaaagctgtgcctctgagaagggaagtaaatcgaattctatagactaaatacacgggcttagtggcatgggtttaawagaaatatactcagacagccgagcttcctcggggcagagcacactgagcaatcctgaagctccccagaggggttggaccagcccggtgtckcctcggtcccactttatcccatctcactgtcctccaagcygatatgtgaaagctggggatgaggagatggcttcattagcggagatcaaaagcagcctctgagcagcgagtgaccaaaacctgggatcatgtgggtcactccggttagaacttgtgatggatgcagcaactttgatgtgattctgtttgctcccagcacacacaaagtcccactttatggagcacagggggaacaaggcacatttctgttgcttctgagtctcctcttcatgcgtacggggtgaacacactcgagctgcccctgcctttgtgagcaacacacagtgcaagaggagggtga

SEQ ID NO: 13359 - DNA, 599 bp, Chicken  19866894217785_1
  misc_feature (1)..(122): n is any nucleotide
nnnnnnnnnnnnnnnnnnnnnnnnnnnnnnnnnnnnnnnnnnnnnnnnnnnnnnnnnnnnnnnnnnnnnnnnnnnnnnnnnnnnnnnnnnnnnnnnnnnnnnnnnnnnnnnnnnnnnnnnnntggcaagtgcacacactgccacgctggactagatgtgctcttggtgaactaactgaagtgcaatactgcatggctgctcataggcaccacaacccccattgaacagttcccatctggatcctggctctgaacctggaaaagcctggactttgaccccttttcctggctcctgggtggsccatgggtgaaacatgttctattttatccaytgtgcaccattgcaactcttacatttgtacctygtatgatgccacgtttaatgcaactcatacaacctgttgcatcctctgtgtagttcgtaaccaagcccaagaaatcctatgtagtaactgcataacatttaagtccccctcactccctgcccctctttttccctrcgcttacctctctttcttcctttcctcaccaccatggacagccatttgcacatcagttccargcatcctttgagcygtaagagacaaaactgcttctctc

SEQ ID NO: 13360 - DNA, 599 bp, Chicken  19866894217785_2
  misc_feature (1)..(91): n is any nucleotide
nnnnnnnnnnnnnnnnnnnnnnnnnnnnnnnnnnnnnnnnnnnnnnnnnnnnnnnnnnnnnnnnnnnnnnnnnnnnnnnnnnnnnnnnnnntggcaagtgcacacactgccacgctggactagatgtgctcttggtgaactaactgaagtgcaatactgcatggctgctcataggcaccacaacccccattgaacagttcccatctggatcctggctctgaacctggaaaagcctggactttgaccccttttcctggctcctgggtggsccatgggtgaaacatgttctattttatccaytgtgcaccattgcaactcttacatttgtacctygtatgatgccacgtttaatgcaactcatacaacctgttgcatcctctgtgtagttcgtaaccaagcccaagaaatcctatgtagtaactgcataacatttaagtccccctcactccctgcccctctttttccctrcgcttacctctctttcttcctttcctcaccaccatggacagccatttgcacatcagttccargcatcctttgagcygtaagagacaaaactgcttctctccttgtctccaagctggctccgtgaggccctc

SEQ ID NO: 13361 - DNA, 599 bp, Chicken  19866894217785_3
  misc_feature (1)..(58): n is any nucleotide
nnnnnnnnnnnnnnnnnnnnnnnnnnnnnnnnnnnnnnnnnnnnnnnnnnnnnnnnnntggcaagtgcacacactgccacgctggactagatgtgctcttggtgaactaactgaagtgcaatactgcatggctgctcataggcaccacaacccccattgaacagttcccatctggatcctggctctgaacctggaaaagcctggactttgaccccttttcctggctcctgggtggsccatgggtgaaacatgttctattttatccaytgtgcaccattgcaactcttacatttgtacctygtatgatgccacgtttaatgcaactcatacaacctgttgcatcctctgtgtagttcgtaaccaagcccaagaaatcctatgtagtaactgcataacatttaagtccccctcactccctgcccctctttttccctrcgcttacctctctttcttcctttcctcaccaccatggacagccatttgcacatcagttccargcatcctttgagcygtaagagacaaaactgcttctctccttgtctccaagctggctccgtgaggccctcccggtgaygagaccctaagtgacaactgcaaag

SEQ ID NO: 13362 - DNA, 600 bp, Chicken  19866894217785_4
tcataggcaccacaacccccattgaacagttcccatctggatcctggctctgaacctggaaaagcctggactttgaccccttttcctggctcctgggtggsccatgggtgaaacatgttctattttatccaytgtgcaccattgcaactcttacatttgtacctygtatgatgccacgtttaatgcaactcatacaacctgttgcatcctctgtgtagttcgtaaccaagcccaagaaatcctatgtagtaactgcataacatttaagtccccctcactccctgcccctctttttccctrcgcttacctctctttcttcctttcctcaccaccatggacagccatttgcacatcagttccargcatcctttgagcygtaagagacaaaactgcttctctccttgtctccaagctggctccgtgaggccctcccggtgaygagaccctaagtgacaactgcaaagcatccagggggcgagtgctgggtgccaccgtgccacactgctgttgcttatgatggtaaaggtgagcacaagtgggaacaagcagtcgtttttgggggtgaccactgcaggagacaataatgcttgtgcatggcaa

SEQ ID NO: 13363 - DNA, 600 bp, Chicken  19866894217785_5
agcctggactttgaccccttttcctggctcctgggtggsccatgggtgaaacatgttctattttatccaytgtgcaccattgcaactcttacatttgtacctygtatgatgccacgtttaatgcaactcatacaacctgttgcatcctctgtgtagttcgtaaccaagcccaagaaatcctatgtagtaactgcataacatttaagtccccctcactccctgcccctctttttccctrcgcttacctctctttcttcctttcctcaccaccatggacagccatttgcacatcagttccargcatcctttgagcygtaagagacaaaactgcttctctccttgtctccaagctggctccgtgaggccctcccggtgaygagaccctaagtgacaactgcaaagcatccagggggcgagtgctgggtgccaccgtgccacactgctgttgcttatgatggtaaaggtgagcacaagtgggaacaagcagtcgtttttgggggtgaccactgcaggagacaataatgcttgtgcatggcaaccaaggcactgctccctgctgccttatctgttgggccaagtgtgtcaccataacagagcaaa

SEQ ID NO: 13364 - DNA, 600 bp, Chicken  19866894217785_6
ccccttttcctggctcctgggtggsccatgggtgaaacatgttctattttatccaytgtgcaccattgcaactcttacatttgtacctygtatgatgccacgtttaatgcaactcatacaacctgttgcatcctctgtgtagttcgtaaccaagcccaagaaatcctatgtagtaactgcataacatttaagtccccctcactccctgcccctctttttccctrcgcttacctctctttcttcctttcctcaccaccatggacagccatttgcacatcagttccargcatcctttgagcygtaagagacaaaactgcttctctccttgtctccaagctggctccgtgaggccctcccggtgaygagaccctaagtgacaactgcaaagcatccagggggcgagtgctgggtgccaccgtgccacactgctgttgcttatgatggtaaaggtgagcacaagtgggaacaagcagtcgtttttgggggtgaccactgcaggagacaataatgcttgtgcatggcaaccaaggcactgctccctgctgccttatctgttgggccaagtgtgtcaccataacagagcaaaggaggaggaaacaa

SEQ ID NO: 13365 - DNA, 586 bp, Chicken  19866894217785_7
cattgcaactcttacatttgtacctygtatgatgccacgtttaatgcaactcatacaacctgttgcatcctctgtgtagttcgtaaccaagcccaagaaatcctatgtagtaactgcataacatttaagtccccctcactccctgcccctctttttccctrcgcttacctctctttcttcctttcctcaccaccatggacagccatttgcacatcagttccargcatcctttgagcygtaagagacaaaactgcttctctccttgtctccaagctggctccgtgaggccctcccggtgaygagaccctaagtgacaactgcaaagcatccagggggcgagtgctgggtgccaccgtgccacactgctgttgcttatgatggtaaaggtgagcacaagtgggaacaagcagtcgtttttgggggtgaccactgcaggagacaataatgcttgtgcatggcaaccaaggcactgctccctgctgccttatctgttgggccaagtgtgtcaccataacagagcaaaggaggaggaaacaacccagagacacttccacaaggaattaaatgtaactccacccgaatgggg

SEQ ID NO: 13366 - DNA, 599 bp, Chicken  19866894217787_1
  misc_feature (1)..(48): n is any nucleotide
nnnnnnnnnnnnnnnnnnnnnnnnnnnnnnnnnnnnnnnnnnnnnnnncatcatcctgaccaataacacaaccctatttctattaggttgggctgccaggaagtcttgcctgacaaccctttgtattctttttatttaaaaaatgactcaagaagctctatatgtaaaaactgagaaagagcacatgtaaggaagaatgcatgctttcagtattactccttcatatctgctcctgtttgcttctggagacaagatgcttgatggcataggctcacaatgaagctccagagttaatgaccycttcttaattcagtgttgctttcaaagatgattttctttgctgttactggggcctctcctttgttcctgacagtttgacatgctcatcctcactgtacctcagttacgtcaagcattgttaccacaaataccatcactgtgccatgttaaaattwaaaaaaaaagaaaaaagttaagtgtaaaccttgaaggcttggcagacaatcttgcagaataaatttaaatgtctaggatgagatagagcaattgtagttgacaactggaatttcttctttgtagtgtctctgaatcaacctgat

SEQ ID NO: 13367 - DNA, 600 bp, Chicken  19866894217787_2
ctctatatgtaaaaactgagaaagagcacatgtaaggaagaatgcatgctttcagtattactccttcatatctgctcctgtttgcttctggagacaagatgcttgatggcataggctcacaatgaagctccagagttaatgaccycttcttaattcagtgttgctttcaaagatgattttctttgctgttactggggcctctcctttgttcctgacagtttgacatgctcatcctcactgtacctcagttacgtcaagcattgttaccacaaataccatcactgtgccatgttaaaattwaaaaaaaaagaaaaaagttaagtgtaaaccttgaaggcttggcagacaatcttgcagaataaatttaaatgtctaggatgagatagagcaattgtagttgacaactggaatttcttctttgtagtgtctctgaatcaacctgataaactcggctgtaagctaaggtggcaagaggtatctgagttttataacaaatcttgccatttattgtgattgtaattggragggggtaaacatgacgctaaatctaagaatggcagtgagatttgattattcatattcttcaacagcacactgaca

SEQ ID NO: 13368 - DNA, 441 bp, Chicken  19866894217787_3
atgctcatcctcactgtacctcagttacgtcaagcattgttaccacaaataccatcactgtgccatgttaaaattwaaaaaaaaagaaaaaagttaagtgtaaaccttgaaggcttggcagacaatcttgcagaataaatttaaatgtctaggatgagatagagcaattgtagttgacaactggaatttcttctttgtagtgtctctgaatcaacctgataaactcggctgtaagctaaggtggcaagaggtatctgagttttataacaaatcttgccatttattgtgattgtaattggragggggtaaacatgacgctaaatctaagaatggcagtgagatttgattattcatattcttcaacagcacactgacataccaaaaatatcattctttggtaaccgttacaatgagtaaggagcagcgagtcattgacagcag

SEQ ID NO: 13369 - DNA, 600 bp, Chicken  19866894217795_1
cccagaaaataagaaagctgagttcctggccactctcagcatgaagaactttgatccatttcttcccacttcccaggaaggtgtcctactcttgagactacagttaccctggcatgcaagttcttgacagccttctcccttcattgaacttcgagctttatgcaggaactgttccaaaattcagagcagaaagcctaagcctgatgaatgcacctggcaggttccaaacctctctccacagcctagttctgtttttaataaaatggcttttaacataaagaacataaaaagatatgggaraactcagatgagcccagaacacagggaacrttcccactgctgagctttayacatgctccctcctatgctatttgcagtagagctgcaacaactgcttactgaagaatgttgtggctaacagcaccggtatctggagctttcatcaaactactatgcattaagggaaacataaacaatatattttgaaaagacaatctgttcattaggtatgggttctttcagaaacaatgttctcctatttaatgcaaataaaatcattttctaaagaaggaagcgccatcttttaaaacttggttttat

SEQ ID NO: 13370 - DNA, 596 bp, Chicken  19866894217795_2
cactctcagcatgaagaactttgatccatttcttcccacttcccaggaaggtgtcctactcttgagactacagttaccctggcatgcaagttcttgacagccttctcccttcattgaacttcgagctttatgcaggaactgttccaaaattcagagcagaaagcctaagcctgatgaatgcacctggcaggttccaaacctctctccacagcctagttctgtttttaataaaatggcttttaacataaagaacataaaaagatatgggaraactcagatgagcccagaacacagggaacrttcccactgctgagctttayacatgctccctcctatgctatttgcagtagagctgcaacaactgcttactgaagaatgttgtggctaacagcaccggtatctggagctttcatcaaactactatgcattaagggaaacataaacaatatattttgaaaagacaatctgttcattaggtatgggttctttcagaaacaatgttctcctatttaatgcaaataaaatcattttctaaagaaggaagcgccatcttttaaaacttggttttattggtatatcccatatcccatcattta

SEQ ID NO: 13371 - DNA, 576 bp, Chicken  19866894217795_3
ttgatccatttcttcccacttcccaggaaggtgtcctactcttgagactacagttaccctggcatgcaagttcttgacagccttctcccttcattgaacttcgagctttatgcaggaactgttccaaaattcagagcagaaagcctaagcctgatgaatgcacctggcaggttccaaacctctctccacagcctagttctgtttttaataaaatggcttttaacataaagaacataaaaagatatgggaraactcagatgagcccagaacacagggaacrttcccactgctgagctttayacatgctccctcctatgctatttgcagtagagctgcaacaactgcttactgaagaatgttgtggctaacagcaccggtatctggagctttcatcaaactactatgcattaagggaaacataaacaatatattttgaaaagacaatctgttcattaggtatgggttctttcagaaacaatgttctcctatttaatgcaaataaaatcattttctaaagaaggaagcgccatcttttaaaacttggttttattggtatatcccatatcccatcattta

SEQ ID NO: 13372 - DNA, 600 bp, Chicken  19866894217797_1
tgtttccatcaaaatatggaaaatctataggaaaaatgatatatagataaaaggaagatctttggctgtttcgttgactaccaatgtcactgaagtgaatatggaaaagtcttaagacaaagacttagagctgcttgagaaattcacagtgatatttgcatatgccattttctaatgtcttactgaggagttttagttgttagctttgtgttgtggtagttgtcagaaggaaaataacgagagatgtcaattatcttctttgaagatagaataatttttaatcagtgatcgaaaaaacayattcaatcaatcagttccactttttttgacaacctacattgtataaagttccttcagactagtactggagaagaatatccacagctaatagaaacatttttgcctttattttaaaagtgatgtttaggcaggactgtgaataatttatttagcatcacttgcataaatcttgattggatatttaatcatttctccctgactatcagagtatttctatatagtgttgagactcataaatataattcaaatggcaataagatagagtggttacattggttctttgtaaaatgtgatgttctt

SEQ ID NO: 13373 - DNA, 600 bp, Chicken  19866894217798_1
gatctgacagtggcaacagcactggcacaaggaagagtgtaagaacagggcaaagcatcaatgtgtgcttgcctgacaagtcaaggactgcccgagtctcaggagtttctctgtattttcttgtctttgatggatttaacttacatggacttgtctatttcctatctgaatcacctgttcgtattcatcatgctacctgcaaggttcagcacaggttccccatgctcttgcattacaggagacagtgaatgatcatgtggtgatgtggcactgagggatatggttagtgggcatggagaratgggctcatggttggactagatggtctcttccrctcacttagaaagccagtatttttctgctcaagtttcttctgaagatctgccttgtccaagaaatgacatgctttctatctctaccactctaaacagtgtcccattgtagagaccatgaggtactgggagtgctgcttcctgtgctactgagagaagarctcttgggcaggaaactggacctgtttcaagccccaagaacagcagtgtcagaagaagggttgtggtataagtgtgtcttattttgccagggtggcttttcrtgcta

SEQ ID NO: 13374 - DNA, 600 bp, Chicken  19866894217798_2
gagtgtaagaacagggcaaagcatcaatgtgtgcttgcctgacaagtcaaggactgcccgagtctcaggagtttctctgtattttcttgtctttgatggatttaacttacatggacttgtctatttcctatctgaatcacctgttcgtattcatcatgctacctgcaaggttcagcacaggttccccatgctcttgcattacaggagacagtgaatgatcatgtggtgatgtggcactgagggatatggttagtgggcatggagaratgggctcatggttggactagatggtctcttccrctcacttagaaagccagtatttttctgctcaagtttcttctgaagatctgccttgtccaagaaatgacatgctttctatctctaccactctaaacagtgtcccattgtagagaccatgaggtactgggagtgctgcttcctgtgctactgagagaagarctcttgggcaggaaactggacctgtttcaagccccaagaacagcagtgtcagaagaagggttgtggtataagtgtgtcttattttgccagggtggcttttcrtgctaagctatccttgtggcacccatcctgcctgccaca

SEQ ID NO: 13375 - DNA, 600 bp, Chicken  19866894217798_3
tacctgcaaggttcagcacaggttccccatgctcttgcattacaggagacagtgaatgatcatgtggtgatgtggcactgagggatatggttagtgggcatggagaratgggctcatggttggactagatggtctcttccrctcacttagaaagccagtatttttctgctcaagtttcttctgaagatctgccttgtccaagaaatgacatgctttctatctctaccactctaaacagtgtcccattgtagagaccatgaggtactgggagtgctgcttcctgtgctactgagagaagarctcttgggcaggaaactggacctgtttcaagccccaagaacagcagtgtcagaagaagggttgtggtataagtgtgtcttattttgccagggtggcttttcrtgctaagctatccttgtggcacccatcctgcctgccacagcctcagaattagcttgtcaccacagttcaaggacagcrgccacagctttcacaagctggtcaagtgtccagtcctagacaacatgagccgtgatgcttaaaggacaaattgcccataggatgcaataggattgcatttttcatactgaagacaagaca

SEQ ID NO: 13376 - DNA, 600 bp, Chicken  19866894217798_4
gagaratgggctcatggttggactagatggtctcttccrctcacttagaaagccagtatttttctgctcaagtttcttctgaagatctgccttgtccaagaaatgacatgctttctatctctaccactctaaacagtgtcccattgtagagaccatgaggtactgggagtgctgcttcctgtgctactgagagaagarctcttgggcaggaaactggacctgtttcaagccccaagaacagcagtgtcagaagaagggttgtggtataagtgtgtcttattttgccagggtggcttttcrtgctaagctatccttgtggcacccatcctgcctgccacagcctcagaattagcttgtcaccacagttcaaggacagcrgccacagctttcacaagctggtcaagtgtccagtcctagacaacatgagccgtgatgcttaaaggacaaattgcccataggatgcaataggattgcatttttcatactgaagacaagacagttttctaatgataatagaggtcatattttatggtatgcaaaaaatgctggactgaaggatttacagcccccagaattagatgcctccccatgccaaatctc

SEQ ID NO: 13377 - DNA, 596 bp, Chicken  19866894217798_5
ctgaagatctgccttgtccaagaaatgacatgctttctatctctaccactctaaacagtgtcccattgtagagaccatgaggtactgggagtgctgcttcctgtgctactgagagaagarctcttgggcaggaaactggacctgtttcaagccccaagaacagcagtgtcagaagaagggttgtggtataagtgtgtcttattttgccagggtggcttttcrtgctaagctatccttgtggcacccatcctgcctgccacagcctcagaattagcttgtcaccacagttcaaggacagcrgccacagctttcacaagctggtcaagtgtccagtcctagacaacatgagccgtgatgcttaaaggacaaattgcccataggatgcaataggattgcatttttcatactgaagacaagacagttttctaatgataatagaggtcatattttatggtatgcaaaaaatgctggactgaaggatttacagcccccagaattagatgcctccccatgccaaatctccacagaccagaaaagaagaagaacaagactcctttgtagctggaggggcgacttaaattacttttagtgtctta

SEQ ID NO: 13378 - DNA, 600 bp, Chicken  19866894217802_1
ttcttttaaaagaaaccaattgaaggtatttagatgaaatacaatgcaggttgttgatctgctgacaaatgtcaacagaaaaatcttacagcaacaacagtcttcttatcacagatttctataagattttcagatgcatgattcaaggaagttatagcacaagtctgattttcagtctgcttgtgttataacaagctatacaagaaattattagcaaacatcctcattttgcatttccagaaaaagtgctaacaggtgaaacagttttcaaaacctatgcatgtttgtaaatgcttgacwgcaaggaaacagttctaggagccacacatctgaaaacaagcaacattcaacaagcactaaatgagaggaagaataaaaaaataaattctcaatggaaaaatattagcttgaagtccattgcttttcccttacacaatgtttttgtctgcttttttaagtaatccaaaataatgaaaatatttggcttggagacaagtcatcccttttcttacaggagagtacaaatgcagcttcataaatcttttcttggctttccagtctaatactccggtgcgaggaccaagggtttctctgaagtag

SEQ ID NO: 13379 - DNA, 529 bp, Chicken  19866894217802_2
acacatctgaaaacaagcaacattcaacaagcactaaatgagaggaagaataaaaaaataaattctcaatggaaaaatattagcttgaagtccattgcttttcccttacacaatgtttttgtctgcttttttaagtaatccaaaataatgaaaatatttggcttggagacaagtcatcccttttcttacaggagagtacaaatgcagcttcataaatcttttcttggctttccagtctaatactccggtgcgaggaccaagggtttctctgaagtagcagggactaatttggaggcctgmaagggctcgaagaccttgccagcacaaggctttgagcagcttcaaaaacgcacacacgggcacagtttaaaccgaggtgcgatctctcccaggatcagtctggcttggcagcacaaactgtgcaaaattagtttgacacacaatacgatgactcagagacaatcaggaacaaagataggctaaagcatgtgtattattaaatacctctttagttcagctatacttcaca

SEQ ID NO: 13380 - DNA, 600 bp, Chicken  19866894217803_1
agtctatatgtcttataaacaaaacccagagctcacagttggacctaaaaccacgtggggagctgtaggaagccccttggtctcagcagtgacacagcaggatcctccatgcccagctactcacacgctgccattggggcacaaggatctgtcacagtgactgctctgtgtcctgctcaattcaaacgtttcctgtccttgcaggacactttgacagccctgtaaatctcctcttaacccctctacttccctaaccctcaggaggaaagtaaagggacatgttttttcagtatcctgaaytgttccagtgatacataactcacatttgagagctaacatatggttcaaacaagcatcagattgttacatgcttttcataccagccctggataatccctgggttcccaacatctgtcttgcatttgtgatataattacacatttattttgccttttactagctgagtttcatatattgtttacttgatcctaggaaygattttgctgcagccaagggacatcctactccttatcacaggctttgttggagcttacggatgtctgcagttctcctgctcacagattcaactaattacagaac

SEQ ID NO: 13381 - DNA, 600 bp, Chicken  19866894217803_2
ccttgcaggacactttgacagccctgtaaatctcctcttaacccctctacttccctaaccctcaggaggaaagtaaagggacatgttttttcagtatcctgaaytgttccagtgatacataactcacatttgagagctaacatatggttcaaacaagcatcagattgttacatgcttttcataccagccctggataatccctgggttcccaacatctgtcttgcatttgtgatataattacacatttattttgccttttactagctgagtttcatatattgtttacttgatcctaggaaygattttgctgcagccaagggacatcctactccttatcacaggctttgttggagcttacggatgtctgcagttctcctgctcacagattcaactaattacagaacacaactgctcgtagcatctccctacctaaacaaactcactctctggactccatataagcctagacaaaaaaacaaaaaaacaaacacagaagcctgaacagttgttctataaaaacttttgagaactgcaagagaattaagagtgcagtgggaggtgaggaggagaacaaggcatccgtttttaacgtaccactaa

SEQ ID NO: 13382 - DNA, 600 bp, Chicken  19866894217807_1
gtgtgccagctgctttgctctgaacagggctaattatgctcttgtgagaacagaaaataggcgctatttacgggaagacggtgttggaataggcagtgctgtaatcattggctctgagatgcctttggataacagcaaatgagagcagacgatttacatgtggggtagattggaagtccgttccgaaatacttaaagtgagtgttgctaacagaatgctgcattacaaacttctgtggggatctgctgtgggaaagaatgcttccttttcttgctctgccttattttctttctggtagtstgttatttcagaatggttacttttcatcttcacatagtgctgaaaactcaactttmagtagctacagatgtcacggtgctacaacrtagyacrtagacaacrtaaggtgaattcatagaatggcttgggttggaagggaccccgagggtcatcaagttaatagtgtagttccaactccccctcracaggcagggccaccaacctccagatctggtactagactgggatccccagggccccatccaaactggtcttgaacacctccagggatggggcatccacagcctctctgggcagctg

SEQ ID NO: 13383 - DNA, 600 bp, Chicken  19866894217807_2
ataggcgctatttacgggaagacggtgttggaataggcagtgctgtaatcattggctctgagatgcctttggataacagcaaatgagagcagacgatttacatgtggggtagattggaagtccgttccgaaatacttaaagtgagtgttgctaacagaatgctgcattacaaacttctgtggggatctgctgtgggaaagaatgcttccttttcttgctctgccttattttctttctggtagtstgttatttcagaatggttacttttcatcttcacatagtgctgaaaactcaactttmagtagctacagatgtcacggtgctacaacrtagyacrtagacaacrtaaggtgaattcatagaatggcttgggttggaagggaccccgagggtcatcaagttaatagtgtagttccaactccccctcracaggcagggccaccaacctccagatctggtactagactgggatccccagggccccatccaaactggtcttgaacacctccagggatggggcatccacagcctctctgggcagctgtgccagcacctcaccactctctctgaattgtaaaacagtgtggactgttctttctt

SEQ ID NO: 13384 - DNA, 600 bp, Chicken  19866894217807_3
gaataggcagtgctgtaatcattggctctgagatgcctttggataacagcaaatgagagcagacgatttacatgtggggtagattggaagtccgttccgaaatacttaaagtgagtgttgctaacagaatgctgcattacaaacttctgtggggatctgctgtgggaaagaatgcttccttttcttgctctgccttattttctttctggtagtstgttatttcagaatggttacttttcatcttcacatagtgctgaaaactcaactttmagtagctacagatgtcacggtgctacaacrtagyacrtagacaacrtaaggtgaattcatagaatggcttgggttggaagggaccccgagggtcatcaagttaatagtgtagttccaactccccctcracaggcagggccaccaacctccagatctggtactagactgggatccccagggccccatccaaactggtcttgaacacctccagggatggggcatccacagcctctctgggcagctgtgccagcacctcaccactctctctgaattgtaaaacagtgtggactgttctttcttaaaatgcagttctggtcatctgcatatgtt

SEQ ID NO: 13385 - DNA, 600 bp, Chicken  19866894217807_4
aggcagtgctgtaatcattggctctgagatgcctttggataacagcaaatgagagcagacgatttacatgtggggtagattggaagtccgttccgaaatacttaaagtgagtgttgctaacagaatgctgcattacaaacttctgtggggatctgctgtgggaaagaatgcttccttttcttgctctgccttattttctttctggtagtstgttatttcagaatggttacttttcatcttcacatagtgctgaaaactcaactttmagtagctacagatgtcacggtgctacaacrtagyacrtagacaacrtaaggtgaattcatagaatggcttgggttggaagggaccccgagggtcatcaagttaatagtgtagttccaactccccctcracaggcagggccaccaacctccagatctggtactagactgggatccccagggccccatccaaactggtcttgaacacctccagggatggggcatccacagcctctctgggcagctgtgccagcacctcaccactctctctgaattgtaaaacagtgtggactgttctttcttaaaatgcagttctggtcatctgcatatgtttaar

SEQ ID NO: 13386 - DNA, 600 bp, Chicken  19866894217807_5
cagtgctgtaatcattggctctgagatgcctttggataacagcaaatgagagcagacgatttacatgtggggtagattggaagtccgttccgaaatacttaaagtgagtgttgctaacagaatgctgcattacaaacttctgtggggatctgctgtgggaaagaatgcttccttttcttgctctgccttattttctttctggtagtstgttatttcagaatggttacttttcatcttcacatagtgctgaaaactcaactttmagtagctacagatgtcacggtgctacaacrtagyacrtagacaacrtaaggtgaattcatagaatggcttgggttggaagggaccccgagggtcatcaagttaatagtgtagttccaactccccctcracaggcagggccaccaacctccagatctggtactagactgggatccccagggccccatccaaactggtcttgaacacctccagggatggggcatccacagcctctctgggcagctgtgccagcacctcaccactctctctgaattgtaaaacagtgtggactgttctttcttaaaatgcagttctggtcatctgcatatgtttaarggc

SEQ ID NO: 13387 - DNA, 600 bp, Chicken  19866894217807_6
aatcattggctctgagatgcctttggataacagcaaatgagagcagacgatttacatgtggggtagattggaagtccgttccgaaatacttaaagtgagtgttgctaacagaatgctgcattacaaacttctgtggggatctgctgtgggaaagaatgcttccttttcttgctctgccttattttctttctggtagtstgttatttcagaatggttacttttcatcttcacatagtgctgaaaactcaactttmagtagctacagatgtcacggtgctacaacrtagyacrtagacaacrtaaggtgaattcatagaatggcttgggttggaagggaccccgagggtcatcaagttaatagtgtagttccaactccccctcracaggcagggccaccaacctccagatctggtactagactgggatccccagggccccatccaaactggtcttgaacacctccagggatggggcatccacagcctctctgggcagctgtgccagcacctcaccactctctctgaattgtaaaacagtgtggactgttctttcttaaaatgcagttctggtcatctgcatatgtttaarggcacgcttagg

SEQ ID NO: 13388 - DNA, 600 bp, Chicken  19866894217807_7
gaaatacttaaagtgagtgttgctaacagaatgctgcattacaaacttctgtggggatctgctgtgggaaagaatgcttccttttcttgctctgccttattttctttctggtagtstgttatttcagaatggttacttttcatcttcacatagtgctgaaaactcaactttmagtagctacagatgtcacggtgctacaacrtagyacrtagacaacrtaaggtgaattcatagaatggcttgggttggaagggaccccgagggtcatcaagttaatagtgtagttccaactccccctcracaggcagggccaccaacctccagatctggtactagactgggatccccagggccccatccaaactggtcttgaacacctccagggatggggcatccacagcctctctgggcagctgtgccagcacctcaccactctctctgaattgtaaaacagtgtggactgttctttcttaaaatgcagttctggtcatctgcatatgtttaarggcacgcttaggtttatttataggtatgctaagtagtggttttgctggtgagagtcctttgtgggcttctctttgttgtaatgatggcattctg

SEQ ID NO: 13389 - DNA, 561 bp, Chicken  19866894217807_8
acrtagacaacrtaaggtgaattcatagaatggcttgggttggaagggaccccgagggtcatcaagttaatagtgtagttccaactccccctcracaggcagggccaccaacctccagatctggtactagactgggatccccagggccccatccaaactggtcttgaacacctccagggatggggcatccacagcctctctgggcagctgtgccagcacctcaccactctctctgaattgtaaaacagtgtggactgttctttcttaaaatgcagttctggtcatctgcatatgtttaarggcacgcttaggtttatttataggtatgctaagtagtggttttgctggtgagagtcctttgtgggcttctctttgttgtaatgatggcattctgrtgaggctgctgtttagctccttacttgtgcacttgcttgctgcttgactagtctcatctcctcaaaatgttgctgtgcggtttagtaaatgggatgtttatgggtatttgagtaaatgggctgttcctaggagggaacgtgccacagaccttcctgacgtgtggaa

SEQ ID NO: 13390 - DNA, 466 bp, Chicken  19866894217807_9
caggcagggccaccaacctccagatctggtactagactgggatccccagggccccatccaaactggtcttgaacacctccagggatggggcatccacagcctctctgggcagctgtgccagcacctcaccactctctctgaattgtaaaacagtgtggactgttctttcttaaaatgcagttctggtcatctgcatatgtttaarggcacgcttaggtttatttataggtatgctaagtagtggttttgctggtgagagtcctttgtgggcttctctttgttgtaatgatggcattctgrtgaggctgctgtttagctccttacttgtgcacttgcttgctgcttgactagtctcatctcctcaaaatgttgctgtgcggtttagtaaatgggatgtttatgggtatttgagtaaatgggctgttcctaggagggaacgtgccacagaccttcctgacgtgtggaa

SEQ ID NO: 13391 - DNA, 600 bp, Chicken  19866894217822_1
aaaaaagacaaatgttctgcagcggatggtgctaaaaagagcagctcccagcctgcccacacggccacctggggtggaataatcagcaagaaactcgagatgagctgctaaattagcagagctaataccgaccagaaatcatctgactgggagggccaaagaaccacaaagaaacactggagataggctatacaggagccagggaatggggggcacttggaggttgtttcgacagtgaagtcagtggtgtccatccacagtgggctttgaatcagaagcagagtgacgtgaggtggtacrgtattatctgacacacaaacctgaacctgaaagtctcggttatctctgcagggccctctgcccagacacatctctgcacatcaggacaccccacagagggaaagcacccgacccggagccagcatgtccggatgcttttgtggtataacaggtgaagaggacatcagactgcaaaatccccatgttatgagggacatcttacaggtttgaacatttctgggtcggggaaatatttcggattcctgtgcagccaatagggagacaacatcagcatgtcacctgcagggatggtgaagctct

SEQ ID NO: 13392 - DNA, 600 bp, Chicken  19866894217840_1
ctaatgaatattcgtgtagaacactgggagtagctggaaaaaaaggaaaagcgaaaaaatcttaagaatatacagaacactgtggtttgttaatggtgaaggcatgaaaggactacctttcccacagcaaacaagctgcagtgaataaaaacccatttaataaaatggtatttgactcaacagtccttcagaaagcttacaaaatatcttgcacgtatttttgcttacaactacccactaactgctgacataacccaaggtaagaatcctggaactggaccagagttaacaaacacaaayaaaagcaaagacaaataattatttctatattcagcttcagatttttctttgtttttgaagaaaatattttcctttgaaccccctgacatttgtcctcaatttcttgtctctgataaaagtatatgcagggagtttgcaagcaaccatctgctgggaacaatagctttttatacctcatgctcagaagtgggaaactaagaacactcatttaccctgcctcccagttttgggctgacaaaattatattttttattttatttttattaaatttgttgaccaaatttatttgctgttgttttt

SEQ ID NO: 13393 - DNA, 600 bp, Chicken  19866894217840_2
agcaaagacaaataattatttctatattcagcttcagatttttctttgtttttgaagaaaatattttcctttgaaccccctgacatttgtcctcaatttcttgtctctgataaaagtatatgcagggagtttgcaagcaaccatctgctgggaacaatagctttttatacctcatgctcagaagtgggaaactaagaacactcatttaccctgcctcccagttttgggctgacaaaattatattttttattttatttttattaaatttgttgaccaaatttatttgctgttgtttttaawaaaggaacttaaactagcaagaaaaattagcagacagtccagtgtacttcagccgccaacgtgctgaagactttctagaaaatggatcgyaatayagcactctctaaggagagaaggtctgattcggtcttcaaaaatgaactgctactgaattcagtcaaatttatgtttgcttccaaaacccatgacaacagtggacaaattccaacacaaaagaaagcgaacagcaaaacattgaaacttttcaatctagcactaaagctaaaacacttttcctagcagcaagcataaacttgtagc

SEQ ID NO: 13394 - DNA, 600 bp, Chicken  19866894217840_3
cctcaatttcttgtctctgataaaagtatatgcagggagtttgcaagcaaccatctgctgggaacaatagctttttatacctcatgctcagaagtgggaaactaagaacactcatttaccctgcctcccagttttgggctgacaaaattatattttttattttatttttattaaatttgttgaccaaatttatttgctgttgtttttaawaaaggaacttaaactagcaagaaaaattagcagacagtccagtgtacttcagccgccaacgtgctgaagactttctagaaaatggatcgyaatayagcactctctaaggagagaaggtctgattcggtcttcaaaaatgaactgctactgaattcagtcaaatttatgtttgcttccaaaacccatgacaacagtggacaaattccaacacaaaagaaagcgaacagcaaaacattgaaacttttcaatctagcactaaagctaaaacacttttcctagcagcaagcataaacttgtagcagcctcgggtatccaacagctcaccacaccagaggacaatctctacctcatatgcttgccattaatctccaatacagtggggatgtactg

SEQ ID NO: 13395 - DNA, 600 bp, Chicken  19866894217840_4
atttcttgtctctgataaaagtatatgcagggagtttgcaagcaaccatctgctgggaacaatagctttttatacctcatgctcagaagtgggaaactaagaacactcatttaccctgcctcccagttttgggctgacaaaattatattttttattttatttttattaaatttgttgaccaaatttatttgctgttgtttttaawaaaggaacttaaactagcaagaaaaattagcagacagtccagtgtacttcagccgccaacgtgctgaagactttctagaaaatggatcgyaatayagcactctctaaggagagaaggtctgattcggtcttcaaaaatgaactgctactgaattcagtcaaatttatgtttgcttccaaaacccatgacaacagtggacaaattccaacacaaaagaaagcgaacagcaaaacattgaaacttttcaatctagcactaaagctaaaacacttttcctagcagcaagcataaacttgtagcagcctcgggtatccaacagctcaccacaccagaggacaatctctacctcatatgcttgccattaatctccaatacagtggggatgtactggcctt

SEQ ID NO: 13396 - DNA, 599 bp, Chicken  19866894217850_1
  misc_feature (1)..(36): n is any nucleotide
nnnnnnnnnnnnnnnnnnnnnnnnnnnnnnnnnnnncttgaagcagctgttcttaggcttttcaaaccactgttcacattcagccagctcagcacactggccagacacatggaattacatggggccatgaccacgagcaataaattgaaagcttctggtgcaaagcaagcgaaggctggaaggtggcaagcacaagttctccttgctggctggcatgtctgccacaatgcaagaaatgagctggtgtcaaagagaagaaaaccagggtaactcatctaggctaactatcatcagcaccargtccaatggaacgtttgaaaaagaaaagctttatctctctcttccctgtagggggagaatgctttgctgcaggtactggtttgggaatgacaacaagcaaaccctgcaactgtcacacgttctcgtgctcaacttcataaggtttcagagaaacagtgggggaaggattgaacccccccagaattcaagaaagataaaaaaatgaaggaacggaatatcagtacactgagcacatagacaggaaaattctctctcactaagaactgtaagtttaaaattcattcatttgacacatcaaa

SEQ ID NO: 13397 - DNA, 600 bp, Chicken  19866894217850_2
cgcatcctctatccccctcctggagtgacacagtttagcacacaggtggacaaggaaaccagctcatgctgctgatgccttctatccttcagagcataggacactataccccaaaacttgtccctgcaagcagcacgacaaagaggaaatgccaccataccttgacgttcaggtttgactgacagtctcagtcagaaggcagttgttttacagacagctcagtttagcctcaaataatctaatattcaacccagtctgttctcccagtttggagttttggttttttttaagcaccctgcrgggatttggctgaaataattacctctgtggtgtatgtcaagctgtcagtttgctggcaccaaagtgttaattacattcttcctcgggaacacggaaaaggatttgtaacgctaggccacaaagtaaatacctcttgtgaatgtaaagggaggtaaaacaaagctgatccttgggctccaccagcttaacattcatgttagattgtcaaacgtgcctccgatgtgctgaaacatgctgtagtccaccaaacawtttagaataataacttaagattgcaccaatacctgtcctaggattctc

SEQ ID NO: 13398 - DNA, 485 bp, Chicken  19866894217850_3
agtctgttctcccagtttggagttttggttttttttaagcaccctgcrgggatttggctgaaataattacctctgtggtgtatgtcaagctgtcagtttgctggcaccaaagtgttaattacattcttcctcgggaacacggaaaaggatttgtaacgctaggccacaaagtaaatacctcttgtgaatgtaaagggaggtaaaacaaagctgatccttgggctccaccagcttaacattcatgttagattgtcaaacgtgcctccgatgtgctgaaacatgctgtagtccaccaaacawtttagaataataacttaagattgcaccaatacctgtcctaggattctctttccatcacacaagcacaaccagtcttgcaatcacttacttagtaagaaacaaggaaactcagctcatctgaggctgatacaccactgctacaccctgcacatttagatctagagaggatgtaaaaggacataaaa

SEQ ID NO: 13399 - DNA, 600 bp, Chicken  19866894217854_1
atagatgttagaagaaatttcatttgctcagagggtggtgaggcactggaacatgttgcccagagaggctgtgaatgcctcatccctggaggagttcaaggccaggctggatgtggctctgggctgcctggtctggtgggtggcatctgcatatggaaggggagctgcagttccccttgaaacttgacctttaaggtccccttcaactcaggccatttgacgattctgtgaacgattaaaatgaatatatttctcagaaaattaacattttataaaaggaagaagtgaaataaaacaatrttattattaaaactctacaggcargttctcagctgttcatgtttttgaagacaagatggtagcttctcatgttttccatgttggaaatgttctgaattaagaacatatttgaaaaaaatctattaattaaaatcacttgttctttcatgaatggtaactacttcaatagctgttyttaattcttctagttcattactttgaagataaatatcctactgtatcttgcataggaattactgatgtcaaactaatgacaaagttttgctttatttagagaaataaaattatttcagaatttct

SEQ ID NO: 13400 - DNA, 593 bp, Chicken  19866894217854_2
tgctcagagggtggtgaggcactggaacatgttgcccagagaggctgtgaatgcctcatccctggaggagttcaaggccaggctggatgtggctctgggctgcctggtctggtgggtggcatctgcatatggaaggggagctgcagttccccttgaaacttgacctttaaggtccccttcaactcaggccatttgacgattctgtgaacgattaaaatgaatatatttctcagaaaattaacattttataaaaggaagaagtgaaataaaacaatrttattattaaaactctacaggcargttctcagctgttcatgtttttgaagacaagatggtagcttctcatgttttccatgttggaaatgttctgaattaagaacatatttgaaaaaaatctattaattaaaatcacttgttctttcatgaatggtaactacttcaatagctgttyttaattcttctagttcattactttgaagataaatatcctactgtatcttgcataggaattactgatgtcaaactaatgacaaagttttgctttatttagagaaataaaattatttcagaatttctaacaccgttaacttgta

SEQ ID NO: 13401 - DNA, 442 bp, Chicken  19866894217854_3
cttgaaacttgacctttaaggtccccttcaactcaggccatttgacgattctgtgaacgattaaaatgaatatatttctcagaaaattaacattttataaaaggaagaagtgaaataaaacaatrttattattaaaactctacaggcargttctcagctgttcatgtttttgaagacaagatggtagcttctcatgttttccatgttggaaatgttctgaattaagaacatatttgaaaaaaatctattaattaaaatcacttgttctttcatgaatggtaactacttcaatagctgttyttaattcttctagttcattactttgaagataaatatcctactgtatcttgcataggaattactgatgtcaaactaatgacaaagttttgctttatttagagaaataaaattatttcagaatttctaacaccgttaacttgta

SEQ ID NO: 13402 - DNA, 600 bp, Chicken  19866894217855_1
aacagtactcaaatatgtatcacactagtgtataagcatagtgagacctataaaacttacgaatgatggttcaatggcagttaaataacaatcagaggaaggggatgtgacaggcaggaaagtttaagctcattttagatatgaggtatattaatgtttatttcaaacaccgatctgaatatattgaagagtaatattcaacaaatggaagcccatggagaagctgtactctgtctttcttactttaagatgagaggcaaatctaactgagactgcatctcaaaactaatttacctcttmttgctgtttctccttagctcttaccttccagattcaaatgtgaaccatgttgagtcacgtccgtatctcctcaaagagctcagaggccacatgaccagcttgaccttggcattgtggatgtcccagagatagatgttttcatgtgtgatttgcattgtacattccccatagatatctaaatttggtgtaggcataagatatacattgaatctctctggaaaacaaaagcagaataagtcatagccagttaaagcaaggcttagtattatttttttttcaataaaataaagtctagttaca

SEQ ID NO: 13403 - DNA, 600 bp, Chicken  19866894217856_1
ccagacctgcagtattttggggagtgggggggaggactggggagaatgggaagagcagaccgagctcggcggtctctgacctcgttttacttccccttttctccttccagttctccttgagtcgcttaacaagagcgagccatcatccaacgggcagtcccaggcccgggagtccccaaaagcccagttcaggaaggcaggcggggacttcccatcagccaatggggaggccggtggggaggcccccaagggctacacgcaggaccaggtggatgccgtgaagaggtgcgtgtgctgctycccaagcttacagccagtgtttattacgtgatacctgtctgtttctcaccatgtttttaagatgtaaggatggagygtggaggggaagggtacatagaataggttggggttggatagctattcatattctgtgctatgtgagagatttggtcagctctgtaccacgtggagtggtctttgttcagtgagatgttaaaaggggacctaggcggccctgcgaggcagctgccaagtttgagactttcccctcaaggcacrtacaaaggctagagctgtacgcaggcaggyattttcctgctg

SEQ ID NO: 13404 - DNA, 600 bp, Chicken  19866894217856_2
tgacctcgttttacttccccttttctccttccagttctccttgagtcgcttaacaagagcgagccatcatccaacgggcagtcccaggcccgggagtccccaaaagcccagttcaggaaggcaggcggggacttcccatcagccaatggggaggccggtggggaggcccccaagggctacacgcaggaccaggtggatgccgtgaagaggtgcgtgtgctgctycccaagcttacagccagtgtttattacgtgatacctgtctgtttctcaccatgtttttaagatgtaaggatggagygtggaggggaagggtacatagaataggttggggttggatagctattcatattctgtgctatgtgagagatttggtcagctctgtaccacgtggagtggtctttgttcagtgagatgttaaaaggggacctaggcggccctgcgaggcagctgccaagtttgagactttcccctcaaggcacrtacaaaggctagagctgtacgcaggcaggyattttcctgctgatgtgcaaagggcattttgagtacattcgttccgtagacttcatgtgaatgtttcccttaggtgctgttcagtggt

SEQ ID NO: 13405 - DNA, 595 bp, Chicken  19866894217856_3
gcaggaccaggtggatgccgtgaagaggtgcgtgtgctgctycccaagcttacagccagtgtttattacgtgatacctgtctgtttctcaccatgtttttaagatgtaaggatggagygtggaggggaagggtacatagaataggttggggttggatagctattcatattctgtgctatgtgagagatttggtcagctctgtaccacgtggagtggtctttgttcagtgagatgttaaaaggggacctaggcggccctgcgaggcagctgccaagtttgagactttcccctcaaggcacrtacaaaggctagagctgtacgcaggcaggyattttcctgctgatgtgcaaagggcattttgagtacattcgttccgtagacttcatgtgaatgtttcccttaggtgctgttcagtggtcctgtgcaaaaccccatatggcgctgaggtgtatcgggggaagccatggctcacagcttgcagcaggaggcccttgtgttctgagccttgccctgtagcaagtgctggaggtgtgggtgtccctctcacccgctgaggtccctctaatgcctaataaagtagaaatctacatcagga

SEQ ID NO: 13406 - DNA, 565 bp, Chicken  19866894217856_4
cgtgtgctgctycccaagcttacagccagtgtttattacgtgatacctgtctgtttctcaccatgtttttaagatgtaaggatggagygtggaggggaagggtacatagaataggttggggttggatagctattcatattctgtgctatgtgagagatttggtcagctctgtaccacgtggagtggtctttgttcagtgagatgttaaaaggggacctaggcggccctgcgaggcagctgccaagtttgagactttcccctcaaggcacrtacaaaggctagagctgtacgcaggcaggyattttcctgctgatgtgcaaagggcattttgagtacattcgttccgtagacttcatgtgaatgtttcccttaggtgctgttcagtggtcctgtgcaaaaccccatatggcgctgaggtgtatcgggggaagccatggctcacagcttgcagcaggaggcccttgtgttctgagccttgccctgtagcaagtgctggaggtgtgggtgtccctctcacccgctgaggtccctctaatgcctaataaagtagaaatctacatcagga

SEQ ID NO: 13407 - DNA, 599 bp, Chicken  19866894217869_1
  misc_feature (1)..(5): n is any nucleotide
nnnnntaagcaaacgtcattcctcctatttagcaattagcctgtgaaagcgattaatctgatgctagtaaaccctgacagggatgaggaaagcctgcccattggcttcaacccgcggtatgacgaatgctagtgcaaacgcctcaaaatcgattcaaatccacagggctgagttcaccccccatggctgctaaacacctgtgatgtttattggaagagtacaagtaacgatctcactgcttcttggcagattacattctgcctccatgaactcacctgtacggtttcaaatggattttaygttattcatttcctatttcagatgtccattattagtaaagatgacattttggtcaggagagaaacgatttccatgcaatctgcaaatcaatttgtaaggatttcagcaaagcaattaggrcaattcctagactataarcactatgtaatgtgagatttcatcttgactgatagaattgccaggakttccatccaaaaatatagctgcttttcccccctctccatccaatatttttaggagttctatccgaaagctttattcggtgtatttattactggctcttgggcaactttcccaat

SEQ ID NO: 13408 - DNA, 600 bp, Chicken  19866894217869_2
gacgaatgctagtgcaaacgcctcaaaatcgattcaaatccacagggctgagttcaccccccatggctgctaaacacctgtgatgtttattggaagagtacaagtaacgatctcactgcttcttggcagattacattctgcctccatgaactcacctgtacggtttcaaatggattttaygttattcatttcctatttcagatgtccattattagtaaagatgacattttggtcaggagagaaacgatttccatgcaatctgcaaatcaatttgtaaggatttcagcaaagcaattaggrcaattcctagactataarcactatgtaatgtgagatttcatcttgactgatagaattgccaggakttccatccaaaaatatagctgcttttcccccctctccatccaatatttttaggagttctatccgaaagctttattcggtgtatttattactggctcttgggcaactttcccaattttaaaagtactttaatcctgctgttgacccactgagcagaccatatcaacaaaaataaacacaaatccagctgaacctgtgccactgaaatgtacacagtgtggctggctggggaacaca

SEQ ID NO: 13409 - DNA, 600 bp, Chicken  19866894217869_3
cgcctcaaaatcgattcaaatccacagggctgagttcaccccccatggctgctaaacacctgtgatgtttattggaagagtacaagtaacgatctcactgcttcttggcagattacattctgcctccatgaactcacctgtacggtttcaaatggattttaygttattcatttcctatttcagatgtccattattagtaaagatgacattttggtcaggagagaaacgatttccatgcaatctgcaaatcaatttgtaaggatttcagcaaagcaattaggrcaattcctagactataarcactatgtaatgtgagatttcatcttgactgatagaattgccaggakttccatccaaaaatatagctgcttttcccccctctccatccaatatttttaggagttctatccgaaagctttattcggtgtatttattactggctcttgggcaactttcccaattttaaaagtactttaatcctgctgttgacccactgagcagaccatatcaacaaaaataaacacaaatccagctgaacctgtgccactgaaatgtacacagtgtggctggctggggaacacagaactgaccaaagctgaa

SEQ ID NO: 13410 - DNA, 600 bp, Chicken  19866894217869_4
gctgctaaacacctgtgatgtttattggaagagtacaagtaacgatctcactgcttcttggcagattacattctgcctccatgaactcacctgtacggtttcaaatggattttaygttattcatttcctatttcagatgtccattattagtaaagatgacattttggtcaggagagaaacgatttccatgcaatctgcaaatcaatttgtaaggatttcagcaaagcaattaggrcaattcctagactataarcactatgtaatgtgagatttcatcttgactgatagaattgccaggakttccatccaaaaatatagctgcttttcccccctctccatccaatatttttaggagttctatccgaaagctttattcggtgtatttattactggctcttgggcaactttcccaattttaaaagtactttaatcctgctgttgacccactgagcagaccatatcaacaaaaataaacacaaatccagctgaacctgtgccactgaaatgtacacagtgtggctggctggggaacacagaactgaccaaagctgaatttgggtacaccatgtttgggtctcaatgtttcctagcaagacagga

SEQ ID NO: 13411 - DNA, 600 bp, Chicken  19866894217873_1
atcatcattctgtcagcatgcgaagggataggatttcacgaggtcacacaagaacttcagtcaggaaaaaaaaaaaaccagcctaagcaagaaaagcagggcaggaaggtgctgggacttttgacagcatttctgctttgacagggaaaccccctttttatttctttgttatagtacatcattagcacaataacacaaactttgcagttactgtcattgtctgctgtagaggatgtcttcagcagggatactttgttagctgtgaaagacgactccagatgacatgtttgcacacccatytgccctacatgcccgttcccttctgctagatctgcagctgacctgctctcgaggacagggcctaatgtggcacgaatgcatcacttcagtctgctactattatgtgtatgtatggtgcacatgcaagtatctatatatgatgagggcacaggaatcctggcttccgtgtgcatagtaaagtgagtatgggcacagagtgagcttttgctctatgctagttatagatttattagcacagtgattgttcatgagaaactgaagtaagggatggatgatgtgatgttgtagttcttttcaact

SEQ ID NO: 13412 - DNA, 554 bp, Chicken  19866894217893_1
cactaaccttgatttaatagctaacggcagacctgaggagatgcgtaatggcagatctctgtaaagccaatccatgtctatagcatgtctgacagggtacgtaaccctttaattctgcacgtagggatcagattgctaggactctgcctctaagacatcattacaacctgcacgttcacacctcacacgggcttcaggagacctcgctgccttctcagctatgctcagccagagtagcacttgcaagacagagaacatctgcttctcagatactctgcttattacagctgacaaacacaytgcactggcccaggtgtcccacacagcccaggagcaacattgtgatgtctccttccctccgaacatgcacagagcaggaaactctaccttacagacaggccctggcagggtgtgatgggcggggagagcttggcagcttctcctgctgacacgcggccctgctgcgtgcagcactcttcatctgcgtcaaaggaagggctccgacgcaacctgaaaagtcacagaatacagaacatcccgagttggaagggatc

SEQ ID NO: 13413 - DNA, 599 bp, Chicken  19866894217895_1
  misc_feature (1)..(165): n is any nucleotide
nnnnnnnnnnnnnnnnnnnnnnnnnnnnnnnnnnnnnnnnnnnnnnnnnnnnnnnnnnnnnnnnnnnnnnnnnnnnnnnnnnnnnnnnnnnnnnnnnnnnnnnnnnnnnnnnnnnnnnnnnnnnnnnnnnnnnnnnnnnnnnnnnnnnnnnnnnnnnnnnnnnnnatgctctttgctactacatttataaatttgtgattcagctccaagagcagagaaaaagaagaaaaatggaatccttcaagccatatttagtaaaagcctcttctcttgctacagcttcttggaaagtaaattttygagagggacaggtcaaaaaggcagggaaattccagctaagaaaggaagctgggagcataaactccaagaaagccttcagcaatggggttctgaaggaacacaggaatggtgtgaagttatgctcaagtgagcagattatcccctcaggagtgatggctgggagacagaccaaaagaaacgtgcagcagctgagagctactctgctaacacatttccttacktttacttcatataactctgtaactaaggacaaataactatttcttttccttatttatttatttatttattttttccct

SEQ ID NO: 13414 - DNA, 600 bp, Chicken  19866894217895_2
agaagaaaaatggaatccttcaagccatatttagtaaaagcctcttctcttgctacagcttcttggaaagtaaattttygagagggacaggtcaaaaaggcagggaaattccagctaagaaaggaagctgggagcataaactccaagaaagccttcagcaatggggttctgaaggaacacaggaatggtgtgaagttatgctcaagtgagcagattatcccctcaggagtgatggctgggagacagaccaaaagaaacgtgcagcagctgagagctactctgctaacacatttccttacktttacttcatataactctgtaactaaggacaaataactatttcttttccttatttatttatttatttattttttccctaatggcaattgcagaagccttaaggggacttagaggtcttcagatgactggaggactcctgctgtgtcctctgagacgcaaataatttatttacagatacacaggacacaactcacgcagtcacttgccacttagtatcatctattgatttgttctaaacctctttatactgacccttcaatctgctttacccacaggacaggtaagaacggtgaacttttc

SEQ ID NO: 13415 - DNA, 600 bp, Chicken  19866894217896_1
ccagttagtgtatcgggtggactttgcatccagagaggtgaaacatggtcgtgtcacctctcctgttgcctatataccaacaaagctgtagtacatgtgacttcaggactctgtgctttgtacaatctggaacatctccacagctggaaaagcagaatgtgcttggtttaccaggcacacttaatatgatttcaccttgggatctctctatttctttgttctctcttttttttttttcttccttccatttaatgggaagtgagaccctgagtgaataataggatcttgcaaggtgatttsctgggtgtttagagcacaacagccaaagtaggatgcaaggagtaggctctgctccgtgctgcagactgtcctggccatgagcaaccatcttcagtgttaaaatgtatgtagatagttaataaaaaagcatgcaagacattctctgtccaattccctctgaggagcttgtcagtcaacctgttgctattttccaaagtgaaataaggtccccatcaaagtgtgcattcaaacaccctgccccattagacactgcttgaagatgctcagggaaaacacacacacatacactactctagaact

SEQ ID NO: 13416 - DNA, 600 bp, Chicken  19866894217896_2
gtgaataataggatcttgcaaggtgatttsctgggtgtttagagcacaacagccaaagtaggatgcaaggagtaggctctgctccgtgctgcagactgtcctggccatgagcaaccatcttcagtgttaaaatgtatgtagatagttaataaaaaagcatgcaagacattctctgtccaattccctctgaggagcttgtcagtcaacctgttgctattttccaaagtgaaataaggtccccatcaaagtgtgcattcaaacaccctgccccattagacactgcttgaagatgctcagggsaaacacacacacatacactactctagaactgtctgatggagtgttaacttcaatgaacaatttaccggagtaaaatttgtgggggaatcgtgtatttttattcgcatctaataagcctgctacactcagtcttgctagttggccagcacatagaggaagacttgttctaccaaaaatattatctgtggtagtgactcggacaaccctgactagttccttcttccattctttcatactgcctgtcctactaaattaattaaaaaattggggagccctccagtggctaaaattatagtgcct

SEQ ID NO: 13417 - DNA, 600 bp, Chicken  19866894217896_3
tgaataataggatcttgcaaggtgatttsctgggtgtttagagcacaacagccaaagtaggatgcaaggagtaggctctgctccgtgctgcagactgtcctggccatgagcaaccatcttcagtgttaaaatgtatgtagatagttaataaaaaagcatgcaagacattctctgtccaattccctctgaggagcttgtcagtcaacctgttgctattttccaaagtgaaataaggtccccatcaaagtgtgcattcaaacaccctgccccattagacactgcttgaagatgctcagggasaacacacacacatacactactctagaactgtctgatggagtgttaacttcaatgaacaatttaccggagtaaaatttgtgggggaatcgtgtatttttattcgcatctaataagcctgctacactcagtcttgctagttggccagcacatagaggaagacttgttctaccaaaaatattatctgtggtagtgactcggacaaccctgactagttccttcttccattctttcatactgcctgtcctactaaattaattaaaaaattggggagccctccagtggctaaaattatagtgccta

SEQ ID NO: 13418 - DNA, 599 bp, Chicken  19866894217898_1
  misc_feature (1)..(156): n is any nucleotide
nnnnnnnnnnnnnnnnnnnnnnnnnnnnnnnnnnnnnnnnnnnnnnnnnnnnnnnnnnnnnnnnnnnnnnnnnnnnnnnnnnnnnnnnnnnnnnnnnnnnnnnnnnnnnnnnnnnnnnnnnnnnnnnnnnnnnnnnnnnnnnnnnnnnnnnnnnnntctctcttctgaggaaacccagagatccatcaaagaaaaaaaagaagaagctggatgaccaatgtgacgacgaagccttcgagctggagggcccactgatcacaccagggtcgggtgagcccaagcacacgttgcagggatgcrcctacggggagcagggacgaagaggcagctagataataaaatgggagcatatatagggaaaaatgtacagtggtattgatctgacctaactccttaagggctgtgcaagacatgggccccacatgatttccatgagctccctacgctggtgagcggtcacgccrgcacagatcagtgcctggggctgaggtgtgtagggaagcagaacaaggctgggctttataaaataaaaagagaaaccaagcgtgaccacatcaacacatagattgtgttactgagatgttttctttccctattaa

SEQ ID NO: 13419 - DNA, 600 bp, Chicken  19866894217898_2
ctgaggaaacccagagatccatcaaagaaaaaaaagaagaagctggatgaccaatgtgacgacgaagccttcgagctggagggcccactgatcacaccagggtcgggtgagcccaagcacacgttgcagggatgcrcctacggggagcagggacgaagaggcagctagataataaaatgggagcatatatagggaaaaatgtacagtggtattgatctgacctaactccttaagggctgtgcaagacatgggccccacatgatttccatgagctccctacgctggtgagcggtcacgccrgcacagatcagtgcctggggctgaggtgtgtagggaagcagaacaaggctgggctttataaaataaaaagagaaaccaagcgtgaccacatcaacacatagattgtgttactgagatgttttctttccctattaagaaagaagctaaatggaaaatcactcctaacttcacattccaggtgtgttttaggcggtaccgctgctctaaaccgtacttgtagcccagcagaagcagccctgttattaattgcgttattgctcccttgtgcaaagggtgtagttatggattggaatggtacaa

SEQ ID NO: 13420 - DNA, 600 bp, Chicken  19866894217900_1
gaagatgtaaaagggaggtaggagggtgttatccttctcagagggatgtgagaaaggcaaatagcttatctgggaatgacttctgcctataggacagaaagaaatcagctttgttttaggtatttttgattttactgagtgtacaaaggagcaattaacaacaagggtttgttttggctctacttgtagtttgaaattgattaggatgtacagggggcaagaaacacagagaaggagctacgttacatagagaagtgctgtcttatattcctgtttctgtaacacaaatgccagaaagtytcttgttttgtgcaatctgaggaagtttcctcctccagtcagatatatgcagcatccctgagtcagagtgcattcttgtgctggtcctccccataatttgttgttttgctgtactgagggaaaygtctcagttcatctacgctgagggtggtttaatcatctataatgtttcaaagtaaatgaatcaacttaatccaaatgataatcctgcgtcagttggatttagttattttacccatatgttttaagtctgtatcctttacatattcataatacataacgtaatcaattaatataatt

SEQ ID NO: 13421 - DNA, 600 bp, Chicken  19866894217900_2
tttgattttactgagtgtacaaaggagcaattaacaacaagggtttgttttggctctacttgtagtttgaaattgattaggatgtacagggggcaagaaacacagagaaggagctacgttacatagagaagtgctgtcttatattcctgtttctgtaacacaaatgccagaaagtytcttgttttgtgcaatctgaggaagtttcctcctccagtcagatatatgcagcatccctgagtcagagtgcattcttgtgctggtcctccccataatttgttgttttgctgtactgagggaaaygtctcagttcatctacgctgagggtggtttaatcatctataatgtttcaaagtaaatgaatcaacttaatccaaatgataatcctgcgtcagttggatttagttattttacccatatgttttaagtctgtatcctttacatattcataatacataacgtaatcaattaatataattccattgggcttgagtggttttataaatctgtttttgtaaatggatatttataataccaggtgcatctaactgggaaatggaagaaaaaagtgtatcctaggaagaatacaaactttgttttatt

SEQ ID NO: 13422 - DNA, 600 bp, Chicken  19866894217901_1
agaggaggcctctgtgcttctgatctcctttagcctgtgtgtgctgggcatcttggcacacctttgagtcggttgaatgtacttctaaaaacatgaaaaattaataacaaaatttagtttaaaagacttcagaaaaactttgagtaatatatgtttagggtgtatgtcaaattaagactgtttgagctgtcatgagcacagtaatgctcagatttgggatatttggttgggagatctgacttgccctaacatcaaaccacacttcataaccttgatacagaagggaagatgaaaatattmttttatgtacttatctgggttgagaacagaaatggaaaagcaaagttataatgcctattgaccttacaattcayggaatgtgttgtggtygargtgacactttctgtttgtgaagaggtgcatatctttccgtacatgactcaaatgttttaggtgaatttcagcatgcaaagtttgggaggctgattcctgatgtgtaaaacaaaggttctgttaaaaggtattctgattaaaatgtaatcaggagttctttgactgtaactaatggccaagtacaattcagcacaaaaaggccctttt

SEQ ID NO: 13423 - DNA, 600 bp, Chicken  19866894217901_2
gaatgtacttctaaaaacatgaaaaattaataacaaaatttagtttaaaagacttcagaaaaactttgagtaatatatgtttagggtgtatgtcaaattaagactgtttgagctgtcatgagcacagtaatgctcagatttgggatatttggttgggagatctgacttgccctaacatcaaaccacacttcataaccttgatacagaagggaagatgaaaatattmttttatgtacttatctgggttgagaacagaaatggaaaagcaaagttataatgcctattgaccttacaattcayggaatgtgttgtggtygargtgacactttctgtttgtgaagaggtgcatatctttccgtacatgactcaaatgttttaggtgaatttcagcatgcaaagtttgggaggctgattcctgatgtgtaaaacaaaggttctgttaaaaggtattctgattaaaatgtaatcaggagttctttgactgtaactaatggccaagtacaattcagcacaaaaaggcccttttgcagtctggagttctcccccatttgtaaaatctgtgactgacaagagatgtcagagttcatctaagtgaaatgc

SEQ ID NO: 13424 - DNA, 600 bp, Chicken  19866894217901_3
acatgaaaaattaataacaaaatttagtttaaaagacttcagaaaaactttgagtaatatatgtttagggtgtatgtcaaattaagactgtttgagctgtcatgagcacagtaatgctcagatttgggatatttggttgggagatctgacttgccctaacatcaaaccacacttcataaccttgatacagaagggaagatgaaaatattmttttatgtacttatctgggttgagaacagaaatggaaaagcaaagttataatgcctattgaccttacaattcayggaatgtgttgtggtygargtgacactttctgtttgtgaagaggtgcatatctttccgtacatgactcaaatgttttaggtgaatttcagcatgcaaagtttgggaggctgattcctgatgtgtaaaacaaaggttctgttaaaaggtattctgattaaaatgtaatcaggagttctttgactgtaactaatggccaagtacaattcagcacaaaaaggcccttttgcagtctggagttctcccccatttgtaaaatctgtgactgacaagagatgtcagagttcatctaagtgaaatgctctcagttgtgttgaa

SEQ ID NO: 13425 - DNA, 600 bp, Chicken  19866894217901_4
tgaaaaattaataacaaaatttagtttaaaagacttcagaaaaactttgagtaatatatgtttagggtgtatgtcaaattaagactgtttgagctgtcatgagcacagtaatgctcagatttgggatatttggttgggagatctgacttgccctaacatcaaaccacacttcataaccttgatacagaagggaagatgaaaatattmttttatgtacttatctgggttgagaacagaaatggaaaagcaaagttataatgcctattgaccttacaattcayggaatgtgttgtggtygargtgacactttctgtttgtgaagaggtgcatatctttccgtacatgactcaaatgttttaggtgaatttcagcatgcaaagtttgggaggctgattcctgatgtgtaaaacaaaggttctgttaaaaggtattctgattaaaatgtaatcaggagttctttgactgtaactaatggccaagtacaattcagcacaaaaaggcccttttgcagtctggagttctcccccatttgtaaaatctgtgactgacaagagatgtcagagttcatctaagtgaaatgctctcagttgtgttgaactc

SEQ ID NO: 13426 - DNA, 600 bp, Chicken  19866894217910_1
aaatgtaataggggtgaatcattcagcagcgtggaaacgctgcccaaagacccacgagcctgataaagccttcttcacctctgcaaacaagcccttggttggcttgtttcttcctgcacatacccctggctattgcctgccgtggtagcgattgtggcggtctgcccactaggctcaccagcagcagcgtggggaatgtggggagaatgggagagaacaggatgctttgccctcccgtacacccgtgtaattttgtgtgtatacatatctgcttttagagtttgctcacacagggaggaygtggcgttctgttgagatttagtcacaagctttggctgctggaaggatcaagtgggagcagatttccatcaaacagtgcatgaggctgattggacgctgggctgatgtgggaggatgggtgagtgggggatttcaatgttttcctccatggaacgggtcaatattcctcccctctcccctgggtagctaataatgtagtggttggctcttcttcgcccagcagggctattgtcatccttgctaaagtttgacattttacactttaactaagcacagccttgggcaagaagctgctaagag

SEQ ID NO: 13427 - DNA, 600 bp, Chicken  19866894217910_2
cccctgggtagctaataatgtagtggttggctcttcttcgcccagcagggctattgtcatccttgctaaagtttgacattttacactttaactaagcacagccttgggcaagaagctgctaagagacacatttccttattaaaagatgtcaccaaaagagcaagtcaacaaatatgccactgcccagaaacagccggggagcagggggaggcacacaggggccatggggatgggggcactccttgtgaccatgcacgtggcacctgtggcactggggtctgggggcacgttgtggccatygtcccccagctgtggggtgtttgcgtgtctgtgtgggagatttctgaacccgaaaacattttcaaggatttttctcaatactgtgcttgtgaaatgccagacacagagctgcaggcaactgctctttttttctttctattttttctttttaaatctgagcgtgcctggtaatgtgccttttccctatgctgctgacaatggttttttgctcccctttatggagtttaagtataatacacttaatagcagttagtgatgtcagtgctctttggtatagcaagtctctggtgtgagataatc

SEQ ID NO: 13428 - DNA, 600 bp, Chicken  19866894217910_3
ttctcaatactgtgcttgtgaaatgccagacacagagctgcaggcaactgctctttttttctttctattttttctttttaaatctgagcgtgcctggtaatgtgccttttccctatgctgctgacaatggttttttgctcccctttatggagtttaagtataatacacttaatagcagttagtgatgtcagtgctctttggtatagcaagtctctggtgtgagataatcttagttaatgaccagcataaaacagatagaggtcagtgttttagcgtggctataaatcccacatttaccaygacagagttggaaggaggcgatcccattaacctttctgctgtgttggtagggcgcgtgtcctgccatggccatctgggctggaggagctccttgggctcatgttcacctgtggtcaccctgctctcacccaacctaagcatcayagaggaaccatgttggccccagtgccccagggcagctccaagccatcactggaccaacaaccactgtggattttggcagtaattctgccatggtggactgggctcacgaytgtattgcrtagcgatataggcaatgtggagagggaaaaaataaga

SEQ ID NO: 13429 - DNA, 600 bp, Chicken  19866894217910_4
ttatggagtttaagtataatacacttaatagcagttagtgatgtcagtgctctttggtatagcaagtctctggtgtgagataatcttagttaatgaccagcataaaacagatagaggtcagtgttttagcgtggctataaatcccacatttaccaygacagagttggaaggaggcgatcccattaacctttctgctgtgttggtagggcgcgtgtcctgccatggccatctgggctggaggagctccttgggctcatgttcacctgtggtcaccctgctctcacccaacctaagcatcayagaggaaccatgttggccccagtgccccagggcagctccaagccatcactggaccaacaaccactgtggattttggcagtaattctgccatggtggactgggctcacgaytgtattgcrtagcgatataggcaatgtggagagggaaaaaataagatgaagtcaatgaagcattatggttaagaatcwaatggcatacaaggaaggaaataaaacatttaaagctcctataggaacattaaattggtgagggctgtgcttaggtagtatcagccctggcttttccctgggcatccatgtg

SEQ ID NO: 13430 - DNA, 544 bp, Chicken  19866894217910_5
atagaggtcagtgttttagcgtggctataaatcccacatttaccaygacagagttggaaggaggcgatcccattaacctttctgctgtgttggtagggcgcgtgtcctgccatggccatctgggctggaggagctccttgggctcatgttcacctgtggtcaccctgctctcacccaacctaagcatcayagaggaaccatgttggccccagtgccccagggcagctccaagccatcactggaccaacaaccactgtggattttggcagtaattctgccatggtggactgggctcacgaytgtattgcrtagcgatataggcaatgtggagagggaaaaaataagatgaagtcaatgaagcattatggttaagaatcwaatggcatacaaggaaggaaataaaacatttaaagctcctataggaacattaaattggtgagggctgtgcttaggtagtatcagccctggcttttccctgggcatccatgtgtctcagcttcagctgtgcagtggggcagcagaggggctcacaaggctctccaag

SEQ ID NO: 13431 - DNA, 535 bp, Chicken  19866894217910_6
agtgttttagcgtggctataaatcccacatttaccaygacagagttggaaggaggcgatcccattaacctttctgctgtgttggtagggcgcgtgtcctgccatggccatctgggctggaggagctccttgggctcatgttcacctgtggtcaccctgctctcacccaacctaagcatcayagaggaaccatgttggccccagtgccccagggcagctccaagccatcactggaccaacaaccactgtggattttggcagtaattctgccatggtggactgggctcacgaytgtattgcrtagcgatataggcaatgtggagagggaaaaaataagatgaagtcaatgaagcattatggttaagaatcwaatggcatacaaggaaggaaataaaacatttaaagctcctataggaacattaaattggtgagggctgtgcttaggtagtatcagccctggcttttccctgggcatccatgtgtctcagcttcagctgtgcagtggggcagcagaggggctcacaaggctctccaag

SEQ ID NO: 13432 - DNA, 466 bp, Chicken  19866894217910_7
tttctgctgtgttggtagggcgcgtgtcctgccatggccatctgggctggaggagctccttgggctcatgttcacctgtggtcaccctgctctcacccaacctaagcatcayagaggaaccatgttggccccagtgccccagggcagctccaagccatcactggaccaacaaccactgtggattttggcagtaattctgccatggtggactgggctcacgaytgtattgcrtagcgatataggcaatgtggagagggaaaaaataagatgaagtcaatgaagcattatggttaagaatcwaatggcatacaaggaaggaaataaaacatttaaagctcctataggaacattaaattggtgagggctgtgcttaggtagtatcagccctggcttttccctgggcatccatgtgtctcagcttcagctgtgcagtggggcagcagaggggctcacaaggctctccaag

SEQ ID NO: 13433 - DNA, 600 bp, Chicken  19866894217915_1
ttttttaggtaacatttataaatctgctcacaactgtttcactgtcttttccctcccacttgatttatttgtggtttcctggtcatatttttagctcgtacttaatctcacattcacatccctacgtgaatgaactgattaaactgtggcatacagaagaaacatttgtttgaggcttagctttcctttcctgcctgcttctctgaacaaatatagcctgatgttctatcctgccaaagaatgtagtaaaatctaaagaaaacacctgagaatggaaaataaattatacttcagaaaatygcttaaaaaagaagttgaagttttcctttcacttgcatgtgtgcrgtgtctgagtagtggtaaagcccaggctttgcagattatcccccgttgcttrcaccagcaaagctggcccttagctctttggyattgtgaaagagatgaaggctgcctctttccctctagaatgaatccagtgccagtcagcacttctgagaactcatctcttctgatagtctcagtggtggaacagtgttcaagagctggctctatgtgggtgcacagcaactctaaatcctatgtattgaaatgccacattta

SEQ ID NO: 13434 - DNA, 569 bp, Chicken  19866894217915_2
cttttccctcccacttgatttatttgtggtttcctggtcatatttttagctcgtacttaatctcacattcacatccctacgtgaatgaactgattaaactgtggcatacagaagaaacatttgtttgaggcttagctttcctttcctgcctgcttctctgaacaaatatagcctgatgttctatcctgccaaagaatgtagtaaaatctaaagaaaacacctgagaatggaaaataaattatacttcagaaaatygcttaaaaaagaagttgaagttttcctttcacttgcatgtgtgcrgtgtctgagtagtggtaaagcccaggctttgcagattatcccccgttgcttrcaccagcaaagctggcccttagctctttggyattgtgaaagagatgaaggctgcctctttccctctagaatgaatccagtgccagtcagcacttctgagaactcatctcttctgatagtctcagtggtggaacagtgttcaagagctggctctatgtgggtgcacagcaactctaaatcctatgtattgaaatgccacatttatgcagacagtaaca

SEQ ID NO: 13435 - DNA, 517 bp, Chicken  19866894217915_3
gtacttaatctcacattcacatccctacgtgaatgaactgattaaactgtggcatacagaagaaacatttgtttgaggcttagctttcctttcctgcctgcttctctgaacaaatatagcctgatgttctatcctgccaaagaatgtagtaaaatctaaagaaaacacctgagaatggaaaataaattatacttcagaaaatygcttaaaaaagaagttgaagttttcctttcacttgcatgtgtgcrgtgtctgagtagtggtaaagcccaggctttgcagattatcccccgttgcttrcaccagcaaagctggcccttagctctttggyattgtgaaagagatgaaggctgcctctttccctctagaatgaatccagtgccagtcagcacttctgagaactcatctcttctgatagtctcagtggtggaacagtgttcaagagctggctctatgtgggtgcacagcaactctaaatcctatgtattgaaatgccacatttatgcagacagtaaca

SEQ ID NO: 13436 - DNA, 486 bp, Chicken  19866894217915_4
aatgaactgattaaactgtggcatacagaagaaacatttgtttgaggcttagctttcctttcctgcctgcttctctgaacaaatatagcctgatgttctatcctgccaaagaatgtagtaaaatctaaagaaaacacctgagaatggaaaataaattatacttcagaaaatygcttaaaaaagaagttgaagttttcctttcacttgcatgtgtgcrgtgtctgagtagtggtaaagcccaggctttgcagattatcccccgttgcttrcaccagcaaagctggcccttagctctttggyattgtgaaagagatgaaggctgcctctttccctctagaatgaatccagtgccagtcagcacttctgagaactcatctcttctgatagtctcagtggtggaacagtgttcaagagctggctctatgtgggtgcacagcaactctaaatcctatgtattgaaatgccacatttatgcagacagtaaca

SEQ ID NO: 13437 - DNA, 600 bp, Chicken  19866894217916_1
agcagcaacactagggatactgcttgaatgatgcagagctgggtaactgcacgatttacttctttacagccataaggaaatatcaaggggaaaataagttgagctgaatagatgcaccattttaaagaagttctttagaatcatagaattgctcaggttggaaaagaccttaaagatcatcaagtccaaccgcaatctaaccatactaccctaactaacaacctctgctatatcatgtccctgagcgccacatccaaacgggttttaaacacatccagggatggtgatggtgactcctaraaattaatttttttttcttttcttcttctctttttttttttttttttcatcattggctgaaaatgtttgatgaatttggatgtcacttatctttctttttttttttctttttacctttctcttttcatataagctaacttgtaaatgaaaacagtattttcaaatggcttcatttttttttttctaaatatcagtgcaaagggtattgcatttcaraaataaactgcttcattttcaaagggactgtgtgcatagtttccatgtttgaaagcctaccctttcaaattgctggactgaact

SEQ ID NO: 13438 - DNA, 600 bp, Chicken  19866894217916_2
aacaacctctgctatatcatgtccctgagcgccacatccaaacgggttttaaacacatccagggatggtgatggtgactcctaraaattaatttttttttcttttcttcttctctttttttttttttttttcatcattggctgaaaatgtttgatgaatttggatgtcacttatctttctttttttttttctttttacctttctcttttcatataagctaacttgtaaatgaaaacagtattttcaaatggcttcatttttttttttctaaatatcagtgcaaagggtattgcatttcaraaataaactgcttcattttcaaagggactgtgtgcatagtttccatgtttgaaagcctaccctttcaaattgctggactgaactaattaattggattccactcaaattcattaagttcatccctctgaagttctttttttttttggcatacattggaaataacctgtcttagtataagagaatggataaaaagaatgaaagcactgctaagaacagaatgaagaccatgaaaggctgcaggaagggatgaatagcagcacgctagtctcacagctcagcaaggtgcacattttatgtcac

SEQ ID NO: 13439 - DNA, 600 bp, Chicken  19866894217928_1
tttaaacttcagtgaaacactgtaacaaactctgttgacctgcagcaaatatgggtacaaaggaaggactaataggatatctttcaatagaaagagctgagatctgcagttctgctacagtacggtatagaactgaagggatgagatttcttttgtgacaactaagcggtagcctgaatagcaacagaaacatctgccacaggtttgtgctgtctgcagatttagttcatactccaaaaagcagcagctatatttggtttgcatatgcttgcatgttaaatgatggatgtcgatcaaagytgccatgaatggaagmgtaagtgaggaattacttcctctatcacttctttaatttgatgcagaagaggcctgcagtgcagaggaatcatgtcacctttagatgattgctctcttagcccttctgtacattatttaatgcaggaaacgacaatgacatgaatagtgtaaaacatctattgaaaaaggtgaggtatttgatgctggttacaagttgcaattctgtgctttcacactatgacttccacgttcaaccgataaacccattcatttctatttagccaaaacagacagtgcatttaa

SEQ ID NO: 13440 - DNA, 600 bp, Chicken  19866894217928_2
acactgtaacaaactctgttgacctgcagcaaatatgggtacaaaggaaggactaataggatatctttcaatagaaagagctgagatctgcagttctgctacagtacggtatagaactgaagggatgagatttcttttgtgacaactaagcggtagcctgaatagcaacagaaacatctgccacaggtttgtgctgtctgcagatttagttcatactccaaaaagcagcagctatatttggtttgcatatgcttgcatgttaaatgatggatgtcgatcaaagytgccatgaatggaagmgtaagtgaggaattacttcctctatcacttctttaatttgatgcagaagaggcctgcagtgcagaggaatcatgtcacctttagatgattgctctcttagcccttctgtacattatttaatgcaggaaacgacaatgacatgaatagtgtaaaacatctattgaaaaaggtgaggtatttgatgctggttacaagttgcaattctgtgctttcacactatgacttccacgttcaaccgataaacccattcatttctatttagccaaaacagacagtgcatttaaggccttcttggatgct

SEQ ID NO: 13441 - DNA, 600 bp, Chicken  19866894217929_1
cgcaggagccgcgctgccgagggcgggcctgagccttctgcccgcctcgcccccggatgccccggcaagcggcggaacagcccccgggaagcccacctcgccgccggagcccagcgcagcgtagccctctccctcccgggcccaggaccccggcagcagtcgaggtcagcccgcacggttcggggggtccggccgggtcggtgctcccggcgtgccggcggcacaggggcacaacggtcccgtcctgagcgctgagaggcggccgcaaccgtaacaataagaatacaaagcgtaggctgktttttattttttttttaattattattattattctaatgagttcatccctcatttcctcgctcgcacagctcggtgtaggcaggccagatgggctgccccgaccctcccgggaaaagggcaggtgcgagcgagttacatttttttttttcctctttacaaagcgagatgccacgtcccggcctttcgcttccccccgccgcccccggccaggaggagcggtgcgccccgggctgcggttcccccgggccgagcgggccctgcggccgctgtgcgctcacaaccgtcggggcgctgacgccc

SEQ ID NO: 13442 - DNA, 600 bp, Chicken  19866894217938_1
gatgttcttgtcttggggacgtcatgcagtgactctaagctagaatgtattcctcagcactaaatgggtgtgaatccgtgcatattagtcacttatgacaaccagcgttcagcactgataaacttctcaaaaatgttgtcaaggacctacaaagaggtggaaacctggcatcatctctgtgctgttcatgactagggcatcctcctgtagtcccaggcacagacgtgcccggtaactgcaggagggaaggaaggattcaggcttttcgagctgactgtaactgaagaatctccatttacyttcagcamgaatastatcgcatcttggtagaagattatctcgtatctcagtttaccaggaakactgcagatttgttcttctaattctcaagaaacttgttaaaataacagaccacttctcataacattttctgcaagactctgacattttatgactggtagtttggtttttataaaacttatattaaaatagtttatattgctttagctaatagtgcaccagtgtcatgaccagcgtgttcctgaaaataaaatttaggaagtatctatgaaagaaaaggggtaatttgtaagataagag

SEQ ID NO: 13443 - DNA, 600 bp, Chicken  19866894217938_2
tgtcttggggacgtcatgcagtgactctaagctagaatgtattcctcagcactaaatgggtgtgaatccgtgcatattagtcacttatgacaaccagcgttcagcactgataaacttctcaaaaatgttgtcaaggacctacaaagaggtggaaacctggcatcatctctgtgctgttcatgactagggcatcctcctgtagtcccaggcacagacgtgcccggtaactgcaggagggaaggaaggattcaggcttttcgagctgactgtaactgaagaatctccatttacyttcagcamgaatastatcgcatcttggtagaagattatctcgtatctcagtttaccaggaakactgcagatttgttcttctaattctcaagaaacttgttaaaataacagaccacttctcataacattttctgcaagactctgacattttatgactggtagtttggtttttataaaacttatattaaaatagtttatattgctttagctaatagtgcaccagtgtcatgaccagcgtgttcctgaaaataaaatttaggaagtatctatgaaagaaaaggggtaatttgtaagataagaggataaaag

SEQ ID NO: 13444 - DNA, 600 bp, Chicken  19866894217938_3
ggggacgtcatgcagtgactctaagctagaatgtattcctcagcactaaatgggtgtgaatccgtgcatattagtcacttatgacaaccagcgttcagcactgataaacttctcaaaaatgttgtcaaggacctacaaagaggtggaaacctggcatcatctctgtgctgttcatgactagggcatcctcctgtagtcccaggcacagacgtgcccggtaactgcaggagggaaggaaggattcaggcttttcgagctgactgtaactgaagaatctccatttacyttcagcamgaatastatcgcatcttggtagaagattatctcgtatctcagtttaccaggaakactgcagatttgttcttctaattctcaagaaacttgttaaaataacagaccacttctcataacattttctgcaagactctgacattttatgactggtagtttggtttttataaaacttatattaaaatagtttatattgctttagctaatagtgcaccagtgtcatgaccagcgtgttcctgaaaataaaatttaggaagtatctatgaaagaaaaggggtaatttgtaagataagaggataaaaggaattt

SEQ ID NO: 13445 - DNA, 600 bp, Chicken  19866894217938_4
aatgggtgtgaatccgtgcatattagtcacttatgacaaccagcgttcagcactgataaacttctcaaaaatgttgtcaaggacctacaaagaggtggaaacctggcatcatctctgtgctgttcatgactagggcatcctcctgtagtcccaggcacagacgtgcccggtaactgcaggagggaaggaaggattcaggcttttcgagctgactgtaactgaagaatctccatttacyttcagcamgaatastatcgcatcttggtagaagattatctcgtatctcagtttaccaggaakactgcagatttgttcttctaattctcaagaaacttgttaaaataacagaccacttctcataacattttctgcaagactctgacattttatgactggtagtttggtttttataaaacttatattaaaatagtttatattgctttagctaatagtgcaccagtgtcatgaccagcgtgttcctgaaaataaaatttaggaagtatctatgaaagaaaaggggtaatttgtaagataagaggataaaaggaatttttttaaatgcttatcttgaaaagtaacaacaagaagtttaagtgtgtt

SEQ ID NO: 13446 - DNA, 600 bp, Chicken  19866894217939_1
tagggaatggagagagaggaaaaaaagaaagaaagaaagcctattggagggaaaaaaaaagacatctcatattctgcaggtttgggtttttttaatccccactcccgtatgctggaaagttttttcaagatcccagacttcccaacttttgcatccagataaattgcattttacagactctggctataagcaacccattgttgtccagctgattttccctttggaaatcccacataaatctttaactgttttgcaaccaggacagactcctaaaattcagcagataaaaggaaaagttcwaaagctgcctcgctgggtgctactttgaagttttctacttgcaacatgcaaaggaacaccatcagattttccaacaagttgcccttttgcattcacaaagtgacagttgtgttactcctcactgaaagtttcagccagtgctgtttggagtcgcaggttttttaagtaaccagatcagtccacttcagttttacagctgcaaactcctaagagcaaagattcagacagagaaaagaaaaaaaaatagaagggagaggggggaatttcattcatttaatatctgatcagaagggtttctag

SEQ ID NO: 13447 - DNA, 600 bp, Chicken  19866894217944_1
tgacagaaatatctgcatgtgaatagatagcccttggagatgtttgggcacgttaagggtctctggctgttatgggtaactccaggaggtgctggttatggccttcccacaagtataactgatccatattccttcctgtgttacctgttccacctcagccagtaaaacaatgcatcactcatcttcgagttcctgttcagtgctggattcaggactcagctacataattcagggaaaaattgactcctgtgctactctcccactgaagtaatgggatttcagactgcctgaagataaacrtgcagttcagtcttctgcaaatgcagccaagtaacccgctggtggtaaagagccagtagggatcacttttccttttgtttgatttcactacagtttattttgtgttgcctgtttagatgttaagtgctttacagagcaaactgtcatttttatgaaggtagtgtttagcacagctgaagcctgtcttgattaggagttctgtatgcaactcgaatgcagataatagaaacttgttaggaggcttgaattaatgcttcatctcccatgctgtacggtttgacatcagcactgcttcatcat

SEQ ID NO: 13448 - DNA, 600 bp, Chicken  19866894217945_1
tagtaaatgcctcagtggtggcagtcgtggaaatttaattcagtgctgtggcagaagaatatttccccttgtatttattcctcctcctttcatcccctgaaggcccattgtctttcttttttcctcccctgcttgtgttggcagaagaatcagcagtgtttgatgtggcgttggtggaggtctggtgagctctgctcacgtgaatttcagactccattgcacaagagttttttgtgtggtttataattaaagcatattatatgcaggcccagtcagcagtgagcaaaaaagttctcaccrtgtttcagccagggtggtttaccctgtggtagaggggctgcagttccacaaggcaggcagcgttgtgactttggtgctagaaaccacatttttaagtcatgctgttgactgcatggcttcctaaaaataagttttgaaccacgagagaaggctcagtacaggagttgaggggaattttgtgacctgttttagggtggtaggttaaatcatcgaagtagtagctttttagtcttcagagcagtagtcttatgaaatcagggagctataaatgttactcggtttactgggatagactatctc

SEQ ID NO: 13449 - DNA, 600 bp, Chicken  19866894217945_2
gagagaaggctcagtacaggagttgaggggaattttgtgacctgttttagggtggtaggttaaatcatcgaagtagtagctttttagtcttcagagcagtagtcttatgaaatcagggagctataaatgttactcggtttactgggatagactatctcaggttgtcaccttccaaaaatccccagtgtgctcaccccatccttaaatgaatagtgcttccccagaaaaggtaaagggacaaacctgtctccttacatatgcaagttttagctctttaagtcttaaaaagcagtacctacycatgaataaaatggcaaatctgccttttttttttctaagtattgcaattgctacaagtgacttagtatttcttgcatcaytcttttactcctgttacaaccagaccctgaaggcaccttcagatgcaagagcttacttcagctcctagcccttgcagtattttgataccatttacattgtatcaccagaatgaatgacatcctgtaaattgagttaatgctattgattgtgatgttactgccaggaatataaagcawgcataaccccattgcagatgtaattcagatattctgagctggt

SEQ ID NO: 13450 - DNA, 600 bp, Chicken  19866894217945_3
tttttagtcttcagagcagtagtcttatgaaatcagggagctataaatgttactcggtttactgggatagactatctcaggttgtcaccttccaaaaatccccagtgtgctcaccccatccttaaatgaatagtgcttccccagaaaaggtaaagggacaaacctgtctccttacatatgcaagttttagctctttaagtcttaaaaagcagtacctacycatgaataaaatggcaaatctgccttttttttttctaagtattgcaattgctacaagtgacttagtatttcttgcatcaytcttttactcctgttacaaccagaccctgaaggcaccttcagatgcaagagcttacttcagctcctagcccttgcagtattttgataccatttacattgtatcaccagaatgaatgacatcctgtaaattgagttaatgctattgattgtgatgttactgccaggaatataaagcawgcataaccccattgcagatgtaattcagatattctgagctggtgccagatggtctgctacctgtcctgctactattttctttctgctacagctggaggataatccattattgttataaataca

SEQ ID NO: 13451 - DNA, 495 bp, Chicken  19866894217945_4
atgcaagttttagctctttaagtcttaaaaagcagtacctacycatgaataaaatggcaaatctgccttttttttttctaagtattgcaattgctacaagtgacttagtatttcttgcatcaytcttttactcctgttacaaccagaccctgaaggcaccttcagatgcaagagcttacttcagctcctagcccttgcagtattttgataccatttacattgtatcaccagaatgaatgacatcctgtaaattgagttaatgctattgattgtgatgttactgccaggaatataaagcawgcataaccccattgcagatgtaattcagatattctgagctggtgccagatggtctgctacctgtcctgctactattttctttctgctacagctggaggataatccattattgttataaatacagcaaataatgttctcatggctgtgccacactgagacttttaatagggcagttgtaaatctggggccagggac

SEQ ID NO: 13452 - DNA, 600 bp, Chicken  19866894217946_1
tctcaatgaagctggctggcttaggagtgctacatgctgatttataatttagtttctgtgggctgttagacttccaaaattactgtcacatgtaactcccaagcaaatacctgacaaggctattcctccaaaaccacttaaagcaatgaaaaatccttgctcagctctttgctcacacccttttatgcagacaggggcaggtgatgctggggagctctgagtgagtgcagctgggacttcctcccacctgcactgtttgcaagaatccctgcaggctctattcttgccttgctcacctcrtttttgctgctgcaaggcttgccagggatactggtacttgctggtatgaacctgagtgggaagtcatggggacaggtgaaatcattgagagaggtggagcaaaagcatcacctgaacagccaacactgtgcttgcacagctcaccagaggtgaggatgtctgtgcaagctgcccaggcaccagcaggtagcagaaggaagttgcacaactgttattgaataggttatgatttaaaagaagcagcaggccagactaatagagcatatttgggatcagagctctgaaacatccattcagctg

SEQ ID NO: 13453 - DNA, 600 bp, Chicken  19866894217946_2
ggatactggtacttgctggtatgaacctgagtgggaagtcatggggacaggtgaaatcattgagagaggtggagcaaaagcatcacctgaacagccaacactgtgcttgcacagctcaccagaggtgaggatgtctgtgcaagctgcccaggcaccagcaggtagcagaaggaagttgcacaactgttattgaataggttatgatttaaaagaagcagcaggccagactaatagagcatatttgggatcagagctctgaaacatccattcagctgctctgaaatgtaacttttgataatktgacagattaagcttctcttcatgctcacacctctcttctttcttaccttctgaacataaaattcagctgtttgcttctgtggtgcacatgattttttgtaataaatgtcatcccattcatgcaagaaggagaatttctcactgtccccgagtttgcaagaagagcagcagttctcatactaaatcatgatgtaggctcatctacaatgagacattcctgatttgccttctgtgcctcgtaacactagaaaaaattgaaagcaccaggtaaaaatgaagtgttatcaagcgaggactaag

SEQ ID NO: 13454 - DNA, 600 bp, Chicken  19866894217946_3
agcagttctcatactaaatcatgatgtaggctcatctacaatgagacattcctgatttgccttctgtgcctcgtaacactagaaaaaattgaaagcaccaggtaaaaatgaagtgttatcaagcgaggactaagaccatctataataactctaatccaaattggattaattatttgcagaaagggctacaacagcttgtattagatcaagggctaaatgggttgaagtgggtcgtacaatttcatggaggaatgggttaggtgaaaaggggatttgtcaatgagcaaaactttattaaayggctgctaattaaaaacaaacttgctatgagggtgtctctgcacttctaaaatctgtataaatcacaatttaacagtcccttggaacccctggctgacagcacataaaaagcaacttcataggcagtctgtcctcctgcagtatggatgggcaaggaaggatctgccagccagccagatcactggggatcccatgctgctgttctatgaatgggatggatgcagatgctgagatactggcattaatgcaggaagctggagaagtccatctggaaggcatccagccagacagcttcattca

SEQ ID NO: 13455 - DNA, 600 bp, Chicken  19866894217948_1
gaatgcctctaatgacttattttgtttccagcccaggtacagcagaccatcagctctccaccgataactggcgaagaaacacctctcatcagcctgactgtggataacacccacctggagcatggggtggtatacgaatatgtcagcagtgcaggaatcaaatcctttgtcctagagaaaattgtggaaccaaaaggttgcttctgtctcacagcaaaggtacctgaccaacatacatagccagcttcattcctgaacagaactgggaagagaataatacaggcatttctctgtcaattrtcttgcgacttcagatggggtagcacatggtcatctcaactctgcctggagtttagtcattagaatggactaactcatactagctctcatttgctgtgggcaagtgagcaaaatcttcctagatttcagctgttgagggagacataggacagtctctctggagctgagaggaattcttgctattttctgactggtaatgtactttttgatgatactgaagatcaacatcytcaggcaagaatttgctgtacactagaaaaaaatcaagcttttttttttttcttcccccatctgatggtc

SEQ ID NO: 13456 - DNA, 600 bp, Chicken  19866894217948_2
acatacatagccagcttcattcctgaacagaactgggaagagaataatacaggcatttctctgtcaattrtcttgcgacttcagatggggtagcacatggtcatctcaactctgcctggagtttagtcattagaatggactaactcatactagctctcatttgctgtgggcaagtgagcaaaatcttcctagatttcagctgttgagggagacataggacagtctctctggagctgagaggaattcttgctattttctgactggtaatgtactttttgatgatactgaagatcaacatcytcaggcaagaatttgctgtacactagaaaaaaatcaagcttttttttttttcttcccccatctgatggtctggatggatcactgaagaaaggagatagaaacacagttactggaagacaacagtgccgtgtattttgatccatctacgcacaatgatgagagaatagtaaatgattctgtcacatcccagtgatgttattgttaagcacaatgaaaatcaaagtgtgccagagccaggttaccttggcagtgcacagtgaatattttgagcaatttgctgttctgaaagtttctgagaaa

SEQ ID NO: 13457 - DNA, 600 bp, Chicken  19866894217950_1
agtgatgctgataggatttggttggtgatcattcaaatctgagatgctctcaaactcgtggtgtctttgagctgatatgactaagtttacctcaagttacaacatagtgtgataaactctgccttcttattgtaggcttcatatatttctaatgctcatatgtggctcttctgaaaagtgacatttagaaattaaaattatgctttaacgtgctagttttttgaatgccttaatttgccccacagtgaatattcagaaaaccactgtcagttcctaaattgtatttatgttttaaaaatkattttcaacctgatcttgtaaaacatgatagaatacttttgaagatactggcaaaaatgagcaaatatttaccaaaacctaggcatagaaatacacttaacaaagtctaattacctgttatccttctcctctcatcagtttttctaatctttatctgcatgttctgttgcatgtgtgtattattgtaaatgctagggatgctgtttttctcttggctgctgttcagtttttggtttgtttttctttttttcttttttttttttagcaagtgaatawaaatttctattttgaaatgtttta

SEQ ID NO: 13458 - DNA, 600 bp, Chicken  19866894217950_2
aattgtatttatgttttaaaaatkattttcaacctgatcttgtaaaacatgatagaatacttttgaagatactggcaaaaatgagcaaatatttaccaaaacctaggcatagaaatacacttaacaaagtctaattacctgttatccttctcctctcatcagtttttctaatctttatctgcatgttctgttgcatgtgtgtattattgtaaatgctagggatgctgtttttctcttggctgctgttcagtttttggtttgtttttctttttttcttttttttttttagcaagtgaatawaaatttctattttgaaatgttttaagtaactaaagtttccatgattttttaaaaaccctgcttgtaatttgaagtaattttattgccgtgcatgggatgaggtttttgtatttagccacaatgagagctgcatgtggctaaataagagctttctctattatcaccatttaattgagcaccattttactctgctgttccagagaatgacaagtaacaggttgtagttttgactgttttgcccactacaggtgaccaactgagtgccatactgaattccattcagtcacggccaaatctccc

SEQ ID NO: 13459 - DNA, 600 bp, Chicken  19866894217951_1
ttcctttatcacagtgaagttctctgcatctgcttgcctttcctgagcaatttcagtttaatcagatgagccgagtcttgataaatccacgagtgtgtatcttgcatctgaagtgcagaatgagcaaggacctctaagtactatgaagagtaggctaaaagcctgctcagggttttactgtgtataagtactttgcaaagtataagcatggctattctagttatttgattaattttatggcaatgattggcttcagaaataaggggagagaggaagcaatttaaggctaattacagtgaratctaatcccaaatatgggacatctgttttgtaccctaaaggacagatggaaaracacttgagacaaaccaatgtataagaaaatcttaacggcctcagaagcttccaattattttttttctccagctttgaacagaattgttgaatgtaccccatctctcttctgcattgctaaagaatactccaataatgaactgaaagaaaaaaaagatttattttcttcaggagcacagtggttctcattgaagagaaagactggacaagagaataagtatctaaagtcaaattaggaacttcctg

SEQ ID NO: 13460 - DNA, 600 bp, Chicken  19866894217951_2
agtttaatcagatgagccgagtcttgataaatccacgagtgtgtatcttgcatctgaagtgcagaatgagcaaggacctctaagtactatgaagagtaggctaaaagcctgctcagggttttactgtgtataagtactttgcaaagtataagcatggctattctagttatttgattaattttatggcaatgattggcttcagaaataaggggagagaggaagcaatttaaggctaattacagtgaratctaatcccaaatatgggacatctgttttgtaccctaaaggacagatggaaaracacttgagacaaaccaatgtataagaaaatcttaacggcctcagaagcttccaattattttttttctccagctttgaacagaattgttgaatgtaccccatctctcttctgcattgctaaagaatactccaataatgaactgaaagaaaaaaaagatttattttcttcaggagcacagtggttctcattgaagagaaagactggacaagagaataagtatctaaagtcaaattaggaacttcctgatgaatgcgtgctcttcgtttagtgtgctcatggagcacatgatgatatgagag

SEQ ID NO: 13461 - DNA, 599 bp, Chicken  19866894217953_1
  misc_feature (1)..(47): n is any nucleotide
nnnnnnnnnnnnnnnnnnnnnnnnnnnnnnnnnnnnnnnnnnnnnnncaaatgcagtgatggtaagagctactgggtgcaaagaggctggaaatagttaggaatttgtaggggaaaaagaaaaccaaaaacaacttacctgtgtttctaactggttcatgccattagcatgatgcattctgtctgttaatatctgttgactggtttcatctagtttctgctcaagagaagctttctgaagattatattgggttaagaacagagggtaggatggacaaagagataagattttaattaaggygtttctttgaatttcattaataacacaatactaaacttgaacaggtttttttttgatccagataggaaaacattgctccaaggtgactctgaaataggagcttaagttctggagaaagcccaagtagtgaaaagagcactaacaagaagcaaatttcttcatgttttcagctgtttcttaacaattctgaggctcaagtgttgaatattcaacattctgtttacacacctatgtgcaaatcagcttcccactcccatcccaatgctttgggaatcatgatgatagaagataaataccaa

SEQ ID NO: 13462 - DNA, 533 bp, Chicken  19866894217953_2
actctgaaataggagcttaagttctggagaaagcccaagtagtgaaaagagcactaacaagaagcaaatttcttcatgttttcagctgtttcttaacaattctgaggctcaagtgttgaatattcaacattctgtttacacacctatgtgcaaatcagcttcccactcccatcccaatgctttgggaatcatgatgatagaagataaataccaagaaacagagtgcactgttctctgtaagggttaaccaataaaattctccagctgctctgccttttgtgggcatgttaaaaaaacctyctctttcccttctaaacagacagatgcattgcctaaacaaacaatgcaaagaccaatgcagacatatgtgcagcatgtacataaacgggcccaacgtagccacccacacaagcctgtccagcacagtgtgtcaatatacactaaagagacaaacatgcctgcattacatcatcatatatactttccatgtgtatattctaaaataattccttacaactgcacttttattcagt

SEQ ID NO: 13463 - DNA, 600 bp, Chicken  19866894217958_1
agtaacaggggtgggcaacagctgagaggacactctaccacagcaccagcaggaagttctctctgggaaggagtgggaggaaacaaactgctttgaattcctcctctttctggcacagcagagtatgagaacaggacagtgcacctcctccacgcttagagtgatggcttgctcaggagttggtgtgcagtttgctgggcacctccagaagcttcctgtgctagcctcagccacaggggcaggacttagcctaggagaaggagcggctccatctgtgtgatatgcaagtgaaaatgaagsactttcttccctgtaaaacacagcagcargatactccaattcaatacactgaactgttgcttacaagaagaaacagcggcagccagcacagtcctcaaaggaatttctgcatttcataaactgcctaatcactgaggggtgtggggggaataattaaaaatcaaatatgacaaagctgtggccttctccagtcaccctgcttactcctgggagcaaagtagtgcagggacatgaggaaaagcatgtggaatgctaacgcaatcactgaggcccatgcttgtcaagaacagaatgcacact

SEQ ID NO: 13464 - DNA, 600 bp, Chicken  19866894217958_2
acactctaccacagcaccagcaggaagttctctctgggaaggagtgggaggaaacaaactgctttgaattcctcctctttctggcacagcagagtatgagaacaggacagtgcacctcctccacgcttagagtgatggcttgctcaggagttggtgtgcagtttgctgggcacctccagaagcttcctgtgctagcctcagccacaggggcaggacttagcctaggagaaggagcggctccatctgtgtgatatgcaagtgaaaatgaagsactttcttccctgtaaaacacagcagcargatactccaattcaatacactgaactgttgcttacaagaagaaacagcggcagccagcacagtcctcaaaggaatttctgcatttcataaactgcctaatcactgaggggtgtggggggaataattaaaaatcaaatatgacaaagctgtggccttctccagtcaccctgcttactcctgggagcaaagtagtgcagggacatgaggaaaagcatgtggaatgctaacgcaatcactgaggcccatgcttgtcaagaacagaatgcacactcctgctgtgctcaggtgttctctgacctg

SEQ ID NO: 13465 - DNA, 600 bp, Chicken  19866894217958_3
tttctgcatttcataaactgcctaatcactgaggggtgtggggggaataattaaaaatcaaatatgacaaagctgtggccttctccagtcaccctgcttactcctgggagcaaagtagtgcagggacatgaggaaaagcatgtggaatgctaacgcaatcactgaggcccatgcttgtcaagaacagaatgcacactcctgctgtgctcaggtgttctctgacctgcgctccatctgtccaaacaaagcccacggcatctccttgtgatgcagcttaaggacaagactccgtcacccagyaagaatgaggaaaggagagagaggaagggctgcctgcatggataatggtgtctaagagtgcaacagcctgaggcctgttacttcatgctcccaccctacacccragcaacgtgtgcacacaataaaatgctgcacacactgcatttacagtgacaaacttctgtgtggctgagaggacacacagatttctgtgtttctgcagatatagaggtggggatgccagataagagcagcagagccggaggaaaggcacacagtgaaatccactcactggagaatgacccagcggaccaggaacca

SEQ ID NO: 13466 - DNA, 600 bp, Chicken  19866894217958_4
tgggagcaaagtagtgcagggacatgaggaaaagcatgtggaatgctaacgcaatcactgaggcccatgcttgtcaagaacagaatgcacactcctgctgtgctcaggtgttctctgacctgcgctccatctgtccaaacaaagcccacggcatctccttgtgatgcagcttaaggacaagactccgtcacccagyaagaatgaggaaaggagagagaggaagggctgcctgcatggataatggtgtctaagagtgcaacagcctgaggcctgttacttcatgctcccaccctacacccragcaacgtgtgcacacaataaaatgctgcacacactgcatttacagtgacaaacttctgtgtggctgagaggacacacagatttctgtgtttctgcagatatagaggtggggatgccagataagagcagcagagccggaggaaaggcacacagtgaaatccactcactggagaatgacccagcggaccaggaaccagcaggcagaactgggcttcccctccccacccagaccctgctgtgctgacatcccctctgcagaggaacatgctccgtgccagcagcaacagcaagctcgtgctt

SEQ ID NO: 13467 - DNA, 599 bp, Chicken  19866894217959_1
  misc_feature (1)..(98): n is any nucleotide
nnnnnnnnnnnnnnnnnnnnnnnnnnnnnnnnnnnnnnnnnnnnnnnnnnnnnnnnnnnnnnnnnnnnnnnnnnnnnnnnnnnnnnnnnnnnnnnnnncaattctgtgctctactttattgatgctttagggattaaaactataaaagaggagctatatagtgaaaaataggctagaaaaaagaagtatgagttgccagacatctaatttcttttgaagcaaacttcctacttcaatacttcatgtagattaaaataaaattgctttttgcaaaattctttttcggggagggaatctgcwgctacctttaggatctccttttactacaatatgctcctgagatctactttaaaactatgtgtctttctccctcaaaagtacttacaaacaaagccattctttaaataatagattaacacgacctccattctatggcacttgcctcattttaaaccattgctactgaaacgtgaggggtatgaaataacaggtaatgacagaactttacacactaagagatctatagcatttgaaaacctatttcaatatcaaaggagatgggatttatctcttgctcaataccctgttctgtgaggttc

SEQ ID NO: 13468 - DNA, 600 bp, Chicken  19866894217960_1
taaacacatataaaataactcttctctacccttgatctggtttgccatattggtcagatgtctttgccaagtagcacggctctgaaaattacgcataatatattgccacgaaaagtgctagtttgtaaagtacacatgtactgtgtgagagaagctggcctaagccctgcactgtcacactgtgctttgagcctgcctctacacgtgagtaggaggtctgttcttggaagattcatcctgataatacaaaatgaagtacctccaacctccataaacctttcagtagcagatgcatacatygaaagaaaaattagggtgtttagttctcattaccattctcctcctggaactcctccagagatcaactttcagtttctctttccttattctggctgacaagttaattactggatttatcatgcccctttcatcacctacttctatgcttgtactggccaattatgagtccctctgttgagatatttgcagcccactagccttaagtgaacactagcattacattctaccagtgtgaaaaactcttaagaattcaggttttgaggttcacatacatagtcgcctgggcttttacataaaagc

SEQ ID NO: 13469 - DNA, 600 bp, Chicken  19866894217966_1
gtgctgctatagacttgttcagctggtttcagctattgctgctgaaatagtttagctgttggaaaatggatgttgttcagcagctgacagtggggtggaggacagatttagcctctcagtcggtaacgcagtactgcacagactgagaagctgaaggaattctaatcttagagtccatagcatggctgacaaagccatgctttaataaggcatgtgctagtgatccaagacccttggatgagctacgtaaggtgagagctgaccagtgctgtccccatcttcagatgggaaactgactcrctatgtgctactgtcttatatctcaccgaatctggttttgtttgagcacaggtgaacaaggacaaagtgaagcaactgatgagggatatcggaaaagagatttaccagctgaacatggctgggtgctattggctgcccagctccaccactgatcatgtaacacggtgcaagaacctggtgaaactgaacttgtccgggtgccgtatcacctccctccgtctctcaaagatgctgtccacactgcagcacctgcggtccctggcgatagatgtaaacccgggttttgatgccagtcagctc

SEQ ID NO: 13470 - DNA, 599 bp, Chicken  19866894217968_1
  misc_feature (1)..(10): n is any nucleotide
nnnnnnnnnnatgaacatataacagaagatatcccagcacgcactgtatgtatccaaaaatacataaagacaattaggacttacctggatttttttttccaaggaatttctctcatttttaagctccatcttaatagcctataagaacaaaacaagtacattgattctaaacacagaagcaacatattaagcattaaaactaaataaaatgaacttcaaaggaaaaacactgtatataagcctcagaactgtactacagtcaacatttaagcaggaatgcatagttgcttcctggaagtmtacagatgtatctgggcacagtatgaaagaaaacagcattcttcagtgagagacasgacaattytgctttgtaagctaataaaagtgcatttttatgagacttagttatgtcagcaggatccctttaacacaggagattttaattagcacttttctttggggaagattggtttttaaagacgaataatctatataaaaatggagctgtgcaccaaacacgttcagcttcctttctcaagtactatagcccaaaagtctgtccacttgctttgaaatgattaaagatgaccctgctttca

SEQ ID NO: 13471 - DNA, 600 bp, Chicken  19866894217968_2
aaaatacataaagacaattaggacttacctggatttttttttccaaggaatttctctcatttttaagctccatcttaatagcctataagaacaaaacaagtacattgattctaaacacagaagcaacatattaagcattaaaactaaataaaatgaacttcaaaggaaaaacactgtatataagcctcagaactgtactacagtcaacatttaagcaggaatgcatagttgcttcctggaagtmtacagatgtatctgggcacagtatgaaagaaaacagcattcttcagtgagagacasgacaattytgctttgtaagctaataaaagtgcatttttatgagacttagttatgtcagcaggatccctttaacacaggagattttaattagcacttttctttggggaagattggtttttaaagacgaataatctatataaaaatggagctgtgcaccaaacacgttcagcttcctttctcaagtactatagcccaaaagtctgtccacttgctttgaaatgattaaagatgaccctgctttcaccttgacacaaaatcatcttgtgaatctagggtagttcttcctgacacattgatttc

SEQ ID NO: 13472 - DNA, 600 bp, Chicken  19866894217968_3
taaagacaattaggacttacctggatttttttttccaaggaatttctctcatttttaagctccatcttaatagcctataagaacaaaacaagtacattgattctaaacacagaagcaacatattaagcattaaaactaaataaaatgaacttcaaaggaaaaacactgtatataagcctcagaactgtactacagtcaacatttaagcaggaatgcatagttgcttcctggaagtmtacagatgtatctgggcacagtatgaaagaaaacagcattcttcagtgagagacasgacaattytgctttgtaagctaataaaagtgcatttttatgagacttagttatgtcagcaggatccctttaacacaggagattttaattagcacttttctttggggaagattggtttttaaagacgaataatctatataaaaatggagctgtgcaccaaacacgttcagcttcctttctcaagtactatagcccaaaagtctgtccacttgctttgaaatgattaaagatgaccctgctttcaccttgacacaaaatcatcttgtgaatctagggtagttcttcctgacacattgatttcactgcagt

SEQ ID NO: 13473 - DNA, 578 bp, Chicken  19866894217976_1
tgcagacagtaaatctgaaaaatgaattctcttctatattttataacatcatagtctgtttcactaaactatttgtttctgtcctgcagtgttttgatgtaaacataacaaccctccaaagaactcttggttatcttgttgaaaaaactcaagataatccctggtgaaattcttaaattcttccagaatttgactatgtttgagtcttcgtctgcattattgttcagtagcattctgatattgactcttgcccatcttcatttctcttttttaatagtttcttctgagaggaaggatgtmgtttcagtgttcagaaaggctcaggaaatgtaattatttctggttcctactcctcagaaagtaggtacaatctagacatgagaaaggatcaaaaaggattaggatccttgtttttccttttttgttgttttttttttttttttcctcataatagtaccatctcatcacctcttctcctgcaaaagtcctattatagtttatgaatgtttttcttctgagaaaaacttaacaatggagatttttggaagtggaatcaggagtttatccagttttaacat

SEQ ID NO: 13474 - DNA, 600 bp, Chicken  19866894217977_1
tgtaatcattctacgtattttattggcacactacatttctgagaggtttgtgaggaatgcaactcaatgacaaactgagctctgcctatgaaaaatcaattattttgactggatttttaaaaggcatttcaatatggtactattgcacatcacttatgaggcttgaaatgcactggagcacagcatttcccatttagcaagccaagaatatatcttgtaaaccgtagaaagtatttcactgaatattcagctacagttttcagctgggagaaataggatcattgatctgattcacagtcrtctccttggagtgattccatcctttgtgaggggttcttccccaagcctgcacatcacctatagctcacatatgttctgaaatccgggtaaaaattctctgtatacatgtctaagtgctaactgtcatgaatcctactgaaataattgattattcattgacagatttttttattgggtctcagcagacatgacctgtgtaagtttttgtgagaacaagatcaaagtgtaaatagtttgcaaagggatacattttgctttcaacagagatttaagattaaggatgagctgagtccacataaa

SEQ ID NO: 13475 - DNA, 600 bp, Chicken  19866894217980_1
atgaattgacacttattttgtcaacctacctgtggcaaaactgcaccctccctctttgtagacctggcagaaacatgaagattactcattgcaggtttccaagaagctcctgaagccagtgctcagagtttgcataacaaccattgtcgacaatccacctacaacagcttaaaaatacagttttgaatgggtgagagaggccgggagttctcagaaggactagtcaaattcaggattttattaatagaaccgaaggcgtgctcatgaaaaaaaaaaataccaccctcttgttatcttagytgtcatcagcagtcaccttttcaaaaacagacaggctagaggcagagtattcctgtagatgagcaaacagaaagatgctgcataaaaacatgagagcaaaatggtgagcagcagcaccagggatcactgctcaggtctccatgttgagaaatgctctgtgcacagctgcctgctttgtgcatgctgctcttgcttaagtgacctcttttttatttattttttttaatacagtgccatgcatttcacccacagagagctaattgccaaacaaagggagcccgccagcacatcgcacatgaa

SEQ ID NO: 13476 - DNA, 600 bp, Chicken  19866894217981_1
ctcccctgattgcgtaaggcctctgttaagttctactgtaagacaccatgcttacatttctttctatagctagaataaatcttactggttgcctttcaattgaaactagatacctagactgcagcttttaactctccaaaaaacaagacaagtattttgcaatggcatccttcaactagcttacctttgtccatatttacaaactactacctgctggagtgatttagtttttgaggaagcaggaagctgaagtgacacaattcttgtttctgttttccatttgggttcagtgttaaactwacttgggttacagcaactctgtacttggaacatcttataatttaaacttatttttttcctaaagctattcaggtttgcatttataaggtttagaatactatagcatttctctgagaattcaggtagggtgagaaagggctgaggcaaaccataccattttttcaataggaaaagaaaaaaaaggagaggaaaaatgtttttttagcctggagaaccttggggagaggtggattgttttgttttgccagggaacatgcaagtctgaataatcccaggtggctgtggttaattccacatttt

SEQ ID NO: 13477 - DNA, 600 bp, Chicken  19866894217989_1
agcagagggggtcatcagctgagagcccgtaaatcaggcaccaatgtgcaaggcgtgtgcaaggcacacatgcagtggagcgaggcctggagctggcagggaccctccctctgggctatgtgcaaaagagcagctgagacgaatgcaatccctcccactcccctgcccatttgtttcttatgaatgcataatgaatgctaatgagtgcctcacttggggcatatggttaagacatatagaggctgaaccttcctggaaagggggaggatgctgatggggcagggtctgtgcctcaagttygtgcttcttcacacagatgtattacttttcaaggatagttcctcaaaaacatcccccactgccaccacctgtgtactactaaaattctctggaaatgaaagcaggcctttagtctgtgtaagaaargatgaggctggatgaaagcatttctcacctgcgttgcaggcaaccagaatgggttatcttccttctctctgggtggccccaatcacccagtagggctgtggctctgcagagggtccccatagccctactggtgttttgtgtgcgctggaacccctatggcttgagctcagagcc

SEQ ID NO: 13478 - DNA, 600 bp, Chicken  19866894217989_2
agagcagctgagacgaatgcaatccctcccactcccctgcccatttgtttcttatgaatgcataatgaatgctaatgagtgcctcacttggggcatatggttaagacatatagaggctgaaccttcctggaaagggggaggatgctgatggggcagggtctgtgcctcaagttygtgcttcttcacacagatgtattacttttcaaggatagttcctcaaaaacatcccccactgccaccacctgtgtactactaaaattctctggaaatgaaagcaggcctttagtctgtgtaagaaargatgaggctggatgaaagcatttctcacctgcgttgcaggcaaccagaatgggttatcttccttctctctgggtggccccaatcacccagtagggctgtggctctgcagagggtccccatagccctactggtgttttgtgtgcgctggaacccctatggcttgagctcagagccttgcatggggtaaggcagagttttgccagcagttctcccctcccagtgcagtgacctcgtgcttggcgacctgggctgctgctgcccacctggtataagaacatctggaacccactgcaaggtgtc

SEQ ID NO: 13479 - DNA, 600 bp, Chicken  19866894217990_1
aagagaactgctgaacacagcgtaaagcacaggagtcatcactatttccattttaaaaggacataagtggtgaccactttttcacagtctattccacaaaggccagtattttcccttagctagtgtctgcctcagaaatagtgtcagtagcctgagtcccaagtagaccacagaacatactgaatgagataccttctttagtatatcctacaagcatgttgtaaacttttttctctctaaggtatgtgaaactatttcacctcacggagactccatgcaggaaaagtgcagtggtctcamctgtgcattcacaggctttatctagcccatgggatgtgtgcaccatacagacatccagacagaggcctggctagactctgctgtgatttctggatagctacatacctgaatttccctcaagtgaaagccagggatgagatggggaagagctactgctatcaaagcaaaacaagaaaaataaagccaaacaaagaaagaaaaaacccccacaaaacaacayagtaatgtactagtgttaatgttacattttgccatctgagaacaatgtgwgaaacatgtgatctcacatcagctgtggca

SEQ ID NO: 13480 - DNA, 600 bp, Chicken  19866894217990_2
gtaaacttttttctctctaaggtatgtgaaactatttcacctcacggagactccatgcaggaaaagtgcagtggtctcamctgtgcattcacaggctttatctagcccatgggatgtgtgcaccatacagacatccagacagaggcctggctagactctgctgtgatttctggatagctacatacctgaatttccctcaagtgaaagccagggatgagatggggaagagctactgctatcaaagcaaaacaagaaaaataaagccaaacaaagaaagaaaaaacccccacaaaacaacayagtaatgtactagtgttaatgttacattttgccatctgagaacaatgtgwgaaacatgtgatctcacatcagctgtggcatctctttgagacagccagaatgtgcatccaggcgtagaaccagagaagcacctccaagcctccatgtaggccaggcaaagccacttttcctgcctatcaatctctcagacagcaagctttctctgcatcaaattcttaacactgatatgctcatttcccctggcatcccaggtacagaaataaaacaaaatcaagataattcctcttgttccccaagaac

SEQ ID NO: 13481 - DNA, 600 bp, Chicken  19866894217990_3
ctccatgcaggaaaagtgcagtggtctcamctgtgcattcacaggctttatctagcccatgggatgtgtgcaccatacagacatccagacagaggcctggctagactctgctgtgatttctggatagctacatacctgaatttccctcaagtgaaagccagggatgagatggggaagagctactgctatcaaagcaaaacaagaaaaataaagccaaacaaagaaagaaaaaacccccacaaaacaacayagtaatgtactagtgttaatgttacattttgccatctgagaacaatgtgwgaaacatgtgatctcacatcagctgtggcatctctttgagacagccagaatgtgcatccaggcgtagaaccagagaagcacctccaagcctccatgtaggccaggcaaagccacttttcctgcctatcaatctctcagacagcaagctttctctgcatcaaattcttaacactgatatgctcatttcccctggcatcccaggtacagaaataaaacaaaatcaagataattcctcttgttccccaagaacacgaaatttcttttctccaccatgagtagcaaagaaaaaatcactgaatc

SEQ ID NO: 13482 - DNA, 600 bp, Chicken  19866894217991_1
aatgttaacagatacctgctaaggtctcattaggtacttcacacacaagtaggacttcagataacaataaagaactactaagtggcacgtggtgcctttgttgataaaacaataatgaggtctgcaccatccccaccaccagctaccatacagagctaggtaccaatattgactcatatcgacacaacagaagaaaggtataaaagcccctttcaaaaaggcaatttgcaagttctcagtctctagcagagctatgtaacagcagtagaaacaacccaatctgacttgcctagccatgcwgtacagsgcacaattaagttactgatttgcagctattccaggtgcaagtcattacacttggttcttatttgaaattctgcctccatacatatgcaagaggcagctctccgttttgttggtacctccatttcgtaaaccaaaacaacaggtaacacattaacctactgcaaacgactctggttgggataaaggttttcccctgcatcttctgtagccaaagcatacaaagctgccttcaagctgcaatgctggaacaaattgataatttaagaagcaaatcatttttccaagttaatctta

SEQ ID NO: 13483 - DNA, 600 bp, Chicken  19866894217991_2
acagatacctgctaaggtctcattaggtacttcacacacaagtaggacttcagataacaataaagaactactaagtggcacgtggtgcctttgttgataaaacaataatgaggtctgcaccatccccaccaccagctaccatacagagctaggtaccaatattgactcatatcgacacaacagaagaaaggtataaaagcccctttcaaaaaggcaatttgcaagttctcagtctctagcagagctatgtaacagcagtagaaacaacccaatctgacttgcctagccatgcwgtacagsgcacaattaagttactgatttgcagctattccaggtgcaagtcattacacttggttcttatttgaaattctgcctccatacatatgcaagaggcagctctccgttttgttggtacctccatttcgtaaaccaaaacaacaggtaacacattaacctactgcaaacgactctggttgggataaaggttttcccctgcatcttctgtagccaaagcatacaaagctgccttcaagctgcaatgctggaacaaattgataatttaagaagcaaatcatttttccaagttaatcttaacatttg

SEQ ID NO: 13484 - DNA, 599 bp, Chicken  19866894217995_1
  misc_feature (1)..(130): n is any nucleotide
nnnnnnnnnnnnnnnnnnnnnnnnnnnnnnnnnnnnnnnnnnnnnnnnnnnnnnnnnnnnnnnnnnnnnnnnnnnnnnnnnnnnnnnnnnnnnnnnnnnnnnnnnnnnnnnnnnnnnnnnnnnnnnnnnnactgcctgacagaaagggttattttatctgaaaacagtgcagttacagatgagagagctcctgaaaaacatcactcacttttactagcgacatccatcacttcctaattatggctgctctcgggtggaggagcaggttcctgccgttgttcctccggagctgctctctcwcctcattgccacagcagcatgggtcaaagccggtccttcctccgtgggcttgcagrttgaattaatgcacagaggtgtctgtctgtgtcagctggtatccctgtgttacggggatggccgtggctcaccactgtggaaagcgaacaactttgtagttcagccacctactctgcagcacaagaaggtctgttaagctcctgtttggaagtcagagctttcatttcaytgtcctttgaaaagctgaatcaaatcagaacaagtygtgagtgcagtgaaaagagaaacctttggtactgctc

SEQ ID NO: 13485 - DNA, 599 bp, Chicken  19866894217995_2
  misc_feature (1)..(74): n is any nucleotide
nnnnnnnnnnnnnnnnnnnnnnnnnnnnnnnnnnnnnnnnnnnnnnnnnnnnnnnnnnnnnnnnnnnnnnnnnnactgcctgacagaaagggttattttatctgaaaacagtgcagttacagatgagagagctcctgaaaaacatcactcacttttactagcgacatccatcacttcctaattatggctgctctcgggtggaggagcaggttcctgccgttgttcctccggagctgctctctcwcctcattgccacagcagcatgggtcaaagccggtccttcctccgtgggcttgcagrttgaattaatgcacagaggtgtctgtctgtgtcagctggtatccctgtgttacggggatggccgtggctcaccactgtggaaagcgaacaactttgtagttcagccacctactctgcagcacaagaaggtctgttaagctcctgtttggaagtcagagctttcatttcaytgtcctttgaaaagctgaatcaaatcagaacaagtygtgagtgcagtgaaaagagaaacctttggtactgctcagaaacaggaaaggagctttgatcgcacttccctactgtgtgggttccccccccag

SEQ ID NO: 13486 - DNA, 600 bp, Chicken  19866894217995_3
tcacttcctaattatggctgctctcgggtggaggagcaggttcctgccgttgttcctccggagctgctctctcwcctcattgccacagcagcatgggtcaaagccggtccttcctccgtgggcttgcagrttgaattaatgcacagaggtgtctgtctgtgtcagctggtatccctgtgttacggggatggccgtggctcaccactgtggaaagcgaacaactttgtagttcagccacctactctgcagcacaagaaggtctgttaagctcctgtttggaagtcagagctttcatttcaytgtcctttgaaaagctgaatcaaatcagaacaagtygtgagtgcagtgaaaagagaaacctttggtactgctcagaaacaggaaaggagctttgatcgcacttccctactgtgtgggttccccccccaggtccctgcagccccagggcatgcatcctgcaacctcatggccagacagagctgctgggcaatcgccctcaaggttcttttccatagtgctaagtcagcttygcttctcccctcagagctttccgatcccggtgccatgctgcacgctgactgctaaagcctgctgctgcct

SEQ ID NO: 13487 - DNA, 600 bp, Chicken  19866894217995_4
caggttcctgccgttgttcctccggagctgctctctcwcctcattgccacagcagcatgggtcaaagccggtccttcctccgtgggcttgcagrttgaattaatgcacagaggtgtctgtctgtgtcagctggtatccctgtgttacggggatggccgtggctcaccactgtggaaagcgaacaactttgtagttcagccacctactctgcagcacaagaaggtctgttaagctcctgtttggaagtcagagctttcatttcaytgtcctttgaaaagctgaatcaaatcagaacaagtygtgagtgcagtgaaaagagaaacctttggtactgctcagaaacaggaaaggagctttgatcgcacttccctactgtgtgggttccccccccaggtccctgcagccccagggcatgcatcctgcaacctcatggccagacagagctgctgggcaatcgccctcaaggttcttttccatagtgctaagtcagcttygcttctcccctcagagctttccgatcccggtgccatgctgcacgctgactgctaaagcctgctgctgcctgggggggatggggcacagctcagccctccacctctt

SEQ ID NO: 13488 - DNA, 448 bp, Chicken  19866894217995_5
tcagccacctactctgcagcacaagaaggtctgttaagctcctgtttggaagtcagagctttcatttcaytgtcctttgaaaagctgaatcaaatcagaacaagtygtgagtgcagtgaaaagagaaacctttggtactgctcagaaacaggaaaggagctttgatcgcacttccctactgtgtgggttccccccccaggtccctgcagccccagggcatgcatcctgcaacctcatggccagacagagctgctgggcaatcgccctcaaggttcttttccatagtgctaagtcagcttygcttctcccctcagagctttccgatcccggtgccatgctgcacgctgactgctaaagcctgctgctgcctgggggggatggggcacagctcagccctccacctcttcctggcacaggagcagacgccagcagctgtgcccatcataca

SEQ ID NO: 13489 - DNA, 599 bp, Chicken  19866894218000_1
  misc_feature (1)..(213): n is any nucleotide
nnnnnnnnnnnnnnnnnnnnnnnnnnnnnnnnnnnnnnnnnnnnnnnnnnnnnnnnnnnnnnnnnnnnnnnnnnnnnnnnnnnnnnnnnnnnnnnnnnnnnnnnnnnnnnnnnnnnnnnnnnnnnnnnnnnnnnnnnnnnnnnnnnnnnnnnnnnnnnnnnnnnnnnnnnnnnnnnnnnnnnnnnnnnnnnnnnnnnnnnnnnnnnnnnnnnnatggcttatgtaagctttttaataactgtaaggcctcaggactggggcttgtcagactcttaggacttgcctttgttggttgaaggytttgcttaacttgtttagccaaaaccacaattttctaatgaccaggtatgtattttagccctgcttacctttgtggtgctatatcagcttcttcaataacgttgatgtatttcctgtaggtagtagatactggctatgactattattccagtagttattctgtgtagaaaggatacaggtgattccagaataacactgtgatgtagtgcaatgccaagattctagcagaaaccatggaaatgtgaacacaagcccagaggcttcagggttatacacaaattgcccattatccattactg

SEQ ID NO: 13490 - DNA, 600 bp, Chicken  19866894218000_2
tgtaggtagtagatactggctatgactattattccagtagttattctgtgtagaaaggatacaggtgattccagaataacactgtgatgtagtgcaatgccaagattctagcagaaaccatggaaatgtgaacacaagcccagaggcttcagggttatacacaaattgcccattatccattactgacgtttaaagaagtacagctggaattaggtgaaacttgttttatgagtcacaaaaagaacaaggaaacaaatgcctggtgtacgtagtacataacatctaaagtaaattcagacrttaacactgaagaacaaagaagaaagaactagttgttaggaagcaaatctagccccagactcacccttggttgtggtggaagaaactatcagtattacattcctcctgtcaaaggacttgagatgttgaatatggaagtaatccccacacacacgcccgtgtgcacaccctgactgaaaccaatgacttctgaagttgaagggagagtggaaatcagaatattctttgtattgaatagtttggactatgaatgacatattattgtaattgatctaataataataactttgtgggattttt

SEQ ID NO: 13491 - DNA, 600 bp, Chicken  19866894218011_1
attatatatatatatattatatatcctcattatttatgaggttggccatcttcttatccttaattacttaatggatttctttaaaaaaccaaggtatatagcttgaaactacccaacttaatttcagttattgaaaagtggtattttcttcattttacagtgcagaagattttgcaaaataactgtttaatcagtaaacttaaatatgatatggtttatatcttctagtaaaaagtatacacctttgcatttgaagagagtttcagaacatattaacatctctactatgacttctaagtwatattattttattattgtacttattacttagttgtaataaatattttcatggtttttattgtgtgtaacttatactcaattacaatgccttgttcttcaaatgaaagtcaagcagagctctgattgtttactctaaggtttcacattccataatttgaacttctttttgaacatctttcacagataatttaatttgtacagtgctcattattttaggatagttcatgacagtctaataattatgcagcttatggcgaaakcatgcagttgatgrccagaacaatgtttaaaacaagatca

SEQ ID NO: 13492 - DNA, 600 bp, Chicken  19866894218011_2
tttcagaacatattaacatctctactatgacttctaagtwatattattttattattgtacttattacttagttgtaataaatattttcatggtttttattgtgtgtaacttatactcaattacaatgccttgttcttcaaatgaaagtcaagcagagctctgattgtttactctaaggtttcacattccataatttgaacttctttttgaacatctttcacagataatttaatttgtacagtgctcattattttaggatagttcatgacagtctaataattatgcagcttatggcgaaakcatgcagttgatgrccagaacaatgtttaaaacaagatcaattctgatatcaaaaaacacagaaaggattagagattttgcagttctgaaaccagaaacgcaaaaagaaaggaaatataataggaataattacatatatatcagaaacacaaatagaaaatgtaatagcagtgrtgccatataagtatatgctgttttattattattaataataattttatggtattaccttctccctatttatctggaagaccaagactatcacaacagccactctgatgatgtttcatcacacacagt

SEQ ID NO: 13493 - DNA, 600 bp, Chicken  19866894218011_3
aacatctctactatgacttctaagtwatattattttattattgtacttattacttagttgtaataaatattttcatggtttttattgtgtgtaacttatactcaattacaatgccttgttcttcaaatgaaagtcaagcagagctctgattgtttactctaaggtttcacattccataatttgaacttctttttgaacatctttcacagataatttaatttgtacagtgctcattattttaggatagttcatgacagtctaataattatgcagcttatggcgaaakcatgcagttgatgrccagaacaatgtttaaaacaagatcaattctgatatcaaaaaacacagaaaggattagagattttgcagttctgaaaccagaaacgcaaaaagaaaggaaatataataggaataattacatatatatcagaaacacaaatagaaaatgtaatagcagtgrtgccatataagtatatgctgttttattattattaataataattttatggtattaccttctccctatttatctggaagaccaagactatcacaacagccactctgatgatgtttcatcacacacagttctgtacagtgtca

SEQ ID NO: 13494 - DNA, 523 bp, Chicken  19866894218011_4
aaggtttcacattccataatttgaacttctttttgaacatctttcacagataatttaatttgtacagtgctcattattttaggatagttcatgacagtctaataattatgcagcttatggcgaaakcatgcagttgatgrccagaacaatgtttaaaacaagatcaattctgatatcaaaaaacacagaaaggattagagattttgcagttctgaaaccagaaacgcaaaaagaaaggaaatataataggaataattacatatatatcagaaacacaaatagaaaatgtaatagcagtgrtgccatataagtatatgctgttttattattattaataataattttatggtattaccttctccctatttatctggaagaccaagactatcacaacagccactctgatgatgtttcatcacacacagttctgtacagtgtcagtcctacactatgaatcacttggtgtctaaggaacagtgagggctccctctgaatattctcttctcatctcagccatcctcct

SEQ ID NO: 13495 - DNA, 600 bp, Chicken  19866894218012_1
gctggctgtggggtactccacagcactctcccactattttctcctgcagttttaaatttacctcaaaaaacattgctagtgggaaaaaaatcctcgcttcatcctgtaggctgtgagatgtaccactgcaacatactcaggatttttctcacttttccccacaggcaaactcattacttaaatgtgggtaaaatagaagcatgagtaaatataaaatactgctctgtgcacagatgagttgtaaaagcacagttggatctgctttcctccagcctaacatgatggaaattcacatgactsaaagaaagcaatactaaatcgcttgtattttattatatgttgcatcttctctgtctaatttgtgtgacctttgtcgtcatttggaatcagtactcattgctgtgaaatgacagatccacagtggtatgcactgtgcctgtttacagacakccccttccgtaaggatgataaatcctaaatgaaagtggaagggaggtaaaagagagagaaagcagcttgcataaggtcattcagaggtcatgggcaaaagaattacctgttttaaaaattgaatttaaaaaaawttgtaaatttcagtgt

SEQ ID NO: 13496 - DNA, 600 bp, Chicken  19866894218012_2
acttttccccacaggcaaactcattacttaaatgtgggtaaaatagaagcatgagtaaatataaaatactgctctgtgcacagatgagttgtaaaagcacagttggatctgctttcctccagcctaacatgatggaaattcacatgactsaaagaaagcaatactaaatcgcttgtattttattatatgttgcatcttctctgtctaatttgtgtgacctttgtcgtcatttggaatcagtactcattgctgtgaaatgacagatccacagtggtatgcactgtgcctgtttacagacakccccttccgtaaggatgataaatcctaaatgaaagtggaagggaggtaaaagagagagaaagcagcttgcataaggtcattcagaggtcatgggcaaaagaattacctgttttaaaaattgaatttaaaaaaawttgtaaatttcagtgttttccctgttgatccacatattgctggcagtgatggtagtgagtgccactgtcaccttcatctagatacagtgttacaggcttgaagaactctctgatgcaactctaatgatttctcagaaatatgatatatwttagggaagaatggttt

SEQ ID NO: 13497 - DNA, 600 bp, Chicken  19866894218012_3
gaaattcacatgactsaaagaaagcaatactaaatcgcttgtattttattatatgttgcatcttctctgtctaatttgtgtgacctttgtcgtcatttggaatcagtactcattgctgtgaaatgacagatccacagtggtatgcactgtgcctgtttacagacakccccttccgtaaggatgataaatcctaaatgaaagtggaagggaggtaaaagagagagaaagcagcttgcataaggtcattcagaggtcatgggcaaaagaattacctgttttaaaaattgaatttaaaaaaawttgtaaatttcagtgttttccctgttgatccacatattgctggcagtgatggtagtgagtgccactgtcaccttcatctagatacagtgttacaggcttgaagaactctctgatgcaactctaatgatttctcagaaatatgatatatwttagggaagaatggttttggactttgcattcctcagcaaataygtacggaaaaaaattatacttgggagcgtgattatcagtatatttttaaatcagtggtcaaaaagtggaagagagtttggagagatacaaccagtagtagtgtacaag

SEQ ID NO: 13498 - DNA, 600 bp, Chicken  19866894218012_4
tgcctgtttacagacakccccttccgtaaggatgataaatcctaaatgaaagtggaagggaggtaaaagagagagaaagcagcttgcataaggtcattcagaggtcatgggcaaaagaattacctgttttaaaaattgaatttaaaaaaawttgtaaatttcagtgttttccctgttgatccacatattgctggcagtgatggtagtgagtgccactgtcaccttcatctagatacagtgttacaggcttgaagaactctctgatgcaactctaatgatttctcagaaatatgatatatwttagggaagaatggttttggactttgcattcctcagcaaataygtacggaaaaaaattatacttgggagcgtgattatcagtatatttttaaatcagtggtcaaaaagtggaagagagtttggagagatacaaccagtagtagtgtacaagtattaaatatgtaaggaagctttcagtcaagacagaattttctaagagtccttaatgaaagctgaaattgtgttacgatattccagacaatacagaacagagaacaactagactttccttgggtctgttcatgtcagcttgcttgacag

SEQ ID NO: 13499 - DNA, 600 bp, Chicken  19866894218012_5
aaatgaaagtggaagggaggtaaaagagagagaaagcagcttgcataaggtcattcagaggtcatgggcaaaagaattacctgttttaaaaattgaatttaaaaaaawttgtaaatttcagtgttttccctgttgatccacatattgctggcagtgatggtagtgagtgccactgtcaccttcatctagatacagtgttacaggcttgaagaactctctgatgcaactctaatgatttctcagaaatatgatatatwttagggaagaatggttttggactttgcattcctcagcaaataygtacggaaaaaaattatacttgggagcgtgattatcagtatatttttaaatcagtggtcaaaaagtggaagagagtttggagagatacaaccagtagtagtgtacaagtattaaatatgtaaggaagctttcagtcaagacagaattttctaagagtccttaatgaaagctgaaattgtgttacgatattccagacaatacagaacagagaacaactagactttccttgggtctgttcatgtcagcttgcttgacagggtacctggctacagtcaaaaaagtcctgagtacagctccaaa

SEQ ID NO: 13500 - DNA, 599 bp, Chicken  19866894218013_1
  misc_feature (1)..(244): n is any nucleotide
nnnnnnnnnnnnnnnnnnnnnnnnnnnnnnnnnnnnnnnnnnnnnnnnnnnnnnnnnnnnnnnnnnnnnnnnnnnnnnnnnnnnnnnnnnnnnnnnnnnnnnnnnnnnnnnnnnnnnnnnnnnnnnnnnnnnnnnnnnnnnnnnnnnnnnnnnnnnnnnnnnnnnnnnnnnnnnnnnnnnnnnnnnnnnnnnnnnnnnnnnnnnnnnnnnnnnnnnnnnnnnnnnnnnnnnnnnnnnnnnnnnnacagtggagaaatatacctttgtacttctgtttttctagaacatctttttgatgayattgtgctcatccaaattggagcttaattacattttrtcttgcagcaacagttttgtggtgttgttgctgctgttgttctctcgtattatatttcaaaggcaggagcatcttcacccttcccacacttctgccatgttaaactttgggttgtttacttgaatcccttcgatatcccagcagtgtgttccagttcagagaaactgactgttccagtgccctggatgcaattctgtgaagttcctcagcttctaattaaacatgtgggagtgatagctcgttcggagctgacagataaacc

SEQ ID NO: 13501 - DNA, 599 bp, Chicken  19866894218013_2
  misc_feature (1)..(207): n is any nucleotide
nnnnnnnnnnnnnnnnnnnnnnnnnnnnnnnnnnnnnnnnnnnnnnnnnnnnnnnnnnnnnnnnnnnnnnnnnnnnnnnnnnnnnnnnnnnnnnnnnnnnnnnnnnnnnnnnnnnnnnnnnnnnnnnnnnnnnnnnnnnnnnnnnnnnnnnnnnnnnnnnnnnnnnnnnnnnnnnnnnnnnnnnnnnnnnnnnnnnnnnnnnnnnnnacagtggagaaatatacctttgtacttctgtttttctagaacatctttttgatgayattgtgctcatccaaattggagcttaattacattttrtcttgcagcaacagttttgtggtgttgttgctgctgttgttctctcgtattatatttcaaaggcaggagcatcttcacccttcccacacttctgccatgttaaactttgggttgtttacttgaatcccttcgatatcccagcagtgtgttccagttcagagaaactgactgttccagtgccctggatgcaattctgtgaagttcctcagcttctaattaaacatgtgggagtgatagctcgttcggagctgacagataaaccartctgagacctggggaagataaagtttggcatgttc

SEQ ID NO: 13502 - DNA, 600 bp, Chicken  19866894218013_3
ttgtgctcatccaaattggagcttaattacattttrtcttgcagcaacagttttgtggtgttgttgctgctgttgttctctcgtattatatttcaaaggcaggagcatcttcacccttcccacacttctgccatgttaaactttgggttgtttacttgaatcccttcgatatcccagcagtgtgttccagttcagagaaactgactgttccagtgccctggatgcaattctgtgaagttcctcagcttctaattaaacatgtgggagtgatagctcgttcggagctgacagataaaccartctgagacctggggaagataaagtttggcatgttctttattttcccttgtgtttcattgtaatactacacatcagctgctgatatgcagccacatatggtgttaattttatacaagatttctgtggattgaaatggcttatgccatgagtggaatttaatgaaatgttggaaagaaagttgcagaaggatgaagaaaacagatttccctgttgagatgcacagataattattttcttttatgtttttttttttctctctggggattgtttctcttcagggtgaagggtaaaaataatgtt

SEQ ID NO: 13503 - DNA, 600 bp, Chicken  19866894218013_4
cagctgctgatatgcagccacatatggtgttaattttatacaagatttctgtggattgaaatggcttatgccatgagtggaatttaatgaaatgttggaaagaaagttgcagaaggatgaagaaaacagatttccctgttgagatgcacagataattattttcttttatgtttttttttttctctctggggattgtttctcttcagggtgaagggtaaaaataatgttgtttaataaaaacttcaagttctgcttttaagtctgcagtagaaagcataaaatctgtgtgaatgactctaytgtgtgtaaaggcagaaatgtaggagttggaagggacctctggagatcccccagtccgagctccccagagcagctccctacagcagtgacacaggaaagtgtcccaatgggtttggatatctcccaaaaaggagactccaaagcccctctgggcagcctgtgctggtgttccatgaaccccaaagggaagaaattttcctcatgtttgggcccattgtcccttgtcctgtcactgggcaccaccaacaagagctctgtgtcatcagcaaacttgctgtgggtgcactctgtcccttcaca

SEQ ID NO: 13504 - DNA, 600 bp, Chicken  19866894218015_1
gtccagccttgttttcactgacctgatatgttaatgtgcaggagaactacctcagcatttctgaggtgctgtttgcttggggcatgtttccctttacagatttcttattgtgcatgaactctgaggctgaatgaataatttataaagctttttacatttctatctaccgttttatggcaaggcaatcagagtgcccctcatgccatattgcttctcttcctccctctatttggtgaacctacagtcatcagtgcctgaattccttcccttatgtacctcatgctctctaaggagggctcygtgttcatcacccaatgttgtgcctttgattctagctaatagtctgtgaagggcagttcacatagcttgaacacacttggcttttctaggtgtataggagacccttgaagcctgggattcccagccatcctcatggccaacacccaagaaagagattcttccagccaaaccattttactataggtttggccgcacagacaaggcaaagcagcttcttttgcttctcacccaccgggtgagaggtgagtcagtctctcaagggaccacatagcgccgtatcaagtcttctgatttgccctg

SEQ ID NO: 13505 - DNA, 600 bp, Chicken  19866894218016_1
gttgatttcagtcactgggccagaagtgttcttccaaaccaacactgcttaaaggctctgctcagacaccaatcgttccccaaaataaaaaggtctacttgtattgaattagttcatttacagaactcagtggaattagcagtgtactcttaaattgcttcttgattgaggactcttgcctcattaatcccaaataacctatgaatgccattaaagcctaatagaataatgagacttcagaggccgtgcacacatactgtactgaaggcagccacaggctgctcagtgatgctgaaacasacacccaacatcagtgctgtaaagtgcatccccgtctgtaatagagatcccatcccctgctttggccatgactcagagttaagtcgcatccaaatacccacagcgatacttctgcaaggagttcacttctgccattcagacagctccagtagatggttctggcaggaatagaatgcattattttcctgatgtttgcaatgagttattttcatttctagttttcctttctttccctttaagaaacacagggcccaaccaatgcaaggccaagccaacgcagggccaagctttggttttgct

SEQ ID NO: 13506 - DNA, 599 bp, Chicken  19866894218020_1
  misc_feature (1)..(46): n is any nucleotide
nnnnnnnnnnnnnnnnnnnnnnnnnnnnnnnnnnnnnnnnnnnnnntggatatttctttggttttaacttattttttcagacttcttttggataagatcaattacaataaacttagttggctgcggagttttaccctgtaattattgaatgtctaaatcagtttacttgcaatatactagaaactttttaactcattggtttgccagaacttgcttttattttagtacattggagactttgttagaacagtcaagtgttggaaaagatactcataaaataaatgaaattaagttaaaaawagaatcttgctgtgtactttccagtgtaaaggagcaatatattcagtctgtttgcagtaatgttatacacttgcttcagtaagtttagcttcacaagacacagtaggggaggttcagaaagggcaggtacaagaatatcctggtacctgatagttaagagaaggaacaaaaacaagtcttagaaaatacttgcaggtatttcaagacttttcttaactttagaagaaaaaaaaaaaagatgaaaagaataaaaatggaacagatctttgttgggagaaaaagaacaaactctggcactt

SEQ ID NO: 13507 - DNA, 600 bp, Chicken  19866894218025_1
attgcaagatactgtcttacataaatacagctttacaaagtgaagaggcaatattttcaaactgatgaaaaccagaatggatatatcctgctttaaagtttgctataactcacatgggtctactgaaaacctaaattatatactaggacttgtaaccataatcttggagatgggaaatatttagtgagttaccaaatacagtggttcttctactctgataatgccactggtagaatttggtattattagtcctcaatacatcatagccacaaaaaaatgcaaatatgatgtaaactcatrcaagcacatgtatcatgaacacaaaagttgaaacgtgtatagtacaaagcctcacagacttaagttgtggttggaatcaaatcacaactgaaacaaactactgtggtagggacaatcaaacttcatttgttgaaaggtattaaagtacttgtggtagggatgtgcatcatggcatgatgcacatggcagagtgactagctgggaggaagaggaggttcccaggctggcctgggaagatgagccagctggtgctgctaatgaagacaacaaaacaaaacaaaacaaaacaaaaaaaccctt

SEQ ID NO: 13508 - DNA, 532 bp, Chicken  19866894218026_1
agcaacccacggcacccttgtttgacattaccctaaccaacttatagctttaatcaagcacagctaccaagaaaagtgaacgacgaggatggtaacgtcacatttagttttcaaacactcccgtcgacaaaggtcagcaaacgtccctcgcaccttcctgccttcccctgccgccggggcagggcagcggccccacagggctgcggccgggagcctctgagtcacgccggccccatgcagcccagcagccgggccgggcacggcggatgcagcacgcaggcagccgcagcggatacccgscgctgctgtgagcaggtagctcggtgcccataaagcggcttctgtctccccacggacgtctcgttcggggagaagacgcgattcattccacgtgacagaaaaagggaaaagccaagagagaaggcggagattgcgagcccaagaagcccgacctatacgggccgttactgcgctcgggaggctgcgagcagcttaaaacctcgctttcccccgcggaaaggcttcctcccgg

SEQ ID NO: 13509 - DNA, 599 bp, Chicken  19866894218028_1
  misc_feature (1)..(80): n is any nucleotide
nnnnnnnnnnnnnnnnnnnnnnnnnnnnnnnnnnnnnnnnnnnnnnnnnnnnnnnnnnnnnnnnnnnnnnnnnnnnnnnnttgtttctctctgcacacaaacggctttgctgctctagtgatgcagagggctgcttcagccatgctgagaatcacaggtgctacttaaactctgtcagacgtgtcttgatggtagagagcaaaccaccaggccccaagcctgcagatgtgttatttgatcaatgttttgattatgtctgataaaaggaatcatccaggtgcatcacctgtcacacagagmggaaaggaragaggaagtcatgggcagcwtctccctcagaaggagaaagttttacagtacagaacagagtatcaatgtgcttcctagtgagagctgaagaaaatacttcaataaagcaaatactggacaccagaaaaacaaaacagtttgttttcctgtgttttacataagcgcytattattttctcttttgcctgacagaagggaagcttggagtgagaatatgttgctggtttgccaaaatgctatgcagcaaaataataaatacatagaagtagccagagtctgtgtgataagaga

SEQ ID NO: 13510 - DNA, 599 bp, Chicken  19866894218028_2
  misc_feature (1)..(71): n is any nucleotide
nnnnnnnnnnnnnnnnnnnnnnnnnnnnnnnnnnnnnnnnnnnnnnnnnnnnnnnnnnnnnnnnnnnnnnnttgtttctctctgcacacaaacggctttgctgctctagtgatgcagagggctgcttcagccatgctgagaatcacaggtgctacttaaactctgtcagacgtgtcttgatggtagagagcaaaccaccaggccccaagcctgcagatgtgttatttgatcaatgttttgattatgtctgataaaaggaatcatccaggtgcatcacctgtcacacagagmggaaaggaragaggaagtcatgggcagcwtctccctcagaaggagaaagttttacagtacagaacagagtatcaatgtgcttcctagtgagagctgaagaaaatacttcaataaagcaaatactggacaccagaaaaacaaaacagtttgttttcctgtgttttacataagcgcytattattttctcttttgcctgacagaagggaagcttggagtgagaatatgttgctggtttgccaaaatgctatgcagcaaaataataaatacatagaagtagccagagtctgtgtgataagagacctgagaag

SEQ ID NO: 13511 - DNA, 599 bp, Chicken  19866894218028_3
  misc_feature (1)..(51): n is any nucleotide
nnnnnnnnnnnnnnnnnnnnnnnnnnnnnnnnnnnnnnnnnnnnnnnnnnnttgtttctctctgcacacaaacggctttgctgctctagtgatgcagagggctgcttcagccatgctgagaatcacaggtgctacttaaactctgtcagacgtgtcttgatggtagagagcaaaccaccaggccccaagcctgcagatgtgttatttgatcaatgttttgattatgtctgataaaaggaatcatccaggtgcatcacctgtcacacagagmggaaaggaragaggaagtcatgggcagcwtctccctcagaaggagaaagttttacagtacagaacagagtatcaatgtgcttcctagtgagagctgaagaaaatacttcaataaagcaaatactggacaccagaaaaacaaaacagtttgttttcctgtgttttacataagcgcytattattttctcttttgcctgacagaagggaagcttggagtgagaatatgttgctggtttgccaaaatgctatgcagcaaaataataaatacatagaagtagccagagtctgtgtgataagagacctgagaagaaattagagttcttgtgatg

SEQ ID NO: 13512 - DNA, 600 bp, Chicken  19866894218028_4
cagacgtgtcttgatggtagagagcaaaccaccaggccccaagcctgcagatgtgttatttgatcaatgttttgattatgtctgataaaaggaatcatccaggtgcatcacctgtcacacagagmggaaaggaragaggaagtcatgggcagcwtctccctcagaaggagaaagttttacagtacagaacagagtatcaatgtgcttcctagtgagagctgaagaaaatacttcaataaagcaaatactggacaccagaaaaacaaaacagtttgttttcctgtgttttacataagcgcytattattttctcttttgcctgacagaagggaagcttggagtgagaatatgttgctggtttgccaaaatgctatgcagcaaaataataaatacatagaagtagccagagtctgtgtgataagagacctgagaagaaattagagttcttgtgatggggatttaattattctagtatcgacaagaatgagaattaagggaggaatcaacaggctgacttccacaggcagtaaaaaacagatttatctttcactgtttattgagctcttagatataataaattcaataatggtctggtgggtat

SEQ ID NO: 13513 - DNA, 600 bp, Chicken  19866894218034_1
tggaaaaatttgtgcctgactctcactctggacagtgtaaaggaatggcataagaaagaattttagcagctgccaatatgtgtgctggaggtggctgatactgaacagaactgtggagtccttagacagtgaataactgtatatttagaaatagcctgtttaaaaaatagatgaattagtttattactgataaaaatgatacacaaatctaacaagatatttgtcaaaattatccctctactaacttccttatctggaatatgttccatagaccctatagatataaagaaagacatacamgggtagttggaaattagcatgatttgtacccacatgccttcatttgtgtccactgcaatcaagtgattgacagcataacataaatcgagatttttttttccttattaatataatatgaactgcaaaaagattaaagtctcatttacataacctgagatgaaaggaggtgaaatattgtaattatcttttcaagctaaatttgtactgccatttaaaattaacctatgcaaatgacaggttaaaccccatgaaagctccagcaatgtttgaaaaaaatacaatcaatttcaagttaggagt

SEQ ID NO: 13514 - DNA, 600 bp, Chicken  19866894218036_1
gtatagggtaagtgagaataaacaaaatctcttcaggtatgttgatatgcagtggcaaaatacaccattgggattttttctcacatctctgaactgttcgttagttgtgtcttattgagttgtcatgacaagcttcttgctcaaatacacaatttttattttcctcttggatagaatttaaatcaagttctttcttcaattataccttcctcaaggcttctgaaataatctaaggattatgaactgtccttatctctgatactctcccagaaacgtgagctgactggattaatttctttraatttttcttatcagatacttcaagtatcatccacaaagggaaaacagatttgttctcattcaggagacagaaatcatttagaggacctgcagccttgttgtcacttgtttgaagtctggcagactctgattactgtccctgactctggatatataagttgagttttcagattgacattcccaaccaccacttcaccacactgkggaaaggataggtttcaagtggtggcattggtctgtcaggcttcttcactccactccagagtcaaygtactttaacaacaagtttgtgatttgact

SEQ ID NO: 13515 - DNA, 600 bp, Chicken  19866894218036_2
ccttcctcaaggcttctgaaataatctaaggattatgaactgtccttatctctgatactctcccagaaacgtgagctgactggattaatttctttraatttttcttatcagatacttcaagtatcatccacaaagggaaaacagatttgttctcattcaggagacagaaatcatttagaggacctgcagccttgttgtcacttgtttgaagtctggcagactctgattactgtccctgactctggatatataagttgagttttcagattgacattcccaaccaccacttcaccacactgkggaaaggataggtttcaagtggtggcattggtctgtcaggcttcttcactccactccagagtcaaygtactttaacaacaagtttgtgatttgacttctttttaaatgcctagctaggtaattttaagtagtgtctggttcatggaaaagatctgatacggtggcaaaatgtgagttttgattttttgtttatttatttaaaagtggactgaaaagggaaacatgagtggactaataggagaagtgcattagtaagatgagcaaaaaggacagacagagcgaggcatgaaagtagataaa

SEQ ID NO: 13516 - DNA, 600 bp, Chicken  19866894218036_3
aaacgtgagctgactggattaatttctttraatttttcttatcagatacttcaagtatcatccacaaagggaaaacagatttgttctcattcaggagacagaaatcatttagaggacctgcagccttgttgtcacttgtttgaagtctggcagactctgattactgtccctgactctggatatataagttgagttttcagattgacattcccaaccaccacttcaccacactgkggaaaggataggtttcaagtggtggcattggtctgtcaggcttcttcactccactccagagtcaaygtactttaacaacaagtttgtgatttgacttctttttaaatgcctagctaggtaattttaagtagtgtctggttcatggaaaagatctgatacggtggcaaaatgtgagttttgattttttgtttatttatttaaaagtggactgaaaagggaaacatgagtggactaataggagaagtgcattagtaagatgagcaaaaaggacagacagagcgaggcatgaaagtagataaagggaatttgtgtaatgagctattctaaaattacattactagtaagaaaaaatgcaaagagatcact

SEQ ID NO: 13517 - DNA, 600 bp, Chicken  19866894218040_1
taagtatacacttgattctcaaaatacttatttatttatacttcagtaaaaatatatctgcccctcctggcaaaatgaaatattcttaccatgtttttccaagtgctggcagcaactgtctacaagccgtggaacctgcctgtaaatagggttcaggcttagtttcttatctcttgccttttctttcttgctctgggcttctgctggcaaagagagctggagagcttctaacaaccgtgactgattgtcatcaagatcagtaatagagtccacagacattgcaccctgtaacatatatayacatgcataracattcagtatggctgtagaaatctaaggaccaccatatctcatctaacaatgatttctgcctgcctgcatttaaaaaaaaaaaaaacttatccaaaatacaatttgctctaccacttttataaattggtcaagatataatattagagtagtggacgcaaaaatctggacagtacccatgatatcattattatatcacaagaaacacaatgctttacattcatttgctgtgtttttagtgctataaaagcctggatattcttcaggacaaggatgagtcagaatttgtgc

SEQ ID NO: 13518 - DNA, 600 bp, Chicken  19866894218040_2
cttgattctcaaaatacttatttatttatacttcagtaaaaatatatctgcccctcctggcaaaatgaaatattcttaccatgtttttccaagtgctggcagcaactgtctacaagccgtggaacctgcctgtaaatagggttcaggcttagtttcttatctcttgccttttctttcttgctctgggcttctgctggcaaagagagctggagagcttctaacaaccgtgactgattgtcatcaagatcagtaatagagtccacagacattgcaccctgtaacatatatayacatgcataracattcagtatggctgtagaaatctaaggaccaccatatctcatctaacaatgatttctgcctgcctgcatttaaaaaaaaaaaaaacttatccaaaatacaatttgctctaccacttttataaattggtcaagatataatattagagtagtggacgcaaaaatctggacagtacccatgatatcattattatatcacaagaaacacaatgctttacattcatttgctgtgtttttagtgctataaaagcctggatattcttcaggacaaggatgagtcagaatttgtgcatgcagctca

SEQ ID NO: 13519 - DNA, 600 bp, Chicken  19866894218043_1
cttagtagttgctatcctctctttgtccccatagcatgttgatgtggggatatattgtatatacaatccctattatttcaaagtgatggcaacaccccaaggatgtttactcaggcgggagactgagcagggttttctcatgattgtaaacagagcatttaaaacaatgtaatccaacttatagcctgttcccgtttttaggcattcaagcctacatgacagactgatgagctctgcatgtttgccaggaaatccaggttaaactcagtcccctgaacttaagcttctgcatcctgactytcatcctgttttcagaagaactggggatgttgcagaggggaagttgtgtattttctctcttgggaaatagatctgtttgctctcagtgcttactccagtggcccttaaacaagtttcagttatgatgtaycagagagctgccagaaaggagggaagtaagtgagaagcccaagagtactgcatacagataggatgaggtacagtcactcctgtatactgatttatttattcatgtatttatttaatttgcagctgctagagaaaggaaagacagaaagcaatgcatgggggtaacacttg

SEQ ID NO: 13520 - DNA, 600 bp, Chicken  19866894218043_2
ggttttctcatgattgtaaacagagcatttaaaacaatgtaatccaacttatagcctgttcccgtttttaggcattcaagcctacatgacagactgatgagctctgcatgtttgccaggaaatccaggttaaactcagtcccctgaacttaagcttctgcatcctgactytcatcctgttttcagaagaactggggatgttgcagaggggaagttgtgtattttctctcttgggaaatagatctgtttgctctcagtgcttactccagtggcccttaaacaagtttcagttatgatgtaycagagagctgccagaaaggagggaagtaagtgagaagcccaagagtactgcatacagataggatgaggtacagtcactcctgtatactgatttatttattcatgtatttatttaatttgcagctgctagagaaaggaaagacagaaagcaatgcatgggggtaacacttgtggctgcatctggcatttcacaggcattcctgccacctttggatgccggtggatgttaggaattgccaccttctgaatgagtcacttgttcttttcttgaactgtagcactcaagcatgctactgaccaa

SEQ ID NO: 13521 - DNA, 529 bp, Chicken  19866894218047_1
tgtgcagctagcctttctggtggcagctggctgttgcatacactgctagttgatgcctctagggttcagttttattaacaaacatgcttgtctagatggcaatcatagattgagcagctccctccctgctctccccttccgcaggctgcttcactgcaggaatgagcaacagatgataggatggactttaatcagaactactgccaaaaagaaagtctgcacaactgtgaggtcagcttagcacaagagggttatactagatcatgcaaccctgtgtctgctgttggctaaaagcccatstgcacacttactacagcctrgctgaaatgtggctgtgtgattgagtcaacacctcgcccccatcagatccttttatcatagctttgaaatctttttgtgaatctacagtattttagtcttcctacaaataattatttttatataacaccttaactaagacctttctaatggggtaaagggaatgtctaagaaatttctttcctccccctacaccaaacacctgatgtca

SEQ ID NO: 13522 - DNA, 509 bp, Chicken  19866894218047_2
tggcagctggctgttgcatacactgctagttgatgcctctagggttcagttttattaacaaacatgcttgtctagatggcaatcatagattgagcagctccctccctgctctccccttccgcaggctgcttcactgcaggaatgagcaacagatgataggatggactttaatcagaactactgccaaaaagaaagtctgcacaactgtgaggtcagcttagcacaagagggttatactagatcatgcaaccctgtgtctgctgttggctaaaagcccatstgcacacttactacagcctrgctgaaatgtggctgtgtgattgagtcaacacctcgcccccatcagatccttttatcatagctttgaaatctttttgtgaatctacagtattttagtcttcctacaaataattatttttatataacaccttaactaagacctttctaatggggtaaagggaatgtctaagaaatttctttcctccccctacaccaaacacctgatgtca

SEQ ID NO: 13523 - DNA, 600 bp, Chicken  19866894218048_1
attaactgcacaaagatagaaagtttttcttgttgcttctaaaacattctattctgtccaggtacaagtagattttgtctcttaaattcttgaaataacaagctaaaaacaaattattggcttttttatagatttagttgtatgcaatttttaaacagtttttttacaaacccatagtagtctctgagctacaaactctgctccattccaatgctgatactttgtgagaggcagcaagacatggaaaaatgtatcttgtccacccaaatttgcttcctaccatctgttccctcctctttrctttgtctcacttgttcaagccaagcataatagtgagatatgcaaaagcaaagacgattagtatcacaacccacactggagatacaaaatgtgaagaaaagagtttgggaatactatggaaataaatttgcactgtaatgaactaatgtactctgctatttgccaccctctagtaactcacttacaatcctattatcggtgctcataaagggaattgtcacatttataaagtctcgagaataagcactgcttgcaaacaacaagtagaactgtgatagcaacagccaaacagcttattta

SEQ ID NO: 13524 - DNA, 600 bp, Chicken  19866894218053_1
aatgacatttcagtctacactacagtgaaaactattttcagtgttttaatgtattgatttgtgacaatgacacatttgttgacagtgtactcctaagtagcgctttgtagatctactgtaattaactgtgagcatggcataaaatgattaaaaggaaactaggttgaggttgattttgtctacatttggttttgaaggagagatgatagtcagatacttgttagaaaatttccatggaactggaagaactttacttttttcctcatgtaagactcttttttttttttttttttttttttycctgaaagaatactttccaggtgtttggattaaccatttaagacaggattatttttcgactccatggtgatacaattttaaagaaaaaaactgtgatctatgtgagttaatctttcagtaaaggccatgggattttttctcatgctgctcatttacatctgtgatttagttgcctaagcaggcaaatgtagctgtcttacttgcctaaacagtcatctactacatttaagatggttgagggtctcaaggccagagtttgtcatcatatctcctgcagagtacctgccatttacacaagga

SEQ ID NO: 13525 - DNA, 599 bp, Chicken  19866894218058_1
  misc_feature (1)..(49): n is any nucleotide
nnnnnnnnnnnnnnnnnnnnnnnnnnnnnnnnnnnnnnnnnnnnnnnnnccaatttagagagaaggatgtggtgagggaccatgtcaaaggccttgcagaagtccaggtagatgacatccacagcccttctcccacccaccaaagccatcactccatcatagaaggccaccagattggtcaggcacgatctgcccttggtgaagccatgctggctgtctcggatcacctttttatctcgtatgtgccttagcatagcttctaggaggatctgctccacgatcttcccaggcacagaggtraggcgcaccggcgtgtagttccccggatcctcctttctccctttcttaacaatgggagtaatgtttccctttttccagtcaccggggacttcaccagacagccatcatttttcaaatatgatggagagcggctcggcaaccacatcagccatctctttcaggaccccaggatggatatcatccagccccatggacttatacacattcattgtcatgaggagaactcggacttgttccactgttacagtgggacagaaatcacacccccacacactcacctacaggctcgtgtcctggca

SEQ ID NO: 13526 - DNA, 583 bp, Chicken  19866894218058_2
acagcccaggctgcctccaatcttaatgtctctaatgctttcctcttcattactgagcaccaggtccagcaaggcttcacctcggttcggtccatctattacctggaccaggaagttgtcctgaacagactccaggaatctcctggattgtcggccacctgccaggccactatcccagcagatatccgggtggctgaaatcccccatcaggacaggagcccgcgagcgcaacacctcctgcagctgaagcaagaaggcctggtccacagcctcctcctaattgggtggcctgtagcagaycccagccactagatgccctttgctggactgatccttgattttcacccacaaactctcgtcctgatcgtggctgttcctyagacacagctcttcacaatctatccacttcctaacatagggggcaatgccgccacccctcctaccctgtctatcccttctgaatagcctatagtcctcagtcagggtattccaattgtgcaattcatcccaccatgtttccgtgatagcaatctcaaactgcaatttctgtcatagcaaaacaatgaaaaaatgagtttttgag

SEQ ID NO: 13527 - DNA, 504 bp, Chicken  19866894218058_3
cctcggttcggtccatctattacctggaccaggaagttgtcctgaacagactccaggaatctcctggattgtcggccacctgccaggccactatcccagcagatatccgggtggctgaaatcccccatcaggacaggagcccgcgagcgcaacacctcctgcagctgaagcaagaaggcctggtccacagcctcctcctaattgggtggcctgtagcagaycccagccactagatgccctttgctggactgatccttgattttcacccacaaactctcgtcctgatcgtggctgttcctyagacacagctcttcacaatctatccacttcctaacatagggggcaatgccgccacccctcctaccctgtctatcccttctgaatagcctatagtcctcagtcagggtattccaattgtgcaattcatcccaccatgtttccgtgatagcaatctcaaactgcaatttctgtcatagcaaaacaatgaaaaaatgagtttttgag

SEQ ID NO: 13528 - DNA, 600 bp, Chicken  19866894218060_1
ttctttctttctttctttctttctttctttctttctttctttctttctttctttctttctttctttctttctttctttctttcttttaaaaaaaaatacccagcagtggtgtttacaaatagtgaaaaataaacgcaggacttcaaaggcatttggaagtatattgttgtaatgacataaatagaacatcatgtttacaggtacgttgaaggtgctcagctgcatgaagatgtggttcagagtagagctcgaaaacctttaaggaagagactcagggttgaatttacttacatgtgtgaytttgaagcaccattgtgagcaataagtatcactatctgtgaactcacccttcctttactttgccacatccttggtacttttagcctgcactccacaggaagactcccttgggcaaaatgaatctgcacacagctagatccaagtgttatgtgtaaggcataacatatttaaacctgcagtatgtcttcagagccccacaaaacagaattaacacattgggaagtctggctgttagtcttagtttgacaatattcttattgtatcctactaatatgattttcaaagatttatacattaatt

SEQ ID NO: 13529 - DNA, 600 bp, Chicken  19866894218060_2
aagcaccattgtgagcaataagtatcactatctgtgaactcacccttcctttactttgccacatccttggtacttttagcctgcactccacaggaagactcccttgggcaaaatgaatctgcacacagctagatccaagtgttatgtgtaaggcataacatatttaaacctgcagtatgtcttcagagccccacaaaacagaattaacacattgggaagtctggctgttagtcttagtttgacaatattcttattgtatcctactaatatgattttcaaagatttatacattaatttttygtacattaatccctgaaactatgcttgaaaaactcatgctataaatatcacatggctaatgcacattccagtgtcagacaaaatttacaagaaacagacaaactttagaataataatttcattatatcactcttataaatcttaccagctattctgacactttaattacaaagtgacactttcagtcttaacatattgaggccagtataataaatcatttcacttaatatatgtcatgactttggctactgtagaggagagattttacaatctatctcccttactaagtcagaaagataa

SEQ ID NO: 13530 - DNA, 599 bp, Chicken  19866894218061_1
  misc_feature (1)..(64): n is any nucleotide
nnnnnnnnnnnnnnnnnnnnnnnnnnnnnnnnnnnnnnnnnnnnnnnnnnnnnnnnnnnnnnnnagctgagtagagggggacaatcacctccttctccctgctggtcaccccttttttaatgcagcccagaacacagtttccaagaagcttttaaacatggttttaataatctccttcctcagagggtgcacaattagcacacttgcttaggatacgaggagtcagggtttgctcttgtatacatttatatattcagagtatttttatgtagggtttctaatgtgagttagaacagtggrgaagttaaacacatggatctcccatgccaccctcggctcttgcagacatttccctgcaccttggatctgaaaataggtgttttgaaactatttttgtgaaagtgctgaaagatacgtttccgttccagccccaaattcagaagttttcctgaaacaaaatcgtcacctcccacctccagttggatttagacacatgtgaatgtcagaggtgaaagaggcaaagaatgcagaggtggcagtgcgtagaggtggtggcaatggtctctggcagccacagagtgcagttctgctgggtaact

SEQ ID NO: 13531 - DNA, 600 bp, Chicken  19866894218061_2
tgcaagcagtgaatgtgcaaagagaaaaaggtgctgcatgctgctcttggcattagacagatgtcttagttgaggctttcataagctggcttttgatacaggagactttataaaacctcattaaatcaatccccagcctaaattgtgcttcctccatgtgtgttgctgttggtgctgtgccctctgactcccagattggaacaatgtcagatgaaactcacagtctcattttcagtgctgtttaagctgtctttggtagcagtatttttaaagggaacccatgattcatggataaggtgyttccttccaatggacagcaaaatattaggcctcttcttggacgtaactagagatagaatgagaggcaatggcctcaagttgcatcaggggaggttcgtgttggatgttaggaaaattttgctctcataaagagcagtgatgcagtggyacagctgcccagggaggtgatggggtcactgtccctggagmtgttccagaacyatggggatgtggcastgagggatgtgggcagtgggcatggtggggtcagttgggattggacttggtgatcactgaggtctcttccaaccttcctgattc

SEQ ID NO: 13532 - DNA, 600 bp, Chicken  19866894218061_3
ttcctccatgtgtgttgctgttggtgctgtgccctctgactcccagattggaacaatgtcagatgaaactcacagtctcattttcagtgctgtttaagctgtctttggtagcagtatttttaaagggaacccatgattcatggataaggtgyttccttccaatggacagcaaaatattaggcctcttcttggacgtaactagagatagaatgagaggcaatggcctcaagttgcatcaggggaggttcgtgttggatgttaggaaaattttgctctcataaagagcagtgatgcagtggyacagctgcccagggaggtgatggggtcactgtccctggagmtgttccagaacyatggggatgtggcastgagggatgtgggcagtgggcatggtggggtcagttgggattggacttggtgatcactgaggtctcttccaaccttcctgattctctgattccatgtgggaaaatatgaaacataaatgtcaagttttaattaaaataattttatctgaatgcgatacgagttagtattgatgtccagatatgtctgggattcatcttgaaatgatctgtctcatttgtgtggtttcattag

SEQ ID NO: 13533 - DNA, 600 bp, Chicken  19866894218061_4
cccagattggaacaatgtcagatgaaactcacagtctcattttcagtgctgtttaagctgtctttggtagcagtatttttaaagggaacccatgattcatggataaggtgyttccttccaatggacagcaaaatattaggcctcttcttggacgtaactagagatagaatgagaggcaatggcctcaagttgcatcaggggaggttcgtgttggatgttaggaaaattttgctctcataaagagcagtgatgcagtggyacagctgcccagggaggtgatggggtcactgtccctggagmtgttccagaacyatggggatgtggcastgagggatgtgggcagtgggcatggtggggtcagttgggattggacttggtgatcactgaggtctcttccaaccttcctgattctctgattccatgtgggaaaatatgaaacataaatgtcaagttttaattaaaataattttatctgaatgcgatacgagttagtattgatgtccagatatgtctgggattcatcttgaaatgatctgtctcatttgtgtggtttcattaggccctatggtacctcatgtttatgttcaacacactcatagc

SEQ ID NO: 13534 - DNA, 600 bp, Chicken  19866894218061_5
caatgtcagatgaaactcacagtctcattttcagtgctgtttaagctgtctttggtagcagtatttttaaagggaacccatgattcatggataaggtgyttccttccaatggacagcaaaatattaggcctcttcttggacgtaactagagatagaatgagaggcaatggcctcaagttgcatcaggggaggttcgtgttggatgttaggaaaattttgctctcataaagagcagtgatgcagtggyacagctgcccagggaggtgatggggtcactgtccctggagmtgttccagaacyatggggatgtggcastgagggatgtgggcagtgggcatggtggggtcagttgggattggacttggtgatcactgaggtctcttccaaccttcctgattctctgattccatgtgggaaaatatgaaacataaatgtcaagttttaattaaaataattttatctgaatgcgatacgagttagtattgatgtccagatatgtctgggattcatcttgaaatgatctgtctcatttgtgtggtttcattaggccctatggtacctcatgtttatgttcaacacactcatagcagtccagtttta

SEQ ID NO: 13535 - DNA, 600 bp, Chicken  19866894218061_6
ctcacagtctcattttcagtgctgtttaagctgtctttggtagcagtatttttaaagggaacccatgattcatggataaggtgyttccttccaatggacagcaaaatattaggcctcttcttggacgtaactagagatagaatgagaggcaatggcctcaagttgcatcaggggaggttcgtgttggatgttaggaaaattttgctctcataaagagcagtgatgcagtggyacagctgcccagggaggtgatggggtcactgtccctggagmtgttccagaacyatggggatgtggcastgagggatgtgggcagtgggcatggtggggtcagttgggattggacttggtgatcactgaggtctcttccaaccttcctgattctctgattccatgtgggaaaatatgaaacataaatgtcaagttttaattaaaataattttatctgaatgcgatacgagttagtattgatgtccagatatgtctgggattcatcttgaaatgatctgtctcatttgtgtggtttcattaggccctatggtacctcatgtttatgttcaacacactcatagcagtccagttttaccacgcaggtagcta

SEQ ID NO: 13536 - DNA, 600 bp, Chicken  19866894218063_1
gctgcatgtttgaacacttctgtgtgccagagcagcagtatgatttctgcatgctgcctccagaaaaaacctgcattttgaatagtcttcagtgccgagagccaaagctggagaagacaaggataagggcaccacagaggggatgcattcaggttctgggagtcagccacgagctctctactgtgaagtggcttttactggcatcacctacttgctttgacacctgatgccctacagagtgtaaacagaaaacacatcaggaaaacagtcaggaagaacagatagaagactgttacaggstttacattttccaggcccgatttgcagtgaatggttgagctttactgccaaggtaaggggcaccaggatccagartgagacctggtattcttggcaaactgaattaaaagtggcaatgatagcatgtggctcrcattgaaagcacttagatagggaaagcactgaaaaagccatttgtatttagagagctgtcatcctcacctgcaggctccagcactgaattcagtagagctgaaacctctcatcatcaaagagcgctctcctaaacaaatgactttactcttcatacaaggatcctta

SEQ ID NO: 13537 - DNA, 600 bp, Chicken  19866894218063_2
ttttgaatagtcttcagtgccgagagccaaagctggagaagacaaggataagggcaccacagaggggatgcattcaggttctgggagtcagccacgagctctctactgtgaagtggcttttactggcatcacctacttgctttgacacctgatgccctacagagtgtaaacagaaaacacatcaggaaaacagtcaggaagaacagatagaagactgttacaggstttacattttccaggcccgatttgcagtgaatggttgagctttactgccaaggtaaggggcaccaggatccagartgagacctggtattcttggcaaactgaattaaaagtggcaatgatagcatgtggctcrcattgaaagcacttagatagggaaagcactgaaaaagccatttgtatttagagagctgtcatcctcacctgcaggctccagcactgaattcagtagagctgaaacctctcatcatcaaagagcgctctcctaaacaaatgactttactcttcatacaaggatccttatgcaactgaatcagtttttatatgaggctgtatcactattgaatatattccacaatctggaagactcagtcccta

SEQ ID NO: 13538 - DNA, 600 bp, Chicken  19866894218063_3
acagaggggatgcattcaggttctgggagtcagccacgagctctctactgtgaagtggcttttactggcatcacctacttgctttgacacctgatgccctacagagtgtaaacagaaaacacatcaggaaaacagtcaggaagaacagatagaagactgttacaggstttacattttccaggcccgatttgcagtgaatggttgagctttactgccaaggtaaggggcaccaggatccagartgagacctggtattcttggcaaactgaattaaaagtggcaatgatagcatgtggctcrcattgaaagcacttagatagggaaagcactgaaaaagccatttgtatttagagagctgtcatcctcacctgcaggctccagcactgaattcagtagagctgaaacctctcatcatcaaagagcgctctcctaaacaaatgactttactcttcatacaaggatccttatgcaactgaatcagtttttatatgaggctgtatcactattgaatatattccacaatctggaagactcagtccctacctacattggattgattattggatttgagatgaacaaaatccatatgcttggcttcct

SEQ ID NO: 13539 - DNA, 600 bp, Chicken  19866894218067_1
agcgagagatcaggatctatgattcacaaaactctctcagatcatcattaccaaacaaaaaaagtttgacttaatgactacacttaattgcagtgacttaattttaattttgcaagtttgtttgtttgtttcttttcctcctatttccctgatcccaatttagggaagcatttggttatgtgacaaatgtttcataatctcctttttatgagtttttgctcaaagtctgttttcatttgtatgtagcttgatttaagtcatatacaaaaatataatccattaaacagcaaacagaaaacrcattgctgattataagaagaagttaaaaactcaggagcccccccagaagtacatgttgggttttattaatggtgaaacatgcaggaattgttgtctacgatgaaaaaagacatatgaaattaccagaagtactgaaagcattcctttccttaaatacaatgcctaaaaagagtacatgcaaatcatgatttagaagctgactgttttagtaaaggtttcctgctcgctgattttagtcacgattgaaatcggcgattttaatccccccgaataacccttcccagcaggagcagtgctgat

SEQ ID NO: 13540 - DNA, 600 bp, Chicken  19866894218079_1
tgctagacctctagcaagatgatcttcaagggaaaagctcaatttggatgagaacaatcactgaaatacactattaaagtatgttcctcaagtatcaagtatttttcctttttcattctccacaagtatttttctcctccttattgtaggctgtgaacttcatctttcacgtgatgtaaataaacagtagttaaccaaccaagagcaacatctgtcttatctgtcactagctttcaactcttccatctgccatcaaactgggctctggatcctggaagtatcagtctaatatgtcagcarcagcagcatctctctatttctcttagtcactcagtccaatctcaagctttgtacttcttgttcttacacaatatttttcttatactctttatgaaatagagtatcttcctgctctgatatttttttcttacaatggatgtgttgcaatttttatttcaaattaaaaatgttggctcagtttcctgagttcagaggtttctctgatttaagtgcaaaccaaagatggtcctctatgaattgctaaattattctggaatgtttcaggcaccttcagatgtcttgtttgatattacaytcaga

SEQ ID NO: 13541 - DNA, 600 bp, Chicken  19866894218079_2
agcarcagcagcatctctctatttctcttagtcactcagtccaatctcaagctttgtacttcttgttcttacacaatatttttcttatactctttatgaaatagagtatcttcctgctctgatatttttttcttacaatggatgtgttgcaatttttatttcaaattaaaaatgttggctcagtttcctgagttcagaggtttctctgatttaagtgcaaaccaaagatggtcctctatgaattgctaaattattctggaatgtttcaggcaccttcagatgtcttgtttgatattacaytcagattttgcaaagttacccatcccaagtaggaggctgatcactgtgaattatgataatgagagcttgggtcaaccttcccatgttgaaattctcacagactttcccactgatataaatggaactatttgcaggagatttcctgcttgcccttcmagacactttgcacattgggcctcaaataacatctccagcagataatgcagatattatcttataacacatttagctgaaatgatactggtttaaaatgaagatttattatccttaatggcactgatctctttcctattaaagccc

SEQ ID NO: 13542 - DNA, 600 bp, Chicken  19866894218079_3
tatttcaaattaaaaatgttggctcagtttcctgagttcagaggtttctctgatttaagtgcaaaccaaagatggtcctctatgaattgctaaattattctggaatgtttcaggcaccttcagatgtcttgtttgatattacaytcagattttgcaaagttacccatcccaagtaggaggctgatcactgtgaattatgataatgagagcttgggtcaaccttcccatgttgaaattctcacagactttcccactgatataaatggaactatttgcaggagatttcctgcttgcccttcmagacactttgcacattgggcctcaaataacatctccagcagataatgcagatattatcttataacacatttagctgaaatgatactggtttaaaatgaagatttattatccttaatggcactgatctctttcctattaaagcccaccatctaccaaagggtatctcatggctcctctgcaaagctcatgaacaaacatgctttctctacctcttctgctctatcaatgcttttccttcacacccttttcaacttatcaaactcttaaagcaagaccacatctatttgtagcaccttttct

SEQ ID NO: 13543 - DNA, 599 bp, Chicken  19866894218080_1
  misc_feature (1)..(45): n is any nucleotide
nnnnnnnnnnnnnnnnnnnnnnnnnnnnnnnnnnnnnnnnnnnnnacatacaagagagtaactattttgacaacctgtagttttaataactcacgaatgttttagtcagcagacaaagattttatgactaaaattgcaacattttactgaatcattttacttctttccaccccctctccccctctccccccaactaaaagaataaaaccttgtgatgattattgtcctataaaagaaccccttcccctcctgttctttttttcttcctcagtattacctcttctgtttttctgcaaggawttttccaacctatcaatatattttccacaaaagtgtacagcaagtggcaaaatgcattaaarctattgctttactcaattacttaaattccaaaacactaaacttgtaagattttcatgtcctttggcttatgcaaagcttggtctatatcagaatacagtgaagacaagctaatagcactgtgtttacctatctctatgtgtccgattaatcacccaaagagcccaaaggataaccaactataaacattactaaaagctactggttggcaccatttgttttggttgaggggcaccaaa

SEQ ID NO: 13544 - DNA, 600 bp, Chicken  19866894218080_2
tattttgacaacctgtagttttaataactcacgaatgttttagtcagcagacaaagattttatgactaaaattgcaacattttactgaatcattttacttctttccaccccctctccccctctccccccaactaaaagaataaaaccttgtgatgattattgtcctataaaagaaccccttcccctcctgttctttttttcttcctcagtattacctcttctgtttttctgcaaggawttttccaacctatcaatatattttccacaaaagtgtacagcaagtggcaaaatgcattaaarctattgctttactcaattacttaaattccaaaacactaaacttgtaagattttcatgtcctttggcttatgcaaagcttggtctatatcagaatacagtgaagacaagctaatagcactgtgtttacctatctctatgtgtccgattaatcacccaaagagcccaaaggataaccaactataaacattactaaaagctactggttggcaccatttgttttggttgaggggcaccaaagggaatggagatttgcttttgttatttgttaaaacatataccagaattagttcaacttcttcc

SEQ ID NO: 13545 - DNA, 599 bp, Chicken  19866894218085_1
  misc_feature (1)..(32): n is any nucleotide
nnnnnnnnnnnnnnnnnnnnnnnnnnnnnnnncgtggagttattgcctgcaatgccataatgtgaaaaccagacactgctttcacgtgggcatggctttacatgcttttctgccaccttcatcttgtctgggtcagggctgctagttttgttagggtgcctttgcactggcattaaccattcagggaatttgcagagtgagtccaaaaccaagaagcatatacaaggatgatggactcttaaacaacttaagtttgctccctctgtccctcatctcccactgcaatgcagcagcatgttyctttgaattttggaagtgtcagtgttactgtgcagctgaagccttcagcacttggaaaagataaatgctgttggtggttggaggcaggatcaagcctcaaaagtaatttctcttaaagagagattatggaacatgaatccaattcattcaagaaatctcatgagttaagaagagaaaagattaccttttgtttttaggctatttacttatttacttgtttcaacttttgaacagtatcttgttctgttcacactaatctgtgacgtttttcaattctcttaagcataccagctgtcatc

SEQ ID NO: 13546 - DNA, 600 bp, Chicken  19866894218091_1
tacccgttctttccattttgtagatatttttctttaaaaaaaaagaaaaaaaactgattaattgtaagaagatggatacttaactgagcttcaagcttcttggtgaggctcagcctgaagctgacaaatgtttcctctgacaatttaaagggttttttattttaattgagtttttaaaaaaatggacatgcgtttaaaaattagcaagacaaggtgatacataactgtcatgaatggcttaaattcacccataggaaagcttcctttcatccctactttcactatcggagaaataaatgragatgatatctgacaatgtctgtatgaacagaaaacccctatgtttgcttagtctgtaaaataagaaaatctaatagtgaaatgtcagaaattggcagaaggagaaaagaatggatataattcctataattcctcagacttctaaatgttttaatcactttcggtcttcaaagacttcatagaatttaatttgactgatcgagtctctttggctagaaaaaatatcatttacagtattgtcagtcctaaatgtcctaatatcctgagttctggatcacaaaattcatgacattgaatttt

SEQ ID NO: 13547 - DNA, 565 bp, Chicken  19866894218094_1
cattttgagtttgccaaacaaccaagcatcatgagaaacctctgatatttttacatattcctctgtggtcactaataaacaaagcaacattcaaagcgataaggtttggattcccaagggttcagatgtacagcacatggtacctcaaaacttctttcattccatatttagcaaaattagggactatttcttcactgggcctgagacatacagaggaacaggtggataggcttaagacaaatgcttcttaaggtgacagaagtccacacaaaatggctgtttagcaaaatatgttttttwaatcacagcacttggcaggaacactcactttgttgagtaaagatggagaggacactgtggtgctgctttactgttgcctggaaaacaaaatgaaagagtcttagattttcatcatgttcatttctacaaccaaaatgatactactgtttttacaattgctagtttgagaaaaacacacagtaattaggagatactgttttggagtgaatctccaaagagctgaagcagacaaagctattatctacttaacaacaaataaatacaa

SEQ ID NO: 13548 - DNA, 600 bp, Chicken  19866894218097_1
agcagaatttcaggaacacacttttcagttgtaaaatagaggctgaccagactggctggatcaagaattactgcatttggtcgtggctattcttcagggaaaagaacagacatttcagcaatgcttgtggatgctgatctttggtgtgaaacatttgcagaattctatctggtggatttaaaaaaaataaataaatttctcaaagcaaaaagcatagcatgatgtccagttagatcagctgcgcctcttgcatacgtgcatttaacactcaggtggttagattacaaacgccgtagagayggttggaaggstgagttgagattaacccctagattgtgttcggtgtcccaaagagtcactgtgacagctgctgagcgacattgggtttggctggtggtgaggcaggaggccaagctcggaggggaatgcttctgtgctggcgtcacagttgctgtttctctcactgcagaacttgagttcaagtggttctagtaactcyttctgctgtgtcttatctttctgacagaggagagcagaatactattgttttattatctaggacaagaaatgcatttcccatcggaaaagtagcttgtggta

SEQ ID NO: 13549 - DNA, 600 bp, Chicken  19866894218097_2
aggaacacacttttcagttgtaaaatagaggctgaccagactggctggatcaagaattactgcatttggtcgtggctattcttcagggaaaagaacagacatttcagcaatgcttgtggatgctgatctttggtgtgaaacatttgcagaattctatctggtggatttaaaaaaaataaataaatttctcaaagcaaaaagcatagcatgatgtccagttagatcagctgcgcctcttgcatacgtgcatttaacactcaggtggttagattacaaacgccgtagagayggttggaaggstgagttgagattaacccctagattgtgttcggtgtcccaaagagtcactgtgacagctgctgagcgacattgggtttggctggtggtgaggcaggaggccaagctcggaggggaatgcttctgtgctggcgtcacagttgctgtttctctcactgcagaacttgagttcaagtggttctagtaactcyttctgctgtgtcttatctttctgacagaggagagcagaatactattgttttattatctaggacaagaaatgcatttcccatcggaaaagtagcttgtggtatagcatctttt

SEQ ID NO: 13550 - DNA, 600 bp, Chicken  19866894218097_3
tcaaagcaaaaagcatagcatgatgtccagttagatcagctgcgcctcttgcatacgtgcatttaacactcaggtggttagattacaaacgccgtagagayggttggaaggstgagttgagattaacccctagattgtgttcggtgtcccaaagagtcactgtgacagctgctgagcgacattgggtttggctggtggtgaggcaggaggccaagctcggaggggaatgcttctgtgctggcgtcacagttgctgtttctctcactgcagaacttgagttcaagtggttctagtaactcyttctgctgtgtcttatctttctgacagaggagagcagaatactattgttttattatctaggacaagaaatgcatttcccatcggaaaagtagcttgtggtatagcatcttttaaattctgtgttaatcacttcatgaagggggcaaagacttctgtacaagaacttatgctgtcttgtgacttgacccagtgagtaattactgcatagcagtcaatttattgctctctagctttcagcttatgactttgattatatggaaagtctgaaggaagtggacccttcatgttggtttgaactgt

SEQ ID NO: 13551 - DNA, 600 bp, Chicken  19866894218097_4
ttttattatctaggacaagaaatgcatttcccatcggaaaagtagcttgtggtatagcatcttttaaattctgtgttaatcacttcatgaagggggcaaagacttctgtacaagaacttatgctgtcttgtgacttgacccagtgagtaattactgcatagcagtcaatttattgctctctagctttcagcttatgactttgattatatggaaagtctgaaggaagtggacccttcatgttggtttgaactgtgggtttttcttctcttttttgagtgtgggacagaacgggctactggmggagccagactgaaagatctgaattaggaaaactggaatatctatcttagattgtcaaacaactctgccactcccatgtctgttgaaatgttgtgattaactttattaaccaggttaattttaggcttttcttccatactgaaattactcttaatttctgtgttttgataaggaactttgataagtatttgataatggttttgcttttgcagttgtatgtatgtaacaaagcgtttgacaaattggggagtgttgcaaaattgcttctttgttttcacttaaataacaaaatcgaagaaa

SEQ ID NO: 13552 - DNA, 600 bp, Chicken  19866894218097_5
catgtctgttgaaatgttgtgattaactttattaaccaggttaattttaggcttttcttccatactgaaattactcttaatttctgtgttttgataaggaactttgataagtatttgataatggttttgcttttgcagttgtatgtatgtaacaaagcgtttgacaaattggggagtgttgcaaaattgcttctttgttttcacttaaataacaaaatcgaagaaatggagaggactggtttcttctcctctccactctaacttctagtttattttaaattgtgttctcctgtctcactktattcttcttaaaagraatcagtaaaaatagaagaataaaatgcatctcctaaaaatagaaaggctgtaaattgttacrgaagcatacagtactgactgttgcagcatgggtgttgtcattcagctcattgaagtatgtcttagatgtggcttcactgggttaaggttatctgtttctgttttacactccaggatcctcatgctgttacactgtgatttctgcattgtaggttgcttgtatacaatccatttattctgctaagcctttttcccctagagatttcagattcaatgtcttag

SEQ ID NO: 13553 - DNA, 600 bp, Chicken  19866894218097_6
ttgtgattaactttattaaccaggttaattttaggcttttcttccatactgaaattactcttaatttctgtgttttgataaggaactttgataagtatttgataatggttttgcttttgcagttgtatgtatgtaacaaagcgtttgacaaattggggagtgttgcaaaattgcttctttgttttcacttaaataacaaaatcgaagaaatggagaggactggtttcttctcctctccactctaacttctagtttattttaaattgtgttctcctgtctcactktattcttcttaaaagraatcagtaaaaatagaagaataaaatgcatctcctaaaaatagaaaggctgtaaattgttacrgaagcatacagtactgactgttgcagcatgggtgttgtcattcagctcattgaagtatgtcttagatgtggcttcactgggttaaggttatctgtttctgttttacactccaggatcctcatgctgttacactgtgatttctgcattgtaggttgcttgtatacaatccatttattctgctaagcctttttcccctagagatttcagattcaatgtcttagaacaagcttactttca

SEQ ID NO: 13554 - DNA, 600 bp, Chicken  19866894218097_7
atttctgtgttttgataaggaactttgataagtatttgataatggttttgcttttgcagttgtatgtatgtaacaaagcgtttgacaaattggggagtgttgcaaaattgcttctttgttttcacttaaataacaaaatcgaagaaatggagaggactggtttcttctcctctccactctaacttctagtttattttaaattgtgttctcctgtctcactktattcttcttaaaagraatcagtaaaaatagaagaataaaatgcatctcctaaaaatagaaaggctgtaaattgttacrgaagcatacagtactgactgttgcagcatgggtgttgtcattcagctcattgaagtatgtcttagatgtggcttcactgggttaaggttatctgtttctgttttacactccaggatcctcatgctgttacactgtgatttctgcattgtaggttgcttgtatacaatccatttattctgctaagcctttttcccctagagatttcagattcaatgtcttagaacaagcttactttcacaaacgaagtgcttatttttctgaaggtctgtgatacgctgggaaagagttttatacaagaaa

SEQ ID NO: 13555 - DNA, 599 bp, Chicken  19866894218098_1
  misc_feature (1)..(58): n is any nucleotide
nnnnnnnnnnnnnnnnnnnnnnnnnnnnnnnnnnnnnnnnnnnnnnnnnnnnnnnnnnatgagaccaatggcagcccctacctcctgctgcagcctgccaagaaggagacgctgcggctccagccctacattgtgctgtaccacgactttgtcagcgatgccgaggctgagaccattaagggactggcagggccctgggtgagcagctgggtgggacaggaacgctgtccccagtggtgtcccctgagaccatccttggaccaccctgacctgtagagtggtgggcttggcttggctccmtccgtgctgccattgagcccaccaagggcttgggggacaaactgggtccctgcatgcatctaaccccttcccatccaggtttggtggactggtgacacccagtaacagtcactgacaccactggtgacactgcatcgtatactcagtgtgttgcttccctcaccccatagggacgccatagaggtgtttggccaatggcgactataattactccaatttagtccccaagtggggtccctgcttggctttggggcctccatcttgagggcggctgtgtcttcagcaatgtcccctcctca

SEQ ID NO: 13556 - DNA, 600 bp, Chicken  19866894218099_1
ataatctctctccccccaccaactaagcaaaaactacttctcaaaaccaaatcacatttatcaagtaattcttagcaaaacttatcagcccggatataccaatggacaaataagatgagctaattttgagtcaaaggcaaaatgagtgagcccacgctgacaagggctttttttttcttttcctactctttgctctttcctgtttattcagttttaccttgtattaacctgggacaatgtgagagaaattggagaaatggctttttatctgactctggttttgtaacagatataaaaagmtttatacttccaagtactttaattttttttcctaagagttactattctctcagcactgcttttctgatctaatagctttcctccacttggttatttagaaacttttgtctttttagttaaaatatgatattctaggtgttctaaaggaaggggagaaagacctacatttgcaatggatactaactgcagtaaattcaragatatagcagggcactattttctgtaggaacrtattgcatcttgctgaaacatttcaagaaggaaagctcagttttgaagaactatgcagtttaccagtag

SEQ ID NO: 13557 - DNA, 546 bp, Chicken  19866894218099_2
cctgtttattcagttttaccttgtattaacctgggacaatgtgagagaaattggagaaatggctttttatctgactctggttttgtaacagatataaaaagmtttatacttccaagtactttaattttttttcctaagagttactattctctcagcactgcttttctgatctaatagctttcctccacttggttatttagaaacttttgtctttttagttaaaatatgatattctaggtgttctaaaggaaggggagaaagacctacatttgcaatggatactaactgcagtaaattcaragatatagcagggcactattttctgtaggaacrtattgcatcttgctgaaacatttcaagaaggaaagctcagttttgaagaactatgcagtttaccagtagctgctgaagttttacaaggacaggaaatgggttgctcttgaagttctatggcttagaaacatagttatgcagggctgatgagcaggatttggtctagaatcattacttttgttttctttgtaaactgggatacaagtcaagcca

SEQ ID NO: 13558 - DNA, 513 bp, Chicken  19866894218099_3
ggacaatgtgagagaaattggagaaatggctttttatctgactctggttttgtaacagatataaaaagmtttatacttccaagtactttaattttttttcctaagagttactattctctcagcactgcttttctgatctaatagctttcctccacttggttatttagaaacttttgtctttttagttaaaatatgatattctaggtgttctaaaggaaggggagaaagacctacatttgcaatggatactaactgcagtaaattcaragatatagcagggcactattttctgtaggaacrtattgcatcttgctgaaacatttcaagaaggaaagctcagttttgaagaactatgcagtttaccagtagctgctgaagttttacaaggacaggaaatgggttgctcttgaagttctatggcttagaaacatagttatgcagggctgatgagcaggatttggtctagaatcattacttttgttttctttgtaaactgggatacaagtcaagcca

SEQ ID NO: 13559 - DNA, 600 bp, Chicken  19866894218102_1
cacagtcacagaatcacacaatcataggggttggaaggcacctctggagatcactgaagtaggtttcctacagaaggctgcacgggaaggagtccaggtgggtttttgaacaagtccaaagaaggagaccacaacctctctaggcagcttgttccagtgttctctcaccttcaaagcaaagttcttcctcattttgtatggaacttcctatgttccaatttttgcccattgtccctctcactgcacactgctgaaaagagcctggaccccgtatgtgttgataagatatctctcagtgtyccccaggctaaacagtcccwggtttctctgctttttctcaaaggataaccaaaagattcctagattctgaatatatatactacttatttattatcaatttctaagcaagttaaaactcagagggaaatgaaatacattgattattcaaaatactcacaaatgtctttgacttgcgttttacttatgattatcttcctaagaagctgttagtgaaactttgagaagtcaatgtggctagttaagatgcctggtgtggttttgttctctaattggaccattctggcaaccagttcaatgcaa

SEQ ID NO: 13560 - DNA, 600 bp, Chicken  19866894218102_2
atcataggggttggaaggcacctctggagatcactgaagtaggtttcctacagaaggctgcacgggaaggagtccaggtgggtttttgaacaagtccaaagaaggagaccacaacctctctaggcagcttgttccagtgttctctcaccttcaaagcaaagttcttcctcattttgtatggaacttcctatgttccaatttttgcccattgtccctctcactgcacactgctgaaaagagcctggaccccgtatgtgttgataagatatctctcagtgtyccccaggctaaacagtcccwggtttctctgctttttctcaaaggataaccaaaagattcctagattctgaatatatatactacttatttattatcaatttctaagcaagttaaaactcagagggaaatgaaatacattgattattcaaaatactcacaaatgtctttgacttgcgttttacttatgattatcttcctaagaagctgttagtgaaactttgagaagtcaatgtggctagttaagatgcctggtgtggttttgttctctaattggaccattctggcaaccagttcaatgcaagttttgagtgattttgcctt

SEQ ID NO: 13561 - DNA, 599 bp, Chicken  19866894218106_1
  misc_feature (1)..(18): n is any nucleotide
nnnnnnnnnnnnnnnnnntatttttttgtgatagcactctaactggtaacattctggacacttggcatcagcccaagcttaactttcaggtctaaagccagtctgtccgtgtcttcaaaaagaagtcacctttatgtgaagctactctcacaaacttactgcaagcctatgtatttctgcaaacagaacctataaaatgaataaacatgatctgttgtattcatggaagagacctgcgtgacaacatacctaaccacgtgtgagaaccactggatagatcgtgaggaatcatcagccatyaggctttttttgcacaacatycaagattagacaccaaaggatctctaatcaccatcgtgtcacatatttttattaaaccatttgccacctactgaaactgcgtgctcacacagagcccagggacaggcttccagggcactgctctcattcttagtgcaaccagaagccatagaaagctttctgagccttgtttcttctcatttctctcagctgccttctccatttaggctggaggttttgaggaaaggactgcgttctaagttttcatatcccttgaatgcagycttgggtaaacaagt

SEQ ID NO: 13562 - DNA, 600 bp, Chicken  19866894218106_2
ttttttgtgatagcactctaactggtaacattctggacacttggcatcagcccaagcttaactttcaggtctaaagccagtctgtccgtgtcttcaaaaagaagtcacctttatgtgaagctactctcacaaacttactgcaagcctatgtatttctgcaaacagaacctataaaatgaataaacatgatctgttgtattcatggaagagacctgcgtgacaacatacctaaccacgtgtgagaaccactggatagatcgtgaggaatcatcagccatyaggctttttttgcacaacatycaagattagacaccaaaggatctctaatcaccatcgtgtcacatatttttattaaaccatttgccacctactgaaactgcgtgctcacacagagcccagggacaggcttccagggcactgctctcattcttagtgcaaccagaagccatagaaagctttctgagccttgtttcttctcatttctctcagctgccttctccatttaggctggaggttttgaggaaaggactgcgttctaagttttcatatcccttgaatgcagycttgggtaaacaagttctttaaatataccttacaaaa

SEQ ID NO: 13563 - DNA, 600 bp, Chicken  19866894218106_3
ggaatcatcagccatyaggctttttttgcacaacatycaagattagacaccaaaggatctctaatcaccatcgtgtcacatatttttattaaaccatttgccacctactgaaactgcgtgctcacacagagcccagggacaggcttccagggcactgctctcattcttagtgcaaccagaagccatagaaagctttctgagccttgtttcttctcatttctctcagctgccttctccatttaggctggaggttttgaggaaaggactgcgttctaagttttcatatcccttgaatgcagycttgggtaaacaagttctttaaatataccttacaaaaattctctactaatcattcactttataaccacacttaacagcaaagcacagttattttggtgtgtgcatttcactaaccttaattctagttgacaaggaaaactttcaaaatacaactttctatttgcacgaccccgtcaaagaaatacatattgtagtgacgtgtaaattgataaatgatccaaagcaaaaaggctgttcaacagcaggcttattgaaaaattcacctctgagtgaacttaaatcaaaacaaatagatatata

SEQ ID NO: 13564 - DNA, 488 bp, Chicken  19866894218107_1
cagccgtctcagcatctccactgcaaggaaattagaagcagaaagttgggatgacagcctttggcagctctattcagcctggggttgggacactaaaaataccagcttggcaaagctgctagggaggattataaaaaggccgaaattttgccagaattgcagatttctgctccaccgccgagcagaagctgtgagcagtgactcacaccccgcttgacacagtctggcacttcggtagctcgtcggccgggaatcacacacagagctcccattatccaggccaaatagagccacatctcrgggctggcagataacgggcgctttcctccgcatggagacaggcattgagcatgggaccccgtggagcatggcatcccatcctgtgattctctcacagcctctgggatattgttcctagggagatttcagctgtgacacgtgggaagggcctccattccttcacagcagtgatactgggtgcgtccctt

SEQ ID NO: 13565 - DNA, 599 bp, Chicken  19866894218109_1
  misc_feature (1)..(49): n is any nucleotide
nnnnnnnnnnnnnnnnnnnnnnnnnnnnnnnnnnnnnnnnnnnnnnnnnaaaaaaatattaacatcaccttcttaaggtacggtcccaaaccatgacctgccttcccaccccctccccccaacctttcccctctaaaatagagtttagtccttgggagaagatattttctaaatataaacccagagactagactgcacagaggaacagtttgcctttctccagttacttcacccaatggaaaggcagttagctttagagactatagaagctcctgcttccaaggccacacaaagacatgyaaccagagaagtcacttgttcaccaaggagctgcccccagttggacatggaggtaaaggatgaggtgtatgaagcaaccaagtgatacaaaagagaaacaagatgcagaggagactayatattgaactctttttcaatcactgttatctcagtcacaaagtgcagcagaatgaagactgaataggaggatatgaatttcagctaaaaaaaaaaaaatatagaactcttaagagttggaaagggcctctgaaagccatctagtccaaatcccctgaaacaaacagggacaccacagctac

SEQ ID NO: 13566 - DNA, 600 bp, Chicken  19866894218109_2
ccaacctttcccctctaaaatagagtttagtccttgggagaagatattttctaaatataaacccagagactagactgcacagaggaacagtttgcctttctccagttacttcacccaatggaaaggcagttagctttagagactatagaagctcctgcttccaaggccacacaaagacatgyaaccagagaagtcacttgttcaccaaggagctgcccccagttggacatggaggtaaaggatgaggtgtatgaagcaaccaagtgatacaaaagagaaacaagatgcagaggagactayatattgaactctttttcaatcactgttatctcagtcacaaagtgcagcagaatgaagactgaataggaggatatgaatttcagctaaaaaaaaaaaaatatagaactcttaagagttggaaagggcctctgaaagccatctagtccaaatcccctgaaacaaacagggacaccacagctacatcaggttgcccagggcctgttccagccttgccttgaaagtctccagggatggggcatcaaccacatcactgggcaacctgttccagtgcctcaccaccctcaaaatcctttgatatgg

SEQ ID NO: 13567 - DNA, 600 bp, Chicken  19866894218115_1
cacaccattttatatctgtcatttttatgaaataatgtgctacctgcttcagtcacagttctgagaacacttcaaagtagctcaaaactgtagcgctgttcaactgacaacaaagatgatctgggttgctgaagcagctttcttcatttctttgggactcatggaactttatctcccttaaactaaatcgagttactggctttatttagaaatcagccccttcttcagcctcttcttcttgaataacaagaatgctgttagttttaggagaaaagttttcattaaattaccagtgcctcrgaatgcattttctgcttataacttagatcaaaaggagaggaaaatgttattgcttgtttgtcttcctctctcctcccccttttctagaaactttcctgagatgatcaactgttgtttttgctgttgttttttttttttgttgttgtatttttaaactttattgaaatggagaaattgctcggttcccctcccagtgtcgttgttgccttcccctcccccaagtccaatgtgttctttattaaactgaattaggacattctagtttttcttaagagtggaaatgggaacagctcaaatgag

SEQ ID NO: 13568 - DNA, 600 bp, Chicken  19866894218116_1
aaagaaagttttagagtgaggctacctacaaaagggaaatagttatcttctgcataactgcatttcaacatggagatgaacagcaagacataggagtgatattcccatatgaccttggtttagccacattgctgctcccatagccttgccattacaaaatgcttcgtgacagtctgcaaaagcagtaagcaaccctaaactcccccctgcaatggaaaagctcttgtgcaaataagaaataagccaggaggtggaaaagaaaaataagagactcgtaatggtggctttgagacacgagcrtacaaagactgctagcaggtagcatggaaatggccacgtgtgcaaataacacgctgctctggtgaatgaaaaaagactaaggtgtcccagaaatacttgaagacactggggtgctgccaggctcctgtaagaacttcccatttcatctgagttcatgataaaaatcctgtagaaagagcttcacaggctcccacaaggtagatcaaaagtctcagttccgtcatctcaacctcagatctcccataaaaggccttacagaagttctgcagtaatgagcctgaacttagcccccctccataa

SEQ ID NO: 13569 - DNA, 600 bp, Chicken  19866894218127_1
agccaagattaacacattaagtcaacaacttctattttgaaatagtttaatgctctaaggagatgactgctctccccaaacgatgcagacatgcgtctgctgttgtctgggccaattcagagaattgttattcaccgcttggttgatttcaaaatcagactaccccttcagtaggttgcagagactatgacatcacatttatgataatttattgcacaattatggtggctacgtccttggattttatttcgtgggaaagtatgtttctgctacagtctcaaccattctcttggcttacgyctgccctcaaagttacaagttttggtacagagcttcrcatgayatttttccctaacaccataaaggcgttttatagcaacctaaggctstgtagttcaattgcctagagaaatatttgcattttaaattgagacttgctggaattcacaagcactgctttaactacttrctaaaaggaatgaagtaaaatcacacaatcctccagctgattttacttcaataatacctgtgccttcaagaaaaacaacaaagatactttcagaaggcaaggctgtcatctcctcaaacgaraggcaagag

SEQ ID NO: 13570 - DNA, 600 bp, Chicken  19866894218127_10
gttgcaaggactccaaaattcatgtcacagaggatacgatcagaacacaaacttgtttccaccttcagttactacacggtacaccatttttaagaattaggtggcaattatttttagactagcactataaacagaatagtgtcttctgtcacgcttctcttcttggctcccaatcattattcgttacctaaatggcacctccaagattacttttgtagcccaaataccatcatggaaagaaatctaaattctttcattacwcgtacggaaacagtctaaatagaagatgaggacagaaasggtattcagctctttcacaacctctaaaatgagctaccagttccaaaatctctcagtcttctctttgtgaggacctctgtccttgcctttaccgactagaagagaacaaatggcgcacggcaagccctgtactcccatgcacacataatctgtcagagtgaagggaaacaggagggcatttccatagcatctaacaacagtgggtgtttttttctgcctcagctgtcttttctgaaattgatattaaactaagttggaatagtactctgttgctttgattggcaaagcctgtttgtgttt

SEQ ID NO: 13571 - DNA, 600 bp, Chicken  19866894218127_11
ccatgcacacataatctgtcagagtgaagggaaacaggagggcatttccatagcatctaacaacagtgggtgtttttttctgcctcagctgtcttttctgaaattgatattaaactaagttggaatagtactctgttgctttgattggcaaagcctgtttgtgtttttattttttattttttaaattgtgtgcttcccatgctatatgaaagggagctaaaaaaaatcaaggtagtttgtaactgtcaaaaagaaggtgccgtattacaagaaaagaagtattaaaaagtcagtgtaacrttcagagtgttcttacctcacctagtctatccttaatacatttgactcattctcagcttcttcccattacagcagtggaatcagacagggaagtgatgatgcagagatggataagaaggtaccaacataaagttcccagaacagcaagtagatctttcctctgctatctcaggcagacttaaaacagtaaactaacagttccatgtgcagttgcagtgtagagagctgtgccattcagcaaactatactgtgagctggtctatgaagacttaggagatatcttcctcttaaagtacagac

SEQ ID NO: 13572 - DNA, 600 bp, Chicken  19866894218127_2
tgaaatagtttaatgctctaaggagatgactgctctccccaaacgatgcagacatgcgtctgctgttgtctgggccaattcagagaattgttattcaccgcttggttgatttcaaaatcagactaccccttcagtaggttgcagagactatgacatcacatttatgataatttattgcacaattatggtggctacgtccttggattttatttcgtgggaaagtatgtttctgctacagtctcaaccattctcttggcttacgyctgccctcaaagttacaagttttggtacagagcttcrcatgayatttttccctaacaccataaaggcgttttatagcaacctaaggctstgtagttcaattgcctagagaaatatttgcattttaaattgagacttgctggaattcacaagcactgctttaactacttrctaaaaggaatgaagtaaaatcacacaatcctccagctgattttacttcaataatacctgtgccttcaagaaaaacaacaaagatactttcagaaggcaaggctgtcatctcctcaaacgaraggcaagagtgattactgaaacccacrgcgagattataatttaaga

SEQ ID NO: 13573 - DNA, 600 bp, Chicken  19866894218127_3
agtttaatgctctaaggagatgactgctctccccaaacgatgcagacatgcgtctgctgttgtctgggccaattcagagaattgttattcaccgcttggttgatttcaaaatcagactaccccttcagtaggttgcagagactatgacatcacatttatgataatttattgcacaattatggtggctacgtccttggattttatttcgtgggaaagtatgtttctgctacagtctcaaccattctcttggcttacgyctgccctcaaagttacaagttttggtacagagcttcrcatgayatttttccctaacaccataaaggcgttttatagcaacctaaggctstgtagttcaattgcctagagaaatatttgcattttaaattgagacttgctggaattcacaagcactgctttaactacttrctaaaaggaatgaagtaaaatcacacaatcctccagctgattttacttcaataatacctgtgccttcaagaaaaacaacaaagatactttcagaaggcaaggctgtcatctcctcaaacgaraggcaagagtgattactgaaacccacrgcgagattataatttaagagctgca

SEQ ID NO: 13574 - DNA, 600 bp, Chicken  19866894218127_4
catgcgtctgctgttgtctgggccaattcagagaattgttattcaccgcttggttgatttcaaaatcagactaccccttcagtaggttgcagagactatgacatcacatttatgataatttattgcacaattatggtggctacgtccttggattttatttcgtgggaaagtatgtttctgctacagtctcaaccattctcttggcttacgyctgccctcaaagttacaagttttggtacagagcttcrcatgayatttttccctaacaccataaaggcgttttatagcaacctaaggctstgtagttcaattgcctagagaaatatttgcattttaaattgagacttgctggaattcacaagcactgctttaactacttrctaaaaggaatgaagtaaaatcacacaatcctccagctgattttacttcaataatacctgtgccttcaagaaaaacaacaaagatactttcagaaggcaaggctgtcatctcctcaaacgaraggcaagagtgattactgaaacccacrgcgagattataatttaagagctgcaggttcaaatgaaaagatttacacaccaacgtgatatttaatgacta

SEQ ID NO: 13575 - DNA, 600 bp, Chicken  19866894218127_5
agtaggttgcagagactatgacatcacatttatgataatttattgcacaattatggtggctacgtccttggattttatttcgtgggaaagtatgtttctgctacagtctcaaccattctcttggcttacgyctgccctcaaagttacaagttttggtacagagcttcrcatgayatttttccctaacaccataaaggcgttttatagcaacctaaggctstgtagttcaattgcctagagaaatatttgcattttaaattgagacttgctggaattcacaagcactgctttaactacttrctaaaaggaatgaagtaaaatcacacaatcctccagctgattttacttcaataatacctgtgccttcaagaaaaacaacaaagatactttcagaaggcaaggctgtcatctcctcaaacgaraggcaagagtgattactgaaacccacrgcgagattataatttaagagctgcaggttcaaatgaaaagatttacacaccaacgtgatatttaatgactaaaactgataaaatactaccatgggacatcacaagacaaagtaatgcaaaaggctgaaaaattgggtttcgttattctttg

SEQ ID NO: 13576 - DNA, 600 bp, Chicken  19866894218127_6
ggcttacgyctgccctcaaagttacaagttttggtacagagcttcrcatgayatttttccctaacaccataaaggcgttttatagcaacctaaggctstgtagttcaattgcctagagaaatatttgcattttaaattgagacttgctggaattcacaagcactgctttaactacttrctaaaaggaatgaagtaaaatcacacaatcctccagctgattttacttcaataatacctgtgccttcaagaaaaacaacaaagatactttcagaaggcaaggctgtcatctcctcaaacgaraggcaagagtgattactgaaacccacrgcgagattataatttaagagctgcaggttcaaatgaaaagatttacacaccaacgtgatatttaatgactaaaactgataaaatactaccatgggacatcacaagacaaagtaatgcaaaaggctgaaaaattgggtttcgttattctttgctcagtgttatcttcattccaaccagaaatacttcatattgcaaagttaaattaaaaggcaatcataaacaggtcttgtaatactataattacaggacccaacccttacatttttgcttctg

SEQ ID NO: 13577 - DNA, 600 bp, Chicken  19866894218127_7
gttttggtacagagcttcrcatgayatttttccctaacaccataaaggcgttttatagcaacctaaggctstgtagttcaattgcctagagaaatatttgcattttaaattgagacttgctggaattcacaagcactgctttaactacttrctaaaaggaatgaagtaaaatcacacaatcctccagctgattttacttcaataatacctgtgccttcaagaaaaacaacaaagatactttcagaaggcaaggctgtcatctcctcaaacgaraggcaagagtgattactgaaacccacrgcgagattataatttaagagctgcaggttcaaatgaaaagatttacacaccaacgtgatatttaatgactaaaactgataaaatactaccatgggacatcacaagacaaagtaatgcaaaaggctgaaaaattgggtttcgttattctttgctcagtgttatcttcattccaaccagaaatacttcatattgcaaagttaaattaaaaggcaatcataaacaggtcttgtaatactataattacaggacccaacccttacatttttgcttctgattcagcaaaaatttcaccatgcagca

SEQ ID NO: 13578 - DNA, 600 bp, Chicken  19866894218127_8
agattataatttaagagctgcaggttcaaatgaaaagatttacacaccaacgtgatatttaatgactaaaactgataaaatactaccatgggacatcacaagacaaagtaatgcaaaaggctgaaaaattgggtttcgttattctttgctcagtgttatcttcattccaaccagaaatacttcatattgcaaagttaaattaaaaggcaatcataaacaggtcttgtaatactataattacaggacccaacccttacatttttgcttctgattcagcaaaaatttcaccatgcagcatgyaagacacacaagtattttctacagcgttcagcatagcatttatttgaatctgtacaactcagttgcaaggactccaaaattcatgtcacagaggatacgatcagaacacaaacttgtttccaccttcagttactacacggtacaccatttttaagaattaggtggcaattatttttagactagcactataaacagaatagtgtcttctgtcacgcttctcttcttggctcccaatcattattcgttacctaaatggcacctccaagattacttttgtagcccaaataccatcatggaaag

SEQ ID NO: 13579 - DNA, 600 bp, Chicken  19866894218127_9
agcgttcagcatagcatttatttgaatctgtacaactcagttgcaaggactccaaaattcatgtcacagaggatacgatcagaacacaaacttgtttccaccttcagttactacacggtacaccatttttaagaattaggtggcaattatttttagactagcactataaacagaatagtgtcttctgtcacgcttctcttcttggctcccaatcattattcgttacctaaatggcacctccaagattacttttgtagcccaaataccatcatggaaagaaatctaaattctttcattacwcgtacggaaacagtctaaatagaagatgaggacagaaasggtattcagctctttcacaacctctaaaatgagctaccagttccaaaatctctcagtcttctctttgtgaggacctctgtccttgcctttaccgactagaagagaacaaatggcgcacggcaagccctgtactcccatgcacacataatctgtcagagtgaagggaaacaggagggcatttccatagcatctaacaacagtgggtgtttttttctgcctcagctgtcttttctgaaattgatattaaactaagttggaata

SEQ ID NO: 13580 - DNA, 600 bp, Chicken  19866894218133_1
gagctctcatctatctgttctgttgagaggccagcataaaaaaaagctttccttctgtcctacgcctttgttgactttctgattccatctatccagaatagagcaaatcagtaagaaaatttctctgagctgctccaaaaatatcttcacaagagcctcaggctagcagttacttctaaggaaaccactgttctatcacctgtttttctggcaattagtctcaggtgctactcaacttatataacacagtccagctgggatcttctgagtcatcacatgaaggtatacttttcctctacrcttaatgtctccrtaccacaracaaaaagctggataatagataaagaaaatagtatgtacactgcaattcaactataccaaaagcatagaaaaattctaaacagaatttcaaaagactgggaccccacaaaagcattaagtttctgacacactgcaaatagtagctgatttcaatccccagtcaggaaaaagagaggaattatggtaatatattcagagaggttcttgaaatataaatccatgttttctgattgcattaaaccaggaagctcagtatgatcttataaaaagaaaaaagac

SEQ ID NO: 13581 - DNA, 600 bp, Chicken  19866894218133_2
tctgttctgttgagaggccagcataaaaaaaagctttccttctgtcctacgcctttgttgactttctgattccatctatccagaatagagcaaatcagtaagaaaatttctctgagctgctccaaaaatatcttcacaagagcctcaggctagcagttacttctaaggaaaccactgttctatcacctgtttttctggcaattagtctcaggtgctactcaacttatataacacagtccagctgggatcttctgagtcatcacatgaaggtatacttttcctctacrcttaatgtctccrtaccacaracaaaaagctggataatagataaagaaaatagtatgtacactgcaattcaactataccaaaagcatagaaaaattctaaacagaatttcaaaagactgggaccccacaaaagcattaagtttctgacacactgcaaatagtagctgatttcaatccccagtcaggaaaaagagaggaattatggtaatatattcagagaggttcttgaaatataaatccatgttttctgattgcattaaaccaggaagctcagtatgatcttataaaaagaaaaaagacatcagggatactt

SEQ ID NO: 13582 - DNA, 600 bp, Chicken  19866894218133_3
gttgagaggccagcataaaaaaaagctttccttctgtcctacgcctttgttgactttctgattccatctatccagaatagagcaaatcagtaagaaaatttctctgagctgctccaaaaatatcttcacaagagcctcaggctagcagttacttctaaggaaaccactgttctatcacctgtttttctggcaattagtctcaggtgctactcaacttatataacacagtccagctgggatcttctgagtcatcacatgaaggtatacttttcctctacrcttaatgtctccrtaccacaracaaaaagctggataatagataaagaaaatagtatgtacactgcaattcaactataccaaaagcatagaaaaattctaaacagaatttcaaaagactgggaccccacaaaagcattaagtttctgacacactgcaaatagtagctgatttcaatccccagtcaggaaaaagagaggaattatggtaatatattcagagaggttcttgaaatataaatccatgttttctgattgcattaaaccaggaagctcagtatgatcttataaaaagaaaaaagacatcagggatacttacaaactt

SEQ ID NO: 13583 - DNA, 600 bp, Chicken  19866894218139_1
aaagaattttagcactgagactgaatcatatgacaaaagaacgcctcttactctgggctcacatatctatcaccaatgactgctctgtgcttctgactcttctctacttctgaaggttactctggaatagaataaggtttgcagtgaaaaaaaaagaacagatccctcagattaatgccaaatgtggacaagtctttatcattaaccaaaatagaagctgactgttgtttagagctgcagggcagccatctcttgcacggactgctagaacctcagtgagaactatcttagatacaactragctacaagaggtaaagaaagccttgtgtttgtttggaaggagaagacttaaagctaattgtccatcctactgcagytgagctttagggctgtaatcaccatatgagatccaatcagttacaaacaaggcactgctatgttcatagcatccagtcttgcctttcaggaaacacccggcagccctgcagaccaggggaactacagctcatctacrcacaatggctgttgtgttgcacaggttcagtctgtaatctcttctcaccgactggaagttctgaagttctaccagggtctttttat

SEQ ID NO: 13584 - DNA, 600 bp, Chicken  19866894218139_2
gactgctctgtgcttctgactcttctctacttctgaaggttactctggaatagaataaggtttgcagtgaaaaaaaaagaacagatccctcagattaatgccaaatgtggacaagtctttatcattaaccaaaatagaagctgactgttgtttagagctgcagggcagccatctcttgcacggactgctagaacctcagtgagaactatcttagatacaactragctacaagaggtaaagaaagccttgtgtttgtttggaaggagaagacttaaagctaattgtccatcctactgcagytgagctttagggctgtaatcaccatatgagatccaatcagttacaaacaaggcactgctatgttcatagcatccagtcttgcctttcaggaaacacccggcagccctgcagaccaggggaactacagctcatctacrcacaatggctgttgtgttgcacaggttcagtctgtaatctcttctcaccgactggaagttctgaagttctaccagggtctttttatccacgacaacttgtccttttagcttgcagtggaacgcctcctctacacgtctatagggtgaaacttcctccaaggag

SEQ ID NO: 13585 - DNA, 600 bp, Chicken  19866894218139_3
aagctgactgttgtttagagctgcagggcagccatctcttgcacggactgctagaacctcagtgagaactatcttagatacaactragctacaagaggtaaagaaagccttgtgtttgtttggaaggagaagacttaaagctaattgtccatcctactgcagytgagctttagggctgtaatcaccatatgagatccaatcagttacaaacaaggcactgctatgttcatagcatccagtcttgcctttcaggaaacacccggcagccctgcagaccaggggaactacagctcatctacrcacaatggctgttgtgttgcacaggttcagtctgtaatctcttctcaccgactggaagttctgaagttctaccagggtctttttatccacgacaacttgtccttttagcttgcagtggaacgcctcctctacacgtctatagggtgaaacttcctccaaggagagcaggagtggaggcagctggctgggatgtgctgaaattgccaaggatgcccgacgctcaatggcttctgaggagaaagaaaggacaggggaaaaaaaaaggcttcgtttaagagcttggtctatgaagccatcagc

SEQ ID NO: 13586 - DNA, 600 bp, Chicken  19866894218144_1
atcctatttgttttcatgtttatgccttctttgatcttccaaaatacatggaaatatactgtttttaaaaataattttgtatattcagtatcattaaattcctactaacaaagtctccaagccacagccttattctagaacagcatatagcaatgctcagaaggaagatttacctctctcccataggttatttatgaatgcccattaaaaagcacaaagatgcaagctattaatttatccagtaaacagctaaaataatggccggtatatcctgcagtgctgagcactgttaggtttttrgaaggcaagttttattctcttccataagaaacatgaatgttcacaatcatcacaacattatctacccctgatgtataataataaagaatatttatacttccaaataaatgaccatataggatagctttgatttagtaaccaatataaggatttgggtgcctaacgtcaaatttaacttcatttttattacagcatagtttggggaggtaattaagcacaaatttgttcaatgcttaaattcacaccatcttattttttagaattaaagctttctatgacaaaataaaatgcatctgcagg

SEQ ID NO: 13587 - DNA, 600 bp, Chicken  19866894218145_1
gtgtccctgggaaatgaggctgacccaaagaaaagcaaataaaagaaaggaaaaggcccatattttctttgcggtgttgctgaaaaggatgggagtatcattttcatagtggaataatgttttctgggaaaacacaaaagcagatgttcctcattaggaacacccattgtctacatatcacaagtatgaacagataaatctatcctatttcacccatacattccaatggctgtaaatgattacaggatgccgtagtaactgctaaaccaaaaccacactgtgtgctaaaataattcctcygtgccatcacaatatattttattggaaggtatggaaattcctaggaagacacatcctcctgccttttcctttccatgtttggctgcgagggctccgtggtgaccaactgttgagagctgaggagcagtgctggaggagcggggcatggggcagcatgcaggcaggggcagctccctggcagcagagacagcttgcgggaaggcagcttgcaggcagcagcgagcagctcatgggcagcttgcagacagtttgcaggcaggcagcagtagcagtaggcagcctgcaggcagcaatgggcag

SEQ ID NO: 13588 - DNA, 600 bp, Chicken  19866894218147_1
aggacctgcccaagaaattcagttactaggagtaaaatggcaagatgggtgtcatcacatcccaggagatgtgaccaacaaaatcaccactatgtctgcacccactagcaagagacacagtgtgggtgcagtgggcttttggagaatgcacatcccaaactacagcctcataataagcaccctctatcaggtgacatgaaagaagaacaattactgctgaagagcagcaggcttttgagaagattaaacaagagatagtacgtgccgtggcactggggccagtatggatgggacaggatktaaagaacatcctctacactgctgctggagagaaaggtcccacttggagcctgtggcaaagagcttcaggacagacccaaggccaacccctgggattctggagtcgagcgtacagagggtctgtatagtgctacactccaactaagccacatatgagggggttcaggctgcttctgaagtagtcggtactgaaaagcagcaccttctagcatcytgactgccagtgctgaactggatgttcagaggaaaggttccctccacccatcatgctactgatgccacttggagcaagtggattgt

SEQ ID NO: 13589 - DNA, 600 bp, Chicken  19866894218147_2
tgctgaagagcagcaggcttttgagaagattaaacaagagatagtacgtgccgtggcactggggccagtatggatgggacaggatktaaagaacatcctctacactgctgctggagagaaaggtcccacttggagcctgtggcaaagagcttcaggacagacccaaggccaacccctgggattctggagtcgagcgtacagagggtctgtatagtgctacactccaactaagccacatatgagggggttcaggctgcttctgaagtagtcggtactgaaaagcagcaccttctagcatcytgactgccagtgctgaactggatgttcagaggaaaggttccctccacccatcatgctactgatgccacttggagcaagtggattgtgttgattatgcagcgagctyggatggggaacctcagccgcccaggaatcctagaggtgatcatggactggcctgaaggcaaaaagtttggaacatcaccagcagaagaagtattgcgtgctaaagaggscccaccatacaatgaactaccagaagatgaaaagaaatatgccctgttcacagatggatcacgttgtattgtggggaagtatcgc

SEQ ID NO: 13590 - DNA, 600 bp, Chicken  19866894218147_3
gctgctggagagaaaggtcccacttggagcctgtggcaaagagcttcaggacagacccaaggccaacccctgggattctggagtcgagcgtacagagggtctgtatagtgctacactccaactaagccacatatgagggggttcaggctgcttctgaagtagtcggtactgaaaagcagcaccttctagcatcytgactgccagtgctgaactggatgttcagaggaaaggttccctccacccatcatgctactgatgccacttggagcaagtggattgtgttgattatgcagcgagctyggatggggaacctcagccgcccaggaatcctagaggtgatcatggactggcctgaaggcaaaaagtttggaacatcaccagcagaagaagtattgcgtgctaaagaggscccaccatacaatgaactaccagaagatgaaaagaaatatgccctgttcacagatggatcacgttgtattgtggggaagtatcgcagatggaaagctgctgtgtggagccccacacgacaagttgcagaggccaccaaagataaaggagaatcaagctaatttgcagaggtaaaggctgtccagctggcct

SEQ ID NO: 13591 - DNA, 600 bp, Chicken  19866894218147_4
gctacactccaactaagccacatatgagggggttcaggctgcttctgaagtagtcggtactgaaaagcagcaccttctagcatcytgactgccagtgctgaactggatgttcagaggaaaggttccctccacccatcatgctactgatgccacttggagcaagtggattgtgttgattatgcagcgagctyggatggggaacctcagccgcccaggaatcctagaggtgatcatggactggcctgaaggcaaaaagtttggaacatcaccagcagaagaagtattgcgtgctaaagaggscccaccatacaatgaactaccagaagatgaaaagaaatatgccctgttcacagatggatcacgttgtattgtggggaagtatcgcagatggaaagctgctgtgtggagccccacacgacaagttgcagaggccaccaaagataaaggagaatcaagctaatttgcagaggtaaaggctgtccagctggccttagatgttgctgaacaggagagcaaaacagctggcaaagaagggtaaacttatttgggctgctgaactgtggaaagacattgctgcccaaataaagaatatggttataa

SEQ ID NO: 13592 - DNA, 600 bp, Chicken  19866894218149_1
tacgtagccaaattctgaaggccagattccagggaaaagaaaacgtaaagcataattgtacatttatatcattcttaagatcataatgttcattttcttcattgttttatagcaatattcatatgacttaatggctaaagtacattttaaccacatagtgcacttatttcctacaacattcttaagttcgctacaagaacatccatattggaaattttgtagtgttgtttctgtcctctccttcagagaaaacctaagacaggaggggtgtaggtactaatgtaggtaatgcaagacaaraggtagtcrgatgaacctaaaacataccatctatttaaaatgtaaaagagtataaatagtcaccagatggcactgtgtctgaaatttaaatcaggcaactgtaaatatagtcagcaggatcttggaataaatgttagttgtttctgaagttgttctgtcacacggtgttattttttttttctatgttgaattttagctgcactttttcttagctacagctagtgcttaggagctgctggtttatccaagcagaaccatctatgtaaactgagctatccaattgatacacgctaagaatta

SEQ ID NO: 13593 - DNA, 600 bp, Chicken  19866894218149_2
aaattctgaaggccagattccagggaaaagaaaacgtaaagcataattgtacatttatatcattcttaagatcataatgttcattttcttcattgttttatagcaatattcatatgacttaatggctaaagtacattttaaccacatagtgcacttatttcctacaacattcttaagttcgctacaagaacatccatattggaaattttgtagtgttgtttctgtcctctccttcagagaaaacctaagacaggaggggtgtaggtactaatgtaggtaatgcaagacaaraggtagtcrgatgaacctaaaacataccatctatttaaaatgtaaaagagtataaatagtcaccagatggcactgtgtctgaaatttaaatcaggcaactgtaaatatagtcagcaggatcttggaataaatgttagttgtttctgaagttgttctgtcacacggtgttattttttttttctatgttgaattttagctgcactttttcttagctacagctagtgcttaggagctgctggtttatccaagcagaaccatctatgtaaactgagctatccaattgatacacgctaagaattaattttagac

SEQ ID NO: 13594 - DNA, 600 bp, Chicken  19866894218149_3
taaaatcacaagattggaaaggacctacaagatcatttagtccaaccgtcctcccattacccttgctaccacaagccactaaaccatatctcgtagctcctcatccagtcatctcttgaacactgccaggaatggtgactccaccacccccctgggcaggccattccagtgcctgaccactctctgagagaaaatgtttttccttatgtcccttgggataaaagcattatttttctagatgttgagattacatggaacaaaaagtgcttttcttcacacgcatgtttcatctgtttttcrtttttcttgttggcctggtacccaaatggtattttaaaagaagggtagcagtcaagttattgcttattctaatggtttattctctcatgagaatttctgtttgaaaaaatatctgaccagataagacatcactttcttgtagtactaagcatcacacttccactagttcagtgaaaatctgcgtggcagtaacatcacttggcagatacacaaatgtcctagggagagatggagtagtactgtcagtacttgggtaacttgttagcagttcagagctgtaatatgtgctgcatgttctaa

SEQ ID NO: 13595 - DNA, 599 bp, Chicken  19866894218153_1
  misc_feature (1)..(149): n is any nucleotide
nnnnnnnnnnnnnnnnnnnnnnnnnnnnnnnnnnnnnnnnnnnnnnnnnnnnnnnnnnnnnnnnnnnnnnnnnnnnnnnnnnnnnnnnnnnnnnnnnnnnnnnnnnnnnnnnnnnnnnnnnnnnnnnnnnnnnnnnnnnnnnnnnnnnngtgaaagagcatggcttaatcagcttagttaacttaattaagctgtactttttcttatggaactgccctgaagtatgtttcagttaaaaagtgtatttcatagttgtggaatgacacaaatttggagaaatctggtgaggttttatagtgrgcttgaaaaagctgaaatttgctattctgtaatatgaagtactgaataaaaggagagtgcttcttttactgaagatttaaaagagaaatgctaatgcagttcagaacgtaaaggcttctcatactgaaaatttttattcccctctcccaccttatttcaacacttttttttacatgggaagatctgtctgtgttaatcccaatttaccctgcctgcttgcagatgtgtcaccaggatctgcacactgccttcttcgccattcctcggaagaatattaactggtttggtgtcattgtgag

SEQ ID NO: 13596 - DNA, 600 bp, Chicken  19866894218157_1
acatactgatgatttcaaccacgtacattagcacagagtgactaaggtacaaagtggacagtcactacacactcccacactctacatgttgaccatcaggctggattctgcctgctttaattgtcatcataacactccatgtgcataacttgtacattcccttgacagaatcttgaaagattaattaatgtcaagccttaaattaattaggcttaacattaaagagcaaaataacatccaattatactggagttgccaaaccagccctgctactttctttgctgcatgtagagcgaaggkttttctactttaatcttgcagtgaagaagtgayctgtcttcycacaatcctttagtttccaagctcacccrtgctgcttaaaaaaacccaacaaaatagcttttatttagacacaatgaatasgttaaacatcctgttcatcctgtgaaataagcactctatgggcaccctgcatcaccattttggactgtaaattaaacttttatctgaaaagtaactggaaaagctatcacctcttttgtggaccacaaggatataagcaatcacaaagtcattctattcttcctgcaaaaaccatat

SEQ ID NO: 13597 - DNA, 600 bp, Chicken  19866894218157_2
cagagtgactaaggtacaaagtggacagtcactacacactcccacactctacatgttgaccatcaggctggattctgcctgctttaattgtcatcataacactccatgtgcataacttgtacattcccttgacagaatcttgaaagattaattaatgtcaagccttaaattaattaggcttaacattaaagagcaaaataacatccaattatactggagttgccaaaccagccctgctactttctttgctgcatgtagagcgaaggkttttctactttaatcttgcagtgaagaagtgayctgtcttcycacaatcctttagtttccaagctcacccrtgctgcttaaaaaaacccaacaaaatagcttttatttagacacaatgaatasgttaaacatcctgttcatcctgtgaaataagcactctatgggcaccctgcatcaccattttggactgtaaattaaacttttatctgaaaagtaactggaaaagctatcacctcttttgtggaccacaaggatataagcaatcacaaagtcattctattcttcctgcaaaaaccatatttgcaaaaaaaaaccaatgactttcataggaaa

SEQ ID NO: 13598 - DNA, 600 bp, Chicken  19866894218157_3
taaggtacaaagtggacagtcactacacactcccacactctacatgttgaccatcaggctggattctgcctgctttaattgtcatcataacactccatgtgcataacttgtacattcccttgacagaatcttgaaagattaattaatgtcaagccttaaattaattaggcttaacattaaagagcaaaataacatccaattatactggagttgccaaaccagccctgctactttctttgctgcatgtagagcgaaggkttttctactttaatcttgcagtgaagaagtgayctgtcttcycacaatcctttagtttccaagctcacccrtgctgcttaaaaaaacccaacaaaatagcttttatttagacacaatgaatasgttaaacatcctgttcatcctgtgaaataagcactctatgggcaccctgcatcaccattttggactgtaaattaaacttttatctgaaaagtaactggaaaagctatcacctcttttgtggaccacaaggatataagcaatcacaaagtcattctattcttcctgcaaaaaccatatttgcaaaaaaaaaccaatgactttcataggaaattcccacca

SEQ ID NO: 13599 - DNA, 600 bp, Chicken  19866894218157_4
ctcccacactctacatgttgaccatcaggctggattctgcctgctttaattgtcatcataacactccatgtgcataacttgtacattcccttgacagaatcttgaaagattaattaatgtcaagccttaaattaattaggcttaacattaaagagcaaaataacatccaattatactggagttgccaaaccagccctgctactttctttgctgcatgtagagcgaaggkttttctactttaatcttgcagtgaagaagtgayctgtcttcycacaatcctttagtttccaagctcacccrtgctgcttaaaaaaacccaacaaaatagcttttatttagacacaatgaatasgttaaacatcctgttcatcctgtgaaataagcactctatgggcaccctgcatcaccattttggactgtaaattaaacttttatctgaaaagtaactggaaaagctatcacctcttttgtggaccacaaggatataagcaatcacaaagtcattctattcttcctgcaaaaaccatatttgcaaaaaaaaaccaatgactttcataggaaattcccaccatattccctgtttatttcccataagcatgt

SEQ ID NO: 13600 - DNA, 600 bp, Chicken  19866894218157_5
tcatcataacactccatgtgcataacttgtacattcccttgacagaatcttgaaagattaattaatgtcaagccttaaattaattaggcttaacattaaagagcaaaataacatccaattatactggagttgccaaaccagccctgctactttctttgctgcatgtagagcgaaggkttttctactttaatcttgcagtgaagaagtgayctgtcttcycacaatcctttagtttccaagctcacccrtgctgcttaaaaaaacccaacaaaatagcttttatttagacacaatgaatasgttaaacatcctgttcatcctgtgaaataagcactctatgggcaccctgcatcaccattttggactgtaaattaaacttttatctgaaaagtaactggaaaagctatcacctcttttgtggaccacaaggatataagcaatcacaaagtcattctattcttcctgcaaaaaccatatttgcaaaaaaaaaccaatgactttcataggaaattcccaccatattccctgtttatttcccataagcatgtttcacttactgtgaatgtctattctagagatgtttatcagggaacaaacagt

SEQ ID NO: 13601 - DNA, 600 bp, Chicken  19866894218162_1
cgacaagatagtggctctagcaaagagccacaggtgtgctgaagaggagaggctgagaggtctaaggtggccttgcctggaaaagagactgctcagggaagctctgctgcagtgtgtggagcctggcttatctcagcgttgccagcaaagggacaggagtcactgagcatgaactgaagtacaggaaaggtgttaaaacttaagagaagtgttcctatcgaggtggccaaacacaggagcaggttgcactctgtggcatctctgtccatggagatggtctgaggctggctgcacatgggrctgagctgactgtgggcaggagctgggccaggggacctctgaagatcccttggacctcagctgatattaaataaataaatataaaataataacagcaaccacaaaaaaaagtaaagaggaattacaaatatatggctaaaatgtcccttgtaaagccacaaaaagcctctctgttgattgagtggaaagcactgtgggattaagctgcagagcactgtatcaacatcctattactgcactcactgaaaggcactcagtgtttgggattaggattagaagtgcttctgtggtttttgatgt

SEQ ID NO: 13602 - DNA, 600 bp, Chicken  19866894218165_1
cggctcttcactgcagagtggctctgggcattctcccatcactcttgtatattcttacttgtatgttaatgataatgtatattttatgagggccacattgaaagtagtgtcttttattttatgatgtcagcccttgacatcagaggtggatgttggtagtacggcagtagaagctgaacctccccaccaatattctgtttcattttgttgctgtgtgacaggtggcaacacagaggtagtcaaacagaaaggcatctgacatggaaagtgcgtatgaagcaaaggtgtggcaatgaattkctcctcatagaaaaaatggcacgcactggcatttatcagcgcttgctgaatgtttgtggagaccaaacagtggatgtgagcagaatgaaggggggtggtggtgcatttcagcagtggtgcgtgcaacagtgggtcatctccattggtatagatttttactagtgtagtatgaggggacttgttcatctctagtgaaaatgcacagctgatggtagtgactatattgaaaagtagtgttttgtagctgagaatttgcccattcaaatagtgttattgtgctctttgttgcggtttccatgg

SEQ ID NO: 13603 - DNA, 600 bp, Chicken  19866894218165_2
gacttgttcatctctagtgaaaatgcacagctgatggtagtgactatattgaaaagtagtgttttgtagctgagaatttgcccattcaaatagtgttattgtgctctttgttgcggtttccatggaaataagtaggaggcattagtttcagagcaacctatgtatatgtggtccaagacaatttcccttcactgtgtggtccaggcaagccaaaaagttggacagacatgtctagcacttagctttcaaaagtagcttctgtatatgaaacaggttagtctgagctcactcaggctgccwcttctagtcattaggtaatatatctcactgagaacacagcaggagacttcccagagttgtgtagcatgcatatctcctgtatgtgaatctatttgcagtctgtagctgcaacctgtgccggctgatgctaaactggaacagccatattatggaaatggaaatgaaccacctgccaggaagtttctcagtttctctctttttgagtgtattctctgaccttccctattaccaacgtagccagaatatgttgacctacagaacatgaccaagttctttgggtagcttagaaagaggaagttg

SEQ ID NO: 13604 - DNA, 600 bp, Chicken  19866894218166_1
gcaaggccttctgtgcaaagccaggccaaaggaggaagctgacagaaagaaagaaggagaggggaagagcacattatcacactacttgtttctgcagagaagtgggtctgtgatggaagcaaagcatcctggtactttggcacagaggggactgcagggtatgcacagaggaggagcagagatggaaaactggaggcaaataattggtagtaagggatataataactttatgttatattatatatgaatagaatattagatatcagaacattgcaggaaactggggccaagctatgagaragaaacagcaaatagatttttgtgagtttgattctctagataggctcactgtggtcagaggagtgccagaaaatctcccttctgctacactctgtatctgcattataatatctggaaaaatttggacagagtaagatgagaaaagaatctgtaaagartacagtagaactgttgtgaggaaagaagagctcctacagaaataacagtggctctgtgcttttctaattgctgtggggatgcgttgttttttgtttttgtttctgcttgattttatttattttttgccaatagaagacatac

SEQ ID NO: 13605 - DNA, 600 bp, Chicken  19866894218166_2
gtatgcacagaggaggagcagagatggaaaactggaggcaaataattggtagtaagggatataataactttatgttatattatatatgaatagaatattagatatcagaacattgcaggaaactggggccaagctatgagaragaaacagcaaatagatttttgtgagtttgattctctagataggctcactgtggtcagaggagtgccagaaaatctcccttctgctacactctgtatctgcattataatatctggaaaaatttggacagagtaagatgagaaaagaatctgtaaagartacagtagaactgttgtgaggaaagaagagctcctacagaaataacagtggctctgtgcttttctaattgctgtggggatgcgttgttttttgtttttgtttctgcttgattttatttattttttgccaatagaagacataccatagaaaattctgtcatcttcggtttggctttaatactctgtttagcaacacagaaatctctggggtgtgctgagctataatttccttgtctggaatttgacaaggaaattggatgcaattttgcatgggtaagaagccgtactgaacaacaggcaa

SEQ ID NO: 13606 - DNA, 599 bp, Chicken  19866894218169_1
  misc_feature (1)..(64): n is any nucleotide
nnnnnnnnnnnnnnnnnnnnnnnnnnnnnnnnnnnnnnnnnnnnnnnnnnnnnnnnnnnnnnnntgtacgctcctgctaggtgatcatgatcaatatatcttgcaagttaccttattttttagacaggatagtttgactaaggttttctcagtcccaagatattcagtattttgtctttttataaacaaaagaacaaaacagtttcttgtcttggttcttaagcatgtgtttaatctgtccctactagatggggcagctgaaagcatgccatagtttcagcagacctgggaggctgtctrggtggcactgttgaaggaccaggcactacagcaaactctggggagcatctctgtgaaggctgatctaatgcatttcttcaatatccatagtcaagktgagttttcatggtgaaactttgttagaatcatagaatcctttgagttgaaagggacctttgaatgtcatctagtccaactcccctgccattaacagrgtctacagctagatcaggttgctcagagcctggtccatctggaccttgcgcgtcttctgggatggggcatctaccacctccctggccaactcgtgccggtgcttc

SEQ ID NO: 13607 - DNA, 600 bp, Chicken  19866894218169_2
tatcttgcaagttaccttattttttagacaggatagtttgactaaggttttctcagtcccaagatattcagtattttgtctttttataaacaaaagaacaaaacagtttcttgtcttggttcttaagcatgtgtttaatctgtccctactagatggggcagctgaaagcatgccatagtttcagcagacctgggaggctgtctrggtggcactgttgaaggaccaggcactacagcaaactctggggagcatctctgtgaaggctgatctaatgcatttcttcaatatccatagtcaagktgagttttcatggtgaaactttgttagaatcatagaatcctttgagttgaaagggacctttgaatgtcatctagtccaactcccctgccattaacagrgtctacagctagatcaggttgctcagagcctggtccatctggaccttgcgcgtcttctgggatggggcatctaccacctccctggccaactcgtgccggtgcttcactacccttttcataaaaactgttttcttacatccaatctaagtctcccctgttttagtttgaaatcatttcctcacatcctgttgcagtagaccct

SEQ ID NO: 13608 - DNA, 600 bp, Chicken  19866894218169_3
caaaacagtttcttgtcttggttcttaagcatgtgtttaatctgtccctactagatggggcagctgaaagcatgccatagtttcagcagacctgggaggctgtctrggtggcactgttgaaggaccaggcactacagcaaactctggggagcatctctgtgaaggctgatctaatgcatttcttcaatatccatagtcaagktgagttttcatggtgaaactttgttagaatcatagaatcctttgagttgaaagggacctttgaatgtcatctagtccaactcccctgccattaacagrgtctacagctagatcaggttgctcagagcctggtccatctggaccttgcgcgtcttctgggatggggcatctaccacctccctggccaactcgtgccggtgcttcactacccttttcataaaaactgttttcttacatccaatctaagtctcccctgttttagtttgaaatcatttcctcacatcctgttgcagtagaccctcctaaagagtcggtccccttctttcttatagcccctgcttttagatactgaaagggatactttcttgactcactgtgaactgaaaaaagcctttcaaa

SEQ ID NO: 13609 - DNA, 600 bp, Chicken  19866894218173_1
tcttccctgtgttagcagagtaattgaagtatcagccagatgcgtagggccagcggcggttatgcccaaggcatcagtacagcatcacagccctcggcttccctccccatggctgcgatgcaaaccacaagagagaaaatcttaagtatatcagaaaagaggaatcattgatagttaccggcgcttaaagctgaagtgatccccgtcatttggccagctgtggccaaacccattgcgaaaagaatgcatcctttatagatgagggctgatgctactgtggttctgatgggtgaactcaayatagggctgaattgatattatcacaaagacttttttcatgcagctcgtgccagtgccagtaccaagcgacgtgctgcagaaaaacacccctccttcagctcacatatatcagattatatcaatatgtaattcatatcacttctgtattctaccacacttaaaaaacgtgtttatggaaaagygctcatggagtgtattagcatttaaccagaatagagtatttaattcagcatgtgagcattgacaatgaagcacatattatccctcccacactgcatttactgtcattatagtcgccta

SEQ ID NO: 13610 - DNA, 600 bp, Chicken  19866894218173_2
gcttaaagctgaagtgatccccgtcatttggccagctgtggccaaacccattgcgaaaagaatgcatcctttatagatgagggctgatgctactgtggttctgatgggtgaactcaayatagggctgaattgatattatcacaaagacttttttcatgcagctcgtgccagtgccagtaccaagcgacgtgctgcagaaaaacacccctccttcagctcacatatatcagattatatcaatatgtaattcatatcacttctgtattctaccacacttaaaaaacgtgtttatggaaaagygctcatggagtgtattagcatttaaccagaatagagtatttaattcagcatgtgagcattgacaatgaagcacatattatccctcccacactgcatttactgtcattatagtcgcctacatatattaacttattttgttgatgattatggacgaatgctgccaaagaactttgtgcaaaataaaatgctggttgcccaccacctgagaayraaggagaaaaggacatacacaaatggctgggcttgaaaatgataagctcattgttttgaaactgtcttggggaaattaaggattgcagt

SEQ ID NO: 13611 - DNA, 600 bp, Chicken  19866894218173_3
cttcagctcacatatatcagattatatcaatatgtaattcatatcacttctgtattctaccacacttaaaaaacgtgtttatggaaaagygctcatggagtgtattagcatttaaccagaatagagtatttaattcagcatgtgagcattgacaatgaagcacatattatccctcccacactgcatttactgtcattatagtcgcctacatatattaacttattttgttgatgattatggacgaatgctgccaaagaactttgtgcaaaataaaatgctggttgcccaccacctgagaayraaggagaaaaggacatacacaaatggctgggcttgaaaatgataagctcattgttttgaaactgtcttggggaaattaaggattgcagtcagtcatctgttgcttgcagcagtgtggcatcaacctgatgccttcaaggttttcctctgcttgtatttctgctcctgactttctaaacagaacagatagcaggagstaaccaatgcttcaatggggcaaagggaaaactgaccaaggaagaatgtgtgtggtttccaatctctgtcgttttcctgactgaggcaataggccaacagatc

SEQ ID NO: 13612 - DNA, 600 bp, Chicken  19866894218173_4
ttcagctcacatatatcagattatatcaatatgtaattcatatcacttctgtattctaccacacttaaaaaacgtgtttatggaaaagygctcatggagtgtattagcatttaaccagaatagagtatttaattcagcatgtgagcattgacaatgaagcacatattatccctcccacactgcatttactgtcattatagtcgcctacatatattaacttattttgttgatgattatggacgaatgctgccaaagaactttgtgcaaaataaaatgctggttgcccaccacctgagaayraaggagaaaaggacatacacaaatggctgggcttgaaaatgataagctcattgttttgaaactgtcttggggaaattaaggattgcagtcagtcatctgttgcttgcagcagtgtggcatcaacctgatgccttcaaggttttcctctgcttgtatttctgctcctgactttctaaacagaacagatagcaggagstaaccaatgcttcaatggggcaaagggaaaactgaccaaggaagaatgtgtgtggtttccaatctctgtcgttttcctgactgaggcaataggccaacagatcg

SEQ ID NO: 13613 - DNA, 600 bp, Chicken  19866894218173_5
atagtcgcctacatatattaacttattttgttgatgattatggacgaatgctgccaaagaactttgtgcaaaataaaatgctggttgcccaccacctgagaayraaggagaaaaggacatacacaaatggctgggcttgaaaatgataagctcattgttttgaaactgtcttggggaaattaaggattgcagtcagtcatctgttgcttgcagcagtgtggcatcaacctgatgccttcaaggttttcctctgcttgtatttctgctcctgactttctaaacagaacagatagcaggagstaaccaatgcttcaatggggcaaagggaaaactgaccaaggaagaatgtgtgtggtttccaatctctgtcgttttcctgactgaggcaataggccaacagatcgcataattttcagtgctgctgcctttatcagtcaactgatttattgctactgtggtgcagagcttcatggaggatgaatttaatcctcaccatctgtaaacagcataactggtatcatagttgtttctattctgcatgctgtgctgtgcagtttcagagtactatatgaatgattctgttgacatccacataacttg

SEQ ID NO: 13614 - DNA, 600 bp, Chicken  19866894218176_1
cttatcagtagtgaataagcgccaacacttttaactaagtacatttccctaaacgtttttaaaatgtgcttttattacttgaagatggttacttcttcagtagaaaccttttttcttgcctcatgagcagcaccattttcatttctgtatcacgttgctaagaagctttctcactcatgggtgcatcttctcactcctcatttttattaatatcccacctcatattgctgtttcttttttccctttacatatgtactatattccagtactgttattaggtgatactactaaaaaacaacwaaaaggttgttggagtagatttgaaaacatttkctgtaggtttgaaaacctggtttgtcacrtctagcagcttgtgacaacgtattatagtttcttagtttgtgcagatccaaaagatcaaactcaaaagtgaatgtgtcttcatgagctcaccaaaatttaaagttttatgacactgaacatgtaatacatgtttcagtgatgtaaatcattgctttgctgatcattcaaggtttaaatgctgtgtcctaagtggctactgtttttctgaacctgtcctgctcccttgtcagaaagtag

SEQ ID NO: 13615 - DNA, 600 bp, Chicken  19866894218176_2
actaagtacatttccctaaacgtttttaaaatgtgcttttattacttgaagatggttacttcttcagtagaaaccttttttcttgcctcatgagcagcaccattttcatttctgtatcacgttgctaagaagctttctcactcatgggtgcatcttctcactcctcatttttattaatatcccacctcatattgctgtttcttttttccctttacatatgtactatattccagtactgttattaggtgatactactaaaaaacaacwaaaaggttgttggagtagatttgaaaacatttkctgtaggtttgaaaacctggtttgtcacrtctagcagcttgtgacaacgtattatagtttcttagtttgtgcagatccaaaagatcaaactcaaaagtgaatgtgtcttcatgagctcaccaaaatttaaagttttatgacactgaacatgtaatacatgtttcagtgatgtaaatcattgctttgctgatcattcaaggtttaaatgctgtgtcctaagtggctactgtttttctgaacctgtcctgctcccttgtcagaaagtagaaaaaggctgggtaacaggaggagttactctga

SEQ ID NO: 13616 - DNA, 600 bp, Chicken  19866894218176_3
aatgtgcttttattacttgaagatggttacttcttcagtagaaaccttttttcttgcctcatgagcagcaccattttcatttctgtatcacgttgctaagaagctttctcactcatgggtgcatcttctcactcctcatttttattaatatcccacctcatattgctgtttcttttttccctttacatatgtactatattccagtactgttattaggtgatactactaaaaaacaacwaaaaggttgttggagtagatttgaaaacatttkctgtaggtttgaaaacctggtttgtcacrtctagcagcttgtgacaacgtattatagtttcttagtttgtgcagatccaaaagatcaaactcaaaagtgaatgtgtcttcatgagctcaccaaaatttaaagttttatgacactgaacatgtaatacatgtttcagtgatgtaaatcattgctttgctgatcattcaaggtttaaatgctgtgtcctaagtggctactgtttttctgaacctgtcctgctcccttgtcagaaagtagaaaaaggctgggtaacaggaggagttactctgattgaacatggtttaccaaaaaaacaaggc

SEQ ID NO: 13617 - DNA, 600 bp, Chicken  19866894218178_1
gcataataaaatttgcttgttactcagattaggccatcaaactggcaggccagggagaaattctcacatggtcctcagatcattttccagcatcctttaaaactgtaaaatttatttgccatctgatccttgagaaaatggctgtaaagtaatctctcctctagttgtcaagaagtttgacagcccttgattaaaacataagcatcttagatgaagaactgctgcctgtaggatacttttagaagtgaaaaccttatctgaagccaaaaatagtctatctgtggtttttgcttagctttyggatgctggtcttaatctttataaataaaagttacttaaagtaattcatgatgagctctgcatatataaatgcacatgtctgaatattttaatcactcatgtttgattcagtctccacaacaagactcttttaagttatttatttatagtgatggactgaattatattattagacgtaagtcttggatagcataaattctaatggtaatacacacagagaaaaaaaatggtatatgacagtactcagtggagagtactgaaagtactacttacatgttgatacatgatattgacagagta

SEQ ID NO: 13618 - DNA, 600 bp, Chicken  19866894218179_1
aaatctctcaattgatcgtcaataaaatcaaatggatatttttacattgaactttgttgcatgaaggcaaaagagcctaggagaactaactgatttcaaagataaattctgcaaagaacaaaatcagtgcattctgattcagttaggcagatacagtaaaatccagcttggatgaaccaaaaactactgacagagctcagacgaaaagaagagttatgtaaaatgtggaagcaggaaggaagtcagtgacagtgcctgaatgtgcaggaatggagttaggagagctaaagctcagggagygttgaagttaggacagatgagaaagaaagagaaataatgttactataagttctttgacagagaaagtaagaccaaactaaaatgagccttctgctcagagggatgggggacctgatgacaaaggagatgaaaaaggctgaagttttcaatgtttttgttgctcccatttttttgctgtatgatccaccctcagacatctcataaagaaagcacatggacctgattgtttagggaactgaacttgaatgcatactaaagaaacaccaaggaggaagatggacatacattcacaggaccaaa

SEQ ID NO: 13619 - DNA, 600 bp, Chicken  19866894218179_2
gaaagcacatggacctgattgtttagggaactgaacttgaatgcatactaaagaaacaccaaggaggaagatggacatacattcacaggaccaaatgggctgagggaactgactgtaaatttgctttcagtcacctttgaaaagtaaacataattggatatggaaaacttcctgattactgtaaataatcaggataagagggggcatcctaggtaaggaaatgggtaacaaaggcttaagtgccttcaaggtcctgacagttgcatgtaacttcttaatgggtgactagagaaaacagcygggctccttggaagtccagagaggctggataagmggcaagaaacacaagctgaaagagtgaaaattctgattatgcaaatacaaaacttttctcacaatgaaggtaatttaaccactggaacacaggtctagaaaggtcatcaggatcgccatcactgaagatatcctgaacccaacaagttatagggcaatccactataactaagtctgtttcgagcgggaaattggaccggctgatctccagaggtctctaccatcctaatttattctacaaattggcaattctaaaagctagaaaaa

SEQ ID NO: 13620 - DNA, 600 bp, Chicken  19866894218179_3
acttgaatgcatactaaagaaacaccaaggaggaagatggacatacattcacaggaccaaatgggctgagggaactgactgtaaatttgctttcagtcacctttgaaaagtaaacataattggatatggaaaacttcctgattactgtaaataatcaggataagagggggcatcctaggtaaggaaatgggtaacaaaggcttaagtgccttcaaggtcctgacagttgcatgtaacttcttaatgggtgactagagaaaacagcygggctccttggaagtccagagaggctggataagmggcaagaaacacaagctgaaagagtgaaaattctgattatgcaaatacaaaacttttctcacaatgaaggtaatttaaccactggaacacaggtctagaaaggtcatcaggatcgccatcactgaagatatcctgaacccaacaagttatagggcaatccactataactaagtctgtttcgagcgggaaattggaccggctgatctccagaggtctctaccatcctaatttattctacaaattggcaattctaaaagctagaaaaagctgacacttcagctggaaattatttgaattctt

SEQ ID NO: 13621 - DNA, 600 bp, Chicken  19866894218181_1
tttgcatctttgcagaaagatttttgtttgggtggatcaactaccattgcaaacaatattcttgtctttttttcttagtgcactaccagaagatcattcaccgggacatcaagccttccaatttgctcttaggagatgatggacatgtcaaaattgctgattttggagtcagtaatcagtttgaagggaacgatgcccagctttccagcacagcaggaacaccagccttcatggcaccagaggccatttcagacacgggcaaaagtttcagtgggaaggtaggtcatggctcacagccakygtctcctgggatctcacaggcactgcacaaaggatagcaccacacctacatcctttgcattttgccctctctggtattatggtgtagatggatattgttttcaactaaaatcaaagctccaattttgtgtgcagttcaggtgaaactcacattggctgttctatacagcaggtaggtggactttttgtcaagctcctgccaagacaaggaggcaggttagagtccaacaggaccccttccctgcctaacaaggaaggataaaaatccctatttccttccaaaataatcaagattcatag

SEQ ID NO: 13622 - DNA, 600 bp, Chicken  19866894218181_2
ttgcatctttgcagaaagatttttgtttgggtggatcaactaccattgcaaacaatattcttgtctttttttcttagtgcactaccagaagatcattcaccgggacatcaagccttccaatttgctcttaggagatgatggacatgtcaaaattgctgattttggagtcagtaatcagtttgaagggaacgatgcccagctttccagcacagcaggaacaccagccttcatggcaccagaggccatttcagacacgggcaaaagtttcagtgggaaggtaggtcatggctcacagccakygtctcctgggatctcacaggcactgcacaaaggatagcaccacacctacatcctttgcattttgccctctctggtattatggtgtagatggatattgttttcaactaaaatcaaagctccaattttgtgtgcagttcaggtgaaactcacattggctgttctatacagcaggtaggtggactttttgtcaagctcctgccaagacaaggaggcaggttagagtccaacaggaccccttccctgcctaacaaggaaggataaaaatccctatttccttccaaaataatcaagattcataga

SEQ ID NO: 13623 - DNA, 599 bp, Chicken  19866894218183_1
  misc_feature (1)..(226): n is any nucleotide
nnnnnnnnnnnnnnnnnnnnnnnnnnnnnnnnnnnnnnnnnnnnnnnnnnnnnnnnnnnnnnnnnnnnnnnnnnnnnnnnnnnnnnnnnnnnnnnnnnnnnnnnnnnnnnnnnnnnnnnnnnnnnnnnnnnnnnnnnnnnnnnnnnnnnnnnnnnnnnnnnnnnnnnnnnnnnnnnnnnnnnnnnnnnnnnnnnnnnnnnnnnnnnnnnnnnnnnnnnnnnnnnnnactggaaaaggatgtctccagtgaaatgactgagctggcttctagaaagatgtgttgaattcatttggtgtgcytgaagcaaaacagaagccatcttcatggtcgaagsgcaagctccctaattgcaatctgtgtgcagagcctccgtgtccacatctctgcaaaattcttcaaacattacatggtatatgggttgaaagaatgtggattctgttttgaggacttactctgataagggaggccttctgtccagctcatcccgtgctgtcaactatggcctgttatccttaggccttgggcttgatctgtatcaaacatgctgagctagatctggagataaaacaggttgtatgatatacctagtacaattcca

SEQ ID NO: 13624 - DNA, 599 bp, Chicken  19866894218183_2
  misc_feature (1)..(191): n is any nucleotide
nnnnnnnnnnnnnnnnnnnnnnnnnnnnnnnnnnnnnnnnnnnnnnnnnnnnnnnnnnnnnnnnnnnnnnnnnnnnnnnnnnnnnnnnnnnnnnnnnnnnnnnnnnnnnnnnnnnnnnnnnnnnnnnnnnnnnnnnnnnnnnnnnnnnnnnnnnnnnnnnnnnnnnnnnnnnnnnnnnnnnnnnnnnnnnnactggaaaaggatgtctccagtgaaatgactgagctggcttctagaaagatgtgttgaattcatttggtgtgcytgaagcaaaacagaagccatcttcatggtcgaagsgcaagctccctaattgcaatctgtgtgcagagcctccgtgtccacatctctgcaaaattcttcaaacattacatggtatatgggttgaaagaatgtggattctgttttgaggacttactctgataagggaggccttctgtccagctcatcccgtgctgtcaactatggcctgttatccttaggccttgggcttgatctgtatcaaacatgctgagctagatctggagataaaacaggttgtatgatatacctagtacaattccatcagtatactaccttcccaacaaacataccagttc

SEQ ID NO: 13625 - DNA, 600 bp, Chicken  19866894218183_3
atggtatatgggttgaaagaatgtggattctgttttgaggacttactctgataagggaggccttctgtccagctcatcccgtgctgtcaactatggcctgttatccttaggccttgggcttgatctgtatcaaacatgctgagctagatctggagataaaacaggttgtatgatatacctagtacaattccatcagtatactaccttcccaacaaacataccagttctgtatgagtgaatagatgcttttccacctattaccatctgatgggtgaagctgtgctccactgagaattttastctgcaggttcatatagaaatgatcctctgaataccaggttggtgttctcaatgccttggtgaragtggatttagttgattccatggctgacagttcatggcttggcatttgtcatgttcctttaggaattaaatcacagtgaccttgaaggcacttctcaacacagtaaaagcctcttasaagagacttggaaactccgaatgggagtaatgccaatgaaatgacayggtttgtgcttgcaagatttatgtggtctatagtatttgtgaacacattgcctcttttgcatctttcaggct

SEQ ID NO: 13626 - DNA, 600 bp, Chicken  19866894218183_4
ctgtccagctcatcccgtgctgtcaactatggcctgttatccttaggccttgggcttgatctgtatcaaacatgctgagctagatctggagataaaacaggttgtatgatatacctagtacaattccatcagtatactaccttcccaacaaacataccagttctgtatgagtgaatagatgcttttccacctattaccatctgatgggtgaagctgtgctccactgagaattttastctgcaggttcatatagaaatgatcctctgaataccaggttggtgttctcaatgccttggtgaragtggatttagttgattccatggctgacagttcatggcttggcatttgtcatgttcctttaggaattaaatcacagtgaccttgaaggcacttctcaacacagtaaaagcctcttasaagagacttggaaactccgaatgggagtaatgccaatgaaatgacayggtttgtgcttgcaagatttatgtggtctatagtatttgtgaacacattgcctcttttgcatctttcaggctgtgggtttaaggagccacagtgccaaccaaaggaagcgcaagccaaggagccggacattgcagc

SEQ ID NO: 13627 - DNA, 600 bp, Chicken  19866894218183_5
gtacaattccatcagtatactaccttcccaacaaacataccagttctgtatgagtgaatagatgcttttccacctattaccatctgatgggtgaagctgtgctccactgagaattttastctgcaggttcatatagaaatgatcctctgaataccaggttggtgttctcaatgccttggtgaragtggatttagttgattccatggctgacagttcatggcttggcatttgtcatgttcctttaggaattaaatcacagtgaccttgaaggcacttctcaacacagtaaaagcctcttasaagagacttggaaactccgaatgggagtaatgccaatgaaatgacayggtttgtgcttgcaagatttatgtggtctatagtatttgtgaacacattgcctcttttgcatctttcaggctgtgggtttaaggagccacagtgccaaccaaaggaagcgcaagccaaggagccggacattgcagctctgcctccatgtctggcagcagtgtatgcaacttggctcattcttagtaattgtatttttattcctgctttccagttgtgtgcactgcgtagggattagaaccatgaaaaaatatc

SEQ ID NO: 13628 - DNA, 600 bp, Chicken  19866894218183_6
gtatgagtgaatagatgcttttccacctattaccatctgatgggtgaagctgtgctccactgagaattttastctgcaggttcatatagaaatgatcctctgaataccaggttggtgttctcaatgccttggtgaragtggatttagttgattccatggctgacagttcatggcttggcatttgtcatgttcctttaggaattaaatcacagtgaccttgaaggcacttctcaacacagtaaaagcctcttasaagagacttggaaactccgaatgggagtaatgccaatgaaatgacayggtttgtgcttgcaagatttatgtggtctatagtatttgtgaacacattgcctcttttgcatctttcaggctgtgggtttaaggagccacagtgccaaccaaaggaagcgcaagccaaggagccggacattgcagctctgcctccatgtctggcagcagtgtatgcaacttggctcattcttagtaattgtatttttattcctgctttccagttgtgtgcactgcgtagggattagaaccatgaaaaaatatccatgagtttactttgagtggaagagggttcctcagtctcagttgctg

SEQ ID NO: 13629 - DNA, 600 bp, Chicken  19866894218189_1
agaatggaaggaccaaacagcgttgctttatcattgggagcttttgtttcatgagtgcacagggtcaccagtgacatgaatttggtcagcactcagcacaggttctactgaagaggacagcacagtttagtagcaaagacaccccgtcttttaatttctggctcacgttagcactgaatggaagatgctccatgcttatcctatgataaagcatagaaactccaagctgaggaggtggtggcagaaagctaccaggcagagcacagagacaccttcaacagctgcactcattgaaagaayagggggaaaatgtgctacctttccatcaccaccttcaagtgaatctcagccaaccatcactaggggtcctgcaggccaagtacaygtcttctaatggcaccgatttctcagtttcacctcctgtccactcaatatcatggttttgctcctgtttttaatgatctaaactgttggagtcacaaagatggtgttactgattggggttactggcaaacagacttttttatgtgccctatgctgatagtcagtggcctgcaaccttcagatcaagatgtattaaattggctttgaaaaactcaa

SEQ ID NO: 13630 - DNA, 600 bp, Chicken  19866894218189_2
tcagcactcagcacaggttctactgaagaggacagcacagtttagtagcaaagacaccccgtcttttaatttctggctcacgttagcactgaatggaagatgctccatgcttatcctatgataaagcatagaaactccaagctgaggaggtggtggcagaaagctaccaggcagagcacagagacaccttcaacagctgcactcattgaaagaayagggggaaaatgtgctacctttccatcaccaccttcaagtgaatctcagccaaccatcactaggggtcctgcaggccaagtacaygtcttctaatggcaccgatttctcagtttcacctcctgtccactcaatatcatggttttgctcctgtttttaatgatctaaactgttggagtcacaaagatggtgttactgattggggttactggcaaacagacttttttatgtgccctatgctgatagtcagtggcctgcaaccttcagatcaagatgtattaaattggctttgaaaaactcaatgagatcttctccaggtgccaccttgggttttttccaccctgttcccctttttccccgtatttgtggaggccaacaatttgtttt

SEQ ID NO: 13631 - DNA, 600 bp, Chicken  19866894218197_1
ttactagatgcacagttgcacctgcggaaggggaatccacttctccatgatccaataggcagctagctcaggattttaacatggtgagtgacagctctttgaaaagttgttggggccctgctggaaactacgcttgttcagagctcttaattttttttcctttctctccactgagaaccactgtagaataagaattgttttgtgttgtggtgcattttttttaatgggatggatttctcttcccttgctcttgccgacaacttgaagtgttatcctggcagctgaattattgcaattcakggcagaggcagcgtggagtttaacacatgcttactcttccttaagctacatcctctttgttgacttacctacttaaaatctcagattttctctgccccctcattttgccymaaaagcatagacattggtgtgaatcacccttagcttagtaaagtgaaatgctcaaatattttttcacatgctgtttggatgcagtcttgaatagctcagaacagtgcaattcaaaatgattcccaaagaagcatgtgtgcttccctgctgttcctttcagaagtgtcccactggctcaggaccatcagc

SEQ ID NO: 13632 - DNA, 600 bp, Chicken  19866894218197_2
tggggccctgctggaaactacgcttgttcagagctcttaattttttttcctttctctccactgagaaccactgtagaataagaattgttttgtgttgtggtgcattttttttaatgggatggatttctcttcccttgctcttgccgacaacttgaagtgttatcctggcagctgaattattgcaattcakggcagaggcagcgtggagtttaacacatgcttactcttccttaagctacatcctctttgttgacttacctacttaaaatctcagattttctctgccccctcattttgccymaaaagcatagacattggtgtgaatcacccttagcttagtaaagtgaaatgctcaaatattttttcacatgctgtttggatgcagtcttgaatagctcagaacagtgcaattcaaaatgattcccaaagaagcatgtgtgcttccctgctgttcctttcagaagtgtcccactggctcaggaccatcagcagcttctgctctgcagtaatgctgagtgtagtgggaggcagtccaacagaaacagggctcaaaatgtcgagggagaggaataatctcagaagggtggggtggggcttagt

SEQ ID NO: 13633 - DNA, 600 bp, Chicken  19866894218197_3
ggggccctgctggaaactacgcttgttcagagctcttaattttttttcctttctctccactgagaaccactgtagaataagaattgttttgtgttgtggtgcattttttttaatgggatggatttctcttcccttgctcttgccgacaacttgaagtgttatcctggcagctgaattattgcaattcakggcagaggcagcgtggagtttaacacatgcttactcttccttaagctacatcctctttgttgacttacctacttaaaatctcagattttctctgccccctcattttgccymaaaagcatagacattggtgtgaatcacccttagcttagtaaagtgaaatgctcaaatattttttcacatgctgtttggatgcagtcttgaatagctcagaacagtgcaattcaaaatgattcccaaagaagcatgtgtgcttccctgctgttcctttcagaagtgtcccactggctcaggaccatcagcagcttctgctctgcagtaatgctgagtgtagtgggaggcagtccaacagaaacagggctcaaaatgtcgagggagaggaataatctcagaagggtggggtggggcttagtc

SEQ ID NO: 13634 - DNA, 600 bp, Chicken  19866894218202_1
agtcagcattcttctatatctactttcccatgagatgataaaatcacataattatttaactcccagaaaacaggtctttcgattttgctaagctctagctgtactaaaaaagctgtgtggatacttttgtttaaagttagctgcatgtgacacatatttaggcttaagtgcgacaggagcagtcttttattttgagcagttcataaacacttgtcttccatttgagaattacagtggttatgtgtacttacgtaataggttgccattgctgagtgaacttgtgtgaattctatagtttayaccagaaagagttactattttgkattcaaatctattttggattggcttttcttgtatctataggacttattctaagtwcttacaggattgtagttcagtatatggctgtgtacatttcaaacagtagaggtcattgccattttgtcattcttaagatcacgaagcrtaaagttttgaggagatggtagttctatgaaacctgccatttgctcctgtgtaacaaagtgctgtgccttcaccaggtgagtctgtgaaccttaattttcatgcatgatttacaagtgataataatggccatca

SEQ ID NO: 13635 - DNA, 600 bp, Chicken  19866894218202_2
tttcccatgagatgataaaatcacataattatttaactcccagaaaacaggtctttcgattttgctaagctctagctgtactaaaaaagctgtgtggatacttttgtttaaagttagctgcatgtgacacatatttaggcttaagtgcgacaggagcagtcttttattttgagcagttcataaacacttgtcttccatttgagaattacagtggttatgtgtacttacgtaataggttgccattgctgagtgaacttgtgtgaattctatagtttayaccagaaagagttactattttgkattcaaatctattttggattggcttttcttgtatctataggacttattctaagtwcttacaggattgtagttcagtatatggctgtgtacatttcaaacagtagaggtcattgccattttgtcattcttaagatcacgaagcrtaaagttttgaggagatggtagttctatgaaacctgccatttgctcctgtgtaacaaagtgctgtgccttcaccaggtgagtctgtgaaccttaattttcatgcatgatttacaagtgataataatggccatcaaaatataatttacattaactttt

SEQ ID NO: 13636 - DNA, 600 bp, Chicken  19866894218202_3
tcgattttgctaagctctagctgtactaaaaaagctgtgtggatacttttgtttaaagttagctgcatgtgacacatatttaggcttaagtgcgacaggagcagtcttttattttgagcagttcataaacacttgtcttccatttgagaattacagtggttatgtgtacttacgtaataggttgccattgctgagtgaacttgtgtgaattctatagtttayaccagaaagagttactattttgkattcaaatctattttggattggcttttcttgtatctataggacttattctaagtwcttacaggattgtagttcagtatatggctgtgtacatttcaaacagtagaggtcattgccattttgtcattcttaagatcacgaagcrtaaagttttgaggagatggtagttctatgaaacctgccatttgctcctgtgtaacaaagtgctgtgccttcaccaggtgagtctgtgaaccttaattttcatgcatgatttacaagtgataataatggccatcaaaatataatttacattaacttttattctctgaaacaggacctagggctacgttcagtaaaaggacttaatatacagag

SEQ ID NO: 13637 - DNA, 600 bp, Chicken  19866894218202_4
agtgcgacaggagcagtcttttattttgagcagttcataaacacttgtcttccatttgagaattacagtggttatgtgtacttacgtaataggttgccattgctgagtgaacttgtgtgaattctatagtttayaccagaaagagttactattttgkattcaaatctattttggattggcttttcttgtatctataggacttattctaagtwcttacaggattgtagttcagtatatggctgtgtacatttcaaacagtagaggtcattgccattttgtcattcttaagatcacgaagcrtaaagttttgaggagatggtagttctatgaaacctgccatttgctcctgtgtaacaaagtgctgtgccttcaccaggtgagtctgtgaaccttaattttcatgcatgatttacaagtgataataatggccatcaaaatataatttacattaacttttattctctgaaacaggacctagggctacgttcagtaaaaggacttaatatacagagacaagccctcttcttcctttctctcatcacttgagtcttgtgttctttattgcctgctggcatgagaaagaaaaaggtgtgttcttat

SEQ ID NO: 13638 - DNA, 600 bp, Chicken  19866894218206_1
tttaattattgcattcggttcatgtgctggccctgaattaattttcgtgcaaagaacctgccagtccacaatttgtcattgggtgggcttctgtctccactgtagtgcaatgctgtcatcctcttctttgtcatttcagaatcactagccatcaataaaatataccgtattaccttagacagaacttagctgcaaagtagttaagcttgttataataacagcagaatgaacaggaagcagtatgaggaaaaataagtcatgcacaaatacacagatgctttttttctaactacaaatttsttattatggtcataattacacagtatgtcactctatcaratttggacaatgcagccttacttcactaaaaacatagtcctctgccaaatcactttaccaaagcaacccctccagcataacacacattgtgcccacaactcttccattccctcctacatttttagaacaggtgttcctactatctcattttctaccactgtttgttacaaaagattgatgcctagtagtgttcaggaaagacaagcacatatgagatgcaaaaaaaaatatcgttcttgaaataacttccacttatatttc

SEQ ID NO: 13639 - DNA, 600 bp, Chicken  19866894218206_2
aattttcgtgcaaagaacctgccagtccacaatttgtcattgggtgggcttctgtctccactgtagtgcaatgctgtcatcctcttctttgtcatttcagaatcactagccatcaataaaatataccgtattaccttagacagaacttagctgcaaagtagttaagcttgttataataacagcagaatgaacaggaagcagtatgaggaaaaataagtcatgcacaaatacacagatgctttttttctaactacaaatttsttattatggtcataattacacagtatgtcactctatcaratttggacaatgcagccttacttcactaaaaacatagtcctctgccaaatcactttaccaaagcaacccctccagcataacacacattgtgcccacaactcttccattccctcctacatttttagaacaggtgttcctactatctcattttctaccactgtttgttacaaaagattgatgcctagtagtgttcaggaaagacaagcacatatgagatgcaaaaaaaaatatcgttcttgaaataacttccacttatatttctttctttcatgtggcctgaagtcaggtacagtattggtg

SEQ ID NO: 13640 - DNA, 600 bp, Chicken  19866894218207_1
ttgttgaagttctgctgttttgagtttcctgttttaatcagctcaaattataatgttattagcaaaagttcttggcttctgtttgtgatgcagcgtgctcggattcagtattcaagctacagaaatcagctttccatattcttaaaggaaaattcccttcatttccacttttccatgtacttgaacttaaatatactagcctgaaatttcacttgcacaattctcttgaaacatggaaaaattgcaccacagactgtggatttattagactatgtacaggatttgatattatgaagacayaaatggttgggcagtggtagttggaaacaaagccaataatctttgcacttcagacatttgatattcatgatttggtactgctacaaaatacaagcaaaaaaaaaaaaaaaaagtcaggcatatatccctgtgcacaaaatgaaacactaaatactaaactaaaagtcctgtccttgaaacagaaacaaacattacagttttgaggagcataactagttggctagttgactagttggctactagatgtttctttgactctggcttagttttttaattgcaattgtatacctggaaaagttg

SEQ ID NO: 13641 - DNA, 600 bp, Chicken  19866894218214_1
aatgacacaagaattctctctactatttttgatgaaccaaaagaagaagattaactctatcccaaccaaaaagagtacacagtgaaagagagagcagttcatccaacaacttctagctagaaacagactatctcatttaaaataaacctgtaaatgacttgctggattctccacaatctcaacagaggaggaaaggaattacacgagaaacgtttgaatggagaggtgcattaaattgagcatttttctaaaagtagtaagagtattcctgaactaaagaggataaacattttaatatawatttgtaatyctgcttgccttgtccaaataaaatccacatcagtttggagctggtctcaaagctaaagctctacccatgattttaacctaagtgaaaaagtaaccttccttcttttcatagatattttagcttactctggccagcctgacccctttgccaatctgaatacacatctctcccacatctcaccccagagaacacaaaaacttggatttagcccaggggctctcgatgaactatttcaaaaacagtgatctaataatgaaggtttaactccaaatagaagactaaatccctca

SEQ ID NO: 13642 - DNA, 600 bp, Chicken  19866894218214_2
gaattctctctactatttttgatgaaccaaaagaagaagattaactctatcccaaccaaaaagagtacacagtgaaagagagagcagttcatccaacaacttctagctagaaacagactatctcatttaaaataaacctgtaaatgacttgctggattctccacaatctcaacagaggaggaaaggaattacacgagaaacgtttgaatggagaggtgcattaaattgagcatttttctaaaagtagtaagagtattcctgaactaaagaggataaacattttaatatawatttgtaatyctgcttgccttgtccaaataaaatccacatcagtttggagctggtctcaaagctaaagctctacccatgattttaacctaagtgaaaaagtaaccttccttcttttcatagatattttagcttactctggccagcctgacccctttgccaatctgaatacacatctctcccacatctcaccccagagaacacaaaaacttggatttagcccaggggctctcgatgaactatttcaaaaacagtgatctaataatgaaggtttaactccaaatagaagactaaatccctcaaatggtattg

SEQ ID NO: 13643 - DNA, 600 bp, Chicken  19866894218214_3
cacatcagtttggagctggtctcaaagctaaagctctacccatgattttaacctaagtgaaaaagtaaccttccttcttttcatagatattttagcttactctggccagcctgacccctttgccaatctgaatacacatctctcccacatctcaccccagagaacacaaaaacttggatttagcccaggggctctcgatgaactatttcaaaaacagtgatctaataatgaaggtttaactccaaatagaagactaaatccctcaaatggtattgtagggctggattacacatcttgcakggaagayctctaaagggatgggctaaaacttcatctcctttgaggagtaaatttgccacataatatagacatggatacagtctcttccttggcacttactctctaagggacatctgactgattttgccataatcctgctgcctaaacagctctgtgagcctgatgacttccagagaaaaattaacacattgccaacagtttctaggctctgygaaatgataggatcttgatattagcctcccaaatctacaaaatgccactattgattctcctctctcttgattataaacaatggtaaca

SEQ ID NO: 13644 - DNA, 600 bp, Chicken  19866894218214_4
gtttggagctggtctcaaagctaaagctctacccatgattttaacctaagtgaaaaagtaaccttccttcttttcatagatattttagcttactctggccagcctgacccctttgccaatctgaatacacatctctcccacatctcaccccagagaacacaaaaacttggatttagcccaggggctctcgatgaactatttcaaaaacagtgatctaataatgaaggtttaactccaaatagaagactaaatccctcaaatggtattgtagggctggattacacatcttgcakggaagayctctaaagggatgggctaaaacttcatctcctttgaggagtaaatttgccacataatatagacatggatacagtctcttccttggcacttactctctaagggacatctgactgattttgccataatcctgctgcctaaacagctctgtgagcctgatgacttccagagaaaaattaacacattgccaacagtttctaggctctgygaaatgataggatcttgatattagcctcccaaatctacaaaatgccactattgattctcctctctcttgattataaacaatggtaacacaaaata

SEQ ID NO: 13645 - DNA, 600 bp, Chicken  19866894218214_5
gcttactctggccagcctgacccctttgccaatctgaatacacatctctcccacatctcaccccagagaacacaaaaacttggatttagcccaggggctctcgatgaactatttcaaaaacagtgatctaataatgaaggtttaactccaaatagaagactaaatccctcaaatggtattgtagggctggattacacatcttgcakggaagayctctaaagggatgggctaaaacttcatctcctttgaggagtaaatttgccacataatatagacatggatacagtctcttccttggcycttactctctaagggacatctgactgattttgccataatcctgctgcctaaacagctctgtgagcctgatgacttccagagaaaaattaacacattgccaacagtttctaggctctgygaaatgataggatcttgatattagcctcccaaatctacaaaatgccactattgattctcctctctcttgattataaacaatggtaacacaaaataaatgctgtgagctcactgatatgtctgttgccagttctctcgtctgatttagaaataaattttaaaaaatcatgcagaactactaga

SEQ ID NO: 13646 - DNA, 600 bp, Chicken  19866894218214_6
ttactctggccagcctgacccctttgccaatctgaatacacatctctcccacatctcaccccagagaacacaaaaacttggatttagcccaggggctctcgatgaactatttcaaaaacagtgatctaataatgaaggtttaactccaaatagaagactaaatccctcaaatggtattgtagggctggattacacatcttgcakggaagayctctaaagggatgggctaaaacttcatctcctttgaggagtaaatttgccacataatatagacatggatacagtctcttccttggcacytactctctaagggacatctgactgattttgccataatcctgctgcctaaacagctctgtgagcctgatgacttccagagaaaaattaacacattgccaacagtttctaggctctgygaaatgataggatcttgatattagcctcccaaatctacaaaatgccactattgattctcctctctcttgattataaacaatggtaacacaaaataaatgctgtgagctcactgatatgtctgttgccagttctctcgtctgatttagaaataaattttaaaaaatcatgcagaactactagaac

SEQ ID NO: 13647 - DNA, 600 bp, Chicken  19866894218214_7
aacagtgatctaataatgaaggtttaactccaaatagaagactaaatccctcaaatggtattgtagggctggattacacatcttgcakggaagayctctaaagggatgggctaaaacttcatctcctttgaggagtaaatttgccacataatatagacatggatacagtctcttccttggcacttactctctaagggacatctgactgattttgccataatcctgctgcctaaacagctctgtgagcctgatgacttccagagaaaaattaacacattgccaacagtttctaggctctgygaaatgataggatcttgatattagcctcccaaatctacaaaatgccactattgattctcctctctcttgattataaacaatggtaacacaaaataaatgctgtgagctcactgatatgtctgttgccagttctctcgtctgatttagaaataaattttaaaaaatcatgcagaactactagaacaatagattttgtaacaacagtgaaattgtaaaaataagaaaactacttaaatagcaaaactagactcaagtagatggtgttggtatgaggaagtgcttccctaacagcatgaaaat

SEQ ID NO: 13648 - DNA, 600 bp, Chicken  19866894218215_1
tgagtcttagcgttgccagctcctgttactcctcagacctgtactgttatgggcacaaggtctctacacagtggcaaaaagcaaaagctgctcgcagcagttttgagacctctccccaaacacccactattttgatgcaaatcacttctgtccccgaattcaagtctctctttgcacagctgtatgcattaccagttcttgcgcacttactgctgtctgctcttttaatgggtgaacttcagtgatggtgaaatagcatttttttaagctcaggaatgttttcaactatattttttttcrgaacggtttgggtttcccgtgttgaatccacaaaatgtttacagaacagccttttatgaggcacgaacttaccttggccttgcaccccagtgcttagtattcataatcctatacatggccaaatggcacgcaccatctgcaacccacgttgtgtgttctgtgtggtcaatctttttcacaagagacatcaaaacttctgaaaagtcaccaagcctccctgtccccaccatggcagagagcccacctctctgacagagaggcatttactgccctgacagcaactcagcrtggagatctgcc

SEQ ID NO: 13649 - DNA, 600 bp, Chicken  19866894218215_2
tattttttttcrgaacggtttgggtttcccgtgttgaatccacaaaatgtttacagaacagccttttatgaggcacgaacttaccttggccttgcaccccagtgcttagtattcataatcctatacatggccaaatggcacgcaccatctgcaacccacgttgtgtgttctgtgtggtcaatctttttcacaagagacatcaaaacttctgaaaagtcaccaagcctccctgtccccaccatggcagagagcccacctctctgacagagaggcatttactgccctgacagcaactcagcrtggagatctgccttgcctgtagctgtctgctagtgaaacrtagaatcgtttgagttgaaagggacctttaaagaccatccggtccaacccccctgcaatgaacaggaatatctacttctagatcaggttgctcatagccctgtccagcctgactttgaatgcctccagggatggggcatccaccacctctctgggaaatctgttcctgtgctttgttagtggtatgaaaatgccacggctcctggctggaaggagatgctgggtagaagagaggcttcagcttgctccagtggcaggagt

SEQ ID NO: 13650 - DNA, 600 bp, Chicken  19866894218215_3
cacaaaatgtttacagaacagccttttatgaggcacgaacttaccttggccttgcaccccagtgcttagtattcataatcctatacatggccaaatggcacgcaccatctgcaacccacgttgtgtgttctgtgtggtcaatctttttcacaagagacatcaaaacttctgaaaagtcaccaagcctccctgtccccaccatggcagagagcccacctctctgacagagaggcatttactgccctgacagcaactcagcrtggagatctgccttgcctgtagctgtctgctagtgaaacrtagaatcgtttgagttgaaagggacctttaaagaccatccggtccaacccccctgcaatgaacaggaatatctacttctagatcaggttgctcatagccctgtccagcctgactttgaatgcctccagggatggggcatccaccacctctctgggaaatctgttcctgtgctttgttagtggtatgaaaatgccacggctcctggctggaaggagatgctgggtagaagagaggcttcagcttgctccagtggcaggagtgcctgtgccatccacccactgaacctctcaagtgagccca

SEQ ID NO: 13651 - DNA, 600 bp, Chicken  19866894218226_1
ggctgctgtgaggtctcttcagggccttcttttctccacatagcacagccccagctccctcagcccgtctctgtagtggaggtgctgcagccctctgatcatcttcgcggccctcctctggacccgctccaacagctccctgtcctccttgtgctgacggctccagaactggacgcagtactgcaggtgaggtctcaggagagcagagcagaggggcagaatcccctccctcgccctgctggtcacacttctcttgatgcagcccaggatacagttggccttctgggctgcaatcgcacrctgccggctcacgtggagtctctgcaacccagacaccggaccttgccccyggccttgttgaactccatgaggttggcatgggcccacccctccagccatcccagggccctctggatggcatcccttccccctcgcgtgtcagctgcaccgctcagctcggtgtcacctgcagactgctgagggcgcactcgatcccactgcccacgtcgcctacagggacgtgaaacagcgccggtcccggcaccaatccccgaggaacacctctcatcaccagtctccattggacgctgagccgctgac

SEQ ID NO: 13652 - DNA, 600 bp, Chicken  19866894218226_2
ccagctccctcagcccgtctctgtagtggaggtgctgcagccctctgatcatcttcgcggccctcctctggacccgctccaacagctccctgtcctccttgtgctgacggctccagaactggacgcagtactgcaggtgaggtctcaggagagcagagcagaggggcagaatcccctccctcgccctgctggtcacacttctcttgatgcagcccaggatacagttggccttctgggctgcaatcgcacrctgccggctcacgtggagtctctgcaacccagacaccggaccttgccccyggccttgttgaactccatgaggttggcatgggcccacccctccagccatcccagggccctctggatggcatcccttccccctcgcgtgtcagctgcaccgctcagctcggtgtcacctgcagactgctgagggcgcactcgatcccactgcccacgtcgcctacagggacgtgaaacagcgccggtcccggcaccaatccccgaggaacacctctcatcaccagtctccattggacgctgagccgctgacagctctcagtgcagccctgcagccaattcctacccagcaagcagtccatc

SEQ ID NO: 13653 - DNA, 600 bp, Chicken  19866894218235_1
gcctggcactgagtccctggcaccgagtccctggcaccatcagcagagcagaggaattcctctttccagggagggcagctggggtcaggggccagctgaggaaacatccttagcttttccgttggtgctgagaggtgttaagtgactctcctgttcctctccagccttctgtgttgggactgggcgtagaacaggcattgcctgcccacagttggtgcatcagcgccaatgcaaccagtattacaaaaatctaggttaaccatcctgaccccatggaatcatctactgcttttcagagasatcagaaagrtcagctgcgttgttgagagggaaagcattgtaaatagcacagtccggtttaatctcttccctttaatgctgttgtgtaatactgtcagtattcattcaccagtgcgctggggtctgcctggagtaaactgctaagggaatttagagccataaaacatcttcattcatcagcattgcttatctcctggccgcagcttgaaccctgcagtgtagctctttgcagatgtcagctgctgttactaagcttaactgtttgcaaatctctttctgcaaaggactgacccagctaag

SEQ ID NO: 13654 - DNA, 600 bp, Chicken  19866894218235_2
gagtccctggcaccgagtccctggcaccatcagcagagcagaggaattcctctttccagggagggcagctggggtcaggggccagctgaggaaacatccttagcttttccgttggtgctgagaggtgttaagtgactctcctgttcctctccagccttctgtgttgggactgggcgtagaacaggcattgcctgcccacagttggtgcatcagcgccaatgcaaccagtattacaaaaatctaggttaaccatcctgaccccatggaatcatctactgcttttcagagasatcagaaagrtcagctgcgttgttgagagggaaagcattgtaaatagcacagtccggtttaatctcttccctttaatgctgttgtgtaatactgtcagtattcattcaccagtgcgctggggtctgcctggagtaaactgctaagggaatttagagccataaaacatcttcattcatcagcattgcttatctcctggccgcagcttgaaccctgcagtgtagctctttgcagatgtcagctgctgttactaagcttaactgtttgcaaatctctttctgcaaaggactgacccagctaagaggaaatgtg

SEQ ID NO: 13655 - DNA, 600 bp, Chicken  19866894218235_3
aacctcagccattttgtgattctttgatttaaaattagaatttcaatccgaaccattatatctttctttccctttagaaatgagcaatcctcagtttactgaagacagccgatttgcatttctgcctgctttttcttcttggctttctttgccatcctccactttcaggcactgtacgcttgcaaaaaaggatcttttaagtttaagtcggagacctgctctctcttctcctctggctgtcagaagtgcagtttctgcatacagaggtctgtgggtggctttaattaggacagcagaaamacgtgtcacccaagtgggccgtcgtccctttaccgtcagctgctggctgggatgcagccagtgaagcaacagcattggcttgcccaggaacgtgaggcagagcccccatcttacaaagtccagaygagtcctgcctggctcagtggtttgccagcaaaggctcttaatctccaaaatctccctcctgctttgcattctctacttttcctccttattacctgaatgagaccattttcctggagggtgtccttcctgctaggaagggaccagctgatgaggacacttatttgacagttttca

SEQ ID NO: 13656 - DNA, 600 bp, Chicken  19866894218235_4
ctgctttttcttcttggctttctttgccatcctccactttcaggcactgtacgcttgcaaaaaaggatcttttaagtttaagtcggagacctgctctctcttctcctctggctgtcagaagtgcagtttctgcatacagaggtctgtgggtggctttaattaggacagcagaaamacgtgtcacccaagtgggccgtcgtccctttaccgtcagctgctggctgggatgcagccagtgaagcaacagcattggcttgcccaggaacgtgaggcagagcccccatcttacaaagtccagaygagtcctgcctggctcagtggtttgccagcaaaggctcttaatctccaaaatctccctcctgctttgcattctctacttttcctccttattacctgaatgagaccattttcctggagggtgtccttcctgctaggaagggaccagctgatgaggacacttatttgacagttttcagagtttcagaaaccctgagaaacactaagcagttgcttgcattctgctaaataccttttcttgggattaaaactcttctctcaacccaagcaaaggcagtcttcattacgaaagggagcaaaaaa

SEQ ID NO: 13657 - DNA, 600 bp, Chicken  19866894218238_1
cagaggctgctcagagctcaggctgcaatttaggagcccatgagcatcagggcagtggagcaggtgtgggcttggctgtgtgcatccgcagccataaaaccatcccagctggctgacccgccacagtcagacccctgcctaacacaggggaatgatttgggtgcagctgtaggactaggaaaggagctaaaaatgcaagagctaaaaagcttcttgtgagattctgtagaggcaagtgtaggttccactttgctcacagcaaatgtgccacttcagaccgccaccttctctgcaaaaagygattatcagtgcgcacagtagcatctccaggggagcattgcactgtgacagcacaggagcctggcaaaggcacagcaatgcaatccagtcctggcatagctgccgtgccaccctgggctgcccgcacacatctgctccattagcacattgaaatgccaggtgtgatggagtgctgaggatgtggctgtgtccctgaagactcagtgacactgcgggatcacagggtttggcggagcaagatgagaagtgacagctgaaaccggctgcagagatgttagtggcatttggaagaagctcgga

SEQ ID NO: 13658 - DNA, 599 bp, Chicken  19866894218245_1
  misc_feature (1)..(115): n is any nucleotide
nnnnnnnnnnnnnnnnnnnnnnnnnnnnnnnnnnnnnnnnnnnnnnnnnnnnnnnnnnnnnnnnnnnnnnnnnnnnnnnnnnnnnnnnnnnnnnnnnnnnnnnnnnnnnnnnnnntgatggtcacctgtattcacaggtatatgatgtatttttagcacctgcaataaattactgcttctttccttacagcttctggaaacattcccagtccttggcgtattcatcaggatcgttacaattctgctgccacaaagagggaagtatcgtgttctcctgttatttattagcatatgctggastgtgagggaccgtggtggggaggggagccctgctgtgaggggcacggggtaaacacagccgaaatgacagcagcaggcctcatcacagagcgttagcaattcaaacagccacgtcaggcggagaatttgagagacggatgtaacacaagcaaaggaagaacgtggcagtttgcaaacagtgagttgggtgatgttcttgtaggtgtgttcattcttgaagcacctcgaaagaaacgcaaatgaaatgtatggtgggcaggtctccgtgcaagcaaggcctgttggagcttcaggtcaga

SEQ ID NO: 13659 - DNA, 600 bp, Chicken  19866894218247_1
aataggactcatagttaaacatgattacaaagcaatttctgccataattataaaaataaggaaaaaaaaaaaggaaaaaaaaaaaaagcagaatctttctgcacatgaacatatctgcacatgaacaatgaagcactttcagccctgagcatactggaaaagaactgaaaaacaacaacaaaaaaaaacaaacacatttttatctctgagaagggaaaagttaataatagtgctgataataaattcattgaggcaaaattgagtacaatttatattgcttctgtttgtacgttttgaackaaagcaatagcttattctaaatgaataaacagatacaatcagctttatgaaaaactacagttttactctcttgctcaaagatttaagtacagcttaaacaaatgtcatggaaaactaggttgtactctcattttaataatatatgatttatccctgacttattactttattttccccacaagcagcaaggcatttcttcatctggcggtctctacagaaggtgccagcagaatattaaactcagtagaactttttaagatacacctgagaaacatccatccatatgaaattctcaggagt

SEQ ID NO: 13660 - DNA, 600 bp, Chicken  19866894218255_1
aaagcactgtattttagtctacaggcaattattttgaagcctaatactaataagatagctggcaagaaactttcagaaccctctccacaatttctgaagtgctataaaaaacaaaaaagaaaacctaaatcaacccaactgcttgaaattcatgtaaaatatagctataagcatgacttaactgttactcagaataaacataaaaagctcaaggcactataaatgaagtacagcaggggctaagttttgtccaaaacagcctattttaaattgggctgaacaggaacacaggcactccayataaacagagtgttagacctactaagatttcagccaatttccacacrgtagtgaagttgtacacaaaaatatacgtaccacaaacagcaccaaatcaatttcacttactgagtattgaataataactgcttgtgtctcctttgaagtatgttagttaacttagctaccctcttcatttgtaaccagtatttttactgattacatgctaatgtgtgaatttggccgacagcacagaaggaaaaagaaaatcaggacttactcaccaaggaggaatccctgtgacaccacattccatcctat

SEQ ID NO: 13661 - DNA, 600 bp, Chicken  19866894218255_2
taataagatagctggcaagaaactttcagaaccctctccacaatttctgaagtgctataaaaaacaaaaaagaaaacctaaatcaacccaactgcttgaaattcatgtaaaatatagctataagcatgacttaactgttactcagaataaacataaaaagctcaaggcactataaatgaagtacagcaggggctaagttttgtccaaaacagcctattttaaattgggctgaacaggaacacaggcactccayataaacagagtgttagacctactaagatttcagccaatttccacacrgtagtgaagttgtacacaaaaatatacgtaccacaaacagcaccaaatcaatttcacttactgagtattgaataataactgcttgtgtctcctttgaagtatgttagttaacttagctaccctcttcatttgtaaccagtatttttactgattacatgctaatgtgtgaatttggccgacagcacagaaggaaaaagaaaatcaggacttactcaccaaggaggaatccctgtgacaccacattccatcctataaaggaagtgaaagtgctcttcccttcggtctgatttacaagaaaga

SEQ ID NO: 13662 - DNA, 600 bp, Chicken  19866894218255_3
cttgacctgagaggttactacagaaaatactgaccgcacctgccctttttggttggtaggaagtcacagatactgccggagaggtgcattacttcaccataagcttaagcagacagcaggaattttaggtatttaacagctaaaactagcccttaaaaaacatcaggcttgggcctacgtgcaacacaggttacatttctttatgaactatgtctataatgagaatgccagtgtggtttttgttttcctgagatgttttcttcctgcaatttctttcttgaagtaacgctgctttcattyatctcctactgaaaagtctacatctatggtttcacaggagggcaatgggaaattaagaggtatgtgtagtataacaagtgacaggattgccaactgaacctaaactcaattctttctgggagaagggagaacagtaaaagaaaacagaacgtgtgtttatgatctgcaactcctcttcaacatggaagacaagtaaagatctgcccaatcattcttcatgtaagaagaatcacatgcagcttctgtattttcttgagaaagccaggatttgcagtaaatctcacctttctttgcaaaagt

SEQ ID NO: 13663 - DNA, 600 bp, Chicken  19866894218258_1
atctccactgcatgtatttaatggctaatcacgcactgctttgcatctctggaggcctaaacatgaaaggtaggtttccccaagcgctctgagtgcttagaagacttcgaaccaattcctacttgcaatctgcttacatgagcagggaaataaacagaagctgccttgcacaactacacttccccagctttctcttactttcccagtactttaacatatccttgaagaaacagaatgaggtagtttcttggcagtgcttttctgtgtgtctgggggtttttgtgcgttttagttgtgctyttttcttttcctgatctactgagaaaagcagattttgaacagggtattccagagcttccagcactattatagtcctttgcttttggaagttgtgctcggcgcagaaccatctccagagatactcctgacaytcctgttaaccagtagcastcgcatcattttgattccattgctgaagctttctgccagaatgaaagagccgctccctcccaaacaatgctattcctttcaggctgtttattgaactctgatccgattttgccaatgcagtgttcatgtttccggcctctggaaagcact

SEQ ID NO: 13664 - DNA, 600 bp, Chicken  19866894218258_2
gcttacatgagcagggaaataaacagaagctgccttgcacaactacacttccccagctttctcttactttcccagtactttaacatatccttgaagaaacagaatgaggtagtttcttggcagtgcttttctgtgtgtctgggggtttttgtgcgttttagttgtgctyttttcttttcctgatctactgagaaaagcagattttgaacagggtattccagagcttccagcactattatagtcctttgcttttggaagttgtgctcggcgcagaaccatctccagagatactcctgacaytcctgttaaccagtagcastcgcatcattttgattccattgctgaagctttctgccagaatgaaagagccgctccctcccaaacaatgctattcctttcaggctgtttattgaactctgatccgattttgccaatgcagtgttcatgtttccggcctctggaaagcactgtgcctaataagaaagtttacaggaagaaaaaaaaacttcaaagccacatgtttgcaattacgaagctgggaataggaggttttctttccttcctacgcaggatagcggtgagcattgtagaataattaag

SEQ ID NO: 13665 - DNA, 600 bp, Chicken  19866894218258_3
taaacagaagctgccttgcacaactacacttccccagctttctcttactttcccagtactttaacatatccttgaagaaacagaatgaggtagtttcttggcagtgcttttctgtgtgtctgggggtttttgtgcgttttagttgtgctyttttcttttcctgatctactgagaaaagcagattttgaacagggtattccagagcttccagcactattatagtcctttgcttttggaagttgtgctcggcgcagaaccatctccagagatactcctgacaytcctgttaaccagtagcastcgcatcattttgattccattgctgaagctttctgccagaatgaaagagccgctccctcccaaacaatgctattcctttcaggctgtttattgaactctgatccgattttgccaatgcagtgttcatgtttccggcctctggaaagcactgtgcctaataagaaagtttacaggaagaaaaaaaaacttcaaagccacatgtttgcaattacgaagctgggaataggaggttttctttccttcctacgcaggatagcggtgagcattgtagaataattaagctaaacgagtcctgaaaat

SEQ ID NO: 13666 - DNA, 600 bp, Chicken  19866894218259_1
ctttacagtacattagaggtaagcgtaacagtattataccaggccctttgaaaaactaataaaatttttcttcctgtgagagaagcccactgctgctaggagaggaactgcatgcccttcagttgaggatcatttgtttctgaagcctggatgaaagagaggtcttttaacaattctcaaagccattgttcgtaatcctattccctgtgctggtctcctagtagcaagggacattcgttaaaatctgcacaaaatcaggcccaaaaaatacagctccatgccctaaaagtcctttttcckattgcctgcactggctatgctgtaccttatgccctatatcaccaccttgctaggaggctgtgctcttttacttgggcagtagtctgtaactctgcaaggacacagaatcaccgaatcaccaaggttcaaaagacctctaagatcatccagtccaaccatccaccatttttttgcactaaaccatgtccctcggtacaacatctaaatgtttcttgaacgcctccatggatggtgactccaccactctctcggagaagtacttcctagcagccaacctgaatctcccctggtgcaacgtga

SEQ ID NO: 13667 - DNA, 600 bp, Chicken  19866894218260_1
gttcttgccacagttgttttcctccagaggctccttctaaaaacaaacatggacttttatacaatcaaggctttcaaagcaaacacaggaagtatcttctccagtctcctacgcatacttttctctactttgcctgctgcttcactctctcttcactaggcgccttcattctggccagcacaaaaacagagttacaatatatatactcatttattcagtttcctccagaaattactgtttcgtcaatacaaaaagcttttaagttagccataattttagcaaattgtctcaagtcaggartgtggcttgggggaagtaagggaaagtgtggacagacagtcattccttaagattcatgaagtatgctatcacctcttccttcaactccatgacagttcaatttagtcttctatctgtccaaagaaggtcatatttgctaggctagaaagtctttcttaagttgttccaattatattatggaggaccaaaacagactatcacccggtcaatctaaaatagtaattgagggtttccaaagcctgctccattgagaagttataattaacaatctgtttcaagaatgacaattaaataaaacaa

SEQ ID NO: 13668 - DNA, 599 bp, Chicken  19866894218264_1
  misc_feature (1)..(101): n is any nucleotide
nnnnnnnnnnnnnnnnnnnnnnnnnnnnnnnnnnnnnnnnnnnnnnnnnnnnnnnnnnnnnnnnnnnnnnnnnnnnnnnnnnnnnnnnnnnnnnnnnnnnnaccacctcctcctcacatgcagcagatccagatctggcctggcagaagcctgagagctgtcctttctgcccagcagcccgggtgagagcaggcagcacagagcactgccctccgagagcagacagcaaacacactgcaagaatagacaggtttattttaaatacaaggagttaaaaaagtccatttgtgcaaatgctcygtaaatatcactggcccagcagctcaggtgcctggacaagtcgctgccatctgtcccgtgtgctgggggaagctgtcagtctctctcccagatgccgctgttatcctctgcagcatcttctaagcagattcctggggaacacgagcagcattcccagcactcaggccacaagctttgtcccttccacccagcagcccttggtgaccccagcaagggatcaccggagcaaccctgcaacctgcatggaggcgagggctcaccccagcaaggggacatacctgctgctctgagctgagcct

SEQ ID NO: 13669 - DNA, 599 bp, Chicken  19866894218266_1
  misc_feature (1)..(53): n is any nucleotide
nnnnnnnnnnnnnnnnnnnnnnnnnnnnnnnnnnnnnnnnnnnnnnnnnnnnntggaaggggcaaagtacttttttaagctaaaaatgcatggtgttttgaatacagatgaaaaaatgtatattttctgtagaaactaacaattctataagacatgattttttattggtgttggatagttttgttttttgaatctccatgtgaactttcctagctttttatcagcagaagaattagctaacctaagagaaacaagtgctgggatatgggtagtgctttttgcagctgagggagtcaaatrtgaaccttagaaagcagcagagaacaacacagtaatgtgctgtgactcagtgcgtatcagttagtaattacctctgagaaacgactcttagtatgaattaaacaatacttttaaaatgttttattatatttagttctctgtagtgcataattctgtcaaaggttaattggtttgggtaatgctagaaaatacagtacttgatacatctactggtctgagcacaagagttgaaagatgttcctaccaattttgctaaggatctaatagctaacttgagtatcttatctatcaaaagaagt

SEQ ID NO: 13670 - DNA, 600 bp, Chicken  19866894218266_2
agttagtaattacctctgagaaacgactcttagtatgaattaaacaatacttttaaaatgttttattatatttagttctctgtagtgcataattctgtcaaaggttaattggtttgggtaatgctagaaaatacagtacttgatacatctactggtctgagcacaagagttgaaagatgttcctaccaattttgctaaggatctaatagctaacttgagtatcttatctatcaaaagaagtaagggataactctaataactctgagtttaatcgggagtctctctagaacagagctgaaygatggaaccaaactaggtcggagagtttcacagtgtagctcctcatccactggggacagagttgttaccagagtagttctgctaagaacaaagtccccaacttcaaaagcttgggaacacaactgaaaagaatgattctttcatccaggtcatgcattttacatttttcctatttaataagctaaagcctggagatgcagaatttggtgcttattttaggcgagtctttggagttgctgcaggtcttaaaaatatgacgatttgggatttttttctttaatgctactttaaatcccccaa

SEQ ID NO: 13671 - DNA, 600 bp, Chicken  19866894218275_1
atctttcatacatcccacatcccaccagaaaatcccttcagctctaaaatgaatcatagaatcacagaatcatagaatcacagaagggcctgggttgaaaaggaccacaatgatcatcgagtttcaacccccctgctatatgcggggccgccaaccaccagaccagactgcccagcaacacatccagcctggacttgaatgcctccagggatggggcacccacagcctccttgggcaacctattccagtgcatcaccaccctctgtgtgaaaaacttcctcctaatatctaacctaaacytcccctgtctcagtttaagaccattcccccttgtcctatcactatccaccctcataaacagccagtcctccccgttcatatgctcccttcaagtactcaaggaagcatatgcttccacgaaggacatcagcttctccctacgtgaacaccctcatgttgcatactgtgcaccctgtgcactgctcatttctattctgtatttgttgtggacacccattcacggcagtgttgaaagtgattttcctagtttagaacaaaatagttgtcacagtcgtagccagatataggcctggtggctaa

SEQ ID NO: 13672 - DNA, 487 bp, Chicken  19866894218282_1
gagcaagcaaaatggtgcttgaaaggacaagtggttttgtgaaacactcgcacagactgatttatactagttaagaaagacatttattgtttccttgcataagcggcagcaaaggtaatgcattctcccttgctgttttgaaggaggttgtagccctttttaatgtgtgaccttcaagctctacagaaaacttacgaatgaaaagctcctgtgagtaatcccatttgtagtcactgtagttgcattctgcagaggtttggtataaatctcttgccttggaatagcaggtgataaagtaargatgttttctttatttttaacaaatggattatttggcattcagaaatcttcacttaagcctcaggctctgaattatgctattgcaagaaatatttttaacttaattgaagagtggttcttaaagactgtagctctgaccatggtgggcccttctgtcacaaagccagctctgggtgatgctgtgtat

SEQ ID NO: 13673 - DNA, 600 bp, Chicken  19866894218283_1
tatccccagttttctgctgacttggcattataactgtccagtaaattttgctcatttttaataatgtcagtccaaagaatactgttgggatgaagaaaggcaagcaaatgaactgagctttttagaaaaatgttatgattccagatatgggaacacatgagaacaattatttatatccaagtagtgctgaatatctttttaattctgatctcatcacttctctttttttgctaagaaaaattattaaaatggatgtttccacaaatgcatgtgaacaagtggctatttgcttacacaagygaatgatcacaatgaagacagaaagaaataaagctctctttatttgggacaactttctgaaaatcctcctttacttctaaaaatgcttgctcatagcatgtccacaagtaaatcacacctgtaatactggtaaatcccaccaaaggaaagtcttctccaccatgaggtctttcatacygtgcttgtcagtgagtgggaaacaggaacaaacatgaaactcacgctgtacccacatccaggtcacagccactcctgccacaggagaaagagttctgagctgagcagcaggcttctgtcaat

SEQ ID NO: 13674 - DNA, 600 bp, Chicken  19866894218283_10
ttaacagctcatgtaattattatggaaagacagttacttcttcctaagtaaaattttatgctttctgccktgagcttggtgcaggccctgctgccatccgtcttgtcaggaaaaatcctcccatcaycaagcccacacctgtaaaatgtagccagaaaacagattctaagtccagatttcagacaaaatttcagttgttctcattaatagccagtggctcatcctaaaaccagcacatcccatgcagtgctggctcctgcccaggccagtggaacacagctgcattcagtcaggaccccrtgctggttggatttgtaggccgggtgctttgtctcctcacatgctgccccaactggagctatgtgccgtgcatcagcaggctgccaggttrgcaaatgctctgttccaggatagttttctactgggataacgtgagatgggatctttaacagctttaacctgggaaaacactggtctagagcatcaaagccagggagtgatgggagatcacacgtgccaacgatgttactcagtgaacctctaactattgcaccaggcaccagctgatgcaaggaggctgttatgcacattttttgttac

SEQ ID NO: 13675 - DNA, 543 bp, Chicken  19866894218283_11
tgccatccgtcttgtcaggaaaaatcctcccatcaycaagcccacacctgtaaaatgtagccagaaaacagattctaagtccagatttcagacaaaatttcagttgttctcattaatagccagtggctcatcctaaaaccagcacatcccatgcagtgctggctcctgcccaggccagtggaacacagctgcattcagtcaggaccccrtgctggttggatttgtaggccgggtgctttgtctcctcacatgctgccccaactggagctatgtgccgtgcatcagcaggctgccaggttrgcaaatgctctgttccaggatagttttctactgggataacgtgagatgggatctttaacagctttaacctgggaaaacactggtctagagcatcaaagccagggagtgatgggagatcacacgtgccaacgatgttactcagtgaacctctaactattgcaccaggcaccagctgatgcaaggaggctgttatgcacattttttgttacaacattacagttcagcatttcagacaggtcaagt

SEQ ID NO: 13676 - DNA, 600 bp, Chicken  19866894218283_2
aagtagtgctgaatatctttttaattctgatctcatcacttctctttttttgctaagaaaaattattaaaatggatgtttccacaaatgcatgtgaacaagtggctatttgcttacacaagygaatgatcacaatgaagacagaaagaaataaagctctctttatttgggacaactttctgaaaatcctcctttacttctaaaaatgcttgctcatagcatgtccacaagtaaatcacacctgtaatactggtaaatcccaccaaaggaaagtcttctccaccatgaggtctttcatacygtgcttgtcagtgagtgggaaacaggaacaaacatgaaactcacgctgtacccacatccaggtcacagccactcctgccacaggagaaagagttctgagctgagcagcaggcttctgtcaatgacctggttgcaattccttcatcacagaggtggtaaaatgggaatttctcattaagaacaagtcatctttgcaccatgtcacatyggtatctccatttaggccacctccttatcacttamctgttgagagatattagtgggtcacgtgggtgggttggygtgggaacagaaggaccaa

SEQ ID NO: 13677 - DNA, 600 bp, Chicken  19866894218283_3
cttgctcatagcatgtccacaagtaaatcacacctgtaatactggtaaatcccaccaaaggaaagtcttctccaccatgaggtctttcatacygtgcttgtcagtgagtgggaaacaggaacaaacatgaaactcacgctgtacccacatccaggtcacagccactcctgccacaggagaaagagttctgagctgagcagcaggcttctgtcaatgacctggttgcaattccttcatcacagaggtggtaaaatgggaatttctcattaagaacaagtcatctttgcaccatgtcacatyggtatctccatttaggccacctccttatcacttamctgttgagagatattagtgggtcacgtgggtgggttggygtgggaacagaaggaccaagcagcatttactgacatcagagtcattacaacagagccaaacagtccaggcacctgcacaccacagctggaaatgggctttgcattgaagagagaaggagatgtgtaactaagggcatctaatttgattagtaggtttgtgygccttgsactgtcccataattcagtcaattaagctatgctttaatagcagggtctttcatggcac

SEQ ID NO: 13678 - DNA, 600 bp, Chicken  19866894218283_4
gtaatactggtaaatcccaccaaaggaaagtcttctccaccatgaggtctttcatacygtgcttgtcagtgagtgggaaacaggaacaaacatgaaactcacgctgtacccacatccaggtcacagccactcctgccacaggagaaagagttctgagctgagcagcaggcttctgtcaatgacctggttgcaattccttcatcacagaggtggtaaaatgggaatttctcattaagaacaagtcatctttgcaccatgtcacatyggtatctccatttaggccacctccttatcacttamctgttgagagatattagtgggtcacgtgggtgggttggygtgggaacagaaggaccaagcagcatttactgacatcagagtcattacaacagagccaaacagtccaggcacctgcacaccacagctggaaatgggctttgcattgaagagagaaggagatgtgtaactaagggcatctaatttgattagtaggtttgtgygccttgsactgtcccataattcagtcaattaagctatgctttaatagcagggtctttcatggcacacatcccagggtaccacacaaaataataaaattaa

SEQ ID NO: 13679 - DNA, 600 bp, Chicken  19866894218283_5
ccatgaggtctttcatacygtgcttgtcagtgagtgggaaacaggaacaaacatgaaactcacgctgtacccacatccaggtcacagccactcctgccacaggagaaagagttctgagctgagcagcaggcttctgtcaatgacctggttgcaattccttcatcacagaggtggtaaaatgggaatttctcattaagaacaagtcatctttgcaccatgtcacatyggtatctccatttaggccacctccttatcacttamctgttgagagatattagtgggtcacgtgggtgggttggygtgggaacagaaggaccaagcagcatttactgacatcagagtcattacaacagagccaaacagtccaggcacctgcacaccacagctggaaatgggctttgcattgaagagagaaggagatgtgtaactaagggcatctaatttgattagtaggtttgtgygccttgsactgtcccataattcagtcaattaagctatgctttaatagcagggtctttcatggcacacatcccagggtaccacacaaaataataaaattaacagctcatgtaattattatggaaagacagttacttcttc

SEQ ID NO: 13680 - DNA, 600 bp, Chicken  19866894218283_6
atcacagaggtggtaaaatgggaatttctcattaagaacaagtcatctttgcaccatgtcacatyggtatctccatttaggccacctccttatcacttamctgttgagagatattagtgggtcacgtgggtgggttggygtgggaacagaaggaccaagcagcatttactgacatcagagtcattacaacagagccaaacagtccaggcacctgcacaccacagctggaaatgggctttgcattgaagagagaaggagatgtgtaactaagggcatctaatttgattagtaggtttgtgygccttgsactgtcccataattcagtcaattaagctatgctttaatagcagggtctttcatggcacacatcccagggtaccacacaaaataataaaattaacagctcatgtaattattatggaaagacagttacttcttcctaagtaaaattttatgctttctgccktgagcttggtgcaggccctgctgccatccgtcttgtcaggaaaaatcctcccatcaycaagcccacacctgtaaaatgtagccagaaaacagattctaagtccagatttcagacaaaatttcagttgttctcat

SEQ ID NO: 13681 - DNA, 600 bp, Chicken  19866894218283_7
aggtggtaaaatgggaatttctcattaagaacaagtcatctttgcaccatgtcacatyggtatctccatttaggccacctccttatcacttamctgttgagagatattagtgggtcacgtgggtgggttggygtgggaacagaaggaccaagcagcatttactgacatcagagtcattacaacagagccaaacagtccaggcacctgcacaccacagctggaaatgggctttgcattgaagagagaaggagatgtgtaactaagggcatctaatttgattagtaggtttgtgygccttgsactgtcccataattcagtcaattaagctatgctttaatagcagggtctttcatggcacacatcccagggtaccacacaaaataataaaattaacagctcatgtaattattatggaaagacagttacttcttcctaagtaaaattttatgctttctgccktgagcttggtgcaggccctgctgccatccgtcttgtcaggaaaaatcctcccatcaycaagcccacacctgtaaaatgtagccagaaaacagattctaagtccagatttcagacaaaatttcagttgttctcattaatagc

SEQ ID NO: 13682 - DNA, 600 bp, Chicken  19866894218283_8
tactgacatcagagtcattacaacagagccaaacagtccaggcacctgcacaccacagctggaaatgggctttgcattgaagagagaaggagatgtgtaactaagggcatctaatttgattagtaggtttgtgygccttgsactgtcccataattcagtcaattaagctatgctttaatagcagggtctttcatggcacacatcccagggtaccacacaaaataataaaattaacagctcatgtaattattatggaaagacagttacttcttcctaagtaaaattttatgctttctgccktgagcttggtgcaggccctgctgccatccgtcttgtcaggaaaaatcctcccatcaycaagcccacacctgtaaaatgtagccagaaaacagattctaagtccagatttcagacaaaatttcagttgttctcattaatagccagtggctcatcctaaaaccagcacatcccatgcagtgctggctcctgcccaggccagtggaacacagctgcattcagtcaggaccccrtgctggttggatttgtaggccgggtgctttgtctcctcacatgctgccccaactggagctatgtgccgtg

SEQ ID NO: 13683 - DNA, 600 bp, Chicken  19866894218283_9
gctggaaatgggctttgcattgaagagagaaggagatgtgtaactaagggcatctaatttgattagtaggtttgtgygccttgsactgtcccataattcagtcaattaagctatgctttaatagcagggtctttcatggcacacatcccagggtaccacacaaaataataaaattaacagctcatgtaattattatggaaagacagttacttcttcctaagtaaaattttatgctttctgccktgagcttggtgcaggccctgctgccatccgtcttgtcaggaaaaatcctcccatcaycaagcccacacctgtaaaatgtagccagaaaacagattctaagtccagatttcagacaaaatttcagttgttctcattaatagccagtggctcatcctaaaaccagcacatcccatgcagtgctggctcctgcccaggccagtggaacacagctgcattcagtcaggaccccrtgctggttggatttgtaggccgggtgctttgtctcctcacatgctgccccaactggagctatgtgccgtgcatcagcaggctgccaggttrgcaaatgctctgttccaggatagttttctactggga

SEQ ID NO: 13684 - DNA, 600 bp, Chicken  19866894218290_1
gtatggatgtaccacaaagagtgtttggttttagccccgatgccttgggtggtggtatgcagcaagtaacagaatactgggaataaagaaaaatcctgaaatgaatccctccagctatgggccggttgagagctagagagacaggatgtaaagtaaaaccagtatgtctccctttgatcaaaggatagattccccaccactgcccagcaggtgatcaacacataagcactttctcccctaaatgagcacattggacagaagtaagctcagcgctcacaaagcaaatttcagttaataaayytagtttagaattattttaattgctgcctttgtgcgctcagatttgtgaagttacatgatctgacacaattcgcttccaaattgtcaaagaatatgaaattctcaattgctgagcatttgacaaaactggaattttattttcagaaaacaagctggttccacaagtaagtcaatgtttatttttcagttgygtaagctttcagtacacagatrtatttattaatagccatctgcactacaaatcctgagtatggtgaaactgtagcgtagggcgtggtcgtgcatagcttttttacatag

SEQ ID NO: 13685 - DNA, 600 bp, Chicken  19866894218290_2
tatggatgtaccacaaagagtgtttggttttagccccgatgccttgggtggtggtatgcagcaagtaacagaatactgggaataaagaaaaatcctgaaatgaatccctccagctatgggccggttgagagctagagagacaggatgtaaagtaaaaccagtatgtctccctttgatcaaaggatagattccccaccactgcccagcaggtgatcaacacataagcactttctcccctaaatgagcacattggacagaagtaagctcagcgctcacaaagcaaatttcagttaataaayytagtttagaattattttaattgctgcctttgtgcgctcagatttgtgaagttacatgatctgacacaattcgcttccaaattgtcaaagaatatgaaattctcaattgctgagcatttgacaaaactggaattttattttcagaaaacaagctggttccacaagtaagtcaatgtttatttttcagttgygtaagctttcagtacacagatrtatttattaatagccatctgcactacaaatcctgagtatggtgaaactgtagcgtagggcgtggtcgtgcatagcttttttacataga

SEQ ID NO: 13686 - DNA, 600 bp, Chicken  19866894218290_3
ccccaccactgcccagcaggtgatcaacacataagcactttctcccctaaatgagcacattggacagaagtaagctcagcgctcacaaagcaaatttcagttaataaayytagtttagaattattttaattgctgcctttgtgcgctcagatttgtgaagttacatgatctgacacaattcgcttccaaattgtcaaagaatatgaaattctcaattgctgagcatttgacaaaactggaattttattttcagaaaacaagctggttccacaagtaagtcaatgtttatttttcagttgygtaagctttcagtacacagatrtatttattaatagccatctgcactacaaatcctgagtatggtgaaactgtagcgtagggcgtggtcgtgcatagcttttttacatagaatccattcaaaagcagctaattgaccagtctgtgtaaggcagagagtgtttttagttcaaaagtaatggcagtggacttatcattttgtttctagaagtacaatactgctttaagaaatcttttgttttctcgtagcttcatctcttattttatgtattaaatgccaaatcatatgcttgttgaagagga

SEQ ID NO: 13687 - DNA, 600 bp, Chicken  19866894218290_4
atcaacacataagcactttctcccctaaatgagcacattggacagaagtaagctcagcgctcacaaagcaaatttcagttaataaayytagtttagaattattttaattgctgcctttgtgcgctcagatttgtgaagttacatgatctgacacaattcgcttccaaattgtcaaagaatatgaaattctcaattgctgagcatttgacaaaactggaattttattttcagaaaacaagctggttccacaagtaagtcaatgtttatttttcagttgygtaagctttcagtacacagatrtatttattaatagccatctgcactacaaatcctgagtatggtgaaactgtagcgtagggcgtggtcgtgcatagcttttttacatagaatccattcaaaagcagctaattgaccagtctgtgtaaggcagagagtgtttttagttcaaaagtaatggcagtggacttatcattttgtttctagaagtacaatactgctttaagaaatcttttgttttctcgtagcttcatctcttattttatgtattaaatgccaaatcatatgcttgttgaagaggaagcayatcaagccaccactgtc

SEQ ID NO: 13688 - DNA, 600 bp, Chicken  19866894218290_5
ctttcagtacacagatrtatttattaatagccatctgcactacaaatcctgagtatggtgaaactgtagcgtagggcgtggtcgtgcatagcttttttacatagaatccattcaaaagcagctaattgaccagtctgtgtaaggcagagagtgtttttagttcaaaagtaatggcagtggacttatcattttgtttctagaagtacaatactgctttaagaaatcttttgttttctcgtagcttcatctcttattttatgtattaaatgccaaatcatatgcttgttgaagaggaagcayatcaagccaccactgtccgaaagaaatgagtgtgtggtagtgtactaacatcattaaactttcccatgtcttytttgaggactacatttcaaasaacttcaaaaattcagagactggcagccatgctttgtaatcattgwttgctttccagtttaaatcagaatacaatgacaaaaacacctgtgttagtatttatctattactatgatcatacaggtgagaatgtttttaatgagtaacctcttttaagrcttctgatggttaagaaatgttattttatcatgaacatttctctatgaa

SEQ ID NO: 13689 - DNA, 600 bp, Chicken  19866894218290_6
gggcgtggtcgtgcatagcttttttacatagaatccattcaaaagcagctaattgaccagtctgtgtaaggcagagagtgtttttagttcaaaagtaatggcagtggacttatcattttgtttctagaagtacaatactgctttaagaaatcttttgttttctcgtagcttcatctcttattttatgtattaaatgccaaatcatatgcttgttgaagaggaagcayatcaagccaccactgtccgaaagaaatgagtgtgtggtagtgtactaacatcattaaactttcccatgtcttytttgaggactacatttcaaasaacttcaaaaattcagagactggcagccatgctttgtaatcattgwttgctttccagtttaaatcagaatacaatgacaaaaacacctgtgttagtatttatctattactatgatcatacaggtgagaatgtttttaatgagtaacctcttttaagrcttctgatggttaagaaatgttattttatcatgaacatttctctatgaaagataagctatccgtgtctcatcagtcaagatcagcaagatgctgctattcagaacagtcattttcacaaaat

SEQ ID NO: 13690 - DNA, 600 bp, Chicken  19866894218290_7
ttttacatagaatccattcaaaagcagctaattgaccagtctgtgtaaggcagagagtgtttttagttcaaaagtaatggcagtggacttatcattttgtttctagaagtacaatactgctttaagaaatcttttgttttctcgtagcttcatctcttattttatgtattaaatgccaaatcatatgcttgttgaagaggaagcayatcaagccaccactgtccgaaagaaatgagtgtgtggtagtgtactaacatcattaaactttcccatgtcttytttgaggactacatttcaaasaacttcaaaaattcagagactggcagccatgctttgtaatcattgwttgctttccagtttaaatcagaatacaatgacaaaaacacctgtgttagtatttatctattactatgatcatacaggtgagaatgtttttaatgagtaacctcttttaagrcttctgatggttaagaaatgttattttatcatgaacatttctctatgaaagataagctatccgtgtctcatcagtcaagatcagcaagatgctgctattcagaacagtcattttcacaaaatggagatcagtatgtaaactga

SEQ ID NO: 13691 - DNA, 600 bp, Chicken  19866894218290_8
aaggcagagagtgtttttagttcaaaagtaatggcagtggacttatcattttgtttctagaagtacaatactgctttaagaaatcttttgttttctcgtagcttcatctcttattttatgtattaaatgccaaatcatatgcttgttgaagaggaagcayatcaagccaccactgtccgaaagaaatgagtgtgtggtagtgtactaacatcattaaactttcccatgtcttytttgaggactacatttcaaasaacttcaaaaattcagagactggcagccatgctttgtaatcattgwttgctttccagtttaaatcagaatacaatgacaaaaacacctgtgttagtatttatctattactatgatcatacaggtgagaatgtttttaatgagtaacctcttttaagrcttctgatggttaagaaatgttattttatcatgaacatttctctatgaaagataagctatccgtgtctcatcagtcaagatcagcaagatgctgctattcagaacagtcattttcacaaaatggagatcagtatgtaaactgattattaggaaaagtatttatcatgtgagactaaatgcatacataca

SEQ ID NO: 13692 - DNA, 600 bp, Chicken  19866894218290_9
tattttatgtattaaatgccaaatcatatgcttgttgaagaggaagcayatcaagccaccactgtccgaaagaaatgagtgtgtggtagtgtactaacatcattaaactttcccatgtcttytttgaggactacatttcaaasaacttcaaaaattcagagactggcagccatgctttgtaatcattgwttgctttccagtttaaatcagaatacaatgacaaaaacacctgtgttagtatttatctattactatgatcatacaggtgagaatgtttttaatgagtaacctcttttaagrcttctgatggttaagaaatgttattttatcatgaacatttctctatgaaagataagctatccgtgtctcatcagtcaagatcagcaagatgctgctattcagaacagtcattttcacaaaatggagatcagtatgtaaactgattattaggaaaagtatttatcatgtgagactaaatgcatacatacatttgacacatgcagtttttgctaggatcttcataaaaataattattacagctcaagaattgtacattctttttaatatcatatttgaattttgaaacacataaaaatacat

SEQ ID NO: 13693 - DNA, 599 bp, Chicken  19866894218294_1
  misc_feature (1)..(92): n is any nucleotide
nnnnnnnnnnnnnnnnnnnnnnnnnnnnnnnnnnnnnnnnnnnnnnnnnnnnnnnnnnnnnnnnnnnnnnnnnnnnnnnnnnnnnnnnnnnnatttgtggcacagaacacaaagtcagggtttgggtggggagaggagaaaggtgcacgttgcagtctggtttgggtcctgtcctaatggctggcgcagctgtgtcattgagtcacaaggcaagactataccaacaccgagtaagtgctgtaattaagaactgaatactgcatgtagcttgtaacagttccatcaaatatttacataaaygagagaaaactgtcttccatcaatttgaaaggaattggaagtcgtatctggtggtgttacacaacttaagggaaagcaaaagagtccttaattgttggaaacttcrgtgcagtgttgatgtgattgaagttaccttttttgggagagaggggggaaaaaaatgtcattctgtgaaaaaatgagcctgaactcaatgaagcactactaatatttagttatgctatagaagaaaaatgagacgaaagaagtttccagtttttgagtttctcatgtttactgtggtccctttcctaagacag

SEQ ID NO: 13694 - DNA, 600 bp, Chicken  19866894218294_2
acacaaagtcagggtttgggtggggagaggagaaaggtgcacgttgcagtctggtttgggtcctgtcctaatggctggcgcagctgtgtcattgagtcacaaggcaagactataccaacaccgagtaagtgctgtaattaagaactgaatactgcatgtagcttgtaacagttccatcaaatatttacataaaygagagaaaactgtcttccatcaatttgaaaggaattggaagtcgtatctggtggtgttacacaacttaagggaaagcaaaagagtccttaattgttggaaacttcrgtgcagtgttgatgtgattgaagttaccttttttgggagagaggggggaaaaaaatgtcattctgtgaaaaaatgagcctgaactcaatgaagcactactaatatttagttatgctatagaagaaaaatgagacgaaagaagtttccagtttttgagtttctcatgtttactgtggtccctttcctaagacagaagacggtcttctgagcctatatgcaaatacttaacgtttagatctctgcttaggggtgtgcttgagtactgcagggtgttttcagaaagctctcatcgtttataat

SEQ ID NO: 13695 - DNA, 600 bp, Chicken  19866894218294_3
ttgcagtctggtttgggtcctgtcctaatggctggcgcagctgtgtcattgagtcacaaggcaagactataccaacaccgagtaagtgctgtaattaagaactgaatactgcatgtagcttgtaacagttccatcaaatatttacataaaygagagaaaactgtcttccatcaatttgaaaggaattggaagtcgtatctggtggtgttacacaacttaagggaaagcaaaagagtccttaattgttggaaacttcrgtgcagtgttgatgtgattgaagttaccttttttgggagagargggggaaaaaaatgtcattctgtgaaaaaatgagcctgaactcaatgaagcactactaatatttagttatgctatagaagaaaaatgagacgaaagaagtttccagtttttgagtttctcatgtttactgtggtccctttcctaagacagaagacggtcttctgagcctatatgcaaatacttaacgtttagatctctgcttaggggtgtgcttgagtactgcagggtgttttcagaaagctctcatcgtttataatggcagcagtgcgcctcgcctggcagagcgttgatgtcygcagc

SEQ ID NO: 13696 - DNA, 600 bp, Chicken  19866894218294_4
gagaggggggaaaaaaatgtcattctgtgaaaaaatgagcctgaactcaatgaagcactactaatatttagttatgctatagaagaaaaatgagacgaaagaagtttccagtttttgagtttctcatgtttactgtggtccctttcctaagacagaagacggtcttctgagcctatatgcaaatacttaacgtttagatctctgcttaggggtgtgcttgagtactgcagggtgttttcagaaagctctcatcgtttataatggcagcagtgcgcctcgcctggcagagcgttgatgtcygcagccctraatattccaataggaggaggaataagccaggtgtcctgctcrgtttgttggtgtacgcaaygatgtgatgttgtgtcctgaaagtaataccgaagagcagtgcacgaaggaatcagaaagtttaaagaaatgggtttgttgtgtctgtttttagatgctcgtggtaggctcgggctgaccataagtgcagacaggagaacgcacagactttcatttttacataatgctttattttcaagcaactgttttgtgtgtttgtgctttttcaagaaactctcctatttagatgag

SEQ ID NO: 13697 - DNA, 600 bp, Chicken  19866894218294_5
gaaaaaaatgtcattctgtgaaaaaatgagcctgaactcaatgaagcactactaatatttagttatgctatagaagaaaaatgagacgaaagaagtttccagtttttgagtttctcatgtttactgtggtccctttcctaagacagaagacggtcttctgagcctatatgcaaatacttaacgtttagatctctgcttaggggtgtgcttgagtactgcagggtgttttcagaaagctctcatcgtttataatggcagcagtgcgcctcgcctggcagagcgttgatgtcygcagccctraatattccaataggaggaggaataagccaggtgtcctgctcrgtttgttggtgtacgcaaygatgtgatgttgtgtcctgaaagtaataccgaagagcagtgcacgaaggaatcagaaagtttaaagaaatgggtttgttgtgtctgtttttagatgctcgtggtaggctcgggctgaccataagtgcagacaggagaacgcacagactttcatttttacataatgctttattttcaagcaactgttttgtgtgtttgtgctttttcaagaaactctcctatttagatgagagaaggaaa

SEQ ID NO: 13698 - DNA, 600 bp, Chicken  19866894218294_6
gaagcactactaatatttagttatgctatagaagaaaaatgagacgaaagaagtttccagtttttgagtttctcatgtttactgtggtccctttcctaagacagaagacggtcttctgagcctatatgcaaatacttaacgtttagatctctgcttaggggtgtgcttgagtactgcagggtgttttcagaaagctctcatcgtttataatggcagcagtgcgcctcgcctggcagagcgttgatgtcygcagccctraatattccaataggaggaggaataagccaggtgtcctgctcrgtttgttggtgtacgcaaygatgtgatgttgtgtcctgaaagtaataccgaagagcagtgcacgaaggaatcagaaagtttaaagaaatgggtttgttgtgtctgtttttagatgctcgtggtaggctcgggctgaccataagtgcagacaggagaacgcacagactttcatttttacataatgctttattttcaagcaactgttttgtgtgtttgtgctttttcaagaaactctcctatttagatgagagaaggaaagtgagaactgaacatcagtttttttttttttctaaagaaaga

SEQ ID NO: 13699 - DNA, 600 bp, Chicken  19866894218294_7
gttatgctatagaagaaaaatgagacgaaagaagtttccagtttttgagtttctcatgtttactgtggtccctttcctaagacagaagacggtcttctgagcctatatgcaaatacttaacgtttagatctctgcttaggggtgtgcttgagtactgcagggtgttttcagaaagctctcatcgtttataatggcagcagtgcgcctcgcctggcagagcgttgatgtcygcagccctraatattccaataggaggaggaataagccaggtgtcctgctcrgtttgttggtgtacgcaaygatgtgatgttgtgtcctgaaagtaataccgaagagcagtgcacgaaggaatcagaaagtttaaagaaatgggtttgttgtgtctgtttttagatgctcgtggtaggctcgggctgaccataagtgcagacaggagaacgcacagactttcatttttacataatgctttattttcaagcaactgttttgtgtgtttgtgctttttcaagaaactctcctatttagatgagagaaggaaagtgagaactgaacatcagtttttttttttttctaaagaaagaggtgttgcttatagcacag

SEQ ID NO: 13700 - DNA, 600 bp, Chicken  19866894218297_1
tttaatcaagcagtattaaataaagaaataggaacatctaaaaataaaattaaaatcaaccttttttccttctccacctccttccccccagcaaaggagtgaaacagcacttagaaaagccctggaaaacacaggcagttttattagggcagaaaacccccaggaaggatagaacatttggataataaggcagatggtgttttcccagctcggagggtctctgcccagcctgctgtactcaaggcattccaaggcatttttttcactttcttccaaagcagctggtactgctgctgctgktgaaagagagtggagtaaatggaccttgggggtggtccaacctggcagttttcacatttttgagagatacaattccaaaatcagagcacaggtgtcagagagagggctgcgtggctctacctacatctttaaaatgtacacaatcttggcagggtttcctgcatgcagaaggccagacaggggtgggtactatacatggccaacaaaagagcagatgatgtgtggtgtgaactccatggaaacccatcattcttggaaaaagcatacagctgcatcctctatgtcactgtcatctccaga

SEQ ID NO: 13701 - DNA, 600 bp, Chicken  19866894218301_1
agatttattttttttttaagtaacatttattaagtcaagataggaaattcttattttgaagtgagtatttgcacataaacttacactaagtatgtgcagctgtgaagggaaacaggtttggttacccttgtaatgaaagatcaaggtaatgtcaaaattccacttgcatctttgctgaaagtgcagtactactccagtggaggaacatcctgggaacctccagcaccatggatggaacaggatgtccctgtgtgccataagacgagccagtggggaagaagaccactctggctgaacagraagcttttgctgagactccaggtaaaaaaagaaagtttactgtctttgaaagaagagataggcagctcaggaagagcacaaggatgttgctagagcatgcakagagaaaattagaaaggtgaaagtctagctagaacttaatctggccacagctgttaaagacaataaaaaatgtttttacaaatatatcaacagcaagaggagggtcaaagagaatctctgttgtttgttggatgcagcagggaacattaccactgaggataaggaaatggctgaggttctcaatgccttgacttctgt

SEQ ID NO: 13702 - DNA, 600 bp, Chicken  19866894218301_2
tgaagggaaacaggtttggttacccttgtaatgaaagatcaaggtaatgtcaaaattccacttgcatctttgctgaaagtgcagtactactccagtggaggaacatcctgggaacctccagcaccatggatggaacaggatgtccctgtgtgccataagacgagccagtggggaagaagaccactctggctgaacagraagcttttgctgagactccaggtaaaaaaagaaagtttactgtctttgaaagaagagataggcagctcaggaagagcacaaggatgttgctagagcatgcakagagaaaattagaaaggtgaaagtctagctagaacttaatctggccacagctgttaaagacaataaaaaatgtttttacaaatatatcaacagcaagaggagggtcaaagagaatctctgttgtttgttggatgcagcagggaacattaccactgaggataaggaaatggctgaggttctcaatgccttgacttctgtctttagtagtcaaaccagttatcctcagggtacctcaggtccctgaccttggaagtcagggatggagagcagaaaccctctatgattcagaaggaaacaatt

SEQ ID NO: 13703 - DNA, 600 bp, Chicken  19866894218308_1
gctgtccaggcgtatgtgcactttaatgcacctggttcctctaaggatttcccctgaaatgctttcagcacatatgacaaggctgctgcttatcgcttggtgtgctgcatctgattcttcctagcataatgggatcgactgcataaccagccacaagtctttaatatgatgggctttccatggtaattgagaaattacagctggaaagctgatatgaaagctgagagagtaagctgaacactttggagtctaactggaacatacgctacacatgtttggtaattcagacaattacaggargaacatgcaggtgggtgacaacccattcagtcttaaacactatttttgttttgcaagacctgccaaagctttttgagaaggcactgagcaacctgatctaactgtagatgtccttcatttcagaggagttggactagatgacctttaagggtccctcctaactcaaacgattctatgattctatgatttccactcaagtgctctaatcaaggccatcaaaggagagaagggtcctgcaaaatgtggaacagcagctgtgaatgtcacayggagagggaagaaggtagacatatcactgat

SEQ ID NO: 13704 - DNA, 600 bp, Chicken  19866894218308_2
acatgtttggtaattcagacaattacaggargaacatgcaggtgggtgacaacccattcagtcttaaacactatttttgttttgcaagacctgccaaagctttttgagaaggcactgagcaacctgatctaactgtagatgtccttcatttcagaggagttggactagatgacctttaagggtccctcctaactcaaacgattctatgattctatgatttccactcaagtgctctaatcaaggccatcaaaggagagaagggtcctgcaaaatgtggaacagcagctgtgaatgtcacayggagagggaagaaggtagacatatcactgatttcaccttttcctgtgttggagaggtcttacacactaatgagaccatgcaacttatggctcatctttccattctgctgttgtctccgtggtacacttgtcactactcagtacagtcaacttcaaaaagtccgatgctctgtttacattacttggaggagagaagcctgcagaaaagaaggctctagggagacctgacagtagcctttcagtatctaaaaggggctataaaaaagaagaggtcagactcattagcagggtgtgttgtgac

SEQ ID NO: 13705 - DNA, 600 bp, Chicken  19866894218308_3
gtttgcctgtgatatggtggaagggatctgatctgctgtttactaagcaatcacttgaactggggtcaggaatgaatatttcctcaggtttgatcagcaggagcttattgaactctgcaacatgaatactgtggcacctgacagggattttcacttttgtttaaagaacaaagacactggcagtgtacttggtttcttcatttcctctttattgtagtccacattattgaccttaatgacctgaagttgcatcaggggagattcaggtgggatatgaggaaaaaaaatcctcatagaaaragtagtgaggcattggagcagactgcccagggaggtggtagagtctccgtccctggagctgttcaagaggagggtagatggggctttgaggaatatggtttagtgggcatggtggtgatgagttggtggttggaccatgattgtggcatgtgctgaggattgctcagtggcttagtgagtaagacacatgggcacagcagtccttctggggtgtctgtccagatgaaatgtctgtcctgtgactgcctttggcagggatatttggcaaggaagttgtaatcatagtatcatagaatcatt

SEQ ID NO: 13706 - DNA, 600 bp, Chicken  19866894218310_1
ctccacacaaaacaaagctaccactggaggacttcttcaaacatgtatgcaattttctagtctgtgatcagaaatgacctcaaagaacagatgttacagtcaaaagtaatgaggccagttgtgctcaaaataattattattagctatatggtttcaattggtacatatggtagaaaatatcctcaaatttaaaatgtcatagttgatttatctcagaataaaagggtacaaaaaatctgctacagagtaatttgcacaaacatttcatcagcaaagtttgttttagaggtaaatcatgayggaacctgtctttaatagctcaaaagaaaaataaaatatggaaaaaaaaatcacagagaaaatcttacggccctgggccccccttaggcaatacatatacatacagcccaaaacattcccttcccccatcyttgactcttttccaaagcacgaaacacagcaaataattcacgtaacagccataagctcagtagctcccaattacgaaaacacggygggattgctcccatractggagggctacaatggacagctataagctcttyasgagggacaggcaagaaaggaarggtggtggca

SEQ ID NO: 13707 - DNA, 600 bp, Chicken  19866894218310_2
aattattattagctatatggtttcaattggtacatatggtagaaaatatcctcaaatttaaaatgtcatagttgatttatctcagaataaaagggtacaaaaaatctgctacagagtaatttgcacaaacatttcatcagcaaagtttgttttagaggtaaatcatgayggaacctgtctttaatagctcaaaagaaaaataaaatatggaaaaaaaaatcacagagaaaatcttacggccctgggccccccttaggcaatacatatacatacagcccaaaacattcccttcccccatcyttgactcttttccaaagcacgaaacacagcaaataattcacgtaacagccataagctcagtagctcccaattacgaaaacacggygggattgctcccatractggagggctacaatggacagctataagctcttyasgagggacaggcaagaaaggaarggtggtggcatggctctctatgttaaagagtgcttggggctgggaatggttaggtagagtctctataggtaaggaccaggggaagggccaacaaggcagacatcctggtggaggcctgttatagactgcctaaccaggatg

SEQ ID NO: 13708 - DNA, 594 bp, Chicken  19866894218310_3
aataaaagggtacaaaaaatctgctacagagtaatttgcacaaacatttcatcagcaaagtttgttttagaggtaaatcatgayggaacctgtctttaatagctcaaaagaaaaataaaatatggaaaaaaaaatcacagagaaaatcttacggccctgggccccccttaggcaatacatatacatacagcccaaaacattcccttcccccatcyttgactcttttccaaagcacgaaacacagcaaataattcacgtaacagccataagctcagtagctcccaattacgaaaacacggygggattgctcccatractggagggctacaatggacagctataagctcttyasgagggacaggcaagaaaggaarggtggtggcatggctctctatgttaaagagtgcttggggctgggaatggttaggtagagtctctataggtaaggaccaggggaagggccaacaaggcagacatcctggtggaggcctgttatagactgcctaaccaggatgaagatacagacgaggtgttctatgagcagctggcaggagctgtgggatcacctgcacttgttctcatagaggacatcaa

SEQ ID NO: 13709 - DNA, 579 bp, Chicken  19866894218310_4
aaaatctgctacagagtaatttgcacaaacatttcatcagcaaagtttgttttagaggtaaatcatgayggaacctgtctttaatagctcaaaagaaaaataaaatatggaaaaaaaaatcacagagaaaatcttacggccctgggccccccttaggcaatacatatacatacagcccaaaacattcccttcccccatcyttgactcttttccaaagcacgaaacacagcaaataattcacgtaacagccataagctcagtagctcccaattacgaaaacacggygggattgctcccatractggagggctacaatggacagctataagctcttyasgagggacaggcaagaaaggaarggtggtggcatggctctctatgttaaagagtgcttggggctgggaatggttaggtagagtctctataggtaaggaccaggggaagggccaacaaggcagacatcctggtggaggcctgttatagactgcctaaccaggatgaagatacagacgaggtgttctatgagcagctggcaggagctgtgggatcacctgcacttgttctcatagaggacatcaa

SEQ ID NO: 13710 - DNA, 544 bp, Chicken  19866894218310_5
atcagcaaagtttgttttagaggtaaatcatgayggaacctgtctttaatagctcaaaagaaaaataaaatatggaaaaaaaaatcacagagaaaatcttacggccctgggccccccttaggcaatacatatacatacagcccaaaacattcccttcccccatcyttgactcttttccaaagcacgaaacacagcaaataattcacgtaacagccataagctcagtagctcccaattacgaaaacacggygggattgctcccatractggagggctacaatggacagctataagctcttyasgagggacaggcaagaaaggaarggtggtggcatggctctctatgttaaagagtgcttggggctgggaatggttaggtagagtctctataggtaaggaccaggggaagggccaacaaggcagacatcctggtggaggcctgttatagactgcctaaccaggatgaagatacagacgaggtgttctatgagcagctggcaggagctgtgggatcacctgcacttgttctcatagaggacatcaa

SEQ ID NO: 13711 - DNA, 542 bp, Chicken  19866894218310_6
cagcaaagtttgttttagaggtaaatcatgayggaacctgtctttaatagctcaaaagaaaaataaaatatggaaaaaaaaatcacagagaaaatcttacggccctgggccccccttaggcaatacatatacatacagcccaaaacattcccttcccccatcyttgactcttttccaaagcacgaaacacagcaaataattcacgtaacagccataagctcagtagctcccaattacgaaaacacggygggattgctcccatractggagggctacaatggacagctataagctcttyasgagggacaggcaagaaaggaarggtggtggcatggctctctatgttaaagagtgcttggggctgggaatggttaggtagagtctctataggtaaggaccaggggaagggccaacaaggcagacatcctggtggaggcctgttatagactgcctaaccaggatgaagatacagacgaggtgttctatgagcagctggcaggagctgtgggatcacctgcacttgttctcatagaggacatcaa

SEQ ID NO: 13712 - DNA, 520 bp, Chicken  19866894218310_7
aaatcatgayggaacctgtctttaatagctcaaaagaaaaataaaatatggaaaaaaaaatcacagagaaaatcttacggccctgggccccccttaggcaatacatatacatacagcccaaaacattcccttcccccatcyttgactcttttccaaagcacgaaacacagcaaataattcacgtaacagccataagctcagtagctcccaattacgaaaacacggygggattgctcccatractggagggctacaatggacagctataagctcttyasgagggacaggcaagaaaggaarggtggtggcatggctctctatgttaaagagtgcttggggctgggaatggttaggtagagtctctataggtaaggaccaggggaagggccaacaaggcagacatcctggtggaggcctgttatagactgcctaaccaggatgaagatacagacgaggtgttctatgagcagctggcaggagctgtgggatcacctgcacttgttctcatagaggacatcaa

SEQ ID NO: 13713 - DNA, 600 bp, Chicken  19866894218319_1
tgtcttgtgacatcttcatttgtaggttattttccatgagtagttctgtctcatctgtgtaccaactgccatgtaactgtctctctcctatttgcttgccctgtttattgtgctcctgatcactgatatttcctggagtgccagagaagcaggaagcctggcataagttacgtcgacctcctgtgagattcctggcttggcagtgagcctctcattgctgtctgctagttcccagacccaactcatttatcttgcaatactaatatcattgcgtagtgcttcctctcatactactgctgraaactagagttgagtctctggcttgcttgtctggagtatgctagatggactgggaagttgttgactgcacacctgtgcagctagatgagaatctggcaaaggcattataaaacctgataactggaattgaaagctgggtaggagttgaaattagacacacacttttaccagtaawggcagttgggcattgagacagatcataaaggcatggatttctttgggtttggtctttccagaaggtatgcttcagttctctgctcatttctggccttatctacaggaacttctgggtgaatttct

SEQ ID NO: 13714 - DNA, 600 bp, Chicken  19866894218319_2
acctcctgtgagattcctggcttggcagtgagcctctcattgctgtctgctagttcccagacccaactcatttatcttgcaatactaatatcattgcgtagtgcttcctctcatactactgctgraaactagagttgagtctctggcttgcttgtctggagtatgctagatggactgggaagttgttgactgcacacctgtgcagctagatgagaatctggcaaaggcattataaaacctgataactggaattgaaagctgggtaggagttgaaattagacacacacttttaccagtaawggcagttgggcattgagacagatcataaaggcatggatttctttgggtttggtctttccagaaggtatgcttcagttctctgctcatttctggccttatctacaggaacttctgggtgaatttctacagattgtgttgaagtcagcataaattatccttatgccttgtagtttcttaaatatgtagatgcaatagaggagtctaaattatgactgtcaatgaataacaattttgctatgactgtggaagatctgtcagtattaaagacaacctggaaatgagagaaatgttagcagttcc

SEQ ID NO: 13715 - DNA, 599 bp, Chicken  19866894218321_1
  misc_feature (1)..(4): n is any nucleotide
nnnnctgagagtccacgtatgctcaagtgtagtttagaagtgacatgacgcctcagctagaggctccaaaaggaagtttggagaacttgagctcagctcggtctgtagcatcgcctattgccaatatccacccaagtggtcggagtggcaacgtggctgtgaaccaggcaggatgcactgctaagtgtcattaggagagcatcgtgcacccttttctgcagtacctccttgtgtcccttccctgtaagagcctcgtgggagcccacgggtggccctgtgcacggcactgcccttctgtgytcactctgtgctcctctccctcagttgacaccacgcgggtggcactccgagacgtggatgagagcgtgcctggctcagactacatcaatgccaactacatcaaggtacttgggaagggaaggcagcagatggggctgtgtttgtggtgggggtgtgcartaatgagaccaaccttgagggaacagcagttcaggtgccattctgtttctccagaccaagcactgcgtttttctgctgtatcctcagggatctcatcattctgacacgttctctttgcgctgatctaagagtttatctca

SEQ ID NO: 13716 - DNA, 600 bp, Chicken  19866894218321_2
tgaaccaggcaggatgcactgctaagtgtcattaggagagcatcgtgcacccttttctgcagtacctccttgtgtcccttccctgtaagagcctcgtgggagcccacgggtggccctgtgcacggcactgcccttctgtgytcactctgtgctcctctccctcagttgacaccacgcgggtggcactccgagacgtggatgagagcgtgcctggctcagactacatcaatgccaactacatcaaggtacttgggaagggaaggcagcagatggggctgtgtttgtggtgggggtgtgcartaatgagaccaaccttgagggaacagcagttcaggtgccattctgtttctccagaccaagcactgcgtttttctgctgtatcctcagggatctcatcattctgacacgttctctttgcgctgatctaagagtttatctcaatctcctgctttccttgcctgttcagggagtcccatggggctgacctaggctctccatcaccgcccattatcttaggggtcaggttataattgccatctgtaagctcagagctgctcgaagctgcgtttccagcagtgctgctctggcatttacacacca

SEQ ID NO: 13717 - DNA, 600 bp, Chicken  19866894218322_1
aaatcaggacatttgccagctctcaattgatggattgagagaggtctcttgatgatgtccaccagccctctgagtaccctaaacattgcattttgccttgctgaatctcattaggtccacatgggcccactttccaagcatgtttaggtccctctgggacatcattccttccttctgttgtatcaactacaccactcagctgggtgtgtaatcaccaaatttgttgagggtgctcccaatcacattgaccaggtcattgacaaagatgttaaaaatcactagttgcaagacagacccctragggattccagtaatcactggcttctacctggacatagagccattggccacaaccctctggttgccatcatccaaccaattgtttattcaataaatagccaactcttgaaatccatctctctccaatttagacatgtctgtgttgtttctgggccttcctttctgcctgtcttraaaatgggagtgatgtttctctttctgcagtcaccacggacttcccccaacagccacaacttcttgaatatgatggagagtggcttggcagctacatcagacagttcctgggatgcatgtcatctg

SEQ ID NO: 13718 - DNA, 600 bp, Chicken  19866894218322_2
ctgttgtatcaactacaccactcagctgggtgtgtaatcaccaaatttgttgagggtgctcccaatcacattgaccaggtcattgacaaagatgttaaaaatcactagttgcaagacagacccctragggattccagtaatcactggcttctacctggacatagagccattggccacaaccctctggttgccatcatccaaccaattgtttattcaataaatagccaactcttgaaatccatctctctccaatttagacatgtctgtgttgtttctgggccttcctttctgcctgtcttraaaatgggagtgatgtttctctttctgcagtcaccacggacttcccccaacagccacaacttcttgaatatgatggagagtggcttggcagctacatcagacagttcctgggatgcatgtcatctggcccagtaggattgtacatattcagtttcatcaggtggtctccaacttcttgttcttttacagtgggagagattttgtttctcaagcctctgcctagagcttcagggacatgataaacagggtaaactgccagtgtaggggtaaagaagttgttaagtaaaatataattcagtc

SEQ ID NO: 13719 - DNA, 599 bp, Chicken  19866894218324_1
  misc_feature (1)..(202): n is any nucleotide
nnnnnnnnnnnnnnnnnnnnnnnnnnnnnnnnnnnnnnnnnnnnnnnnnnnnnnnnnnnnnnnnnnnnnnnnnnnnnnnnnnnnnnnnnnnnnnnnnnnnnnnnnnnnnnnnnnnnnnnnnnnnnnnnnnnnnnnnnnnnnnnnnnnnnnnnnnnnnnnnnnnnnnnnnnnnnnnnnnnnnnnnnnnnnnnnnnnnnnnnnnagaaatgtgtgactttgtgtactgtcgtttattaaagatgcaaaagaggtagtcttgttattcgaaagactgacacctttcctctgaatatattatayccataaagtccaattcacatttacaagccctctaagaaaaagatgagcgaattgaaaaaatctggagaaatttttgctctcaagaaagctctgagagcatgttcttgcaatctaagwtatcattagtgccaggggaaatgcagctttagccagctgtgtttttatgtgaagagggttcacacgcaggttcccaccgccagcttttcacttacacttctgtaggtgcttaccaaacgtagaatgccgtcaatctgcagacaactaatgaaagggctggctatgttcttctgatgtctttg

SEQ ID NO: 13720 - DNA, 599 bp, Chicken  19866894218324_2
  misc_feature (1)..(85): n is any nucleotide
nnnnnnnnnnnnnnnnnnnnnnnnnnnnnnnnnnnnnnnnnnnnnnnnnnnnnnnnnnnnnnnnnnnnnnnnnnnnnnnnnnnnnagaaatgtgtgactttgtgtactgtcgtttattaaagatgcaaaagaggtagtcttgttattcgaaagactgacacctttcctctgaatatattatayccataaagtccaattcacatttacaagccctctaagaaaaagatgagcgaattgaaaaaatctggagaaatttttgctctcaagaaagctctgagagcatgttcttgcaatctaagwtatcattagtgccaggggaaatgcagctttagccagctgtgtttttatgtgaagagggttcacacgcaggttcccaccgccagcttttcacttacacttctgtaggtgcttaccaaacgtagaatgccgtcaatctgcagacaactaatgaaagggctggctatgttcttctgatgtctttgaggcaaaactcccatcagaatggcagacgagatgctgttgtaagtggaaatctttctccaagtgaagtcaaaaatttctggctgacactgtgctctcactcctagcagmaatgcctt

SEQ ID NO: 13721 - DNA, 600 bp, Chicken  19866894218324_3
aatctaagwtatcattagtgccaggggaaatgcagctttagccagctgtgtttttatgtgaagagggttcacacgcaggttcccaccgccagcttttcacttacacttctgtaggtgcttaccaaacgtagaatgccgtcaatctgcagacaactaatgaaagggctggctatgttcttctgatgtctttgaggcaaaactcccatcagaatggcagacgagatgctgttgtaagtggaaatctttctccaagtgaagtcaaaaatttctggctgacactgtgctctcactcctagcagmaatgccttatttatgttgaaataaaagcaaaggcagttgttcatacctgaattgcagttaatgggctcggctggcgatgacaagtgagtgctttaattgattagccagggaaatgtactttatctgcttctctttggtgagctttatgctggattgatcatcagggtgctagttttactccttaagactgatttcttcttccaatcgtgcacatcattagtcaataggatggatggaaaggtggtgaggtagttgtttgtgcttctaaataggcattcattatgtgtgtgactgtatttt

SEQ ID NO: 13722 - DNA, 600 bp, Chicken  19866894218326_1
gtagcagaaaatcaatcttgatataaccacaggatgcttttatttgtaactgatattttaagatttgcgcgtatgttgtggtttcacattgtttgggtttagcatgcaagttgtagaaaggaaaaatccccagcatgtttaattacccacactgtaaaatgtgaaaaggccaatacaaaatgatttatctctgactgatattacagtggcatgaaaaatgtttctgtacagtgcacagtgaagggccaagtccatctccatgtatattaccttggtttaaaaaagaaaaaaaactccccraacagtcttttagtggtctgcatcaaatacaattcattctaaaattaatcatgtttactacaatgtttgcggggtgtaggcaatgtctaattcgttacttgaagcaatgatgtggaaggtaattaacaagaatagaagcatatgtagtgtatcacaaaataggatccagcatgataattaacaatgtcattaactaaagttcacatttatctagaagaggtagtgttcttcagtgaatgtggaatatacttaactaaatggccaattacagtgaagtatattaatttgtatgtttcagat

SEQ ID NO: 13723 - DNA, 600 bp, Chicken  19866894218328_1
taactgcctctgcaagaggtaggaatactgacaataaagcatggggaactgacccagaacagccaggtaggtgcatggtggtgatgcaggcacagcaggatgcgtgctggcagagatctgtaatagatgcatagggcttggccaccagtgcatgctgctgctgggcaatgccacccctctatgctcagtgcgggtgcatttctctgctctggagtagcaagggcacatccattgcttaaagcaggatgcagcagtgcaacgtgtgaagaagatggctaaataaacacctcctgagtggamtggttgggtcatccaccttgctcagttgtaattaggtaaggtaaatccaaaagctgccatggtcgtggggatgagctatgcacacccagagccacatcccttatggcctcccctcccaccccagggatgtcacttgtgcaaaactcagtgccacatcccagacagaggcagcccggcagacactgcaggctgcgtcccagcctgaggatggctattttaagacctgtgactcctgagaaagcattaaatacatctgcatttttcaagatctgttcacggattcaytcgacactgacttcc

SEQ ID NO: 13724 - DNA, 600 bp, Chicken  19866894218328_2
acctcctgagtggamtggttgggtcatccaccttgctcagttgtaattaggtaaggtaaatccaaaagctgccatggtcgtggggatgagctatgcacacccagagccacatcccttatggcctcccctcccaccccagggatgtcacttgtgcaaaactcagtgccacatcccagacagaggcagcccggcagacactgcaggctgcgtcccagcctgaggatggctattttaagacctgtgactcctgagaaagcattaaatacatctgcatttttcaagatctgttcacggattcaytcgacactgacttcccaggctggggttcacctcatctaatttttattcacctaaaaaattcagcatctcgtgtgaagcagctactacactccctctccagtcaacacaggggcatggcgaaaaccagagggttgttcttcccatctaagagctcctaaccatgggatacaagcagaaaatcgcagtacaccacagatcaggaccacagcagctgaactcgaagctcaagctgagcactaaccctgctctaacacagccctgaggaatcggcaccaccaggactctgggaagggctgaggc

SEQ ID NO: 13725 - DNA, 600 bp, Chicken  19866894218329_1
ggtgtaaatggacacagacatgctgagatgtagatagtgctttggagtatggagcactgctcaccggagcagggcacggcgtggggactccctaccaaagcaggtgctgatttcctggtgcagcttccctcattcctcacaaagcccaatttcctcctctggtcaccatgcagagcaaatccagggctagtttgctgtcttataacccaccatctccctcagatctaaagccaatgatgtaaaagcagcagctttatgttggactacagctctgcctgtgacattttccaccctctccaratggcatgggaaaagcaggcacccagggcaggggtggaggggcccttcycaggcaattgctagggagttgtggctcagggactcgaggctatgaaaggtgtttgtacttcatggtttacagtggatttttttcactctatgaacttgtctggttgcccacggaattcacgcaggcatttagctcccacagcttccccactcaagaccttaacagccatggtgacagagccaggagaggtcaatccttcacccatggaaaactgttcaaggggttcaaagaaacacatttggcttcaccca

SEQ ID NO: 13726 - DNA, 600 bp, Chicken  19866894218329_2
tggagcactgctcaccggagcagggcacggcgtggggactccctaccaaagcaggtgctgatttcctggtgcagcttccctcattcctcacaaagcccaatttcctcctctggtcaccatgcagagcaaatccagggctagtttgctgtcttataacccaccatctccctcagatctaaagccaatgatgtaaaagcagcagctttatgttggactacagctctgcctgtgacattttccaccctctccaratggcatgggaaaagcaggcacccagggcaggggtggaggggcccttcycaggcaattgctagggagttgtggctcagggactcgaggctatgaaaggtgtttgtacttcatggtttacagtggatttttttcactctatgaacttgtctggttgcccacggaattcacgcaggcatttagctcccacagcttccccactcaagaccttaacagccatggtgacagagccaggagaggtcaatccttcacccatggaaaactgttcaaggggttcaaagaaacacatttggcttcacccaccccaagcaggtttgcaggcatgggaaggtgcaggctgagctctgccct

SEQ ID NO: 13727 - DNA, 600 bp, Chicken  19866894218329_3
gtctggttgcccacggaattcacgcaggcatttagctcccacagcttccccactcaagaccttaacagccatggtgacagagccaggagaggtcaatccttcacccatggaaaactgttcaaggggttcaaagaaacacatttggcttcacccaccccaagcaggtttgcaggcatgggaaggtgcaggctgagctctgccctcagagtcctgctaccagcttcaggatcacgtttaaccaggcaggccccatgccagacctgctagcagcttcctttctccctccctcccaaggggtgyggggaagcattgagtgtgccccagcccaccctggacccctatgccctgtccccagccccagcacacatggacacagtgctgcagcaatggtgtctttattgaagacttgaagttgtagacggtggcttatctgtacttctcagccagcacagcagacacggcagacaggaacttgtcgaaggcagcatgcacttcaggggtgtagtctttgcccatgtgtacagccagcaccacctggatgcactgcgacaacagctgcaaggcaaacagaggctcagtacccttgctctggatggagga

SEQ ID NO: 13728 - DNA, 600 bp, Chicken  19866894218331_1
gctctgtctttatgaactctaatctagagattctgcattcctccagcattcagtacattatcaaatcatattcaaagtactatgaattcatgccccagagggcatgaacccaaatttaaagtcatcatcattctgtatattttctgctcggttgaaggttttatgatacaggctgaatgtcttttcaggacaatcctaaaaataagctaatgcagtggggactgaatttattggacgcgtacactcaccttcggttgatgttctccctaggtcagttctcatgtgattggcaagggatcrtgacagcttgtatcttcctatgagaaacctgtgtagacactggtaattagaactgccactcagtccttcctgacaacagctactgcagtggcactgggcctctgaactagcaactacctcaggaaaatcctgtttcccggtgtcttcttctccataggcacacacctaattgcatgtaaacattcagtaatttactacaccacagaaaaacattggtaccttcaagctgaaaatatagcggttgataaatgcctaagaactgcaattccaaagtgtcacctgcaatgtagttctcccaac

SEQ ID NO: 13729 - DNA, 600 bp, Chicken  19866894218331_2
aaaacattggtaccttcaagctgaaaatatagcggttgataaatgcctaagaactgcaattccaaagtgtcacctgcaatgtagttctcccaacagccttccctgactgctgcctgaactaagggtacttcctcagtaatggagaaattaagaagggtctcagtctgccttttgaggagtctaacccttggtctaaatcaagagtgctgaggctcatcagccagctcggtatacaggaaaaaagcaccccaaacacaaccccactatggtttgaaaacatcagtgcatttttcttggagyattttcccccagtcaaaagaacagaaatgttcacttarctatactttttacccataattaatttactcaccagctgttaatgactgcagctgagaaaaggaaagaaacttgatgcaaatggaacatgaatgtgaaacaacacttttgagaggcaaaaggtaaggaaaaatgtttggaaacatcttcaaatgaaaaggatgctgaagtacttccttgtagtatgacagctctgttcaaagcccagaaagctgagtatctatggaattaaacttggattctattcccagctttgccacagtt

SEQ ID NO: 13730 - DNA, 600 bp, Chicken  19866894218331_3
ataaatgcctaagaactgcaattccaaagtgtcacctgcaatgtagttctcccaacagccttccctgactgctgcctgaactaagggtacttcctcagtaatggagaaattaagaagggtctcagtctgccttttgaggagtctaacccttggtctaaatcaagagtgctgaggctcatcagccagctcggtatacaggaaaaaagcaccccaaacacaaccccactatggtttgaaaacatcagtgcatttttcttggagyattttcccccagtcaaaagaacagaaatgttcacttarctatactttttacccataattaatttactcaccagctgttaatgactgcagctgagaaaaggaaagaaacttgatgcaaatggaacatgaatgtgaaacaacacttttgagaggcaaaaggtaaggaaaaatgtttggaaacatcttcaaatgaaaaggatgctgaagtacttccttgtagtatgacagctctgttcaaagcccagaaagctgagtatctatggaattaaacttggattctattcccagctttgccacagttttgaggtatcatttagatacagattccttgcctgtgaa

SEQ ID NO: 13731 - DNA, 600 bp, Chicken  19866894218331_4
caaatgaaaaggatgctgaagtacttccttgtagtatgacagctctgttcaaagcccagaaagctgagtatctatggaattaaacttggattctattcccagctttgccacagttttgaggtatcatttagatacagattccttgcctgtgaaacggagctaacagcagaactccagtttccatgcacagtgcccagttaaacagcatcgcattaaatagcatcttcgtcctgcggtagagaaataaagaggcagagtgaggcggtcaggaacttttgagatccaaatggcagtgaaatytaatctccagaccatggaaatcactggaaattgacttcaaaacactgttgatttcagtgggttttggatcaaggcttagcagaacaaacttaccgcatgaagacaactttgttttccagagcaatgtttgacttcttgacaggagctagtgtgctgagccagaccgtaccttgggggcgaacctaagccaaagggttgcactgartcccaggagcatcttgtggaaggagctccctctccatcccccccctccataccttgttcaggatgacacgggattttctagcttacccccatagg

SEQ ID NO: 13732 - DNA, 600 bp, Chicken  19866894218331_5
catcgcattaaatagcatcttcgtcctgcggtagagaaataaagaggcagagtgaggcggtcaggaacttttgagatccaaatggcagtgaaatytaatctccagaccatggaaatcactggaaattgacttcaaaacactgttgatttcagtgggttttggatcaaggcttagcagaacaaacttaccgcatgaagacaactttgttttccagagcaatgtttgacttcttgacaggagctagtgtgctgagccagaccgtaccttgggggcgaacctaagccaaagggttgcactgartcccaggagcatcttgtggaaggagctccctctccatcccccccctccataccttgttcaggatgacacgggattttctagcttacccccataggaaagcagaaaacatctggcagcagaccaggtgcgctgagccttgagatgcaaggaagccaggcactrtgggaagggtcagtcacagggagctgcttccacttcccaccctgtcagcatcaagcctgccagatatgggaatttttgatacactgtgcagagaactcagtgtgctggagctggaaggcactgcaaccattgcaaggc

SEQ ID NO: 13733 - DNA, 578 bp, Chicken  19866894218331_6
atcaaggcttagcagaacaaacttaccgcatgaagacaactttgttttccagagcaatgtttgacttcttgacaggagctagtgtgctgagccagaccgtaccttgggggcgaacctaagccaaagggttgcactgartcccaggagcatcttgtggaaggagctccctctccatcccccccctccataccttgttcaggatgacacgggattttctagcttacccccataggaaagcagaaaacatctggcagcagaccaggtgcgctgagccttgagatgcaaggaagccaggcactrtgggaagggtcagtcacagggagctgcttccacttcccaccctgtcagcatcaagcctgccagatatgggaatttttgatacactgtgcagagaactcagtgtgctggagctggaaggcactgcaaccattgcaaggctgaattcatttttcccagtaacagttcagcccaaagagagcacagcacagtgcattaagtatctcaataaagttttatgcaaccactcttcagaaaccaacccagaaatggcagtgggtgtatttttagacatttaatta

SEQ ID NO: 13734 - DNA, 600 bp, Chicken  19866894218334_1
ttcttgctggcttatttcaacaggaaggtaacctcccctttctgccccccagccacaggcagggggagggagaagcatctttagtcaggagagaaacacaaaacaagtcaacctctgttgtaatgcacaaatggtaaacagcaatttccatttcctgttaaaatctgatagaggcttcttcagaaaacaagtcatgatgcactttatttgcttttctcctagtttcttgcttgttgtttttatctaagacccatatgacatacttttactggtgcttatgtcaatatttattgaacaagyggtcaaggcaggccactttttaagccctgcactatccggttgttaattacctcaatgcaatgtgttaatgaagaagaacaccctcttcttttgacagataattgataagagatcaggaggcctgatgcctgacaaggaacatgaaatggcctctttgattgccacgcagatcactgcacttctgcagtaatgggacttgcaaggagcccacatggctcacagggagtacatagccccagggtgaagactctggtaagaaaaagagcaaaggatttgcaagcagtttgagcagatgttctt

SEQ ID NO: 13735 - DNA, 600 bp, Chicken  19866894218343_1
gggcagaaagtggaggggggatgagtatagctgcagtgccaagcattacgctgaaccaggcattcttgcaaaaaattgtggactgtgcatttaacagtttagatgagaaagtagcactgcattgcaaagtacctggcctttcaaatggtaatagacttttcctcacagctgcacaagccatgttgtcatttatacatcagagaagttagaacctactacttttaatttattaatgctgtattcatacagtctcctcattcaaattcaccttctttcttatctcggttcttttcattggayattgctgtactaaaacatggmtttacttctttttctttctgatttatctgtttaagaaaaattgaacttcgtagctacagggataggattttacttccaagcaaaacaaaaggccaaaattacaggccaggaaaactaaaagttgctgttttttatgctaactttcatcacattaaaataactttgtgaagaattcctctaaaaaaataaatgtaaaatggatgaaaattgagtacacagtgaaagaaaacttggtgagcccactagragagatacttcattgtcagaagtaagaaaagt

SEQ ID NO: 13736 - DNA, 600 bp, Chicken  19866894218343_2
tgagtatagctgcagtgccaagcattacgctgaaccaggcattcttgcaaaaaattgtggactgtgcatttaacagtttagatgagaaagtagcactgcattgcaaagtacctggcctttcaaatggtaatagacttttcctcacagctgcacaagccatgttgtcatttatacatcagagaagttagaacctactacttttaatttattaatgctgtattcatacagtctcctcattcaaattcaccttctttcttatctcggttcttttcattggayattgctgtactaaaacatggmtttacttctttttctttctgatttatctgtttaagaaaaattgaacttcgtagctacagggataggattttacttccaagcaaaacaaaaggccaaaattacaggccaggaaaactaaaagttgctgttttttatgctaactttcatcacattaaaataactttgtgaagaattcctctaaaaaaataaatgtaaaatggatgaaaattgagtacacagtgaaagaaaacttggtgagcccactagragagatacttcattgtcagaagtaagaaaagtgtaaggcttctytggttttgt

SEQ ID NO: 13737 - DNA, 600 bp, Chicken  19866894218343_3
cttctttcttatctcggttcttttcattggayattgctgtactaaaacatggmtttacttctttttctttctgatttatctgtttaagaaaaattgaacttcgtagctacagggataggattttacttccaagcaaaacaaaaggccaaaattacaggccaggaaaactaaaagttgctgttttttatgctaactttcatcacattaaaataactttgtgaagaattcctctaaaaaaataaatgtaaaatggatgaaaattgagtacacagtgaaagaaaacttggtgagcccactagragagatacttcattgtcagaagtaagaaaagtgtaaggcttctytggttttgtaagaattccttaagattactatgtgaatacagcaacagaaaatgagcttttagaagatttcaagacggcagttcacctgaacaatgctgaaggcttcagctgaggtggctagacctgtgtttctattgctctgtgtgattattccttctttctcattgtcaagcattcaggttacacaaatacagtctcattttgccataaaacttccaccaaaataatccctgatagttattttaaaacatttcct

SEQ ID NO: 13738 - DNA, 600 bp, Chicken  19866894218343_4
aaacatggmtttacttctttttctttctgatttatctgtttaagaaaaattgaacttcgtagctacagggataggattttacttccaagcaaaacaaaaggccaaaattacaggccaggaaaactaaaagttgctgttttttatgctaactttcatcacattaaaataactttgtgaagaattcctctaaaaaaataaatgtaaaatggatgaaaattgagtacacagtgaaagaaaacttggtgagcccactagragagatacttcattgtcagaagtaagaaaagtgtaaggcttctytggttttgtaagaattccttaagattactatgtgaatacagcaacagaaaatgagcttttagaagatttcaagacggcagttcacctgaacaatgctgaaggcttcagctgaggtggctagacctgtgtttctattgctctgtgtgattattccttctttctcattgtcaagcattcaggttacacaaatacagtctcattttgccataaaacttccaccaaaataatccctgatagttattttaaaacatttccttcttttcactcatctttcagattgacatagccttagaggaattt

SEQ ID NO: 13739 - DNA, 600 bp, Chicken  19866894218345_1
ctccactgtgaaatatactcagataatatttatgtatgtatattgccgagagaaatgagccaacatttagcacaaatgcacagatgcatgaatactgaaaatctcatataaatgagtgtaattgcacacacatgtatgtccccctaggaacaaagagttcatttctgaacacctgcagcatagaaaccaaccatccaaatatttgcaacaggaaaaatatctgagataaattcaaagagaccaaaattcaagtctggtttggtcaaagtgttcataaacacattttctatgaatttgctyctatttcacctgtatcttgtataactccatgtatttatgactctctgtactaactgaactgttgcaattgaacattgtgcaaatgcaattgcacatttgaaaatgattcttactaaggtcagttgaatctcatgacatctgtaacactgtcaacctttatagctgtataaagtgtctcactatgtcttggccctttggaggacatatgtaacctttatgcttcttgttcttccagttttgtacatatcctcaatgacatcatcytccattattgcaatcactgtcatcagaaggagagtt

SEQ ID NO: 13740 - DNA, 600 bp, Chicken  19866894218345_2
aaagtgttcataaacacattttctatgaatttgctyctatttcacctgtatcttgtataactccatgtatttatgactctctgtactaactgaactgttgcaattgaacattgtgcaaatgcaattgcacatttgaaaatgattcttactaaggtcagttgaatctcatgacatctgtaacactgtcaacctttatagctgtataaagtgtctcactatgtcttggccctttggaggacatatgtaacctttatgcttcttgttcttccagttttgtacatatcctcaatgacatcatcytccattattgcaatcactgtcatcagaaggagagtttgaaacaatggatatgacaaagagcagtacatattttaagtaggagatttgtagatgtattcaggcagagcaggagtaagaaagggtcaaggagatggtgacagggaaaaaaaaaaagaggactattatcagttaagggtgactcaggaatgcatgggagtacagcagactgttgaagaacataagttgaatgtaaacacacttttccatgtttagctccatatgacttatttgccagcaggatgaagacaaggttgggcaagt

SEQ ID NO: 13741 - DNA, 600 bp, Chicken  19866894218348_1
gcgaggatgtggagctgacacaggaagacggctggattgctggttagtattctgggcatggagtggaggggtggagggaaagaacagtcttgggtatagagctcttctgatgtaaacctttccctagtgtatagtttgcaagcattggtgttgggggattgtgctttttgaatttatgcattcatctgggtgtttccaatgcatgttggaggttcactctgggacctgagaaattgttattcaaagatgctattatgctaaatgtttgagagctttccaaacatcacagccacttagtcmaatccattcaggcaatgaaagtccattcaaagtctgacagcttcattttccccagaaaccattaagtaatggtagaaagtgccagatgagcaaagtaactgaggttacaaactgaggcagaaggtttgtctgaaggagaacagtgttaacagagatgaaagcactgatgggcttgtgatttgattgtaatgtgacaagtgcatgtgagctttgacttgggatcccaggtgttggttatctgccaaattagttacacccaaacagctgaaactgtatggaaggagcacatacacgatacag

SEQ ID NO: 13742 - DNA, 600 bp, Chicken  19866894218354_1
acctgtgagtgtaaagactagactgaacagacatggaacacttttttcttaaacttggctgtttctaagtcaaaagttatttgaagtcagtttcccgatacaaatttttagactgtggaggaagtaggtatctaacacatagtttagacttacatttttctgatggaattaatcatcctttgaaggtacttaacatggaagatttataaatcaagcatttacatggcaaaattagaatactgccaaggtcattgtcttcatacaccgccagttattctatcaagagtttctagcgtcaaygatgaaaaggtattcactgcagaaaagtaaggaaaaaatgtagaggtgaaaaggacagtgcttttcaatctaagctacaactgatctagttgtgaagctggatttgatctcagtgtaatcgcaactttgagcaacaggtgggactaggttacttcaggtggattcttctcatttaaatcattctacatttctacaatatgatctttagagtgtacaaatcatgattataggactgggctataattccagttttccatataaagacaacatacttcagacacaattgccaagcacatagaa

SEQ ID NO: 13743 - DNA, 599 bp, Chicken  19866894218356_1
  misc_feature (1)..(87): n is any nucleotide
nnnnnnnnnnnnnnnnnnnnnnnnnnnnnnnnnnnnnnnnnnnnnnnnnnnnnnnnnnnnnnnnnnnnnnnnnnnnnnnnnnnnnnntacatttaatgtcttagtcaggactcctgacaaaggctgattaatgtcctcatctcttttattaaagataagagtagcactgcagtcaggagatagaaagcacaccataaatcttcgtaaaatgagcagtcaaataatcactcatcagaaataaaatctacatacattaacactaacactcagcctaccatgcacacagccataaaaaaaaargggggggaaagaacaggcggatttccggaagttttaatttcaactagttctttaagtttaatgttacagttcccgtaacctggatgcaaaagctggcatttaaaagcacatgtgaaaggaccagatgcctcgtcattacattaagagcatgaagcaggcaacaattaagcgattcactggaaagacataatgctgatctatgctagcaattaatcacagaatacattagacaatgatgggtgacctacaaatttttgacaaaataatttttcatcatgttggcgatttcttagcctaat

SEQ ID NO: 13744 - DNA, 600 bp, Chicken  19866894218357_1
ttccatgtctcaaataattatatcaaagtcatataagatatgccacgaaaagagaactcatttgtcaccattcagatctactactcaaacactggctgttttctgtgggctttgttaccattcagagtgatgtagagacacctttctgtcaacaaaagcaacaatttacagggactgtgtgtgtgtgtgtgtgtctgtgtgtggtgttatctgatacatttgactgggcaaaatgtttatcttcatggtgaacctggatattaaccacaaagaattcaattttggaaaattttgctcttytgcaatagtttgaagaarttcctaaaatgcctttaatagggagcgtgatagtatttgtattgcttgttgttttcttcctgcctggaaaagggagaaaaaaaagtgaagtatttttaataatggtggtgatgttctgggtaatggctatgctcaggcagttaactaagaagccatccaggcattcgggttttgcacattccagtgccaaaaggttatgaaatgggcactgtttgtctagcagagtgattatagtgtggtgacaagtaaagcaaatatttactattaaagacagatggaatt

SEQ ID NO: 13745 - DNA, 600 bp, Chicken  19866894218357_2
tatatcaaagtcatataagatatgccacgaaaagagaactcatttgtcaccattcagatctactactcaaacactggctgttttctgtgggctttgttaccattcagagtgatgtagagacacctttctgtcaacaaaagcaacaatttacagggactgtgtgtgtgtgtgtgtgtctgtgtgtggtgttatctgatacatttgactgggcaaaatgtttatcttcatggtgaacctggatattaaccacaaagaattcaattttggaaaattttgctcttytgcaatagtttgaagaarttcctaaaatgcctttaatagggagcgtgatagtatttgtattgcttgttgttttcttcctgcctggaaaagggagaaaaaaaagtgaagtatttttaataatggtggtgatgttctgggtaatggctatgctcaggcagttaactaagaagccatccaggcattcgggttttgcacattccagtgccaaaaggttatgaaatgggcactgtttgtctagcagagtgattatagtgtggtgacaagtaaagcaaatatttactattaaagacagatggaattcatctggcgttcatcaag

SEQ ID NO: 13746 - DNA, 599 bp, Chicken  19866894218360_1
  misc_feature (1)..(169): n is any nucleotide
nnnnnnnnnnnnnnnnnnnnnnnnnnnnnnnnnnnnnnnnnnnnnnnnnnnnnnnnnnnnnnnnnnnnnnnnnnnnnnnnnnnnnnnnnnnnnnnnnnnnnnnnnnnnnnnnnnnnnnnnnnnnnnnnnnnnnnnnnnnnnnnnnnnnnnnnnnnnnnnnnnnnnnnnnatgagggggtgagtgcacacagttcagaggtagaggatttacatggcaagagggaggcaggcagcaaagcactgccattgggagtgcattgggctgctccctcacttaggcacggttgttgggctggggartgggctgccactgctatccaaagcgatgggatgcaaggacacatcagttgaatcctgtttttgctaacaaggatgacgactttttcacaagtggttcattaatacaaatttgactttgtcaaaggcgtgcatctttaaaccacactgctaaagaaaagctatttcagcaagtacttctatgctaaatacaaggggattcacaaccagaaaggaaattgtattttggaataaatttgtgttaggattttattactaattcattacattcttaatctgaaaaatcctgaagcagcacaact

SEQ ID NO: 13747 - DNA, 600 bp, Chicken  19866894218360_2
ggttcattaatacaaatttgactttgtcaaaggcgtgcatctttaaaccacactgctaaagaaaagctatttcagcaagtacttctatgctaaatacaaggggattcacaaccagaaaggaaattgtattttggaataaatttgtgttaggattttattactaattcattacattcttaatctgaaaaatcctgaagcagcacaactactttagaattatcattaataattacactgatactgaattcttttatgcaaatagtacggtagacttagagataggaccctttgtaaacctcytgagtgtttgcaggaagtttaattcatttcatatctcctccagtttgcaaatgaggtgtgaaacaattgtctgtttctaggaggtgtcagcattagagtacacacacagcgccgttaagttaatggatcggtatacactgccacccaatatacccaatgtcacgcagccattgggtgaggtcagccagatactattaattacaatcactgattgagtgctgccagtgcgcrcagcgctgtgtggcaccttgcagcgagcccaygttctccagctgcccactgtccccatgggractggcg

SEQ ID NO: 13748 - DNA, 600 bp, Chicken  19866894218360_3
acactgatactgaattcttttatgcaaatagtacggtagacttagagataggaccctttgtaaacctcytgagtgtttgcaggaagtttaattcatttcatatctcctccagtttgcaaatgaggtgtgaaacaattgtctgtttctaggaggtgtcagcattagagtacacacacagcgccgttaagttaatggatcggtatacactgccacccaatatacccaatgtcacgcagccattgggtgaggtcagccagatactattaattacaatcactgattgagtgctgccagtgcgcrcagcgctgtgtggcaccttgcagcgagcccaygttctccagctgcccactgtccccatgggractggcgttgaggtgcacatcacccatggggacaggtgttaaggtgcacatcaccatgggatggagactgggacagtgccaaggagacaggaatcactcactcccatcattaggaactcctctgctttccccagggagggatgagctcctgagctcatacacgtcaggatgactgattaatgagcggccgcaaccagcctcccagataccttttttttttttttttaaaggaagacat

SEQ ID NO: 13749 - DNA, 600 bp, Chicken  19866894218360_4
acggtagacttagagataggaccctttgtaaacctcytgagtgtttgcaggaagtttaattcatttcatatctcctccagtttgcaaatgaggtgtgaaacaattgtctgtttctaggaggtgtcagcattagagtacacacacagcgccgttaagttaatggatcggtatacactgccacccaatatacccaatgtcacgcagccattgggtgaggtcagccagatactattaattacaatcactgattgagtgctgccagtgcgcrcagcgctgtgtggcaccttgcagcgagcccaygttctccagctgcccactgtccccatgggractggcgttgaggtgcacatcacccatggggacaggtgttaaggtgcacatcaccatgggatggagactgggacagtgccaaggagacaggaatcactcactcccatcattaggaactcctctgctttccccagggagggatgagctcctgagctcatacacgtcaggatgactgattaatgagcggccgcaaccagcctcccagataccttttttttttttttttaaaggaagacatcccgttgccaaatatttctgcgaaagaaacaa

SEQ ID NO: 13750 - DNA, 600 bp, Chicken  19866894218360_5
aacctcytgagtgtttgcaggaagtttaattcatttcatatctcctccagtttgcaaatgaggtgtgaaacaattgtctgtttctaggaggtgtcagcattagagtacacacacagcgccgttaagttaatggatcggtatacactgccacccaatatacccaatgtcacgcagccattgggtgaggtcagccagatactattaattacaatcactgattgagtgctgccagtgcgcrcagcgctgtgtggcaccttgcagcgagcccaygttctccagctgcccactgtccccatgggractggcgttgaggtgcacatcacccatggggacaggtgttaaggtgcacatcaccatgggatggagactgggacagtgccaaggagacaggaatcactcactcccatcattaggaactcctctgctttccccagggagggatgagctcctgagctcatacacgtcaggatgactgattaatgagcggccgcaaccagcctcccagataccttttttttttttttttaaaggaagacatcccgttgccaaatatttctgcgaaagaaacaaaacaattttgctaaagatatttcatttgaa

SEQ ID NO: 13751 - DNA, 600 bp, Chicken  19866894218362_1
ctggtgcaggtcctttaggcatttgtgtcagcccagctgtggtggcacctcccagccgtgctggccatggctccagagcaggttagctgtgacagctgagcttcagagattgttctgaacaatttagatgtgagaaaggtgggcaagatagaaagcagacagagggacccaacttttagtaaggatattcaacttcattgcttttcaggagaggaagagtctgagaagaacaagaacagcctatgtggatacttgcagatgtgaagaccaaccatagtctctcccactccttgctccttrcatttgttaacaattaaatttggtccatggcagctgcaggctgctggaacaggctggacggaaaggagtgaatggtttcagggtaactgccctagataccaactctccttgagtttgtcaatggccagcttgtctgtcatctcagctcccatcctccatctcacacccagcccttggctttgcagggatttatatctgtgctcccctttaaggcaatgaaccagaaaaaaaaccaaaaccaaaccaaccaaaaacaacaacaacaacaaaaaaaaaaaacagaaaaaaagatttaatatg

SEQ ID NO: 13752 - DNA, 600 bp, Chicken  19866894218362_2
cctggcctttcttctctgggctttccacggctgcaggcagtgaggctcagcagcacactcaggggagcagagggggtgtgatgaccacagcaagtcattttgcctttccagtttggcttccctactcatacatagagataatggcactcttttcctctgaagactacttttaagacctcagggtgaaaatgactattcaaaggcatcaattgttagtgaacaataaacagcacaaaatggttcagctcttatttggagcttttgagtgttttttgcaacactattcctaaaggaagtttktttttccaacagtcctaatctgggagctttctgcttgctcctccctcctttatctgatatttcttgttttccatttgtgcaggaaacaccggggcctggaaaatatacacccacatagtggtttccaaagcagtgatgaactgctgctagttcgggtcatgaacaccatatctccttcagcgtatgaactatggggagggaatatgagggggaaggcagtgtccctgtcttcaggcatgatttctcaccccatcgcgcttgtgattcaccacccacctgactgtcccgaacagcactgtc

SEQ ID NO: 13753 - DNA, 600 bp, Chicken  19866894218362_3
gaacagcactgtcagggggtgcatgtggccatagagtggccaggtgggtgacttctgaggtgggtaggactcagaagctagctgtagaggcttgcttggggggacagccttagccaggcttgtatagctgtactttctggccctaactcagggttgctgttaggccaaagaataatttaaggtattgacttctgtgggaattcttgtgctctgagggctgtacatgtgttaagagtctttgtgttgggctgtggcacgagtggcactgtgctggttaaggtcgctgaagtgttttgttcwgcttttgttccgtctccggcactttacaattgcttgtaactttcagatacttcatgtgtcaagttgaactgctacagatggtttccttttaagaatggcttcatgcatgggggtctcaggaaaaccagttcagccattttagagaaggaatggcctttgtttccatgttctggctttaaaatttcagaaatgctttcaaaaccatccacgttccaactagaggccagtagtgcatggtgcaaggaccctctttcccgcaatccctaagactgagcattttgtaggtacgcatgctaagtt

SEQ ID NO: 13754 - DNA, 600 bp, Chicken  19866894218362_4
ttcatgtgtcaagttgaactgctacagatggtttccttttaagaatggcttcatgcatgggggtctcaggaaaaccagttcagccattttagagaaggaatggcctttgtttccatgttctggctttaaaatttcagaaatgctttcaaaaccatccacgttccaactagaggccagtagtgcatggtgcaaggaccctctttcccgcaatccctaagactgagcattttgtaggtacgcatgctaagtttacctctttttcatttgtttttagacattttcttgaagcaatattaaaawttattcacagggtagtatcagtgtgctgtgtttccagcatggataaagccttatgtttctgctcatgtgagtgagataaataactgggccttgatactgaaagccaggtgggatatattcaaagtaaagtgtataataagctctccttgtattaaattcatctctattgctcttgctgaaatttaaaaatgttacaactatgtaggctgttctgaaagtaacacctcctattcatttgcacagaaactgcagcacaataacacagtttggtagaggaagctctcagcaacaaaacactgt

SEQ ID NO: 13755 - DNA, 600 bp, Chicken  19866894218362_5
cctctgctgccatctgtcacacagcaacaaaatgtaatggggtattggtgggaaggttcaacctctattgctgcaccaccaacatccacccctggtcatgggcaaatgtaataaaaacaggaggcattacttttggagcagtccttgtacgtaaattctaccacagttccggaagtggaaatattaactggattcccttaatcccttaagactcccttaaagactcaaggagtcttgaggcctaacgacacgctactggtctgtggctttggcctgtggggtttgggttgggttactttktgctgtttcctgttgccggtggtgtagttaatgcagagaaaggggaaggaaggagagaggagtgagagaaaagaacctgggtactcagcactgtgtgtgagtctggcccttcgtgggtgggaatacggttccaagagtcaaaaagtcctccttgtctcagctgctgcttcacagccctctttggcggcatggtttcctcagcagatgtgaaactggcccatgctcagcctgctactctgggataaactggaagaaatgagatctggaggctgtggttcctcctcaggccaccccatgccc

SEQ ID NO: 13756 - DNA, 599 bp, Chicken  19866894218365_1
  misc_feature (1)..(208): n is any nucleotide
nnnnnnnnnnnnnnnnnnnnnnnnnnnnnnnnnnnnnnnnnnnnnnnnnnnnnnnnnnnnnnnnnnnnnnnnnnnnnnnnnnnnnnnnnnnnnnnnnnnnnnnnnnnnnnnnnnnnnnnnnnnnnnnnnnnnnnnnnnnnnnnnnnnnnnnnnnnnnnnnnnnnnnnnnnnnnnnnnnnnnnnnnnnnnnnnnnnnnnnnnnnnnnnnaatggcttgggttggaaggaacctaaagatgatccatatccaacccccatgctgtgggcagggttcccacccaccacatcagacaccaggckccccaggaccccatccagcctggcctggagcatctccagggatggggcacccccagcttctttggttacactgaagctttcaggtgtcatttcagccctcctcattctgccattgctttcccttgtgactcttggcagtagtttttctactaagaaaaaaaaaatwatcagtgcaaataaaagttgtgcaggttctccctttaagtttgcagttccttcagtatcagaggtccgtggtgtattgcgttacactcttttggatgtgtttttgttgtaagcttgtcagacgttttgtcttt

SEQ ID NO: 13757 - DNA, 599 bp, Chicken  19866894218365_2
  misc_feature (1)..(42): n is any nucleotide
nnnnnnnnnnnnnnnnnnnnnnnnnnnnnnnnnnnnnnnnnnaatggcttgggttggaaggaacctaaagatgatccatatccaacccccatgctgtgggcagggttcccacccaccacatcagacaccaggckccccaggaccccatccagcctggcctggagcatctccagggatggggcacccccagcttctttggttacactgaagctttcaggtgtcatttcagccctcctcattctgccattgctttcccttgtgactcttggcagtagtttttctactaagaaaaaaaaaatwatcagtgcaaataaaagttgtgcaggttctccctttaagtttgcagttccttcagtatcagaggtccgtggtgtattgcgttacactcttttggatgtgtttttgttgtaagcttgtcagacgttttgtctttaagatcctcttcagatcaaagcaattgaaaacattcccagcttgtcctgttaattgtgtgatcaagaaaccaaagctttgaaggaagagtgttcaggttaattattttaaacctcagaaagcaaatcattaggaacgagggtaagcaaggcatggagtatcttggc

SEQ ID NO: 13758 - DNA, 599 bp, Chicken  19866894218366_1
  misc_feature (1)..(87): n is any nucleotide
nnnnnnnnnnnnnnnnnnnnnnnnnnnnnnnnnnnnnnnnnnnnnnnnnnnnnnnnnnnnnnnnnnnnnnnnnnnnnnnnnnnnnnnatgcctttccacttatgttacatttataagttaatttttctcatgaaaattttctaagtctatcaaagacattgctgcgctgccctgagccccacttacctccctttggagaaaggtaggaggatgatttaatcaatgtttataatattacagagggaagtgcagggtaaaaatacctgttttctctccatctgttgacagccaagggtcacrcatcccttctgccacagcagtttcyagccatgtcctggcttgattccaggctgtggggtactggcttcaattagatgaatttcaagttggcccttggctaacactttacaaacctcatcagaaataaaatttcaacactgggctgcacctgacgcacacaagttggtcttccttcactcttcctcacattagtgcctaagggtatatacgatttttctatggcttattcttttcttttctgctaatagaaggtcactgtgtacttttgccaacrgtccttttctctacagtgatatcag

SEQ ID NO: 13759 - DNA, 599 bp, Chicken  19866894218366_2
  misc_feature (1)..(62): n is any nucleotide
nnnnnnnnnnnnnnnnnnnnnnnnnnnnnnnnnnnnnnnnnnnnnnnnnnnnnnnnnnnnnnatgcctttccacttatgttacatttataagttaatttttctcatgaaaattttctaagtctatcaaagacattgctgcgctgccctgagccccacttacctccctttggagaaaggtaggaggatgatttaatcaatgtttataatattacagagggaagtgcagggtaaaaatacctgttttctctccatctgttgacagccaagggtcacrcatcccttctgccacagcagtttcyagccatgtcctggcttgattccaggctgtggggtactggcttcaattagatgaatttcaagttggcccttggctaacactttacaaacctcatcagaaataaaatttcaacactgggctgcacctgacgcacacaagttggtcttccttcactcttcctcacattagtgcctaagggtatatacgatttttctatggcttattcttttcttttctgctaatagaaggtcactgtgtacttttgccaacrgtccttttctctacagtgatatcagttagagtaacattgaattttcccca

SEQ ID NO: 13760 - DNA, 600 bp, Chicken  19866894218366_3
ccatctgttgacagccaagggtcacrcatcccttctgccacagcagtttcyagccatgtcctggcttgattccaggctgtggggtactggcttcaattagatgaatttcaagttggcccttggctaacactttacaaacctcatcagaaataaaatttcaacactgggctgcacctgacgcacacaagttggtcttccttcactcttcctcacattagtgcctaagggtatatacgatttttctatggcttattcttttcttttctgctaatagaaggtcactgtgtacttttgccaacrgtccttttctctacagtgatatcagttagagtaacattgaattttccccaaccagtgaattttttacttccttacacggcaatcaratttgcagttttacaagcaggtagatgttgtatatgcaattgtttacatcttacaaaaactagactttgaaaaatgtttacctcaaaattcaattgccatagaagagctgctgtctgctatcatgwgtgtctctataaaaagtaagactgaaggttaggatattgtgtttgtgtcccaagcaggctttctgagaactgtatagcatgatgaaca

SEQ ID NO: 13761 - DNA, 600 bp, Chicken  19866894218366_4
ctggcttcaattagatgaatttcaagttggcccttggctaacactttacaaacctcatcagaaataaaatttcaacactgggctgcacctgacgcacacaagttggtcttccttcactcttcctcacattagtgcctaagggtatatacgatttttctatggcttattcttttcttttctgctaatagaaggtcactgtgtacttttgccaacrgtccttttctctacagtgatatcagttagagtaacattgaattttccccaaccagtgaattttttacttccttacacggcaatcaratttgcagttttacaagcaggtagatgttgtatatgcaattgtttacatcttacaaaaactagactttgaaaaatgtttacctcaaaattcaattgccatagaagagctgctgtctgctatcatgwgtgtctctataaaaagtaagactgaaggttaggatattgtgtttgtgtcccaagcaggctttctgagaactgtatagcatgatgaacaattaatttttatgagcaaacaaaattgcacaaggggcaggcaaagtcctgcatgtgaggagaaacaaccccatacattaataaatg

SEQ ID NO: 13762 - DNA, 600 bp, Chicken  19866894218366_5
cattagtgcctaagggtatatacgatttttctatggcttattcttttcttttctgctaatagaaggtcactgtgtacttttgccaacrgtccttttctctacagtgatatcagttagagtaacattgaattttccccaaccagtgaattttttacttccttacacggcaatcaratttgcagttttacaagcaggtagatgttgtatatgcaattgtttacatcttacaaaaactagactttgaaaaatgtttacctcaaaattcaattgccatagaagagctgctgtctgctatcatgwgtgtctctataaaaagtaagactgaaggttaggatattgtgtttgtgtcccaagcaggctttctgagaactgtatagcatgatgaacaattaatttttatgagcaaacaaaattgcacaaggggcaggcaaagtcctgcatgtgaggagaaacaaccccatacattaataaatgctgggggatgagcggctggaagatggttcagcagaaaagggcccgggggtcctggtagacactaagttgaatgtgagtcagcaatgggcccttgctgcgaaggccaatagtatcttgagctgcatt

SEQ ID NO: 13763 - DNA, 600 bp, Chicken  19866894218372_1
gagacacagaaagctcagcggagttttcccagtttatcccgcggctaatctttttatatcattttttttccctttaaaatcagggggagggggaagccctctcattctctgcagctggcatgtctaagctactaacatatgtgctccttataccacatacagtagcttaggacttttcaaaaacacagaacccctgaatccaataaaattgcaaatttcactgtatttcacaatatcctaaataaacatgaacagcgtgcatttctctttctggcatcaaatattaatctgtccgtggtyggaaatgtgctttccatcttgtgtgcgctcacattgggtaaacacttgggagattgctattccagacctttcattctctcctagagtcaagagcatgacaaatttttctcctaattacacctgccactgtttgccttctaatactgtaaatcctccatcacatagtttttcagattcaggattaggttccttttctgtcatacaaatgatgggaggtgcaatgtgcagttagcaatgcacgctatgaatgtttaggttgggttgtcactttttaattattgttatttatttttaaagtga

SEQ ID NO: 13764 - DNA, 600 bp, Chicken  19866894218373_1
acgatgaacccctagaggcactgtttgtgataggtctccacctggatatagagccattaacaataacagtctggctacaaccaactctgtgtccaccgagtagcacactctttaaatccacatctctctgattcagagataaggatgtggtgtgggaccatgtctcagacatttgtgttgttagaacttctttctgaaaggtagataggccttaaataaacacacatttccctttctctagtattactgctttctctgatagagaagagaacttgatttattctgtgaacatatccaagyaactttttgatgttctccttgctaaaataagcagcaagctctttaaggctttcactttttttttcagcttcctcctgctctttcattctttttcaccaccagttttaagttgtatgttccacacctagagatagcatgtcattgtcaccagtgtcacatgtagagttaaaaatatttctgtttttattcactacttctctgtttgcacattcatagtctgtataccactttttgccatagcatcacaataagaactcagattcttgtctgccatgactctgtaatttattttcaagtctg

SEQ ID NO: 13765 - DNA, 599 bp, Chicken  19866894218375_1
  misc_feature (1)..(124): n is any nucleotide
nnnnnnnnnnnnnnnnnnnnnnnnnnnnnnnnnnnnnnnnnnnnnnnnnnnnnnnnnnnnnnnnnnnnnnnnnnnnnnnnnnnnnnnnnnnnnnnnnnnnnnnnnnnnnnnnnnnnnnnnnnnnaatgtgtagcacttagaagtatttagtcataatgcaatattacattgcctaaattgtcttttatccctttctcttctctcaggatatattttaagaaaaaaaaaaagtgggctgatagtgctttgtgtattcaagctgtcactatgaaacactgcaagctttaatgggtttctgcrcatacaaaacctagcagcagcctggaacagaaatatggatttctccattcttcctgttgttggttatttcagttgtgtwtattgccaaggtaagctggcctgcaaagctgaggagggttagcygtgctgtcaatgtaactagtgtgagagcaggcgttcttaaatggccaagcagttcygagtgctctgttgctgatgggtggcattgtttgtgattctgatattgtagcaacctattgttgacatgctgaaatatttatgtatttcaacatatgttgactaaaaatgcattcatatat

SEQ ID NO: 13766 - DNA, 599 bp, Chicken  19866894218375_2
  misc_feature (1)..(45): n is any nucleotide
nnnnnnnnnnnnnnnnnnnnnnnnnnnnnnnnnnnnnnnnnnnnnaatgtgtagcacttagaagtatttagtcataatgcaatattacattgcctaaattgtcttttatccctttctcttctctcaggatatattttaagaaaaaaaaaaagtgggctgatagtgctttgtgtattcaagctgtcactatgaaacactgcaagctttaatgggtttctgcrcatacaaaacctagcagcagcctggaacagaaatatggatttctccattcttcctgttgttggttatttcagttgtgtwtattgccaaggtaagctggcctgcaaagctgaggagggttagcygtgctgtcaatgtaactagtgtgagagcaggcgttcttaaatggccaagcagttcygagtgctctgttgctgatgggtggcattgtttgtgattctgatattgtagcaacctattgttgacatgctgaaatatttatgtatttcaacatatgttgactaaaaatgcattcatatatttttgcttatggatttgatacaaaagcagagtgattgatagtcattaagtattacagaaggatttttcacactgtatca

SEQ ID NO: 13767 - DNA, 599 bp, Chicken  19866894218375_3
  misc_feature (1)..(1): n is any nucleotide
naatgtgtagcacttagaagtatttagtcataatgcaatattacattgcctaaattgtcttttatccctttctcttctctcaggatatattttaagaaaaaaaaaaagtgggctgatagtgctttgtgtattcaagctgtcactatgaaacactgcaagctttaatgggtttctgcrcatacaaaacctagcagcagcctggaacagaaatatggatttctccattcttcctgttgttggttatttcagttgtgtwtattgccaaggtaagctggcctgcaaagctgaggagggttagcygtgctgtcaatgtaactagtgtgagagcaggcgttcttaaatggccaagcagttcygagtgctctgttgctgatgggtggcattgtttgtgattctgatattgtagcaacctattgttgacatgctgaaatatttatgtatttcaacatatgttgactaaaaatgcattcatatatttttgcttatggatttgatacaaaagcagagtgattgatagtcattaagtattacagaaggatttttcacactgtatcaaaggagttctactaggaagatgactggaattaacccctagcctc

SEQ ID NO: 13768 - DNA, 600 bp, Chicken  19866894218375_4
gtcttttatccctttctcttctctcaggatatattttaagaaaaaaaaaaagtgggctgatagtgctttgtgtattcaagctgtcactatgaaacactgcaagctttaatgggtttctgcrcatacaaaacctagcagcagcctggaacagaaatatggatttctccattcttcctgttgttggttatttcagttgtgtwtattgccaaggtaagctggcctgcaaagctgaggagggttagcygtgctgtcaatgtaactagtgtgagagcaggcgttcttaaatggccaagcagttcygagtgctctgttgctgatgggtggcattgtttgtgattctgatattgtagcaacctattgttgacatgctgaaatatttatgtatttcaacatatgttgactaaaaatgcattcatatatttttgcttatggatttgatacaaaagcagagtgattgatagtcattaagtattacagaaggatttttcacactgtatcaaaggagttctactaggaagatgactggaattaacccctagcctcatctcagtgatctttagtattaaattgctaatacaagctactgattaggatcttcct

SEQ ID NO: 13769 - DNA, 560 bp, Chicken  19866894218376_1
gtttaagtcaagtatgttgccttttaaacttttattcctcttacttcatcaattcatttgttaattgctcccaattgtattatctcattctagcaatgcaacttttccaaaagagatgtaacaacataggaactggtggatgacaggttggcaatgagccagcagtatgccctggtgggaaagaatgccagtgggatcctggggtgcatttaaaggagcgtagccagcaggtcaagggaggtgatcctccccctctactctgccctggtcaggccaacacctggagtactgcatccagtyctgggctccctggtacatgaaagacaaggatctcctggagagagtccagtggagggccacaaacatgataaatctcctggagcacctcccctatgaggaaaggctgggcaagctggggtctgttcagacttgagaaaagaagactcagaagggatctgattaatgtttataagtatcttaagtttgggagtcaaagagacacggtcaacctcttttcagtggtctgtgggagcaggacaaggggaaacagccaaaaactg

SEQ ID NO: 13770 - DNA, 600 bp, Chicken  19866894218378_1
tacttaatttattttctgctttctttctctttcttaggttgagatgttatatttcattgaatatgcatatccttattccatgctgttcttcacaatttcagctttaattctgaaaatatggctcacaagcttcaagactggtaaagaaaagaatccccaagatcaaagaggaggtaacagatgaaagaaaactaggaaagccttcagggattatcaaggagtgttgaggaagaagacaccaaaaatgcactcagtcaccaccaaagtgtggagaaaaatctgtgggggaaaaataaggaraactatatggattatttaggcaaatgctgaatttttgatgtgtgtggtgtgtgagagaagggaagaaaaagatttctttttttaaccattgttctakaggcaaaaccagaaacagtgacattcagtgaccttatgttagagcatttattatttataacccttcagatgaaatgtaaaaaagtccatgttccatgtgatttggagcacagggaatgcctttccttttccagtgtttgcaggctgtgctaagaaaacttaatgtttctgtaggaaactygatagttgcatcatcacctttca

SEQ ID NO: 13771 - DNA, 600 bp, Chicken  19866894218378_2
tcagctttaattctgaaaatatggctcacaagcttcaagactggtaaagaaaagaatccccaagatcaaagaggaggtaacagatgaaagaaaactaggaaagccttcagggattatcaaggagtgttgaggaagaagacaccaaaaatgcactcagtcaccaccaaagtgtggagaaaaatctgtgggggaaaaataaggaraactatatggattatttaggcaaatgctgaatttttgatgtgtgtggtgtgtgagagaagggaagaaaaagatttctttttttaaccattgttctakaggcaaaaccagaaacagtgacattcagtgaccttatgttagagcatttattatttataacccttcagatgaaatgtaaaaaagtccatgttccatgtgatttggagcacagggaatgcctttccttttccagtgtttgcaggctgtgctaagaaaacttaatgtttctgtaggaaactygatagttgcatcatcacctttcacttaagaatggagagcaatttaaatcgcaccacaaatacataagataaagaaaatgctgacctacactaaattacctttcccaaccctgcatttaga

SEQ ID NO: 13772 - DNA, 549 bp, Chicken  19866894218378_3
atctgtgggggaaaaataaggaraactatatggattatttaggcaaatgctgaatttttgatgtgtgtggtgtgtgagagaagggaagaaaaagatttctttttttaaccattgttctakaggcaaaaccagaaacagtgacattcagtgaccttatgttagagcatttattatttataacccttcagatgaaatgtaaaaaagtccatgttccatgtgatttggagcacagggaatgcctttccttttccagtgtttgcaggctgtgctaagaaaacttaatgtttctgtaggaaactygatagttgcatcatcacctttcacttaagaatggagagcaatttaaatcgcaccacaaatacataagataaagaaaatgctgacctacactaaattacctttcccaaccctgcatttagataataagcattctgaagccctaagatgaagcttattatttaatggaaattctttctgctgaatttagctagcttttgttcaggttatggaagagaaataattatctgctaccaaattctagataattat

SEQ ID NO: 13773 - DNA, 600 bp, Chicken  19866894218385_1
aattcgtattacatcttgttaagcttgttaaaacctacagtgaactttctgaaagggtattcaaatgctcaattaggagaaaaacattttcccaggatgtctttgtgtttggagattttccgttcccctgtttcccttccatttcccttctatttcccttccctctccctctcctttttttctttttcagtttcacacaacagatcacagctttttctatgaaaatagaaataaatctttctgatgacatgattctcctttaatgcccagtatataatagatcttcatgtgaagattctygtgagcaccacagcagattttagttagctgtttttcagtacccatgattggaatcactgtattctaaaagagagtatcccataattgggatactagattgtgaggataagtgaggtcacatgattatttaattattcagctaaagatggcaagccttcaatatctttagatacagtccaaattttactgtctatcacagctgtctaactcaggttaattgttgtgacctatctgttccctgaggtacactgctgttcaattcaagacataatagatgatttgactttattttttaataat

SEQ ID NO: 13774 - DNA, 600 bp, Chicken  19866894218386_1
ttcttgatagaaagaatgaagaaatatttagctggagaaagggttcatgcagtatcatggttatacctaatagcagtgctagtatttagtcattcacataatctgggaaagtagtttgaacaaggaggaattcagaagaataaaatgcaacatgattcacataatttaagcagtaatattaattgtatttcctactatataaaatagtgcatgtttgcattaatgcactataatctgaaactattcagggcaatggcatgtaattatgaactttatctaatttgcaggaggccacaggtrcttacaaagttagacatccctcctcctggcagttaaaactgtcatgtctatgctgcctgcccttgcttttctctctttgaggatatattattttrtttattcaagcagttatgtttagcttagttaagacactgagaatttgtctaagtaaattgactgtaccagactagcatgttcccttgcctcttctaagggcatgatttctggtctttcttcctgttgactgttaacagtggaacaattggactgataactctgaattccagaggactggagcacgtatagttgcaaccagaatgc

SEQ ID NO: 13775 - DNA, 600 bp, Chicken  19866894218386_2
acataatctgggaaagtagtttgaacaaggaggaattcagaagaataaaatgcaacatgattcacataatttaagcagtaatattaattgtatttcctactatataaaatagtgcatgtttgcattaatgcactataatctgaaactattcagggcaatggcatgtaattatgaactttatctaatttgcaggaggccacaggtrcttacaaagttagacatccctcctcctggcagttaaaactgtcatgtctatgctgcctgcccttgcttttctctctttgaggatatattattttrtttattcaagcagttatgtttagcttagttaagacactgagaatttgtctaagtaaattgactgtaccagactagcatgttcccttgcctcttctaagggcatgatttctggtctttcttcctgttgactgttaacagtggaacaattggactgataactctgaattccagaggactggagcacgtatagttgcaaccagaatgctgaagcacttgcagtccttatgctttgttgtttttgataagtttgctgctcacacggagtagtgtcacattctttgggccagcacccacaaaggg

SEQ ID NO: 13776 - DNA, 599 bp, Chicken  19866894218401_1
  misc_feature (1)..(100): n is any nucleotide
nnnnnnnnnnnnnnnnnnnnnnnnnnnnnnnnnnnnnnnnnnnnnnnnnnnnnnnnnnnnnnnnnnnnnnnnnnnnnnnnnnnnnnnnnnnnnnnnnnnncactgttgcagtcctacctttccccttctttccatatgacgcagtctcactctctttgtgggacacctgtataatccatgtagagctaggtcagagagctgactaacaggatgcagactgtgcttttttttcctccaaaaaatacactgctgggtcagcgtagtgccagcacccatgtgacggcatactgttaatatggkctgtgtaatgctggcttatgttattacagctgtttggaaatgcatgaatggctgagctgatctaataacttgctgttactggaggaaaggaaggagtagcaatagttctcctgatcctcagccagacaaaatctgcccctacttttccctgcttgctttatttaatttaaacttgtgcaatttagcagctaataaatttttggcatctgaagactgggccttgcctgatggtgaaaagtctacgtatggttctagaataattaattgggtactttatactgtgaacgcaaatgggtcca

SEQ ID NO: 13777 - DNA, 600 bp, Chicken  19866894218402_1
atagatattttcatgtcagctagttgtcaagactttttcacagtaagtggagtaaaattggcactttcaaagcatgagtcatctcatcctaaaatagatgattaaaataggtcagatgaatcattggatattgttgtctattgaccttgaagagcacattaggttgcaaactagtatgtagacatataaagtgcatacaaaaagctgacgggaaggataccactaccatgcctctgcaacaatattatcacaacaagttctataggcacgaaggagacaaatagactaatatttcttaakaaaagaaaatcaaatcttattctcattttaatggaaaataaactaaaagaragtacatgtgatttaaatcagtgttctaatgtctgtgtatatttgaatataaaagtattttccttgaactagaagatgcagstgtttgaaatagtatcatagtatttcagtacaacatatcagtgctagcatatatcaaatgtccttatagctccaagacacagacattgtacagtaaattattgattaatttgacaaaaagaatgtccaagactaaatacgtttaaatgaatcttgaaagattctgaa

SEQ ID NO: 13778 - DNA, 600 bp, Chicken  19866894218402_2
gtaaaattggcactttcaaagcatgagtcatctcatcctaaaatagatgattaaaataggtcagatgaatcattggatattgttgtctattgaccttgaagagcacattaggttgcaaactagtatgtagacatataaagtgcatacaaaaagctgacgggaaggataccactaccatgcctctgcaacaatattatcacaacaagttctataggcacgaaggagacaaatagactaatatttcttaakaaaagaaaatcaaatcttattctcattttaatggaaaataaactaaaagaragtacatgtgatttaaatcagtgttctaatgtctgtgtatatttgaatataaaagtattttccttgaactagaagatgcagstgtttgaaatagtatcatagtatttcagtacaacatatcagtgctagcatatatcaaatgtccttatagctccaagacacagacattgtacagtaaattattgattaatttgacaaaaagaatgtccaagactaaatacgtttaaatgaatcttgaaagattctgaatagatgataagcaactttgyagcaaactacaaattcttcccctggaattaa

SEQ ID NO: 13779 - DNA, 600 bp, Chicken  19866894218402_3
ttgtctattgaccttgaagagcacattaggttgcaaactagtatgtagacatataaagtgcatacaaaaagctgacgggaaggataccactaccatgcctctgcaacaatattatcacaacaagttctataggcacgaaggagacaaatagactaatatttcttaakaaaagaaaatcaaatcttattctcattttaatggaaaataaactaaaagaragtacatgtgatttaaatcagtgttctaatgtctgtgtatatttgaatataaaagtattttccttgaactagaagatgcagstgtttgaaatagtatcatagtatttcagtacaacatatcagtgctagcatatatcaaatgtccttatagctccaagacacagacattgtacagtaaattattgattaatttgacaaaaagaatgtccaagactaaatacgtttaaatgaatcttgaaagattctgaatagatgataagcaactttgyagcaaactacaaattcttcccctggaattaaagtgtaaactctatagaagtgttgagcttgagaaaaataggtactgagaaaaatagtaactgacccttttgaactttaacga

SEQ ID NO: 13780 - DNA, 586 bp, Chicken  19866894218402_4
tctcattttaatggaaaataaactaaaagaragtacatgtgatttaaatcagtgttctaatgtctgtgtatatttgaatataaaagtattttccttgaactagaagatgcagstgtttgaaatagtatcatagtatttcagtacaacatatcagtgctagcatatatcaaatgtccttatagctccaagacacagacattgtacagtaaattattgattaatttgacaaaaagaatgtccaagactaaatacgtttaaatgaatcttgaaagattctgaatagatgataagcaactttgyagcaaactacaaattcttcccctggaattaaagtgtaaactctatagaagtgttgagcttgagaaaaataggtactgagaaaaatagtaactgacccttttgaactttaacgacaaaaagcatacattgaatgttttaatatctttcttctctaatttccttcttgaagaaattccctcaagggcactttcttgaaatcaaaatccaaaaatcattcatgctgacatatctgccaggttttatccccaaaccatcagaatattaacagaaagggtaaaggcagcat

SEQ ID NO: 13781 - DNA, 600 bp, Chicken  19866894218406_1
cagcctgtacttatgttcaaggttgccctgtctcaggtgcagaattcaacacttgctcttgttaaacttaatgtggtcagtagttgcctggttctcttcaattcgtaaagatctctctgcaagtttaaaaagataaaaacatgagcagcaaaacacagtagcactctcaccataagttatgtttcatctaatcatacactgtgcatgagaaaggagagttcgtgtttttgatccagtcctttgcatcgagggaatgccagaaaggcatttgtttgatgtaaaagaatactaatgcaagtwatttcagtgtaattgttgaaaattacatggacttctgtttaggctaagttaagtattgcmgatcatctgcaaatttagttattttattatctagcycttttccagagctttataaataytgtgcaagccatttacacaccagtatawattttcatcttgaaagccaatcatttgtttgtaaatgtttagttttatcttagctagttttgatccttgaaggtaccttactgtttgattcacttaataatatcctttgagagaatttatcaaaacattttagaacactctactaaaatatat

SEQ ID NO: 13782 - DNA, 600 bp, Chicken  19866894218406_2
gttaaacttaatgtggtcagtagttgcctggttctcttcaattcgtaaagatctctctgcaagtttaaaaagataaaaacatgagcagcaaaacacagtagcactctcaccataagttatgtttcatctaatcatacactgtgcatgagaaaggagagttcgtgtttttgatccagtcctttgcatcgagggaatgccagaaaggcatttgtttgatgtaaaagaatactaatgcaagtwatttcagtgtaattgttgaaaattacatggacttctgtttaggctaagttaagtattgcmgatcatctgcaaatttagttattttattatctagcycttttccagagctttataaataytgtgcaagccatttacacaccagtatawattttcatcttgaaagccaatcatttgtttgtaaatgtttagttttatcttagctagttttgatccttgaaggtaccttactgtttgattcacttaataatatcctttgagagaatttatcaaaacattttagaacactctactaaaatatatagtttctctttcattctttatgtcattgccacactccaaaattctaaaaaacagtgaagc

SEQ ID NO: 13783 - DNA, 600 bp, Chicken  19866894218406_3
ttcaattcgtaaagatctctctgcaagtttaaaaagataaaaacatgagcagcaaaacacagtagcactctcaccataagttatgtttcatctaatcatacactgtgcatgagaaaggagagttcgtgtttttgatccagtcctttgcatcgagggaatgccagaaaggcatttgtttgatgtaaaagaatactaatgcaagtwatttcagtgtaattgttgaaaattacatggacttctgtttaggctaagttaagtattgcmgatcatctgcaaatttagttattttattatctagcycttttccagagctttataaataytgtgcaagccatttacacaccagtatawattttcatcttgaaagccaatcatttgtttgtaaatgtttagttttatcttagctagttttgatccttgaaggtaccttactgtttgattcacttaataatatcctttgagagaatttatcaaaacattttagaacactctactaaaatatatagtttctctttcattctttatgtcattgccacactccaaaattctaaaaaacagtgaagcatgagtctttcttcttcctcatggaagccattgtag

SEQ ID NO: 13784 - DNA, 600 bp, Chicken  19866894218406_4
caagtttaaaaagataaaaacatgagcagcaaaacacagtagcactctcaccataagttatgtttcatctaatcatacactgtgcatgagaaaggagagttcgtgtttttgatccagtcctttgcatcgagggaatgccagaaaggcatttgtttgatgtaaaagaatactaatgcaagtwatttcagtgtaattgttgaaaattacatggacttctgtttaggctaagttaagtattgcmgatcatctgcaaatttagttattttattatctagcycttttccagagctttataaataytgtgcaagccatttacacaccagtatawattttcatcttgaaagccaatcatttgtttgtaaatgtttagttttatcttagctagttttgatccttgaaggtaccttactgtttgattcacttaataatatcctttgagagaatttatcaaaacattttagaacactctactaaaatatatagtttctctttcattctttatgtcattgccacactccaaaattctaaaaaacagtgaagcatgagtctttcttcttcctcatggaagccattgtagttgtccttataaattttactcct

SEQ ID NO: 13785 - DNA, 600 bp, Chicken  19866894218406_5
gcaaaacacagtagcactctcaccataagttatgtttcatctaatcatacactgtgcatgagaaaggagagttcgtgtttttgatccagtcctttgcatcgagggaatgccagaaaggcatttgtttgatgtaaaagaatactaatgcaagtwatttcagtgtaattgttgaaaattacatggacttctgtttaggctaagttaagtattgcmgatcatctgcaaatttagttattttattatctagcycttttccagagctttataaataytgtgcaagccatttacacaccagtatawattttcatcttgaaagccaatcatttgtttgtaaatgtttagttttatcttagctagttttgatccttgaaggtaccttactgtttgattcacttaataatatcctttgagagaatttatcaaaacattttagaacactctactaaaatatatagtttctctttcattctttatgtcattgccacactccaaaattctaaaaaacagtgaagcatgagtctttcttcttcctcatggaagccattgtagttgtccttataaattttactcctctaggtatttcttaagtgtatctttcat

SEQ ID NO: 13786 - DNA, 599 bp, Chicken  19866894218407_1
  misc_feature (1)..(80): n is any nucleotide
nnnnnnnnnnnnnnnnnnnnnnnnnnnnnnnnnnnnnnnnnnnnnnnnnnnnnnnnnnnnnnnnnnnnnnnnnnnnnnnncccccccagatttgtttccacccccacgtttccataagttggccatgcagtgagatggcttgtgtccaagtcagatggcttgagccagaggctgtggcctcctgaggatgaagatgggcagaagagcacccatgtggctctgcctgctgcagccaatacttgggctctgtgagccacatcacacagagcactcaggtgctgtaccttagaacagagctgyaaccagagacagtgacagttgtttgttttctaaagacctaaacagaaagaaaaggaaaaacaacaatgaaagcaaaaaaccttttggcaaagcatgacacatggaatggctcatgccgtatccaaaatacctcactctgattgaaatacactttttttatacagagtgattatatcatcagaaggtaattttaaacagcaaagaacctttaaaagccttatgaagtaaaaaggaaaagtatagctggaataaaaagatcataacatggcttcaacagtcaatagcaaagggaggtttgg

SEQ ID NO: 13787 - DNA, 599 bp, Chicken  19866894218412_1
  misc_feature (1)..(44): n is any nucleotide
nnnnnnnnnnnnnnnnnnnnnnnnnnnnnnnnnnnnnnnnnnnnttcctgcagtagtcctgcagcagagctgcagtgtccttctgcattttcttcctcttgacgagtttgtttctcagactatctgtcttaatttgataaagtgtttggtcacactgcaaattagggtggatcgccaggtctccctgcactgcctgcttagaaaacttctatcaagaagttcacagagcagtaaaatttaattgctaccaagagagaacaccttcagatttctttgctgcacatttgttggggttttcakgaattttgtttgccagtgacaggcacaatatagcaatacatttcagactcctttttggcagccgtaggaatatatttcaaacaggttttgtttgatatctacaagaaatctctgtttggtttatgtataagacaaatgtatgcaaatctatcctccagtcctgtaaattatatgcctggaatcagtaagcaatacagtaaaagctcactacgttgcattttagctatccgcatatcccataaaactgacataaaaaacaatggtttcttccccatttctcagcaaatttttaatagcac

SEQ ID NO: 13788 - DNA, 599 bp, Chicken  19866894218414_1
  misc_feature (1)..(185): n is any nucleotide
nnnnnnnnnnnnnnnnnnnnnnnnnnnnnnnnnnnnnnnnnnnnnnnnnnnnnnnnnnnnnnnnnnnnnnnnnnnnnnnnnnnnnnnnnnnnnnnnnnnnnnnnnnnnnnnnnnnnnnnnnnnnnnnnnnnnnnnnnnnnnnnnnnnnnnnnnnnnnnnnnnnnnnnnnnnnnnnnnnnnnnnnngtctttgcgttatttctgctgaggcatgtggatatggacatggttatgacgtgcggaaatcagaccctatagccagtaaggatatagagcaggcatgtgtttattggtgatgtgygtacaccctggtgcaagggggatcgctccacctaacttgcacaccgtcaggagaaatcgtgctataggtataggtcgaactaatacataatcaatagttgacaggaatttggatacatattcattacattcctaagagcccattagcatgcagtccctcccccccttgcatgtgcrtagtaggtcgtgatgataaaggcttgtagkctttcttgcgaagactcgtagtcttcctcgctgcaaacttctgaccctgaaggggrggcatcccccgaamtggtttcaacttgccctgttgac

SEQ ID NO: 13789 - DNA, 599 bp, Chicken  19866894218414_2
  misc_feature (1)..(9): n is any nucleotide
nnnnnnnnngtctttgcgttatttctgctgaggcatgtggatatggacatggttatgacgtgcggaaatcagaccctatagccagtaaggatatagagcaggcatgtgtttattggtgatgtgygtacaccctggtgcaagggggatcgctccacctaacttgcacaccgtcaggagaaatcgtgctataggtataggtcgaactaatacataatcaatagttgacaggaatttggatacatattcattacattcctaagagcccattagcatgcagtccctcccccccttgcatgtgcrtagtaggtcgtgatgataaaggcttgtagkctttcttgcgaagactcgtagtcttcctcgctgcaaacttctgaccctgaaggggrggcatcccccgaamtggtttcaacttgccctgttgacatctaatcacctccctgccaaatgttttcgagctgctctccagtccttatctttatggccttcatcctccttgttattccagacctagtgtctgtgaaagtgcttggaatcccttgttttctaacattctctacataaactatctctatttgccccttatttctactttgtgaagc

SEQ ID NO: 13790 - DNA, 600 bp, Chicken  19866894218414_3
aggcatgtggatatggacatggttatgacgtgcggaaatcagaccctatagccagtaaggatatagagcaggcatgtgtttattggtgatgtgygtacaccctggtgcaagggggatcgctccacctaacttgcacaccgtcaggagaaatcgtgctataggtataggtcgaactaatacataatcaatagttgacaggaatttggatacatattcattacattcctaagagcccattagcatgcagtccctcccccccttgcatgtgcrtagtaggtcgtgatgataaaggcttgtagkctttcttgcgaagactcgtagtcttcctcgctgcaaacttctgaccctgaaggggrggcatcccccgaamtggtttcaacttgccctgttgacatctaatcacctccctgccaaatgttttcgagctgctctccagtccttatctttatggccttcatcctccttgttattccagacctagtgtctgtgaaagtgcttggaatcccttgttttctaacattctctacataaactatctctatttgccccttatttctactttgtgaagctactttcccttttcttgctgtgaggcccttc

SEQ ID NO: 13791 - DNA, 600 bp, Chicken  19866894218414_4
aaggatatagagcaggcatgtgtttattggtgatgtgygtacaccctggtgcaagggggatcgctccacctaacttgcacaccgtcaggagaaatcgtgctataggtataggtcgaactaatacataatcaatagttgacaggaatttggatacatattcattacattcctaagagcccattagcatgcagtccctcccccccttgcatgtgcrtagtaggtcgtgatgataaaggcttgtagkctttcttgcgaagactcgtagtcttcctcgctgcaaacttctgaccctgaaggggrggcatcccccgaamtggtttcaacttgccctgttgacatctaatcacctccctgccaaatgttttcgagctgctctccagtccttatctttatggccttcatcctccttgttattccagacctagtgtctgtgaaagtgcttggaatcccttgttttctaacattctctacataaactatctctatttgccccttatttctactttgtgaagctactttcccttttcttgctgtgaggcccttctctctataactgcagggtcctgttctcactcttcagttatactgtcccccttcatg

SEQ ID NO: 13792 - DNA, 600 bp, Chicken  19866894218414_5
ggcatgtgtttattggtgatgtgygtacaccctggtgcaagggggatcgctccacctaacttgcacaccgtcaggagaaatcgtgctataggtataggtcgaactaatacataatcaatagttgacaggaatttggatacatattcattacattcctaagagcccattagcatgcagtccctcccccccttgcatgtgcrtagtaggtcgtgatgataaaggcttgtagkctttcttgcgaagactcgtagtcttcctcgctgcaaacttctgaccctgaaggggrggcatcccccgaamtggtttcaacttgccctgttgacatctaatcacctccctgccaaatgttttcgagctgctctccagtccttatctttatggccttcatcctccttgttattccagacctagtgtctgtgaaagtgcttggaatcccttgttttctaacattctctacataaactatctctatttgccccttatttctactttgtgaagctactttcccttttcttgctgtgaggcccttctctctataactgcagggtcctgttctcactcttcagttatactgtcccccttcatgatgtggctggggag

SEQ ID NO: 13793 - DNA, 599 bp, Chicken  19866894218416_1
  misc_feature (1)..(174): n is any nucleotide
nnnnnnnnnnnnnnnnnnnnnnnnnnnnnnnnnnnnnnnnnnnnnnnnnnnnnnnnnnnnnnnnnnnnnnnnnnnnnnnnnnnnnnnnnnnnnnnnnnnnnnnnnnnnnnnnnnnnnnnnnnnnnnnnnnnnnnnnnnnnnnnnnnnnnnnnnnnnnnnnnnnnnnnnnnnnnntccactggaattactgcagagaattaggtttttcagggcctttgctctaaaattctcctagcttcatgttattgtccccctttgtgccctttgtgaaataccaacttgctcaagtttaagaatttratcctgatttagtcctgtcagaatcttctgatgagagaaacatgcttcagagtttcttgtgtttctacaatgttaccccatttccatgaatgctgtmatagcatacctactgaattcattagaaattatgtactttgaggcactggaaaaataaatgctttttactgtgtggttgwcagagcactggcacacattgcccagaagctgtrraatctcttccttggagaccttcactattgcctagacatggtcctaggcaccctgatctgggtgcccctggttcagcaggggttgggcca

SEQ ID NO: 13794 - DNA, 599 bp, Chicken  19866894218416_2
  misc_feature (1)..(77): n is any nucleotide
nnnnnnnnnnnnnnnnnnnnnnnnnnnnnnnnnnnnnnnnnnnnnnnnnnnnnnnnnnnnnnnnnnnnnnnnnnnnntccactggaattactgcagagaattaggtttttcagggcctttgctctaaaattctcctagcttcatgttattgtccccctttgtgccctttgtgaaataccaacttgctcaagtttaagaatttratcctgatttagtcctgtcagaatcttctgatgagagaaacatgcttcagagtttcttgtgtttctacaatgttaccccatttccatgaatgctgtmatagcatacctactgaattcattagaaattatgtactttgaggcactggaaaaataaatgctttttactgtgtggttgwcagagcactggcacacattgcccagaagctgtrraatctcttccttggagaccttcactattgcctagacatggtcctaggcaccctgatctgggtgcccctggttcagcaggggttgggccaggtgatttccagagaactcttccaacctccaaccattctgtgaagcatttttgccctgctagcattcaggtagaatctatgcattagcttgaacatc

SEQ ID NO: 13795 - DNA, 600 bp, Chicken  19866894218416_3
cactggaattactgcagagaattaggtttttcagggcctttgctctaaaattctcctagcttcatgttattgtccccctttgtgccctttgtgaaataccaacttgctcaagtttaagaatttratcctgatttagtcctgtcagaatcttctgatgagagaaacatgcttcagagtttcttgtgtttctacaatgttaccccatttccatgaatgctgtmatagcatacctactgaattcattagaaattatgtactttgaggcactggaaaaataaatgctttttactgtgtggttgwcagagcactggcacacattgcccagaagctgtrraatctcttccttggagaccttcactattgcctagacatggtcctaggcaccctgatctgggtgcccctggttcagcaggggttgggccaggtgatttccagagaactcttccaacctccaaccattctgtgaagcatttttgccctgctagcattcaggtagaatctatgcattagcttgaacatcaatcttatgtaaaaccatctgatctctttctgtttcctgtagggccctttgtagagttatagattatttccaagagagat

SEQ ID NO: 13796 - DNA, 600 bp, Chicken  19866894218416_4
gggcctttgctctaaaattctcctagcttcatgttattgtccccctttgtgccctttgtgaaataccaacttgctcaagtttaagaatttratcctgatttagtcctgtcagaatcttctgatgagagaaacatgcttcagagtttcttgtgtttctacaatgttaccccatttccatgaatgctgtmatagcatacctactgaattcattagaaattatgtactttgaggcactggaaaaataaatgctttttactgtgtggttgwcagagcactggcacacattgcccagaagctgtrraatctcttccttggagaccttcactattgcctagacatggtcctaggcaccctgatctgggtgcccctggttcagcaggggttgggccaggtgatttccagagaactcttccaacctccaaccattctgtgaagcatttttgccctgctagcattcaggtagaatctatgcattagcttgaacatcaatcttatgtaaaaccatctgatctctttctgtttcctgtagggccctttgtagagttatagattatttccaagagagatttgcagagcagctgttacagtaagaatcatgtc

SEQ ID NO: 13797 - DNA, 600 bp, Chicken  19866894218416_5
ggcctttgctctaaaattctcctagcttcatgttattgtccccctttgtgccctttgtgaaataccaacttgctcaagtttaagaatttratcctgatttagtcctgtcagaatcttctgatgagagaaacatgcttcagagtttcttgtgtttctacaatgttaccccatttccatgaatgctgtmatagcatacctactgaattcattagaaattatgtactttgaggcactggaaaaataaatgctttttactgtgtggttgwcagagcactggcacacattgcccagaagctgtrraatctcttccttggagaccttcactattgcctagacatggtcctaggcaccctgatctgggtgcccctggttcagcaggggttgggccaggtgatttccagagaactcttccaacctccaaccattctgtgaagcatttttgccctgctagcattcaggtagaatctatgcattagcttgaacatcaatcttatgtaaaaccatctgatctctttctgtttcctgtagggccctttgtagagttatagattatttccaagagagatttgcagagcagctgttacagtaagaatcatgtct

SEQ ID NO: 13798 - DNA, 600 bp, Chicken  19866894218419_1
aattctacctcacagccctgtctttactaccacggcatactcttaagtcctgttcttgtccagcctccacaaaaataattattttgatatttccatactctggaataggagaatatgacttttgttcttatccatctccttgtattttttacaagaaaacttcaggatctcagctgtggactaagcgctttcagctaatgcattaaaaaggagttctacaatttgatttaaatgggtaagaaatcagtggaagaagcaattgaaagacaggctagcaggaagtttaggggagaaccacarcacagacaagtatgagggtgcagacacaggaggcaatctgacatcaaacatctgcctggctggttctgctttctctattctctctgtcctcaagggcagccrgcacttgcattagacaagttatcccatyacagttgggtgatcatcagctaataagcagttaagaatcagctggaaaacctacagcacacctctaagagacctgcagcactagagatatgcaggtatcaaaccctgggtagacttgacagtcacaatgctgacccttgcaagatgtctgagtccttacaggccactgtg

SEQ ID NO: 13799 - DNA, 600 bp, Chicken  19866894218419_2
gaataggagaatatgacttttgttcttatccatctccttgtattttttacaagaaaacttcaggatctcagctgtggactaagcgctttcagctaatgcattaaaaaggagttctacaatttgatttaaatgggtaagaaatcagtggaagaagcaattgaaagacaggctagcaggaagtttaggggagaaccacarcacagacaagtatgagggtgcagacacaggaggcaatctgacatcaaacatctgcctggctggttctgctttctctattctctctgtcctcaagggcagccrgcacttgcattagacaagttatcccatyacagttgggtgatcatcagctaataagcagttaagaatcagctggaaaacctacagcacacctctaagagacctgcagcactagagatatgcaggtatcaaaccctgggtagacttgacagtcacaatgctgacccttgcaagatgtctgagtccttacaggccactgtggtctgctgtggcaccttcccatgccaacactaacaacaccccctctgtctcagcacctggtgtcaccgagtgccatgcatcattgcactgtagcagcatgcc

SEQ ID NO: 13800 - DNA, 600 bp, Chicken  19866894218419_3
tccatctccttgtattttttacaagaaaacttcaggatctcagctgtggactaagcgctttcagctaatgcattaaaaaggagttctacaatttgatttaaatgggtaagaaatcagtggaagaagcaattgaaagacaggctagcaggaagtttaggggagaaccacarcacagacaagtatgagggtgcagacacaggaggcaatctgacatcaaacatctgcctggctggttctgctttctctattctctctgtcctcaagggcagccrgcacttgcattagacaagttatcccatyacagttgggtgatcatcagctaataagcagttaagaatcagctggaaaacctacagcacacctctaagagacctgcagcactagagatatgcaggtatcaaaccctgggtagacttgacagtcacaatgctgacccttgcaagatgtctgagtccttacaggccactgtggtctgctgtggcaccttcccatgccaacactaacaacaccccctctgtctcagcacctggtgtcaccgagtgccatgcatcattgcactgtagcagcatgccccaagatcgctagtaggtcaagcaatcc

SEQ ID NO: 13801 - DNA, 600 bp, Chicken  19866894218424_1
atgttgttcccatgttactctgctatttgtaaccccagtctgctccctctctgtcaaaggaatggcatagaagaaaaactcagcaggattcaccctgcccggactgcagcgctgtatcccgcggtgacatttctcttcaaagcaaagagcaaaattccacttcaggaaacaagatgtcccctgaatcatcacaatctcagccgtgtttggtcatcagctcagcagatctggaaaggatcatttaggggatctccctgctctccccccttccacatttagaggctctgtatcccacagccrtgttacaccctcacctggtatttcttgctccctctactgcacaaagtctcatttgtgcatatcagtacagaattgttccttttttttaatgttgttctggacttaaggtttacacccaagaaaccagtgcacacagcatagctgccttagtctatttagactctctgtatcaaacgtttctcaccacaacacccgtatgaaccctgaaactctgataaataatgcattctagcaaaagataaatccatttccttctattagctacaattacagcctaaaatagtaaaggagttattgggt

SEQ ID NO: 13802 - DNA, 600 bp, Chicken  19866894218432_1
tatctgtagtaatcttctgttctcattttcctcctttccccacacctttcccccaggacagcctatttcagaaggtccaagaatcctatgtattttctccagcattgcagaagtctctaaatgaagaaaagcctggttaatccataataatggcaggtctgtttattgatctcataaattgcactttacttgacctgtcaaaaaggcagcattctcagcatgtactttcctgcttctctcatagcctctctgcccgaggtgaagattgctccccccagcctctcctcatcttctggcagytgttgtaagccctgatctaaactcagccttcsccaaacaatctatttgagttcatccttgagaaagtacagaaggaacaataaatactcaatactgatttttctcccctacccttcataacatacccacgctcaagctgaatatgcatgcttcttctgaaaggagcaaaattaaaatgaaaaacaataggaactggtaaatcagccaacagactgggattttctaattaacaatactatgactcttaggaggtgctaacagatatccaatacaaagcaagttatggttaccttgtggatg

SEQ ID NO: 13803 - DNA, 600 bp, Chicken  19866894218432_2
cctttccccacacctttcccccaggacagcctatttcagaaggtccaagaatcctatgtattttctccagcattgcagaagtctctaaatgaagaaaagcctggttaatccataataatggcaggtctgtttattgatctcataaattgcactttacttgacctgtcaaaaaggcagcattctcagcatgtactttcctgcttctctcatagcctctctgcccgaggtgaagattgctccccccagcctctcctcatcttctggcagytgttgtaagccctgatctaaactcagccttcsccaaacaatctatttgagttcatccttgagaaagtacagaaggaacaataaatactcaatactgatttttctcccctacccttcataacatacccacgctcaagctgaatatgcatgcttcttctgaaaggagcaaaattaaaatgaaaaacaataggaactggtaaatcagccaacagactgggattttctaattaacaatactatgactcttaggaggtgctaacagatatccaatacaaagcaagttatggttaccttgtggatgctgtaaatggatttccagacctcaacatttga

SEQ ID NO: 13804 - DNA, 600 bp, Chicken  19866894218437_1
tattattaaaagtaactggtatccttattttttatatgtaagcttcgttgaagaagtgggtctctaactcaaatgtgtactgacatctaagtattattgctttatactgggataaattgtcttttattgtacataaaaggactaatataaactgtgtatttatagtcagaatttctctctatgatatgtctgtcttggaagaatgtatacatatgctgacatatgcagtattggaaggcagtaactactgtgtaactgtaatcttgtaaaatgccctattctaaggaggaattatgttgytttgtaaatggttctgtgtgtttgggatcctgcagagtaagacagtgaagccagctgagtgccacatggtacgtttctgcaaaatgttaatctaacaactgggaagaccaacctayrtaagttaaaggataataacatatatttttacaagagaaatcaatagtcatacagttttacttgactcggagtggatggcttagaacatttttatttgtaaatattttctacttcttcaatagaagttggattaagttctcaccttgttggcataaaagatgtttttccatttgctttgctgat

SEQ ID NO: 13805 - DNA, 600 bp, Chicken  19866894218437_2
ttgtcttttattgtacataaaaggactaatataaactgtgtatttatagtcagaatttctctctatgatatgtctgtcttggaagaatgtatacatatgctgacatatgcagtattggaaggcagtaactactgtgtaactgtaatcttgtaaaatgccctattctaaggaggaattatgttgytttgtaaatggttctgtgtgtttgggatcctgcagagtaagacagtgaagccagctgagtgccacatggtacgtttctgcaaaatgttaatctaacaactgggaagaccaacctayrtaagttaaaggataataacatatatttttacaagagaaatcaatagtcatacagttttacttgactcggagtggatggcttagaacatttttatttgtaaatattttctacttcttcaatagaagttggattaagttctcaccttgttggcataaaagatgtttttccatttgctttgctgatcgtgtacaggaaatgaggtgactgaatttaatgtaagtaaataaagaaaagtggcttctggtaataaatcagttgtgcaataatgcatcctgtcaaggagctgtaattgaatattg

SEQ ID NO: 13806 - DNA, 600 bp, Chicken  19866894218437_3
tgtcttttattgtacataaaaggactaatataaactgtgtatttatagtcagaatttctctctatgatatgtctgtcttggaagaatgtatacatatgctgacatatgcagtattggaaggcagtaactactgtgtaactgtaatcttgtaaaatgccctattctaaggaggaattatgttgytttgtaaatggttctgtgtgtttgggatcctgcagagtaagacagtgaagccagctgagtgccacatggtacgtttctgcaaaatgttaatctaacaactgggaagaccaacctayrtaagttaaaggataataacatatatttttacaagagaaatcaatagtcatacagttttacttgactcggagtggatggcttagaacatttttatttgtaaatattttctacttcttcaatagaagttggattaagttctcaccttgttggcataaaagatgtttttccatttgctttgctgatcgtgtacaggaaatgaggtgactgaatttaatgtaagtaaataaagaaaagtggcttctggtaataaatcagttgtgcaataatgcatcctgtcaaggagctgtaattgaatattga

SEQ ID NO: 13807 - DNA, 600 bp, Chicken  19866894218438_1
gggaaaggagtgtggtgatttgctgagtacttctggaggaaggaaagtgaaaaaaacaaaacaaaacaaaaacacaaaaagagcaaacctagaatatcagaacagcaaatgcaaccggaaacaaacaatgaatcatatctcagaagtcgggctgatagtcataaagaaggacataggcataacaaaagaagttttcctcaaatcatttaattctgggcctacgcaaaacttgcctgaattaatagtctttcatttcagtcatggagttgaacattataattaaacttgaaattggtataytaatacaaacatcctgaggatctacttcaggtcattcagtcaccacctaattctgctaatggagagttctgtatcttgccaagaaagctcatttcagagctctgaaacaaacatccttgctccttctttgaaggataagacagacaggcatcaatagcaaacccactttttcctctcttcctcaagtgattttgacttccaagagtgaaagggagtaatcaagttttcttaaggcctcaaagtaatatgctgatctggtaaatataaggctgcaaactgattcggttaagtatctgtaat

SEQ ID NO: 13808 - DNA, 456 bp, Chicken  19866894218438_2
atcaagttttcttaaggcctcaaagtaatatgctgatctggtaaatataaggctgcaaactgattcggttaagtatctgtaatatactgatagaatatacataatcactctgctatcctttctcagcctctatctgcctcaatctgctgaacaagtttatttctgtctccattatgttgaggagccccaaaatagctgttagttggtgagactgtgctatactggttcagattctaagttcaaagtcacaacttaagtagactcttcctgctctcacccctctgttgaggagcagcagtwctcagaagtacctgtcttcaagcatgaaaggtcaatcttgctctgagtgcttttcatactataccttttagaaaggtaaaaatgctcacttatcctgaagtggagtcgtgggtctagagcaaagcatatgctactgtgttaccttttgaagcaaag

SEQ ID NO: 13809 - DNA, 599 bp, Chicken  19866894218442_1
  misc_feature (1)..(20): n is any nucleotide
nnnnnnnnnnnnnnnnnnnnaagagggaggagttaaatataacctgaaggaaaatctaccttaagagcccatttctgccagggatcggtgtcctgagaggcacgaagactgtaaaaagacaacttggtgaaagaagcaaagaaaagacttgacacagacaggcaaatacagaccaatgctgaaaagaacagaacgaacactaacttgttgtcacagggaggataattagcatagggcaccaggattaaaaagaaaaaaagagaaaagaaaaaaaaagaaaaaaagagagagagagagaaragaaaaagaagtcctgagtggcacgtggcactttacttggggtaactgtgccaccacccatgtaactcaatgcatgccagtggatagaagcaaggcaagacagacacttccaaatgaatacagcctacacagctgtacataaattaccagaactccccattctccttctcccagttacagtcactgtctgcactcagaagagatactaatgtggttaccgtttgcttctgaaaatgtctcattggagaaaagttttgtagagatcattgctttctccaatattggatacaaatgacaac

SEQ ID NO: 13810 - DNA, 599 bp, Chicken  19866894218449_1
  misc_feature (1)..(99): n is any nucleotide
nnnnnnnnnnnnnnnnnnnnnnnnnnnnnnnnnnnnnnnnnnnnnnnnnnnnnnnnnnnnnnnnnnnnnnnnnnnnnnnnnnnnnnnnnnnnnnnnnnnaatgctcatctgctatagtgagtgaaacactgaatggatttggagaaaaacaaaaaagcaaaaggctgatggggactgtgttctcgtgaatccatttctttgcagagcctaaaagagagtgaatgccagaggactgctgccatgacagtcactcttgaaagtcagatttattggcagcaggcctactttgaagggtccttyctggctgagtcttggattagatgtgtgtggtgacagattgcagatgtgtgtaggcagctctcagctgcatatggatgctgtggggcacggctaagtttgcagaacaggaacatcccagatgaagatagggaaggagagtcagaaggatggggtgaggtggggaacctaaagaaagggtagggaaaagtaaagaaagatggagggagaactgtggaagaaaggtgaaatatagctgacaagaaacagttggcaggaggggaaagaacagagcaagaggaatctgggagtcattgttttgg

SEQ ID NO: 13811 - DNA, 600 bp, Chicken  19866894218449_2
ttggattagatgtgtgtggtgacagattgcagatgtgtgtaggcagctctcagctgcatatggatgctgtggggcacggctaagtttgcagaacaggaacatcccagatgaagatagggaaggagagtcagaaggatggggtgaggtggggaacctaaagaaagggtagggaaaagtaaagaaagatggagggagaactgtggaagaaaggtgaaatatagctgacaagaaacagttggcaggaggggaaagaacagagcaagaggaatctgggagtcattgttttgggctgggtagggwggtgggagcagggctagtttagcacatacataggcaggaaaggctgctgccagcagctatgccaatgatagccagctaagagagtcatcatcatttaactgaggggatgaaggtgggccggggggctgacatttagcaattacactgagcagtgtgaaggaaggagtgtttatgcttaagaagaacacaagaaaaaaaagtgtttgtaatgatttatctgactcattagcagtgttcctccaggtcattcctgtgctgttcaaaactcggtgtcctttgcttgtttctctattccatatt

SEQ ID NO: 13812 - DNA, 600 bp, Chicken  19866894218449_3
agctaaatttccctttcagtctcaaattagtgaaagttttgcctgagcaatggctgaattatttggttctttgagctattatttcaagcattacaaagccattatttaccagtagtcagtctgtgcatatacctgactttgtgtcttactggaattaaaaaagggcactctgtaagagactgtaaaccaaagcctacagagcaggaggcacatctgctcttacagggctttgagcactaccgaagagcagtgctttctaagaaataagttctactggtaaatagaattatttttacatgrttttctaatggttgtaaaaatactgacatttatagcaacagaattgtggttgactgttcttgactgagtgaaataatgtttggtttagatatttttagttgtttcctagttgactcracattgaaaaggcagtacttcatattgtgaacacgtacattccaactttttctgtgatgaaagacataaatgctgaagacttctgaagtgacttctggtggggttgaaaaaaaatcagaacactttttgaactgctttatcattgtgatgcgaaagaggttttgctttgctttgctttgcttt

SEQ ID NO: 13813 - DNA, 600 bp, Chicken  19866894218449_4
agtctgtgcatatacctgactttgtgtcttactggaattaaaaaagggcactctgtaagagactgtaaaccaaagcctacagagcaggaggcacatctgctcttacagggctttgagcactaccgaagagcagtgctttctaagaaataagttctactggtaaatagaattatttttacatgrttttctaatggttgtaaaaatactgacatttatagcaacagaattgtggttgactgttcttgactgagtgaaataatgtttggtttagatatttttagttgtttcctagttgactcracattgaaaaggcagtacttcatattgtgaacacgtacattccaactttttctgtgatgaaagacataaatgctgaagacttctgaagtgacttctggtggggttgaaaaaaaatcagaacactttttgaactgctttatcattgtgatgcgaaagaggttttgctttgctttgctttgctttcttctttggatgtctgcaattctactgcccttagcgtgtgaagtgctcctcgtgactgtgtcctttgctgaacttttcaactgtgccactgacattgaaatacatttcagattttcc

SEQ ID NO: 13814 - DNA, 600 bp, Chicken  19866894218449_5
atttttcctctccagacatgcttctgagctaaaccagtgctctgaggagagtgcttgtgcatgaaaaaacaggagttcttccttgtcacaagccttagcatactgctctgctactcgtgcctgtgaaatgcatttcatgcctcactcatctgttacctaaatgagatgtgaaagtagttcccacctcgtttacatttgcgctgttttatagagcagcatagctgcagttcccctggaagtaacaaaatgaggtcaccaaccctggcctctccttgggctgaatccatgcagcctcatccyttcaattcactaaactgaaaatgaagtctatttctctgagcaagttactatgaaacaccagctttctccagcgtgcagcagtcacctgtagtttctgtactttaccaagctgtaagctgtccatgctggaaataaaaatggaagctgtgcatttacacgagttgtctgagcccaaagtgattcctcctgcactgagcagaatgtagtcaaggtgaataagcaggaaagcagactaaactgatatggaaaggagatgaaaacaaggcaaaaaaacccagaaatcagtgctcctgtgctacc

SEQ ID NO: 13815 - DNA, 598 bp, Chicken  19866894218449_6
gcagactaaactgatatggaaaggagatgaaaacaaggcaaaaaaacccagaaatcagtgctcctgtgctacccctcccttggctgagtttgcagcaagtggtctgcagaagtgtgcctgaggggcagagggctgctgagggaccggtatctgcacagctctgggaaccctggatgctgcatctgaaccacctgtagagagctgcagagaccttagctgcagaacctggcttcttgctgtcttacattttacaccagcacagagaagtgaaaaatgttatcttcctgtttcagtatgggytttttttttttcttttcagtttttgaaccttataaacgtataaatagctgtgtaagaaaggacacagaagtccctagagtatagtcgtacaaattcaaccaattcaaccacttctgttctttcatcagctgagtcctagagttgaaaatagagtggcaatgtaaagcttgcaaggtgtcagctatatttggcatcatgctaatgcctgagaagacagactgaaaatactagctttcttcacgtgataccctcctttttttccttctagtgctctctgctggttatgggatcaagacgc

SEQ ID NO: 13816 - DNA, 600 bp, Chicken  19866894218450_1
cattttgtattgagatagctttatactttgctatatttatggttttcagatgctactaaaaggaaaactatgaaatcacttgtcattacatagataagcgcaaagggactgccacgtttgtgccactgactctaaacagcgtacacgtttatggaaccacaggtaatggagcaactgaatattcaaacacaggaaaatacttaagtactggatgacaaaagacaattcgtttagaaatgcctttcaagacacctcaaaatcccaacaggatcacacatgtgcagttcataaatagtgatwtccctgactttgaacaagtcttcaaagatctacttcagtattgctaacggcacaatttggatttcagctgttttccaaaaatccaaagaaggatgaaaagatgaaaatatctccttacatgtttcatgatagagcatcattttccagcaaacagaatcccaagacttgggcagctcttcaggtgaaggctgaggagcccatgaggagctatgggtaatagacagaaatttgcacctgatacacaaactgagaatctctttccccaccttgctgcttccacataatatcaagaaaatgaac

SEQ ID NO: 13817 - DNA, 600 bp, Chicken  19866894218450_2
agctgttttccaaaaatccaaagaaggatgaaaagatgaaaatatctccttacatgtttcatgatagagcatcattttccagcaaacagaatcccaagacttgggcagctcttcaggtgaaggctgaggagcccatgaggagctatgggtaatagacagaaatttgcacctgatacacaaactgagaatctctttccccaccttgctgcttccacataatatcaagaaaatgaacctgtcttcttaccgtgctgcatttctctggggttgttgttttttttttttccataagaacagtamgattcttagtcccttcagcattatataggggctgctgggagctccaggttcctaacatctctttgacagcctttgaaatcctacaggccatacaatatatgatgcagaaactcaggctgcccctctcatagccaagcgtaactcctgtgccctgaagtatcagtgggatctgctcagctcatgtataagcagcggtgtttaataaggtgtggcagcagaaatccagttatattgctgttttctaggcggttagcgtaagtgaaattgaacgaagctagcaaggccagcttcacaggactg

SEQ ID NO: 13818 - DNA, 600 bp, Chicken  19866894218453_1
tcatacattcctgcaaagactgatcccatatcatctgccatgggagtcttactggcctccaattctgaccacgcagtgcagaagtaacttgggtgtgatctgtctggtatgggaaagctgctgggccctgggcctcctagggctcctgagatggtcatggccaaaagaggatgaaagtgaagtggatgtgaagtctttattcccttcttaatggttcttttcaggatgccaagcaatccttggagggccttgtgggaaagatggccatgaatctgcaaggttgctcttctctgacctatrgggctttgaatctggcatgtttttattggcattagatgaaggtaggatggcaaaaggcaggagcaggttgacagaattaaggtcttttgtaaccttggaatgggtttgtccttggaacttggagattcttgtgtggagtagcaaatatagtggtcggggacacttggtgtccgtgggtcactcctgtccaaagagtaggaagggttgttttacagtgtcctcagctaggtgaatctcttctgtaattgctggagggatatttgaggtatggagccgtactgtggcactgacgttgataac

SEQ ID NO: 13819 - DNA, 600 bp, Chicken  19866894218460_1
atatattgtgaagggaaatgagtattttttccttcaatagtctctcccctccttcttcaggcttctcagcattagatcattttcttgtgtgctttggtcttcattgacattcagtgaaggcttgatgctgtactaatatctgcttctttctggagcatcctaatgcagctgttaaatacaggaaaacttcatatgaaatagagcaaatttaaatgtacaataaataaacagcaagtaagtgtagtatgattcttgtttttgaaagagattaattctcagttgttagaggcatttccttayttccactgtttcagatgtcaataccttttttccctttgatttacttcataatcatctttctttggtcagccatgttgtatagcaagtaaaataaatgattcttgatacagagaattcaargtgcattacgtagaagtgtatgtactaactacctgtcaatggatgttttacaaacaaactttcttcagttgagataatttagaaaccttcctgcactcttttttttttttttttgattcccctaaatagtcttgcctacttttaaagaatagaatgtacttaaaaaaactgtttttaccc

SEQ ID NO: 13820 - DNA, 600 bp, Chicken  19866894218460_2
cttgatgctgtactaatatctgcttctttctggagcatcctaatgcagctgttaaatacaggaaaacttcatatgaaatagagcaaatttaaatgtacaataaataaacagcaagtaagtgtagtatgattcttgtttttgaaagagattaattctcagttgttagaggcatttccttayttccactgtttcagatgtcaataccttttttccctttgatttacttcataatcatctttctttggtcagccatgttgtatagcaagtaaaataaatgattcttgatacagagaattcaargtgcattacgtagaagtgtatgtactaactacctgtcaatggatgttttacaaacaaactttcttcagttgagataatttagaaaccttcctgcactcttttttttttttttttgattcccctaaatagtcttgcctacttttaaagaatagaatgtacttaaaaaaactgtttttacccttttcattatcatgttaataatgtaatctacctagaaatctaaggaaagagcttattgaactgttgggaagccctgatgtttatcattgtctttttcatttatgtatagatttgtcatta

SEQ ID NO: 13821 - DNA, 600 bp, Chicken  19866894218460_3
ttttcattatcatgttaataatgtaatctacctagaaatctaaggaaagagcttattgaactgttgggaagccctgatgtttatcattgtctttttcatttatgtatagatttgtcattaattttagcttttcctcctgtagtgctatgctttcagagccctgagatttctcttcagtatggaaagaaatcgacatatcttcaaaaggtatactagtaaaatgttgtgtgaaactcctttacaatagctttcagaatgtatcattccaatcagacaggaattgtttctaaatgccagttrttttcagcaaaaagggtaagttacaggcaacttctgtccaatctgcagtcacagatagattttgctgctttgtattagtgtcaacctacaagatgtacatattcaatgtggggacttctattgctatgcatgccagagaacctagctcggtagggcctcttttttcccctgtgaataaggtttaaaatacgtagagggtgtttaagactgctggagataaaccatactttaatctgaagattatcagatataatttacagccctggatagtggcaaataactggcaaaattatatatttt

SEQ ID NO: 13822 - DNA, 600 bp, Chicken  19866894218460_4
gtccaatctgcagtcacagatagattttgctgctttgtattagtgtcaacctacaagatgtacatattcaatgtggggacttctattgctatgcatgccagagaacctagctcggtagggcctcttttttcccctgtgaataaggtttaaaatacgtagagggtgtttaagactgctggagataaaccatactttaatctgaagattatcagatataatttacagccctggatagtggcaaataactggcaaaattatatatttttgctgctcaaccctccagtctttcacatgggatgrattttacatcagtttacttaagagtgttaaaaaaagatttggatcaataagaggaaaatgtctttcatcagttacccatttttaattagctgccagtttccccaggtagactacaaagctgtgtaaaatctaatgcttttgggattagggtagtactcatactgtttatgacaactgcttggcaccagtgtttctgtatgattttattctatattatatattcctagaattctaaataagaatgtatctcatttttacttaaaaaaaaaaaaaaaaaagattttgtactggaaaaggacc

SEQ ID NO: 13823 - DNA, 600 bp, Chicken  19866894218461_1
ctacataggctgaaaagtaaaagatggctctgacagtaggttaaatggttgattctctaaatgaggaatcccaatttaagacctgttacataacacctgactgtcgctggaagataattttagacataattatccagaaatgattttgatgctaatggacaattctgtttcagcaacctggagattattttcatacaattgtcttctgtgagttgcctgggctttcatactcctggacaacaaacaactagattcccctcagtttaatttatgtcctctaaatgcctttgccattgcttmaagccttgtttagctgaaaatggcagcttctccgtaggacaagggatggtgagtcaccctgggaactggactgtcctgtacatgaaacacagtgtacagcaacagtttgaggatgagccagtttgcgcctactgctggagtcactgccagcgctgctgacaactctttgtcttgtatgcctttccttcctgaagatacgcttttcccatttaaagaagatatgcccatccagatatgagtctctgaaattgaccaattttgtttacggatgatgtagatttcttcacttccaggtttaag

SEQ ID NO: 13824 - DNA, 465 bp, Chicken  19866894218461_2
agtttgcgcctactgctggagtcactgccagcgctgctgacaactctttgtcttgtatgcctttccttcctgaagatacgcttttcccatttaaagaagatatgcccatccagatatgagtctctgaaattgaccaattttgtttacggatgatgtagatttcttcacttccaggtttaagaagcttgcttagctgttggtagaaatcccttatcactaagggatacttatgcgaggggtttatattatagacacatctaagggctctgctcaggaaccatgatcccattgctgtaagastgagcatcagattgcaggaagggaaatccttatggatttagaaaaaagtcttcacggtgagagcagcaaagcactggaatagatgcatgcatcatggtgaagtagaaacagtggtttcatagcatcatagaatcacggaatcatagagtcatagtatcataaaat

SEQ ID NO: 13825 - DNA, 600 bp, Chicken  19866894218462_1
gcctcatgaggtaaacaaattgacaggaaagagattgatttttttttttttttctgaaagaataagtgaagactacatctcaaaacagcaacaaaatgtagcaagatctgtatgtaaggtctgtaacatgtctgtttcacttttagaacgtttgggaggagcaaagaaaaatactgttttacatgaaatgtacgggcagttttccattcatgaacatagagaaaattatgggataatttaacctgctatttttttaaaaaaattttatttttgcaaaaatagaaatatattttccttttmtttttttctgtgacagtgttggatagaaaagctttttttctctgttggaaaatagacatttcatctgtgttctttcaaattctttccaattttttatacgtgtgtttaatgctgtttccataggtagagcaaaaccgcgtgaagcttctgaatgataaggcagttgctaaatcacagcttcaaaagaaactaggacagcttctatatctcactaatctggagaaagtaaggtgttatggtgtcttgctctttaccaaactaaactgatgtcttgtatttttctagctgaagaaacttgcc

SEQ ID NO: 13826 - DNA, 552 bp, Chicken  19866894218464_1
cgttacattttggtgctgtaataagagcattccaaaggctaataaatgctttgaaatgttggtttaatgaaaagatgagaactatgtgtttactactttgaatttgtagtgcagtaaacactcattacaacaaaattagaaaagattgcatctatgcttgaaaggtattctcatgaatgcaaggaggccaaactcatccctcacctatctcttttgtcatgacagaaaaatagcactaagaaaagtttgtctaagtcatagtatgacaagcgtgtactgcccaggttccttgtgattgtyacctctgcagtgtgatgttcacattacctacgttcattaggttcacttatctatatggatgcagagaaaagctgaagataatgtgtacactttgtttgtatcctgaatttaaggatggtagcctccattatataccttgcgactgaacaaaacgaagtaggcatcagacacaaaactagtagtgggatgaatgtcgctactctttatttttcagggtcaggactatcatcatatcatcatgtcaggttcaag

SEQ ID NO: 13827 - DNA, 600 bp, Chicken  19866894218471_1
ttgtgactgattcactctgagatagtccccgtgtgtcagacagacacaatgcagctgttctccttcaagtctgtgcaccgaataagagaaatgctgatgaggactttgggtaaaatgaggtattgttgcagtaaagtttgtttctgagtgtgatacagctggattttgtaacactcttcagttttactcagtcagattttcccctcctactcatacaaggaaatctccctttgttcccaaaggttgttcctcccaaaaagtatacagccatctgcactttacccttgtgtttcagttctycactggaaaagcaactttgagcactgctcagagggctttttaggagcacttccagcagagcattctgggaaatagctccgaaggttctcttgtactcagtcctggctaatctccagctaacctctccagtgctggtgcttggcttgaccagcagtggtttgacttaggaggcaagatgtccctggcattgtgaggctcgaggtctctcttccttggtggtttcatgcacaacttacttatggatcatgtcccaaagaagaacatacaaggccacatagcgggaaagaggaacacacaggg

SEQ ID NO: 13828 - DNA, 600 bp, Chicken  19866894218472_1
aaaaaaagtatattatgactatcttttgaccccggtactgtttcattataacagcaggttttatataagcagctttgaacatttttttctttaattcaaatcttttgcaacatctatgtgggtcccaggtgcactgtagaaacctcatcattttggattggatctttatctaaccaaagtaaaccaccacttacatcagccttactaaactgcttgcctgtttgcctgcaagtcatttttcaaattaaattagaacaaagtaattgtttctattgacactgtgcacctttgcactgagcrggggaatagacgttatttattgaaaacacatggatggcatttttctcaaaagagcatcacatttaattttatacatttcacatttaatttgaagcgttgaacttctgttttcttctccaaatattttcggaagccagccttgactgaacaggacacagcaaaaaacaggcaggtaacaccagcagcctggaactgcgcttcaggtgagtcttcatgtctcacaatatgaggtgagctcaacaggaaagagctagcagtactggagtgacaaataagcggagctcgctttcattcctgtgc

SEQ ID NO: 13829 - DNA, 600 bp, Chicken  19866894218483_1
ttcacaaaccaaaaaggcgcaaagcgcaatgatgaaggccgacccaaagcacctggacgtggtgtcaccgtgggtctgttacagccgagctgtgtttccatcacctcttccctctcccagcacgaatcatcactggctgctggggctggaacaggaaaggcacggggaaaagctggagccggtgggatgggacccatgtagcaccaggcaaatgctttgctctgggtagggaaagagctaaaagcagaaggaggaaagctcctctgctcaccctggggaagggagttcacatcataagcrcaggacaaagcactgctgatattggggctgccagaggatttgaatgggattggcctgggctaacaaactgtggtcaaagctaatctctgattagctatactgaggagatttaatttagtttaaagccttacctgaaatgcagaactgggtattattgcatatctgaccgaggccgctgtgtacagctgaagtatttatagtagaattaaaacctctctgaaagcaatcatccaaggagcagcgaaattgattgcagcggcaccgcttccaaacatttggaaaacatgagtcagtctccaa

SEQ ID NO: 13830 - DNA, 600 bp, Chicken  19866894218489_1
agtatattgctatgataatactgtaatctatgtgctttagaaaatattctagtcccaggcaatttagtcttagatttttctttttctggctaggatagttgagctgtttgtagagaaaccatgatagcattttctagccatttttatttttttgcaaaggaaataaaagacagattctgacagcacatgctcaaaacactgcagacattaattaacaagcgagagatgatgaacaagtggtgaaaagtttcaacgcttctgtctcgccttgaaaacccgagcagaatggcccatgcttcyatgggccagccaactataaatgccagccgggaacagcatgacagtattcagactcaaagcctgcagtcaaactgtcagcagcatctaattagcggagttctagatcaagaataaaatgtgtttgactctttataaatatgatgtgtaaaaatgttacataatgacatgctgctcctctacatcccccttaatgttttgacaaggggcgtcaagtggtgaaaaactgcaaagcgcagaagtatttcagcgactgtgtgctaacagctgaattctccatttaaatttcttaagcaccaagat

SEQ ID NO: 13831 - DNA, 600 bp, Chicken  19866894218489_2
gcggagttctagatcaagaataaaatgtgtttgactctttataaatatgatgtgtaaaaatgttacataatgacatgctgctcctctacatcccccttaatgttttgacaaggggcgtcaagtggtgaaaaactgcaaagcgcagaagtatttcagcgactgtgtgctaacagctgaattctccatttaaatttcttaagcaccaagatccagaaatgggccaggccagggggataagtggtgaggttaagtttaatgagatattaggagccaggttgggttttgcatttatttaaataygttttttacagaaattttagtatgtataataaattagagagtagacagaggtatctgaaatctatccacagaagactcaggtctagaactgcttctgcaggacaccgtttttattttagcaactagcttcaagcaaaattcccactgttggccattaatatgtgtgtttcacactttgygggtgtttcacctcccctataaggacagattgagagagctggggttgttcagcttggagaagaaaaggctccagggagatctgatagcggcctttcaggatgtaaagggagtctacaggaa

SEQ ID NO: 13832 - DNA, 600 bp, Chicken  19866894218489_3
tctccatttaaatttcttaagcaccaagatccagaaatgggccaggccagggggataagtggtgaggttaagtttaatgagatattaggagccaggttgggttttgcatttatttaaataygttttttacagaaattttagtatgtataataaattagagagtagacagaggtatctgaaatctatccacagaagactcaggtctagaactgcttctgcaggacaccgtttttattttagcaactagcttcaagcaaaattcccactgttggccattaatatgtgtgtttcacactttgygggtgtttcacctcccctataaggacagattgagagagctggggttgttcagcttggagaagaaaaggctccagggagatctgatagcggcctttcaggatgtaaagggagtctacaggaaagaaggggcagactctttagtagggtctgttgtgataggggaaatggttccaaactaaaacaggggagacttagactggatatcaggtaagtttttacaacaaaggtggtgggacactggcacagtttgcccagaggggtggtggatgctccagacctggagatactccaggtcaggcc

SEQ ID NO: 13833 - DNA, 600 bp, Chicken  19866894218490_1
cagccctaacatcccaaccacctcactgtcaggactcttaagagagcaaactcaatgatgttcattcacatatagcacgagagcttttcttagtttggcatccacatcctgttactattacaaactccaacatcatacatacgtgcacctcctgctacccctgaagctaaagaaaggctgatcctgcctcaataccaggatttcataccatggctgttcgactccctttttcccctgtcctcatcagttacttcaagtaactaggtgcactagattcaaccctaagcacttttcatccaygagcaattttaaataaaaaatgtgcatgttattaaacttactattttaacatccaagtcaaagctatcatcccacctgaataagtaccaaaaaaacagttatcacrgagaggaaaaggaaattgcattttaaaaacagattccgcaagctagattagctctggcaacactgaaaaaaccttatcagttacttcctccttccttattgtagtcaaactatttgcatgaaacttctaaatgaagttcatacgggcagtaagccagccraatcatcaaggtgaaaagaaaacagctcatctgc

SEQ ID NO: 13834 - DNA, 600 bp, Chicken  19866894218490_2
tcctgttactattacaaactccaacatcatacatacgtgcacctcctgctacccctgaagctaaagaaaggctgatcctgcctcaataccaggatttcataccatggctgttcgactccctttttcccctgtcctcatcagttacttcaagtaactaggtgcactagattcaaccctaagcacttttcatccaygagcaattttaaataaaaaatgtgcatgttattaaacttactattttaacatccaagtcaaagctatcatcccacctgaataagtaccaaaaaaacagttatcacrgagaggaaaaggaaattgcattttaaaaacagattccgcaagctagattagctctggcaacactgaaaaaaccttatcagttacttcctccttccttattgtagtcaaactatttgcatgaaacttctaaatgaagttcatacgggcagtaagccagccraatcatcaaggtgaaaagaaaacagctcatctgcattacagttgattcttggcattagctttacacgtgtggacagattggtcttgaacatcatagaatgacttgggttggaagggacctcaaggatcttcaagttcaaa

SEQ ID NO: 13835 - DNA, 600 bp, Chicken  19866894218490_3
gcactagattcaaccctaagcacttttcatccaygagcaattttaaataaaaaatgtgcatgttattaaacttactattttaacatccaagtcaaagctatcatcccacctgaataagtaccaaaaaaacagttatcacrgagaggaaaaggaaattgcattttaaaaacagattccgcaagctagattagctctggcaacactgaaaaaaccttatcagttacttcctccttccttattgtagtcaaactatttgcatgaaacttctaaatgaagttcatacgggcagtaagccagccraatcatcaaggtgaaaagaaaacagctcatctgcattacagttgattcttggcattagctttacacgtgtggacagattggtcttgaacatcatagaatgacttgggttggaagggacctcaaggatcttcaagttcaaacccctgtcacaagcagggttgccagctgctagatcaagtcgcccagggccccatccaacctggcctcacatggtttcaaaccacgtgtcccagctaccgacaccaaggaaccacaaagcccaatatcatgttttaataacgctgatagctacaccaaatc

SEQ ID NO: 13836 - DNA, 600 bp, Chicken  19866894218491_1
tgtgcaaatcacatcacgacatattgacaggaggtgtcagcagtaggtgggctgtgctttgatctggtatgacttctttctgagaagtccagcagtttttatgcaaccagtccagagtgcgtttttctgtaagtagaatctaatggattttacttttgcatttttcctcactagagaggggggaaaaaatgtgtttgttctcaccatcttaatctgtttcataactctcctttagtttaagaacaacatgtggcctttaattatagatgtggagtacaggctgtcctgtgcacacccagraatttgttacagcgtggaaaaaaaaaatcagtttttcaccatatgtaatacaaggttttatactactctctttaaaagtattatttgcagaggtaatgcagctgatcagggaataygtgtatctgagcaagcatcccaaaaatgaaatacttggagattttctattaacagtaacagccttttggtttttacagtatgccacattatttatttatgcttactgagcagcaggcacagacttgtaaaattacagtgaactagatttcactttttaatttggaacgttcaaaaatgaaactg

SEQ ID NO: 13837 - DNA, 600 bp, Chicken  19866894218491_2
gtgcgtttttctgtaagtagaatctaatggattttacttttgcatttttcctcactagagaggggggaaaaaatgtgtttgttctcaccatcttaatctgtttcataactctcctttagtttaagaacaacatgtggcctttaattatagatgtggagtacaggctgtcctgtgcacacccagraatttgttacagcgtggaaaaaaaaaatcagtttttcaccatatgtaatacaaggttttatactactctctttaaaagtattatttgcagaggtaatgcagctgatcagggaataygtgtatctgagcaagcatcccaaaaatgaaatacttggagattttctattaacagtaacagccttttggtttttacagtatgccacattatttatttatgcttactgagcagcaggcacagacttgtaaaattacagtgaactagatttcactttttaatttggaacgttcaaaaatgaaactgcataatgagacattgatagaaaggatatacaagcaatcaatctgttgaattcagttttggtagcttgctggatcccacagtaaagtgcactgcttcccagtgttttctctggaata

SEQ ID NO: 13838 - DNA, 600 bp, Chicken  19866894218491_3
ctattaacagtaacagccttttggtttttacagtatgccacattatttatttatgcttactgagcagcaggcacagacttgtaaaattacagtgaactagatttcactttttaatttggaacgttcaaaaatgaaactgcataatgagacattgatagaaaggatatacaagcaatcaatctgttgaattcagttttggtagcttgctggatcccacagtaaagtgcactgcttcccagtgttttctctggaataagtggggagattagaatagtttgctgagtttggctctggctgagygttgacttcagcactggtgaggtggttggggtcactgttctgcttgctttaagcaactttttaaactgctgtttacattttccttaccaagtatacttaaagattttctgattggcgtgtcttagaaagagaattaaatccaaaatgaatgggtttcgtaagtgtaccgaatgggattatttgttatctaattctgtttacttacgtgttaaatatacatccagatgctcttagtttgctccttactgggtttattttgaaagatatgcctatctgtattttctggttattgtaaaccgt

SEQ ID NO: 13839 - DNA, 599 bp, Chicken  19866894218497_1
  misc_feature (1)..(3): n is any nucleotide
nnnatgggctgcttcttgggatctagtggacagatttcaccttttctaaataagcttccattcccccatccttcttggcatcatttattttggttcatgtgaaacagtgagggaaagttcacagatttgtgctgatgtatagagaatgtgctacaggcaactaatgggttattaatagagcaaaaattgctgcagattagagtacactcccctaattgcaaagcaaaatgtttatctcactaagagtgtggcactcaaagggaaatagatgccatcaaatctcagttttctttccccccrcccccccttcaggttggtgaagtgtcacagtcacccacagaaggaaccaggccacagcggggaaatgcaacgacagggttttaaagatgaggtaacaccctgatmatgtaatcctgcttctgctccaccaggtaatcaggagtcttggagcctgtggaaatatgttttgttcaragcaaasatttggcattgcctcctgccctgcaaaattagagaagagatggattgtggtcaccagagcagccacgctcacaggggacatcgctctgcctycaaagctggagagactgggctacaga

SEQ ID NO: 13840 - DNA, 600 bp, Chicken  19866894218497_10
gcattaattatagggtttgttctgaacctagcacagcacagagataacataatcaagtcttttcagcgctactacggcataaatgatgcacagcccccttcagagctgtctcctgcccagatgttctgcctgctgtctgcaacgcacagcccttagcagggttatggcagccaggacggggtcaggcacggctggttccctttgtccgctccctcgccgtcctgcactcggctcctcacagctgctccacacatggaacgggcagcaatcagatgatcctgttctttcaaaaggaaataycttctctttaataatgtagagctcttcctaaccaccccactagtagaagccatagctctttttcctttccctctggcactgatttctagcatagctggcaccgtgagtactcagaccagctgccacagagcagggtgcaccgggtgacagtaggtgcaagtgctggatcctcccttctctccctatgctcgcaagcagccaacacgttgtcacccaacagtcttcctgctgggcagcctctgagacaggcctccaagaggtcttctgtaagagcaaagaatgacaggtagtaaatgggtg

SEQ ID NO: 13841 - DNA, 600 bp, Chicken  19866894218497_2
agtgagggaaagttcacagatttgtgctgatgtatagagaatgtgctacaggcaactaatgggttattaatagagcaaaaattgctgcagattagagtacactcccctaattgcaaagcaaaatgtttatctcactaagagtgtggcactcaaagggaaatagatgccatcaaatctcagttttctttccccccrcccccccttcaggttggtgaagtgtcacagtcacccacagaaggaaccaggccacagcggggaaatgcaacgacagggttttaaagatgaggtaacaccctgatmatgtaatcctgcttctgctccaccaggtaatcaggagtcttggagcctgtggaaatatgttttgttcaragcaaasatttggcattgcctcctgccctgcaaaattagagaagagatggattgtggtcaccagagcagccacgctcacaggggacatcgctctgcctycaaagctggagagactgggctacagagagaggccgtgtygtctctcaggagtacattttgtctttctgcacaaatggmagtggctggggaaaaagatttacaacagaagtcaggaggagagcttggagagtc

SEQ ID NO: 13842 - DNA, 600 bp, Chicken  19866894218497_3
atagagcaaaaattgctgcagattagagtacactcccctaattgcaaagcaaaatgtttatctcactaagagtgtggcactcaaagggaaatagatgccatcaaatctcagttttctttccccccrcccccccttcaggttggtgaagtgtcacagtcacccacagaaggaaccaggccacagcggggaaatgcaacgacagggttttaaagatgaggtaacaccctgatmatgtaatcctgcttctgctccaccaggtaatcaggagtcttggagcctgtggaaatatgttttgttcaragcaaasatttggcattgcctcctgccctgcaaaattagagaagagatggattgtggtcaccagagcagccacgctcacaggggacatcgctctgcctycaaagctggagagactgggctacagagagaggccgtgtygtctctcaggagtacattttgtctttctgcacaaatggmagtggctggggaaaaagatttacaacagaagtcaggaggagagcttggagagtccttgaaggcctgaagagaccctgctcccaagagattcactgcggagacctttttggtaaatgtttgcct

SEQ ID NO: 13843 - DNA, 600 bp, Chicken  19866894218497_4
aaaaattgctgcagattagagtacactcccctaattgcaaagcaaaatgtttatctcactaagagtgtggcactcaaagggaaatagatgccatcaaatctcagttttctttccccccrcccccccttcaggttggtgaagtgtcacagtcacccacagaaggaaccaggccacagcggggaaatgcaacgacagggttttaaagatgaggtaacaccctgatmatgtaatcctgcttctgctccaccaggtaatcaggagtcttggagcctgtggaaatatgttttgttcaragcaaasatttggcattgcctcctgccctgcaaaattagagaagagatggattgtggtcaccagagcagccacgctcacaggggacatcgctctgcctycaaagctggagagactgggctacagagagaggccgtgtygtctctcaggagtacattttgtctttctgcacaaatggmagtggctggggaaaaagatttacaacagaagtcaggaggagagcttggagagtccttgaaggcctgaagagaccctgctcccaagagattcactgcggagacctttttggtaaatgtttgcctggccagt

SEQ ID NO: 13844 - DNA, 600 bp, Chicken  19866894218497_5
atcaaatctcagttttctttccccccrcccccccttcaggttggtgaagtgtcacagtcacccacagaaggaaccaggccacagcggggaaatgcaacgacagggttttaaagatgaggtaacaccctgatmatgtaatcctgcttctgctccaccaggtaatcaggagtcttggagcctgtggaaatatgttttgttcaragcaaasatttggcattgcctcctgccctgcaaaattagagaagagatggattgtggtcaccagagcagccacgctcacaggggacatcgctctgcctycaaagctggagagactgggctacagagagaggccgtgtygtctctcaggagtacattttgtctttctgcacaaatggmagtggctggggaaaaagatttacaacagaagtcaggaggagagcttggagagtccttgaaggcctgaagagaccctgctcccaagagattcactgcggagacctttttggtaaatgtttgcctggccagtccttaaactttgagcaaatttccccygcacacactcaagaaacccactccagtgtctgactgactragctcaccattttttctaataccagc

SEQ ID NO: 13845 - DNA, 600 bp, Chicken  19866894218497_6
gttggtgaagtgtcacagtcacccacagaaggaaccaggccacagcggggaaatgcaacgacagggttttaaagatgaggtaacaccctgatmatgtaatcctgcttctgctccaccaggtaatcaggagtcttggagcctgtggaaatatgttttgttcaragcaaasatttggcattgcctcctgccctgcaaaattagagaagagatggattgtggtcaccagagcagccacgctcacaggggacatcgctctgcctycaaagctggagagactgggctacagagagaggccgtgtygtctctcaggagtacattttgtctttctgcacaaatggmagtggctggggaaaaagatttacaacagaagtcaggaggagagcttggagagtccttgaaggcctgaagagaccctgctcccaagagattcactgcggagacctttttggtaaatgtttgcctggccagtccttaaactttgagcaaatttccccygcacacactcaagaaacccactccagtgtctgactgactragctcaccattttttctaataccagccttctgtggctgaaatgtaagcccattaattctcagatc

SEQ ID NO: 13846 - DNA, 600 bp, Chicken  19866894218497_7
ccacagcggggaaatgcaacgacagggttttaaagatgaggtaacaccctgatmatgtaatcctgcttctgctccaccaggtaatcaggagtcttggagcctgtggaaatatgttttgttcaragcaaasatttggcattgcctcctgccctgcaaaattagagaagagatggattgtggtcaccagagcagccacgctcacaggggacatcgctctgcctycaaagctggagagactgggctacagagagaggccgtgtygtctctcaggagtacattttgtctttctgcacaaatggmagtggctggggaaaaagatttacaacagaagtcaggaggagagcttggagagtccttgaaggcctgaagagaccctgctcccaagagattcactgcggagacctttttggtaaatgtttgcctggccagtccttaaactttgagcaaatttccccygcacacactcaagaaacccactccagtgtctgactgactragctcaccattttttctaataccagccttctgtggctgaaatgtaagcccattaattctcagatcgtgctcccccaagcacttgagcatgcagcaaagctgcaa

SEQ ID NO: 13847 - DNA, 600 bp, Chicken  19866894218497_8
aattagagaagagatggattgtggtcaccagagcagccacgctcacaggggacatcgctctgcctycaaagctggagagactgggctacagagagaggccgtgtygtctctcaggagtacattttgtctttctgcacaaatggmagtggctggggaaaaagatttacaacagaagtcaggaggagagcttggagagtccttgaaggcctgaagagaccctgctcccaagagattcactgcggagacctttttggtaaatgtttgcctggccagtccttaaactttgagcaaatttccccygcacacactcaagaaacccactccagtgtctgactgactragctcaccattttttctaataccagccttctgtggctgaaatgtaagcccattaattctcagatcgtgctcccccaagcacttgagcatgcagcaaagctgcaaggactgagctgcaagcagccactgctgctgtctgcatgttgcttcttttcatcccagcccctgcccgtttgtctcccccatgaatgagatgacaggcttaagtggaggcaggcattaattatagggtttgttctgaacctagcacagcacagagat
